United States Patent Application Publication US 2006/0123505 A1 - sequence listing, part 2

SEQ ID NO: 2402 - DNA, 972 bp, Oryza sativa
  ref <308>: DATABASE ACCESSION NUMBER: AK060238
  ref <309>: DATABASE ENTRY DATE: 2001-12-06
gtgccagatgctcgtctcgccttcgccttaccgcaaatacttcggggcttccggcgcacgcaaaaaaaccgcaggttttcttagcattccacagccgaaaaagcccccaaacaaaacagccaagcttgctcggtcgctgcgcgctatctcgcctcgcgacgacgccatggccactgcctcctcactcttcctcgcctcccccgtcgccaccgcgccgacagcccgcgcccggtccacaccctcggcttcccctgcccggccgtccctgcgcctccggcggccgtcgacgttggccgcggccgcggtccaggccgagcaccagcccgcggtcgccgcggcgccgaagccgccggcactcccgttccgcgtcggccacggcttcgacctccaccgcctcgagccgggcctccccctcatcatcgggggcatcgacatcccccacgaccgcggctgcgacgcccactccgacggggacgtgctgctgcactgcgtggtggacgcgattctcggcgcgctcgggctgcctgacatcgggcagatcttcccggactccgacccccgttggaagggcgccgattcgtcggtgttcatgagggaagctgtgaaactgatgcatgaagctggctatgagctggggaacctagacgctacgttgatcttgcagaaacccaaaattagcccattcaaggagacaatacggtctaacttgtgtgacttgctgggggcggatccatccgtcgtcaatctgaaggccaagacgcacgagaaagtcgacagtcttggtgaaaacaggagcatagctgctcacactgtagttcttctgatgcggaaataggaaaatggaagtgtactacatattacaggaattgaattgtaacatagtgaacaaattgtccttatgtaagtggtttatcactgaaattttagggcaaaaacaataaaaccgagtgcaatgtaaaattttatgtgtcc

SEQ ID NO: 2403 - DNA, 1262 bp, Oryza sativa
  ref <308>: DATABASE ACCESSION NUMBER: AK060239
  ref <309>: DATABASE ENTRY DATE: 2001-12-06
agagaagggccctagaaaacataaggtcataacaagggtctgaggatcttagctagcacaagatctcaactcggcatttcattggagtttttcacgcctaatggatagcagcagtggtagccagggaaagaattccaaaaccagtgatggttgtgaaacaaaaggtttgcatatcttgaatttctgtttgtttcctgttagccttttcacctttgcttctcttaacaataggtatatagctttttcatttcctaattcctatcatcatgttcaataaggaaacaaatgaagaagtgtcatttagttaatacctagcgacatttaacctgtatattgtcatattctgcatcttgatgctttacttgattatgtcaatggagaaaacaaagagaaacgagaagtcaggaagtaatagtcagagcatactcgcaaagtagcaaggaactttgtaactacataaactgcaagaaagtatacatgcaaacttgataatcagttgcctatcatcagtcctgatagctaataggaacagattaacataatgaataaggcatattccagctttgtttacttccaggcttccagcataagaataaatccccaccagggcagattgcaaattctaatggaggctagtagtttgcaaaatatttgagatggttggctactgagttattttgcttattttggtgaccagtttttttaataaattttgcagaagttaataacactgcacagaattttgttcatttcacggaagaagaggaagatctcgttttcagaatgcacaggcttgttgggaacaggtatcctaatacacatattacatatctgtaatgtgcatcaagtgaaaatgaagacaaattgtatttttacattattagcttgtactatgattgtttcagaagtttggcaaattcatgaaacccatatgtctgtttcaaaaaaatacattatttgcagttccctaactttgctccttgtatggagttatgcaggtgggaacttatagctggaagaatccctggaagaacagcaaaagaggtagaaatgttctgggcagtaaagcaccagaatacataaggggggaaaaagggtgtatgccctaaaagtagcgtacaatttagaagcaaacttttttagaaaaggatttaggccctaaaagtaggctataatttagataaattgtgttgcctcagtcttatgcctgatgcaaaaggggaggaaaaactgaatgcaaaattaatgtgtttattccatag

SEQ ID NO: 2404 - DNA, 144 bp, Oryza sativa
  ref <308>: DATABASE ACCESSION NUMBER: AK060240
  ref <309>: DATABASE ENTRY DATE: 2001-12-06
agattcatcgctagttttacttcagttcgaatccttctgaaagcttgggctgaaatcggccaaaattgttcatgtttttacttcacttctttgcacctatatactgtattcctgtctctacttacagagagggaactatacctg

SEQ ID NO: 2405 - DNA, 1599 bp, Oryza sativa
  ref <308>: DATABASE ACCESSION NUMBER: AK060241
  ref <309>: DATABASE ENTRY DATE: 2001-12-06
acatgagattgtttacaagcttctcaaattggttctggtacttccagtagcaacagctagtgttgaaagaatattttctgccatgaattatgtgaagaataaattgagaaacaggatgggggatcaatacttgaatgattgcttggtcacatttattgagcgtgagatgtttttgaaagtcaaggagtgtgatattataaaccgctttcaagccatgaaggaacgcagaattaaagctactcttccaagccacgaaggaaccgaaatagaaaattagagaacaagagtctgaccatggcgaggacggctctgcaccaaaagccgccgccgtgcgtggtgggtcaccgagaggcggcgtccggtggtggctgtcggtggcggcggacatgttcatggtgctctgcggccagaccgtggccaccctcctcggccgcctgtactacaactccggcggcaacagcaagtggatggccacgctcacgcagtccgccggctcgccgctgctcgccatccttctcctcttcacgccggcgcccgccgccgacgagcccaggccggcggcggcaaagatggcgcccatctacgtcggcctcgggatcatcatcggcttcgacaacctgatgtactcgtacgcgctgcagtacctgccggtgtccaccttctcgctcgtggccgcgacgcagctcggcttcaactccgtcacctccaggctcatcaacgcgcagcggttcacggtgctgatcgccaactccgtcgtcgtgctcaccttctcggcggcgctgctcggcatcggggcctcctccgacgagaccgccagcagcgtgccgaggggcaagtaccccgccgggttcgccctgacgctcgccgcctccgccgtgttcgcgctcatcctgtcgctgttcgaggccaccttcgagaaggtggtccggacgcggacgctccggtgggttctgcgcgcgcagctgtggaccaacgtggtggcgtcgacggtgtcggcggtggggctgctcgcgtcgggggactggaggacgataccggcggagatggcggcgttcaaggacgggagggcgaggtacgtggcgacgctggtcgggacggcggtgtcgtggcaggtgatggcggtgggctcgctgcggctgatcgtgagggtgtcgtcgctgttcgccaacgtgacgggcacgctgtcgctgccgctggtgccggtgttcgccgtcgcgctgttcggggacaggatgaccgggatcaaggccgtatccatgctcatggccgtctggggtttcctctcgtacgcgtaccagcagtacatcgacggccggcgcgcggccggcgccgggaaggggagagcggcggcggagtgccgcgtttgcgccgcgcgcgccggcagcgatccggactcgcccgcgtgaggggcccgcgttttctcacggcccaacaaaccgaaagtagctcacgtctacttttcgcctgaggcccaatacacagaggacatgtaggcccatcggcttgtgttttgagatactgtttaggttttaaaccgtgtatccatcatcgtagggccccttggaaaggaataattcactcgaggttctttaatttgtc

SEQ ID NO: 2406 - DNA, 1397 bp, Oryza sativa
  ref <308>: DATABASE ACCESSION NUMBER: AK060242
  ref <309>: DATABASE ENTRY DATE: 2001-12-06
aacattgtatggctaccttcgtggctgtaacatgaaaagagggacaaaggtacatatcacaggggcaggtgattttagcttgtctggggtaacaagtttggcagatccttgcccattgccatcagctgcaaagaagagaggactacgtgacaaggaaaagctgttctacgcgccaatgtctggccttggtgatctactgtatgacacagatgcagtttatataaacatcaatcctcatcttgttcagttctcaaagactggtgagaatgatgcatctaaaaagcaagggaaaggacaggatgttggtgtaaccctagtaaaaacacttcagaaccccagatattcccttaatgaaaagttggatcagagttttataaatttatttggtagaaagcctgctgctcagtccgaagacatctctggcaaccagaatgatcagggagatgctaatattttggaagaagcagatggtaataacatatgcaacgcaaacacattggagagcaatgatcattcttattctgagtgctccagcgatagtgaacatgataatgatgaagcaactcagcaaaatgaccatgaagttggcttgagagaagaggtggaattttgcaatggaaggatgaggagaaaagctgtatcagctaattttaaagatgatgacgatgatgagggtgcggaagaagatgacgttgacagtgaaaattctggtgatgaccagttatctgaaggttccgcagatgacagtgaagaatcacttgattcagatgatgaaactgagaacaattcaaagtggaaagagtccttgcttgctagaacactgtccagacggagtgccaatctaatgcaacttgtatatggccaagcttcaaagaagctggatgaaggaaatgacagtagtgcagaagagagttcagatgaagaattttttgtaccaaaaggacaaaagaagcaagcaaagaatgaatcaacaagctttgatgatatggatgctgaggattactccaagttttttaaaactgagctaagagattggtctgacgaagatctcatcaagagcattcgtgaccgtttcgtgactggaaattggtcaaaagcagctctaagaggacaggaaataaatgaaaacgatgtggatgacgaagaagtcgatggagattttgaagatctggagactggtgaggtgcatacaagcaaggcatatgaaaatacttcaggaaatggaggtactcacaagcaagatgaccttgctatggaagaaagaagactcaagaagctcgcacttaaggcaaaatttgatgcagaatatcctttcttacatttttgaatgttttttttcttttgtttgttgtcaaataatttgctatcatttaaaaggggaattgcttttatggtcc

SEQ ID NO: 2407 - DNA, 1558 bp, Oryza sativa
  ref <308>: DATABASE ACCESSION NUMBER: AK060243
  ref <309>: DATABASE ENTRY DATE: 2001-12-06
aaatcagtgagagagcaacaggcgtttattgagtctcacgtacttacgtagtgtatagtgatagcagtagtagcattcatggcgtcgtcgtcgtcgtcatggctcgtgctgctctcagccgcgctctgcatcggcgcgctcccggcgtcgcacgccgcccgcgccttcttcgtcttcggcgactccctcgtcgacaacggcaacaacaactacctcatcacgtcggcccgcgccgactcgccgccgtacggcattgacacccccgaccaccgcgccaccgggaggttctccaatggcaagaacatgcctgacattatcagtgagcacctgggagctgagccggtgttgccgtacctgagcccggagctggacggcgacaggctgctcgtcggcgcgaacttcgcgtcggccggcatcggcatcctgaacgacaccggcgtgcagttcgcgaacatcatccacatcgagaagcagatcaggtacttcgagcagtaccaggaccggctgcgcgcggtggtcggcgacgagcaggcgaagaaggtggtcgccgggtcgctggcgctcatcacgctgggcggcaacgacttcgtgaacaactactacctcatcccgtactcgccgcggtcgcgggagttctcgctgccggactacatccggtacatcctctcggagtacaagcaggtgctccggcacatccacgcgctgggggcgcggcgggtgctggtcaccggcgtcgggccgatcgggtgcgtgccggcggagctcgcgctgcacagcctcgacggcgggtgcgacgccgagctgcagcgcgcggcggacgcgtacaacccgcagctggtggcgatgctggcggagctcaacgcggaggtcggcggcgacgtgttcgtcggcgtgaacaccaagcgcgcccacgacgacttcatcgaggaccccagggcgcacgggttcgagacctccacggaggcgtgctgcgggcagggcaggttcaacggcatgggcctctgcaccctcgtctccaacctctgcgccgaccgcgactcgtacgtcttctgggacgccttccaccccaccgagcgcgccaaccgcctcatcgtacagcagttcatgcacggctcgctcgactacatcacccccatgaacctcagcaccatcctcaagctcgaccaacaagctcaactccgcaactgatcaatatctcgccaccatgattacaacctgcatgcattattgcaatcaatcagaatgatcgtcagatcgatggattgatctctctccgtaatttactgtcatttggatttttcaagtgttcgacgtacgtactctacgtacgtccgtgattagttttagtttttgctagatatatagcgtccacataaaccatatttgagcttagctcgatcatcatccggtcagatcgattgctcatcagctagtgtgtttaattactcctacatatgtactgtgttgtgtatgtacgtggtgttcttgttttgaatcacatatcattattgataggtttttaattaatctttcagaattaaggaatttttttctgctt

SEQ ID NO: 2408 - DNA, 724 bp, Oryza sativa
  ref <308>: DATABASE ACCESSION NUMBER: AK060244
  ref <309>: DATABASE ENTRY DATE: 2001-12-06
accgacctcacttccacgcccaccgtcgtcgactcgtcgtcgcgcgaattccgcgggaacaacgcgccgccgtccgccgtccgccggccgccgtctccagccacagatcgcccctccaccctggcaggaaacatgatcgtctgcgtcgccgtcgtcggccatcagaacaaccctctgtacctgcagagcttcacggaggcggacgacgccctcaagctccaccacgtcgtgcactgctccctcgacgtcatcgacgagcgagtgaacaatcctaaaaggaatgcgcctgcacttaacgagacatttttgggtcttctatatccgaccgagaattacaaagtgtatggctatttgactaacacgaaggtcaaatttatcatggtcacaactgatcttgatgtcaaagatgcagatgccagaaattttttcaggaagttccatgctgcatatgtagacgctgtttcgaacccctttcacgttccagggaagaagattgcgtcaagaagctttggtgcaagagtaagcacaattgtgaaatccttcggttcagggacgactgcctgagttccacttgttccaaatccccccttcaatcaagcattgtaccgttcccctttgttgacaattcatttctgaatctccatattgtcccctgtatgcatgctgaacaagatgataatttggcaatgaaaacaaaaaagaaaaagaaaatatggtctcgttc

SEQ ID NO: 2409 - DNA, 1707 bp, Oryza sativa
  ref <308>: DATABASE ACCESSION NUMBER: AK060245
  ref <309>: DATABASE ENTRY DATE: 2001-12-06
aaaataagcatagatccggagattcccaaataggtcaaccttttgaactgcctgctgaatccatgagcaggcaagagacaacctggcgaactgaaacatcttagtagccagaggaaaagaaagcaaaagcgattcccgtagtagcggcgagcgaaatgggagcagcctaaaccgtgaaaacggggttgtgggagagcaatacaagcgttgtgctgctaggcgaagcggttgagtgccgcaccctagatggctaaagtccagtagccgaaagcatcactagcttacgctctgacccgagtagcatggggcacgtggaatcccgtgtgaatcagcaaggaccaccttgcaaggctaaatactcctgggtgaccgatagcgaagtagtaccgtgagggaaaggtgaaaagaacccccagtgggtagtgatactagatgaagcaattgagtacttgaagtccctgcaaatgcaagttcagatcatgtggatgactaccgggattgtgccgatgatgttccccggtacccaccagctcatgccaccgatgggcatgggattgaacacggcatgcatgcctggggctcaagctcaaggcctgaatcagatgcaaagaacaacatattacatgaacaattctctgccaaaccagatgcctcagatcccttctccagctatgaatgcacccagtgttccagacgatatgcagaatgataatcgcatccgcgggccaagaaatccttttcttcattgcaatgatacactgacagcaacagctcaggtgccaggtttgtttacctatggatctcaaattgcagaacaaaatgagattcaggagttactctctggcgctgtcattccatcctcatctgatgggaccataaaataatgaccaacatgcaaacaactaggggagataaacaaaggaaggcagaacaactggtcctagaagaatgatttgattccaagatgcagtttgtgtcctgtgagtcgtgtaaggctgaagctttgggacaccactcggcagtcgacacgtgtacaccgcctcctgatgctattcttatctgaagagtatagtgatcaacatcacctttctgtttctggaagggtttttgtctatgggagatgaactggaggatccctttgcatagataatcaagacaacaggaagatgcttcatatgatgctacatgtatggaaatggcaggcaccggcaatatgtgaagaatatagtggctgtgtggactcagcttgagccggcatcgcaaaagctgcacaagaacacaacagtgacagtttcactcttcttttagctgatgttactgttatatgatgcccgagggacatgcatctggtgagttcttacaagaacaaatcaaggaaccaaatgacagttttggttgctatgttgatttttcaactggataagcataaccatcggttcttcaagattgcacatggtctaaagcagaaaaagaacttaggtagactgaaccatgtacaattcagatatatggcacatcaagatcattggaaatgcgcagatatcggcagaaattttgctcctgaacaaaacagctaccacatctgtatctcctcttgccttggtactcattgcctcatcaatgtaactttcacctttctcatgatcttgactgtactacttgcaactagtcgaattccctgcacaattgtgcagtagacagtatagc

SEQ ID NO: 2410 - DNA, 2090 bp, Oryza sativa
  ref <308>: DATABASE ACCESSION NUMBER: AK104278
  ref <309>: DATABASE ENTRY DATE: 2002-08-28
atcgccgacgacaaccagagcagaggagaggggaggggaacccaagcaagcaatcagcgtggaatcggatcgggtacgaggaggaggaggaggagggggatggatttcgagctgcgcaaggcgcgggagaagctggagcgggagcagcgggagcgcgtgcagcgcgccaaggacaaggccgaccgcgagcgccgcgccaaggccgaggccgcgcgccgccgcgacgcgctcgaggcgtcccaccgcgagcgccgcctcgacgccgcccgcgcgcaggaagaggctcagcagaagatggaagaggtgatgcaacttggaaaggggatttctttcttgcacatgtttgaagctcttcgatatgatggtcctggggataagatcaagttgccaccatcgtcttttaaggaattgtctgatgaaggagcactggacaaaggtcccatgtacttcaggttgtcaaaggttagagacagtgttccgggtgcccctcaggataatgatgccgatgaggcaacatgttgtggtgttcttgagttcactgcaagggaaggctccgcagaactcactccacatgtgtggaacaatctgttccggggtgatagcccagatgttcctctgattgaggttaggtatgtcagtttacccaaagggacatatgcgaagctgaagccagaaggagtggggttctcagaccttcctaaccatagggctgtccttgaaacggcactccgcaatcatgcaacactatctgaaaatgattttgttgtggtgaattatgggcagctgcaatacaagttgaaggttcttgaattaaaacctgcatcaagtgtttctgtcctggagacagatgtggaagttgacattgaaggaccagattcagttttggacaacgtagagaatcaacatgtgcttgtgccacttgagactggaaaggttgaatctggagttgtggaagaaggaaagtttaggtactacaaatttcttgttgatgaaggtatgggtgagaaagtagcttctaggcatgcaaatattgaggttaagatagagacatatacaagtggtggtgacactgatatttatgtatcaaggcatcctttagttttcccaactcagcaccgtcacgaatggtcttctcatgaaatgggatctaaggtcctcatactgaaaccaagggatgccagtctctccagtggtacctacagtattggagtttatggtttcaagggaaccactaaataccaactttctgtagctattaaagatgttcttaatggccaaaggattggtgagcaggctagtgcctcatctagtgttgatgttgattcagtggtgtgcaagaactgcaaacgctatatatccaaccgaacttcgctacttcatgaagcatactgtgtgagacacaatgttgtttgcatgcatgatgggtgtggtgttgttcttcgaaaggaggaagcaacagatcacgtgcattgcaacaagtgagggcaagctttccagcagagagaaatggagaagcacatgaaagttttccatgagccactacaatgcccttgtggggtggtccttgaaaaggaagatatggttcaacaccaatcctcaacctgccctttgcgcttgattgtgtgccgattttgtggtgacactgttcaagctggtggagaaccacttgatgctcgggatcggcttcgcaacatgtgtgagcacgagagtacctgtggatccaggactgcaccatgtgattcttgtggacggtcagtcatgctgaaggacatggacattcatgtgattgctgtgcatcagaagagctaactattgtaaagcattggctctgagaaagatggcctgtcctttatcctgctgggctttaaccaccaaggccatgaagtttcagcactgctggaccaaatgttatttccttttgtgttacatatatcttgtgtcattggttaaattgtaacactgcgtatgggagcatggaacactggggcggtgtatgggagtatggaacacagtggcggtgtctccttatgtatacacaaaccatctataatatttgatttgagctttctcatattcaggagctttattag

SEQ ID NO: 2411 - DNA, 1344 bp, Oryza sativa
  ref <308>: DATABASE ACCESSION NUMBER: AK060246
  ref <309>: DATABASE ENTRY DATE: 2001-12-06
aaaatccgaccagccagcgttagctcggagaggcgaggcgagaatgtcggccgcggcgggcgggtacagggcggaggacgactacgactacctgttcaaggtggtgctcatcggcgactccggcgtcggcaagtccaacctcctctcccgcttcaccaagaacgagttcagcctcgagtccaagtccaccatcggcgtcgagttcgccacccgcagcctccaggtcgacggcaaggtcatcaaggcccagatttgggacaccgccggccaggagaggtatcgtgctatcactagtgcctattaccggggagctgtgggagcattgctcgtctacgatgtcacccgtcgtgctgcattcgacaacgtgggacgctggctaagggagcttagagaccacactgatcctagcattgtctgcatgctgattggcaacaaatccgatctccgccacttggtggctgtctcaaccgaggacggcaaagagtttgctgaagccgaatcaatgtacttcatggaaacttctgcgctcgacgctaccaacgtcgacaatgcgttcgcggaggtcctgactcagatgtaccagattgtgaacaagaagccggtggaggcacctgaggatgggtcggctggcccaggaaaaggagagaagataaacgtgaaagatgatgtctcggcgatgaagagagttggatgttgctcaaactaaagacaagagggacacaatttattcatttttccaagtagggatgctcagggtatactgtaatagatctattcaattgtctcatttctggtgttgttattgagggttagggtgatccaactatcattcaaactatcagttcttgatttgctctttgtatcaaactgatcatggtgttgttatctatcactgcaatgcaagtgctcgtgctggtcttcacttctacaataccaaagaggaggtggatgtctttgtcgatgcgctgaaagatactattgatttccttacttctgaacactagtaccacggttcgattagtatacggcattctccctttttacaagtttcaggttgactttatctagccaaggggtcatacaattacaaaatgaaacaaccaaccaaaacatgtgtattagattgcctactttggcctttcttgtaaatcaagtccctttttctcccatccctgaaattttgcagaagctgaatttgtacaacagaataatttaagtgttgcagcaagctgtgagaaagctcatgaccttgaaggtttatttgtaaattatgctgacctgtatgttctcttcgttgaaaatcataaacaaggttacacaagcataaacaagtttttttttaac

SEQ ID NO: 2412 - DNA, 909 bp, Oryza sativa
  ref <308>: DATABASE ACCESSION NUMBER: AK060247
  ref <309>: DATABASE ENTRY DATE: 2001-12-06
aatgtgctagggtgtatactatcaaccccaaaaaacccaactctgccttacgtaaagttgccagagtacgattaacctctggatttgaaatcactgcttatatacctggtattggccataatttacaagaacattctgtagtattagtaagaggaggaagggttaaggatttacccggtgtgagatatcgcattattcgaggagccctagatgctgtcgcagtaaagaatcgtcaacaagggcgttctaaatatggggtcaaaaagccaaaaaaataagtgattcgtttttagcccttataaaaagaaaacggattcttgaacctctttcacgctcatgtcacgtcgaggtactgcagaaaaaagaactgcaaaatccgatccaatttttcgtaatcgattagttaacatggtggttaaccgtattatgaaagacggaaaaaaatcattggcttatcaaattctctatcgagccgtgaaaaagattcaacaaaagacagaaacaaatccactattggttttacgtcaagcaatacgtagagtaactcccaatataggagtaaaaacaagacgtaataaaaaaggatcgacgcggaaagttccgattgaaataggatctaaacaaggaagagcacttgccattcgttggttattagaagcatcccaaaagcgtccgggtcgaaatatggctttcaaattaagttccgaattagtagatgctgccaaagggggtgggggtgccatacgcaaaaaggaagcgactcatagaatggcagaggcaaatagagctcttgcacattttcgttaatccatgaacagaatctaggtatgtagacacatggatccatacatctcgatcggaaaagaatcaatagaaggagaatcggacgatatctttctcgaaacaaac

SEQ ID NO: 2413 - DNA, 844 bp, Oryza sativa
  ref <308>: DATABASE ACCESSION NUMBER: AK060248
  ref <309>: DATABASE ENTRY DATE: 2001-12-06
gacagaagggtaggcagcttagtgctgccagctgcttcaaacggggcattgttcaatgctacaatcatggtcttcctcccaatctatgacagaatctttatcccagtggccagaagatacaccaagaaccctagcggtatcacgacgctgcagaggatcggcgtcgggttggttctctcgatcatcacgatgatcgttgctgcaatggttgagatgaggaggctcaggatagcaagaggtttcggccttgtggacaaacctgaagctgttgttcctatgagcttcttgtggattgttccgcagaacattctggctgcaatttctgatatgtttgctgtgattggattgcaagagtccttctacggtgaggcaccggagagtctgcgaagcttttccatggctctgttcttgagcataattggagttgggaacttcatcagtagtttcattgtatatgccattgacagggtgaccagtagctttggagacagctggttctctaacaatccaaacagagggcatgtcgattacttctacttgcttattaccgtgctcaatgctttgtccctggcctgtttcttatactttgctaaaatgtatgaacataggaaaaaggtcatctcagtgcagtgacattgtgtgcagcctacatatttgtagctccactgataaggtcaccttcacaatctgatccagtctcaagaatgtaacatggtaaagctgtatctggtataatgtatgttccagtttcacttccttcattgatacgtcctaactatactttgtaagaaattatgtgacccagctgcaaatgcaaatgaaatgttccttaatttcatgtttt

SEQ ID NO: 2414 - DNA, 889 bp, Oryza sativa
  ref <308>: DATABASE ACCESSION NUMBER: AK060249
  ref <309>: DATABASE ENTRY DATE: 2001-12-06
aatctccctttgaattccgcgcactggaggttactttggaagccatttgcagttttcttggtgcacgcactactgagttggagagtgctgcttacccagctttggatgaactgacatccaagattagcagccgcaacttggatagggtgcggaagttaaaaagtggtatgacacgattgaatgcgagggttcagaaggtgagagatgaacttgaacaattattggacgatgacgatgacatggctgatctttacttgtccagaaagttggctggggcagcttcccctgtcagtggctctggtggaccaaattggttcccagcatccccgactattggttcaaaaatatcaagagcaagcagagccagtgccccaactatacatggaaatgaaaatgatgttgaagagctagagatgttgttggaggcatacttcatgcaaattgatggcacattaaacaaattgacaacgctgagagagtacattgatgaacagaagattacattaatatccagcttgacaaccaccgtaatcagttaattcagctagagctattcttgagttctgggaccgtatgcctgtcgctttactcattggttgccggaatttttggtatgaacattccatacacctggaatgacaaccatggatacgtattcaaatgggtggttctcgtgtcaggacttttctgtgccttcatgttcgtctccattgttgcgtacgcacggcacaagggcctcgtcgggtcgtgaaccttgcccaaactgtaaatttgagctagagcaaccttgcgtatgattaatctcttgtaccaaaattcatcagtataaaattgggatgatgaaaaagaacaataaataggaaaaaaaaagagtaaattccaaagagat

SEQ ID NO: 2415 - DNA, 1691 bp, Oryza sativa
  ref <308>: DATABASE ACCESSION NUMBER: AK060250
  ref <309>: DATABASE ENTRY DATE: 2001-12-06
actctgctctcgttctcttctgtctgctactaccatgcattcgaccggcatggagatggaggtggaggtcgccggcgacgacgaggcggtcccggaggcgccggagcggtccgtcgtcctcatctccgccggcgccagccactccgtcgccctgctcagcggcggggtggtgtgctcgtgggggcgcggcgaggacgggcagctggggcacggcgacgcggaggaccggccggtgccgacggtgctgacggcggcgttcgacgacgcgccggggggcgtcgcctccgtcgtcatctgcggcgccgaccacaccaccgcctactccgacgaggagctgcagctctacagctggggatggggcgacttcgggaggctgggtcacggcaactccagcgacgtgttcaacccgcggcccatccaggcgctccagggcgtccggatcacccagatcgcctgcggcgacagccactgcctcgccgtcaccgtcgccggccatgtccacagctggggacgcaatcaaaatggtcagcttggcctcggaaacaccgaggactccttgctcccacaaaagattcaagcttttgagggtgtccgtgtaaaaatgattgctgctggtgccgagcacaccgctgctgtaacagaagatggtgatctctacggttggggctggggtcggtatggcaacttgggactaggcgatcgcgatgaccgcttaatcccagaaaaggtttcttccgtgaatggtcaaaagatggtgcttgtagcgtgcgggtggcgccataccatcaccgtgtcctcctccggtagcgtctacacatatggatggagcaagtatggtcagctagggcatggtgattttgaggatcacctggttccacacaagttggaagcattgaaggatactactatatctcaaatttcaggtgggtggaggcatacaatggcacttgcagcagatgggaaactctatggatggggatggaacaagtttggacaagtcggtgttggcgataatgaagatcgctgctccccggtgcaggtcaattttccaaacgaacagaaagttgttcaagttgcttgtggatggaggcacactcttgccctgacagaagccaaaaatgttttctcatggggaaggggcaccagtggacagcttggccatggtgaaatagttgataggaacatacccaagatgatagatgccttgagctcggatggatcagcttgcaagcagctggaatcatcaaaagccgtcccaatgtcagctaaagtttgggtctcgccatcagagcgatatgccatcgtgccggatgagaaggctggaaaaggcatccctgctggcaatggaacagagactcatgtgccccaaggagatgtgaagaggatgcgcgtctgattcagcaacatatacgatccagtgctcttcttccacttgatatcctctattagttaaccttagaattagcatcatatatacatataataaccttggggcagcatttatcctctaccatcttatgacatatgctgcccagtctttaattagtgtgttgccttttcacttcttaaaataatcagtgatattattcacagtgaggttggtcatgtatgacagtatgagtaactatggactgtcataggtatcaccatgggaaaaaaatcagtcagtttattattctgcttggcattgc

SEQ ID NO: 2416 - DNA, 1665 bp, Oryza sativa
  ref <308>: DATABASE ACCESSION NUMBER: AK060251
  ref <309>: DATABASE ENTRY DATE: 2001-12-06
attagtgtaaagtatgacatgcttactttttttgagcactttgacagattggtgggagataagagaaatgaggaggtgatttcaaagcaacacatactacaccaaagctaaaggcagagttgagaatactgagagatatggcagaagtttatactctagcagtcttaagatatttgcggaagaagtaatgcagtctttgaattgtgacatattctactgcggtgatgttgatgcagaaaataaaggttagtggaaagaatcatgaacatgttaaattctcaccgttggaatctactgttaagtgcagttgcaagaagtttgaattcgtcggcatcctgtgctctcatgcattgaaaatacttgacatcaacaatatcaaatcagtttcgcaatagtatatattaaaaagatggacaattgatgcaaaagtactacgtgtaagtggaagtagcaatatgcatgatgatcctagaattaagttatcatatcggtactcctcattgtgcaaaatgtttgttaaaatagcttgtcgagttgcaaaatctgaagaaacatactccatgtcaactaattgtgctgaaaaattggcagaagatatagagaacttcttgaaaattagaggtgatccagatttagacagctccccttccccacaagttgcaaaaggaaatcagatcatggctagtaaaccaaaaggcattgagctcaagagaaaggaaatttgtggttcagctagacctattggtggcttagagaaatcatctcagaacgggaaaaagaagaagaatgatgactccccagtcgaggtagtagaacttcaacctgtgacagagatgcagccacagccatatgctacagtactgggtaatctagaggttcccaatgaccaagcatttttacatgtatcacagtcagcgttctaattagcgggctatagcggttttgccgagcaacagctaggagaagtcaattttgcagctaagcttcgcgggccgctattagctgtatttagcccgacatagccgctaaacgggctgaatgagcggtcgctaaatgggctaaaaatgaagcctgcttctctaactctaaccctaactctctctctctctctctctctctctcccgatctcgcctaagaggagaagaaccggcggcggaggcaactgcgcggcgacggaagcgagcaacggcggccgccggtccccatccctgctcctccgtcctcccctcatgcagcgacagtggatctaacccgcggcggcggtggcggctttcgtgctgctgctcccctgctgccggcggcggccacggttgctgctactcccctgcgccggcgcagcggtggctgctgctcccatgcgacgtcggctaccgcggctggtgctcccctgcggtgccggcggctgcagctgctgcttctgctcccttgtggcactggttgcggtcgctgctccccaacagagccggtggctgctgctgctcgttcttctccgagcagcagcgatggctctctattccctgagaagcggcagcagctccttcttccccaatcgagcaacaccactctgctctaatgacagataagattatttctcaaatcgcaatgcactttatttatttctcaaatcgcaatgcactttatctggacttggaaagaacgagagc

SEQ ID NO: 2417 - DNA, 1786 bp, Oryza sativa
  ref <308>: DATABASE ACCESSION NUMBER: AK060252
  ref <309>: DATABASE ENTRY DATE: 2001-12-06
tacactctgaaggtgtagttgcctttgttggtttagaacatgggttcacggtttccatcccaccaactaagcaatggcctttatgtctcgggccgaccagagcaacctaaggagaaggctccagtcatttgctccacagcaatgccatacactgggggtgacataaagaaatctggagaactagggaaaatgtttgacctccatgttgaaaagtcgcggaagtctggtcctttgggtaatcaaccttcaagaaatacttcatttggtggtgctggttccaactctggaccagtttctaatgctcttggtcggtccaactactctggttctatttcatcatctgttcctggtgctggaggatcagcaagggcaaaatcaaattctggacctctcaataagcatggagaaccaggaaagaagtcatctggtccccagtcaggcggagtgaccccaatggcacgtcagaattctggtcctttacctcctgttcttcctacaactgggctgatcacatcagggcctatctcctctggacctctgaattcatctggtgctccacgaaaagtatcaggccctcttgatcctagtgtatcaatgaagatgcgtgcaacttcttttgctcacaacccagctgttacaaacctgaatgccgatgatggttactctattaagggcagcattcctaagacaatactctggatggttattctgctctttttgatggggttcatagcaggtggtttcattcttggagctgttcataaccctattctgctggtagttgtggtggtcatattttgctttgttgctgctcttgtgatttggaacatttgctggggaacaagaggtgtgactgggttcgtcagtcgctatcctgatgctgatctcagaacagcaaaaaatggacagtatgtgaaagttactggggttgttacatgtggaaattttcctctcgagtcctcatttcaaagggtcccaagatgtgtgtacacttcaacttgcttgtatgagtacaggggctgggattcggaagctgctaacactgagcaccgccaatttacttggggtcttaggtcaatggagagacatgctgttggtttctacatctctgatttccaatctggactacgagcattggtcaaaacaggatatggagcacgggtaaccccttatgttgatgaatctgttgttattgacataaacccagataacaaggacatgtctcccgagttcttgagatggctgcgtgaaaggaatctatcaagtgatgatcggataatgcgcctgaaagaaggatacattaaggagggcagcacggtgagtgttatgggggttgttcaaaggaacgacaacgtgttgatgattgttcctccatcggaacccatctccactggctgccagtgggccaagtgcatcctccctactagccttgatgggctagtcttaagatgcgaagatacatcgaacatcgatgtaataccagtctgagcttagctttgttctggcagctactcctagaaagaaaatgcctgtcaaaatctttggatttatttcgtgggatgttagagttgaaagatgtgcaaatgcagggtgtgattatggctaagtacaatatcggtggtctattatttgggtcttggttgtatagtattttatgtattttttctctcttcttttttctttcttttggtgatctatggatacttgtaacatggatggcttgagttgtaccttggagctgtttggagattcagtggaatcgagttcacaaggttttttggtgaag

SEQ ID NO: 2418 - DNA, 1645 bp, Oryza sativa
  ref <308>: DATABASE ACCESSION NUMBER: AK060253
  ref <309>: DATABASE ENTRY DATE: 2001-12-06
aaaaaagccaggcatttttcagcttgatgatattcctgagaatgctgtgttcatgatacaccagctgttatctctgagagatgctgcacgtgccagtctcctaactcgaaagtggctacgtgtttggagattctaccctaatttagagttcactacaaaggcattgggtctgaagaaacgaattcacaaagtacagaggagggcaaagtttgtcagttgtgttaatactgtcatacgacaccatgctggaactggggtgaagtcattcatcatcaagaaaaacctcaataatcagaagtacacccattatcttgaccgttggatgtacttcgcagtcagttcaggtgccaaggaactgactcttgacttacgtccacaaaggtttattcattaccgtaatatccaatacaacttcccatcatctaattttgctacccccatgcctacctccgtagaacatctgaagctcttgttttgctatttgaggccttcaccaacattttttggcttgagtaacctgaaaacacttgagttgagctttgtacgtataactaaagaagatttggagagcttgttaagctatacattttccttacaagagttgaagttaagtcagtgtccaaacatagatcacttgaggatccctgatgtgccatctaagctcaactaccttgatattgatttatgctggataagagcactggaaatacacattcaaaatctagttatctttaattaccatggaagtgttcgctttagaatcatacaaggagaaggatctttgtttaaagaggcacggtttcagttctcgtgtggggacgctatagagtatgctatcacagaaatggctccagctttgccaaatcttgaaacactgtttctgattggattttctaagatggttattccaaccagagatccaagacataggttccattgcctgaagcacttacagctgaaaatgataatgctctcaaagaaatacaataacctctgccttgtttcttttcttgatgctgcgccatttttggaatcacttattgtgcatgtatgcaacggatcactttattatcctggaaagaaaacagacttgagaaggctcgagaaacgtgaaccgcataaaaacctcaaatttgcgaagatgaccgggtttgatggagaacgatcaagcattgagcttgcactgcacatcctggagagctcaactaaccttgagtgcctcattctggatcctagaaaatataaatccgagtggaaatatatttatgaagagaacttgcgcgatgttcagtggagagtacataatttcactatttcggaatacattgcagaggcagttccttcacatgttaaattattgttttcatgattctcaggtgtgcggctataaccattgtcttgaactctccaccacatttgagattgggtttgagttatgaagccggccatctgctggtgttgtcgtgctcatagttttgcatttatggtggtgcctttttcttttggggaaaaaatgtatatgctcacttctcacatgtaccattaattcttggtgttgctagcttatctcaagcacatatcagacaatgaatattttcatccagactagtactagtagttatgcaagttcaaaaggttgaatttc

SEQ ID NO: 2419 - DNA, 722 bp, Oryza sativa
  ref <308>: DATABASE ACCESSION NUMBER: AK060254
  ref <309>: DATABASE ENTRY DATE: 2001-12-06
aaaaaaaaaaaaaaaaaaaaaaaaaaaaaaaaaaaaaaaaaaaaaaaaaaaaaaaaaagtacaccggctatctatccatctatctactcagctttgcgtcctcccgcgaattcaccgcagcaatggcgtccctcgtcgccgtccagcctgtcgccgtgaagggcctcgccggcagctccatctccggcaggaagctcgccgtcaggccgtcgccccgggcgctctgccgcaccacccgcaggccgcgcgccgccgtggtggccaagtacggcgagaagagcgtctacttcgacctcgaggacatcggcaacaccaccgggcagtgggacctgtacggctccgacgcgccgtcgccgtacaaccctctccagagcaagttcttcgagacgttcgcggggcccttcaccaagagggggctcctgctcaagttcctgctgctcggcggcggatcgctggtggcctacgtcagcgcgtcggcgtcgccagacctgcttccgatcaagaagggcccgcagctgccgccgacgcccggcccacgcggcaagatctaaattaaattcctcgtctctgcctcaccttcttcttgatccgatccatccatgcaaatcccctgtactgtactgctagtcccccatggccggatcgccatggattaattccccctgtttatgatgttgatataattgtactattcctatggctatataagttgtaaaggatcc

SEQ ID NO: 2420 - DNA, 1999 bp, Oryza sativa
  ref <308>: DATABASE ACCESSION NUMBER: AK060255
  ref <309>: DATABASE ENTRY DATE: 2001-12-06
gttattacgtttccccgagcttatcattcaggtttcagccatggttttaattgtggcgaggcagtgaatttcgctattggagaatggtttcctctgggagcacttgctagtcaacgttatgcacttttaaagaggacaccattactaccttacgaggaacttctttgtaaagaggcggcacttcttgatcatgaattttctacctgtgattataaagatacaacaacattagctggagaaacacacagtcaacgctgtatgaaagttccttttgttcagttgatgagggtccaacatcgtatccgttggtcccttatgaaaatgggtgctcgcacgcattataaagcagatattgatgccacagttctgtgtggaatatgtagacgcgactgctacgtagcccacattatgtgtaactgcagaattgatgcgatttgcctttgccatgaggaagagattaggagatgcccttgcagttgtgatcgtgttgtatttgtgaggaaagacatatttgaactggagacattatcaaagaagttcgaggaggaaagtggaatactggatgcagtcaaaaagcaaatggctcgacgtgatggcgctagtcagcattctaactttttcgattgtactgatcatgaagctgagtactacccatactgcaatattcacatagatccatccccagaaatatatagcatttcagagacaaattttgttgggtatgacttgaacaatccacatcctgctgcatcaacagtaacattttcttttgtaccccatgagtattctacacaaagtgatgagtgtacaagttctaacagaagagccttgtctagctcttgtctcgagaatacaattacccctgaaaatgcaattagtaatgcttgccagttatctactcctgatcaaacatgtctgtctgacaaattggctgcacatgatactgatgattctgactgtgagatatttagagtaaagagaagatctggcctaactcctgagaaaagacacatggaagatggaacaacaaatttcactgggaatcaggtattgaaacggctgaagaaaattaatgcacatgacagacaagaacataagttacctgaactatcctgtggtgcaaggagtgaacctgtccatactgatgattgtatacattgtgttgacttcatttctgaagatggagacgacttcatagctccaaccaaattgaagatgatacatcaactagatgcaaatattgttgaggatgaagttgcttccagccagaaatataatagttgcaactaccaatctccatctatagagcttgggccaaaacgcttgaaaattcgtggcccatcttttcccagcaggatttctgagctggaggtatcttgtagattccaggacaatgacttgggcagccagcatgctcgatgacgactgctaggccattggttctaacactacgtaagttaacaaacagcatccctaacttctggaagctgaaagctcctaccagccaaggtttccaaattgttggttggtcagctggtaacagatggctcagatttaattcttctgcgggcctccaatagaggcattgacatgggttcatggctggattcttgattttattgctgggccacatttgtggtagggggctgaaagcagtaggcagacaattctgatgtttttccactgtacatcttcacatacatctcctttcacctttctcgtaggtttttcactgtgaagaggttagtctactaccttaccaatttctttcattctttttgcacacatacacatgtacctagaatgcttaatcagatgcaaatatggaattgatactgtagatcccatattgagtcagttattcaactttctactggtctttgatctcttcatgtaatctcaaatgatcaaatttcttttgtcattattggtaccggtacatttgtctccagatgtgttgataacttgacttgttaataaatcgattgatgctgacagg

SEQ ID NO: 2421 - DNA, 1540 bp, Oryza sativa
  ref <308>: DATABASE ACCESSION NUMBER: AK060256
  ref <309>: DATABASE ENTRY DATE: 2001-12-06
aaaccctaatttctcttctcaaaaaaaaaaaaaaaatccagcggcggcggcggcgcacatggatcagatggcggagcggcagcacaagaagcggaagccggagaagatggccggcgcgcgcaccagcggccatgataaggaggaggagaagaaggtgaaggctccttctgtgtacctggtggtaggccatgaggtgagctgggcaacctactccgtgttcaaggtggatccctacacggcggcgaagagaggcggcggcggcggcgacgaggaggatcccgctccggtgcctatccctcgccggctcgcccgcatcagcgccaagttctgcatgtctttcgcccccgtgcccgtgcgctcatggatcgtcggcgtcgggggcgattcagcggatgaggactacgccccggagaccatcgtcttcgacaccgagactcgcgccgtgatccgggggcccaacctcctgtcgaccaagctccacccggttgtgctcaccatcggccacaagatctacgccctggcacggtatccctccgtcacggggcaactcgacttcgttccatggttcgaggtgcttgatctctcccaagcgcgcgtggtcgatggccatctagagagctgcgagtggaagcccctgccacggcctcccttcttcccatgggacctcaccccattgcagtacctttctccgccaatggttactgtcgagtcctacgttgcactggcctcctgcattctggtgtcattatctcagcaggagggcacgcacatgtttgatgtcgacaaggagcaatggtcgaaactggatgacaacagcctgccattcgtcagaggcgccgttccacacggacccatcttccttggcttatcgagagccaagaaaatcatcaccgcatacaatatcacagtggtctgccaaccaaggtcaggcggcacagcgccgtccttatcaattgttgagttccctgtggtgtctgacatggaagaggagatcttaagcacaccaatatttctttctctcggtagccctggcttctgttctttgaaaagttggagcgaccacccaacgacggatgatccatgtactcgtgcacgtatcaaattgatggcataccatacagaggaacccatatcacaagagtacatcgagtcttctcatggcttattgataccgaaccagtggaaacaggtgtacgagatatgtgattcgtccagggaattgatttggcaatgcctgatcactgcaatgtccttatgagtatattccatgatgttggagccaccagaagtttattgtagaggctggcttaagaaaacggtttacttgtagcaccctacaattccagtaaattcttcagagtacaacagctttgcatggcttcgaacttagggagtagtgctgcagggcatcttttgcttgtgtattaagtggatttagaatatgatatttgaggagaaatgatcccctgtagtatctatgctggactgatctaattgaacctgtctaaaagagtttcatgtatgaaacagctgtacgtat

SEQ ID NO: 2422 - DNA, 1784 bp, Oryza sativa
  ref <308>: DATABASE ACCESSION NUMBER: AK060257
  ref <309>: DATABASE ENTRY DATE: 2001-12-06
agcagatcctctggttgtcggagcctcatcaatctcactcattctcacccgctccttgcccacgacgcgcacggccacgccgccatggccgcggccgcgctgctcctcctcgccgcggccgccgccgccgtcgtggttgccatggcgctcagatggctcctcctcctcgggggccccgccgccgggaggctggggaagagggcgcggatgccgccggggagcacgggcctgcctctgattggcgagacgctgcggctcatctcggcgtacaagacgcccaacccggagccgttcatcgacgagcgcgtggcgcgccacggcggcgtgttcaccacccacgtcttcggcgagcgcaccgtgttctccgccgacccggccttcaaccgcctcctcctcgccgccgagggccgcgccgtccactccagctacccgtcctccatcgccacgctcctcggcgcgcgctccctgctcctcacccgcggcgccgcgcacaagcggctccactccctcaccctcacccgcctcggccgccccgcgtcgccgcccctcctcgcgcacatcgaccgcctcgtgctcgccaccatgcgccagtgggagcccgccgccaccgtccgcctcatggacgaggccaagaagatcaccttcaacctcaccgtcaagcagctcgtcagcatcgagccgggaccgtggaccgagagcctccgccgcgagtacgtcaagctcatcgacggcttcttctccatcccctttcctctcgcctacttcctcccttttaccacctacggccaggccctcaaggcgaggaagaaggtggccggtgcactgcgggaggtgataaagaagaggatggaggagaaagcggagaatggtggctccattggggatgatgaggggaagaaggagaagaaggacatggtggaggagcttcttcaggcggagggtggcagcttctcggaggaagagatggtggatttctgcctttctctgctggtggctgggtatgagactacgtccgtgctcatgacgctcgcggtcaagttcctcactgagacgcctgctgcgctagctgagctcaaggaagagcatgccaatatcagggatatgaaagggaaaaaccaaccattagagtggagcgattacaagtccatgccatttactcaatgtgtgataaatgagacactccgtgtgggtaacattattagtggagtattcaggcgagcaaacactgatattcattataaagattacacaattccaaagggatgcaagatttttgcttcattccgagctgtgcaccttaataatgaacactacgagaatgctcggacatttaacccttggagatggcagatcaacaataaacttcagaatgcggtaggggccaatatatttactccatttggtggtggacctcggttgtgtcctggctatgagcttgcccgggttgtcgtttctatcttcctccatcatcttgtaacgcgctttagctgggaagaaaccgaagaagatagacttgtcttcttccccaccacacgaactctcaaaggataccctatcaatcttcggctgctttcagaatcaatttgctgacgttagattgttttgcagctgctcttatcttggaagaaagactaaacatagataaatttatagaaaaatagttctcgcataggtagtgcatttccctcttttttgttgatctgtaacctggtatgtaaacagtaggcagcagagttgtgctgcttgtaaaatgacctaaaatgctgtggataccggttacaagc

SEQ ID NO: 2423 - DNA, 447 bp, Oryza sativa
  ref <308>: DATABASE ACCESSION NUMBER: AK060258
  ref <309>: DATABASE ENTRY DATE: 2001-12-06
tgtcccgatagccatcttttcctggtttcctttcatatccaccttccagacccgacttctatttaaccaggctttcagcagaggtttggagatctctctcattcttgctggcaacaatccaaatgcgggagtatgactgtagctgctcccatccatctaagcatctccattcagatcgtggagctttacaatcactgttgttctctcttagcagtaggatgtatatatttcatggacggggagtcgtggatgtatcctgttggccacattgttgtattgatcttagtgcttctaattgtgattgctactgttgttttgtagctttagttgtggagttagcttttcatgtttgctaatacaactgattatattatcctattagattttgttgatgtatttcttttgatcgttaatattttgatacgtagaatgaacaaccattttatt

SEQ ID NO: 2424 - DNA, 115 bp, Oryza sativa
  ref <308>: DATABASE ACCESSION NUMBER: AK060259
  ref <309>: DATABASE ENTRY DATE: 2001-12-06
acaaagatgtgcaaatgtaaatgcaacgagttgtatgaatgaatgttcatatgatgtgaagcagatgatgatgatgatatggatattcattggcatagttgtgatgctttgttct

SEQ ID NO: 2425 - DNA, 1255 bp, Oryza sativa
  ref <308>: DATABASE ACCESSION NUMBER: AK104279
  ref <309>: DATABASE ENTRY DATE: 2002-08-28
gtgccgtctcgtactctctcgtgcaggctaacgttggaatcttgggaggggagatggcggtcgtggcatcgaggtgtacggggctgctcctccccgacctcggcgcgagcctcgccggcttccgccgccgccgctcgacgccggcttcttctctcagcttccgcccgcggcgggcccgtcgacggctcgggtccctctcctgcatcgcgccgcccgattcggcggagccgcagacggatgagccggccgccaaagatgactcgactgaagataaggctgaggcaagtagtgcatcccaggatgctggaaatccaacttttcccaataaagatctcagcagaaggatagcactggcctccactattggagctgtgggcctctttgcatatcaaagactcgactttggaggcgtttctctcaaagatcttgcagcaaatgctacaccgtatgaagaggctctctcaaatggcaagcccactgtagttgaattttatgcagactggtgtgaagtttgtcgagaattagcaccagatgtctacaaagttgagcaacagtacaaggaccgtgtcaactttgtcatgctaaatgttgacaacacaaagtgggaacaagagcttgacgagtttggagtagaaggcattcctcattttgcctttctggacaaggagggaaatgaggaaggcaatgttgttgggagacttccaaaacaatattttcttgataatgtggttgctcttgcttccggtgagcccactgtacctcatgcacgggttgttggccaattctcgagtgcagaatcccgaaaagttcatcaagttgctgatccaagaagccatggctaacaatagcttgtggtgatcaattttagtggtaatgctaagacctattgacaagaggcgatatggtctgcatgctcagtcctggaaccaagcattagcgcgtggacattggtactgagctgttccaactcccttaacgtatatgattttgctggtagaaccaggcattcggctacagcattgatatgttggtgatatttgaatcggtgcatgtctgcatacatatttgcataatgaaaatgcagacatgtgttgcagccgcaagcatgcccatgttagtaaactgtttaccaatcaccactagtttctacttagaattgcaatagaatgtttatatacaggagcttactaaaatttgtgtgatatatatatgcttctgctactcttggggaaagctgcacaacctgtgttgatct

SEQ ID NO: 2426 - DNA, 1688 bp, Oryza sativa
  ref <308>: DATABASE ACCESSION NUMBER: AK060260
  ref <309>: DATABASE ENTRY DATE: 2001-12-06
agacaataatttttcacgattttcaccggacagcttcttgggtaatcctggactctgtggctattggcttggttcttcgtgctactccaccagtcatgtgcagagatcctctgtctcaaggtctgcaattcttgggattgctgtagctgggcttgttatcctgctgatgatcctagctgctgcttgctggccacactgggcacaagttcccaaagatgtgtctttatgtaaaccagatatccatgcactaccatcaagtaatgttcctccaaagcttgtaatccttcacatgaacatggcattccttgtgtacgaagatataatgaggatgactgaaaatttgagcgagaagtacattatcgggtatggggcatcaagcacagtgtacaaatgtgtactgaagaactgcaagccggttgcaataaaaaaattgtatgctcactacccacagagcctgaaggaattcgagactgagcttgagactgttggaagtatcaagcaccggaatcttgtcagccttcaagggtattccctatcacctgctgggaatcttctcttctacgactacttggaaaatggcagtctctgggatgttttacatgcaggctcatccaagaagcaaaaactagattgggaggctaggctccggattgctctcggtgcggcacaaggtctggcttatcttcatcatgactgcaacccacggataattcatagggatgtgaagtcgaagaatatccttctagacaaggactatgaagcacatcttgccgactttggtattgccaagagcttgtgcacctcaaagacacacacatcaacctatgtgatgggtactataggctacattgaccctgagtacgcatgcacatcccgcctcaacgagaaatcggatgtctacagctatggcattgtcctcctggagctacttacaggcaaaaagccagtcgataatgagtgcaatctccatcacttgatcctatccaaagccgcagacaacacggtcatggagatggtcgacccagacatcgccgatacgtgcaaagatcttggcgaggtcaagaaggtgttccagttggcgctcctttgcagcaagaggcagccttctgatcgaccgacgatgcacgaggtcgtgcgtgtcctggactgcctcgtctaccccgacccgccctcaaagccggcactgccaccggcattgccacagtcgtccacggttccgagctatgtcaacgagtacgtgagcctacgaggcggcagcacgctctcctgtgaaaattcgtcgagcgcgtcagatgcggagctcttcctgaagttcggcgaggtgatatcacagaacacagagtagagtgactatctgaatatcctgatggctttgtgctttgtggcgttggcgttctagctaagttaccagcttttgtgcccttcctggaataagaagggacaccgacgaagggctggctattcgctgctgtaaatatgctgtcttctggtttgttaggccttcggaaagctatttggccttcctgttttgatcagtttttcttcttatcattattagttagtggggtttggatgaggtgaactgtattaaggcctcctgggagtatgaattttgtaagcacgggtcagttaaaaatatcgcagtgatcgggaaaaatccgcctcttataaaattggttttgttggat

SEQ ID NO: 2427 - DNA, 474 bp, Oryza sativa
  ref <308>: DATABASE ACCESSION NUMBER: AK060261
  ref <309>: DATABASE ENTRY DATE: 2001-12-06
acagatcaacaccggcaaccgactaactctgtctgaaggaagctaagattattaatcagtgagtagctagccatggctgaggagaagaagcaccaccacctgttccaccacaagaaggacggggaggaggagagctccggcgtggtggactacgacaaggagaagaagcaccacaagcacctcgagccgcgctgggcgccgcggggttcgccttccacgagcaccacgagaagaaggacgccaagaagcacgccgccgaccaatactagatcgatcccgatcgaatgaacgcaagaacgaacggtttatatgcttaattactttctccccataattacatgtatgcatgtggttgatggcttaatttgcttcttcttgttcgtcgtcatacgtcgtcgcttttacttcgtgttcatgtacattaattctgtatccgcactgagtattaaataagtgcgtttgtgctgcacacag

SEQ ID NO: 2428 - DNA, 876 bp, Oryza sativa
  ref <308>: DATABASE ACCESSION NUMBER: AK060262
  ref <309>: DATABASE ENTRY DATE: 2001-12-06
tttacttgactgctgctgcatggatcattcttgggatattttcacttatcagacttgaagctgactaccttcttgttgttggagtttgcttgactctaagccttgcaaacattgttgggttcaccagatgcaacaaagatgccaagaagaatatccggggttactttgaaggtcatgctcaaaatgcgatcacatcccgcatcacatccaccctgcaatcagcatttggagtaatctaaaatccgagctccaaacagcaaggcccttttcgaatacaaccatgtaaaatctgtcaaaaggattagcgtgcattatcccatttccatacatttttgttgacccaatacacccagtaggttgattttgattggaaagacagagaacaccttgttagtactactgccttccaaaggagtaaaaaagaagtttttagccgagaatatgtcttgagtctgagtgtaccctttagggattttgaccctggaacctgtcttccaatgcagcttcttgttaattccatatattattaatcatttgctgtgctgtatcttaaaaaaaaaaaaaaaaaggccacaggccgacgaggaggccggctcgctgctgcaggagcgtgactcgcacggcgaacgcaagagcgacaaccaggcctaaagcgtgggatctggtccaacagcacacgcaatttggttggttctaatgaattcatcaatgtgtgatcctctactagtttgatgcaaaatctgttcatttcttgtcttaatttgtggtaggaaggcaaataaatacaggaaaagtacgatctttgtgtcgggcatatgaaaatatgagtcaatttttgccacttgtagttactttgacagtatatgaaaattgtct

SEQ ID NO: 2429 - DNA, 1988 bp, Oryza sativa
  ref <308>: DATABASE ACCESSION NUMBER: AK060263
  ref <309>: DATABASE ENTRY DATE: 2001-12-06
gctgactctttttcagaagtacaagattttctgtgccattgaagctccgtcgctgtccaccagtggaactaccctgtcaacaatggttgaactattgggggtgaaactgatagcagttatggttggctattgctggacagaacttcaggaaaatgatttgcattttgtgtttcatacagtacagaagtggattgaatcagctgttttgcttgtggaagaaatgacagatgccatcaatgatgctgtaataaaccagaaatcaaatgaagatactttggagaagcttaaattagtggttagctctatagatgagttaactttaagcttcggtgaattcgctttggttacactgtgtcacctcaaccatctcgtggatatccaagaaacggagaacttccagagtttgcaaattattaaatcaggggattttgctgatagaaataacaatatgatggaaagtatgcttcgtttgttcttggcttctggtgtttcagaggcaattgcaaagtcttcttgtgaagaggcttcatccatcatagcttccagtcgcgttgcttatatgcatttctgggaacttgtggcatcatttgtcatttatgcttcaccacagactagaagatgtgcactggagtcgatggaactgtgggggctcgcgaagggctcagtcagtgggctatattcaattttgttctcttcacagccaatctctcatctgcagtttgctgcttattctctacttctttctgaacccctctgtcaattttcactaataaaggagtgttctctgggatcaaatagaccactgactcaggaatcttgcatgggacagagtattgagttgatgccagattcagagaagacactagatctgagagaagaactctcatcgttaattgagatgcctacttctgaacttctccagacagatctgttagcccatgatagggttgatgccttcattgcctggtcattgttgttgtcccacctgcaattactaccaccagcttccattactagggaaagggtacttcaatatatacaagataagattagtccatgtatattggattgcattttccagcatattcctttaaggactggtgcaccttgtggaaagaaaaaagatgctgaactcatgcctgaagcagaagttgctgcgcaagcttctaagaatgccataattacatgttcactgctcccatgcattgaatccctttggccagttgggacatggcaaatggcctcacttgcagggggactgtatgggatgatgattaggctgttgccttcctatgtgcgtacatggtttactagtttaagagatcgttcattgtcatcctcaatcgagtccttcactagagcatggtgcagtcctcctcttctacttgatgaattttctcaggtcaaggactctctgtatgctgatgataatttctcagttagtgttaaccgctcggcgtacgaaattgttgctacatacaagaaggaggagacaggaattgatcttgtcatacgcctcccgagctgttaccctctgcgccatgtggatgttgaatgtaccagaagtttgggcatcagtgaagtgaagtgcagaaaatggttgctttctctcacggcattcgtacgcaaccagaacggcgcaatagcagaggcgatccacacttggaaaagcaattttgacaaggagtttgagggggtggaggaatgcccaatctgttacagcattctgcacacgagcaaccacagccttccccggctggcttgcaagacgtgcaggcataagtttcatggtgcttgcctctacaagtggttctcaacatccaacaaatcaacgtgtcccttgtgccaaactcctttctagtccggctgtgctgcgctatgcctattttttttttgcaccgtagaaatttaaatttatactccgtagttattatgttttgtcttacaaatttaatgaaggttagataaaaatatgtagttcatgtgtc

SEQ ID NO: 2430 - DNA, 1556 bp, Oryza sativa
  ref <308>: DATABASE ACCESSION NUMBER: AK060264
  ref <309>: DATABASE ENTRY DATE: 2001-12-06
aaatcaaatccaatcctcctcctccagatctctccaccccacctccgcctcccatgtccgcctcctcgcgcttcgatctccgggcctcgtcgcacccgcaccagcacgccatcggaggcggaggcggaggcggaggcatgagtgacggtggcggtggcgcggcggcggcgttcgcggacgcggggaacctcgagcactgcgccaggtacctcaaccagacgctcgtcaccttcggcttcccggcctcgctcgatctcttcgccaccgaccccgtatcgattgcgagaacgtgcaactgcatctatgctcttcttcagcagcggcagcgtgatattgagttccgggagtctaccaatgatctgcgtcagcgtatgcagtctgatatttctagattagtagccaagattgaaagaatggatgctcaattagctgcaaaagatcgcgagctggccacattgactagaacggaggccaaaaacactgcaactttgaaggctcagattgacaagctgcaacaggaacgcgatgagttccaaaaaatggttattggcaatcagcaagtacgtacccagcaaattcatgaaatgaagaaaaaagagaaagaatacatcaaattgcaggagaagttaaaccaggtattaatggagaaaaagaaggaatcatcacgttcaggaatggaaataatgaacttgttgcagaaagaaggacggcagcgtggaacttggagtggaaaaaagaatgacaatgattattacaaaatgattgttgatgcctatgaggtaaagaagcaagagttgatgcaagaaaatgctgatttgcgagcactattgcgttcgatgcagatggatatgcgcgagttcctcaatgctccaaatggagttccacagccagctgttgtgggcaatggacgacaggaggcaggatctcctcagtctccacttggtggcaagacggatgtctttgatttgccctttcacatggctagagaccagattgaagagagtttgcgcactaaaatggcttccataaaggcccgaatgacacaacttcaagatgcccaaaagggtgcagaagtgacatcagaagctaccgagcgggaacttgaacttgaagctcaactagttgaagctagaagcattatccaggagcaggcatccctcatgtccaagcactttacgaagtctgataaaccaaggaggttgagtggattggatgctgagcgtgaggcggttgcagctcaggaggtgtaaattatgtttgtgtcgaccttcacaggcttcagctatccaaggcacgtcacgatgccaacctttcatcgaggtctcatgtgtttagtaaccaccaagcttcctccttggtaaacctgttgttgccatggtagcatgacttctaggcgttctctgtgtagtattatgtgcaggagcatctcctccgctgttgctaactgcctgcctctgactgttacatgtatcgcacttctactgttagggagaacagatcagtgtagctattatggcctacgaaataggcatcaataccttacttacagaattgtt

SEQ ID NO: 2431 - DNA, 318 bp, Oryza sativa
  ref <308>: DATABASE ACCESSION NUMBER: AK060265
  ref <309>: DATABASE ENTRY DATE: 2001-12-06
aaaaaaaaaaaaaaaaaaaaaaaaaaaaattgtttcttctttttttttttgtggagtatgcatgtataagatgttaatgaattggggggaggagagagagagatggatgtgatgagattcagacttactgtgtgtgttgtggtaattgtttcctgcatgcatggatctggatgcatgggtgagggggtgagttgagtggtgaatttctgatgtacagtactacagggggataaactatctcatggtagcagcagtgttctagctatctcatggtctcgatcttaattatggtggataagctacgcttaattgcttgtc

SEQ ID NO: 2432 - DNA, 1769 bp, Oryza sativa
  ref <308>: DATABASE ACCESSION NUMBER: AK060266
  ref <309>: DATABASE ENTRY DATE: 2001-12-06
ctcagttggtttctcatatttcacatgctacagaagcccaacctcagaaaggacttcatgtaatcagtaatgtggttccagtcccaacttgctttgtggttaatgaagtaattgatggcaggatggtgaatgttctagaggggcttaagttgtataaagggtatgtagatctaactgagataggaaaggttctttcttttgtgaatgaagctaagactatgcggcgtaaaccaggactggaagggcaaacagttgtagttgccaaaaggccaatgaagggtcatggaagagaaattattcagcttggtcttcccatcacagaaggccctcctgaagatgaacatttaagagaggtaaaggtggatcctattcctggtgtgcttcaaaatctgtttgatagcttggttcatcagaaagttgtcccttccagtccagattactgtgttatcgatatcttcaatgagggagattattctcaccctcatcatcatcctccttggtatggtagacccatttgtacactctgcctgactgactgcgacatggtatttggccatgttattgcagcagatagccgaggcgatcatgcaggtccactgaaactctcactctctacagggtctgttctagtttttgagggaaagagcgctgatatagcaaaacgggcactccctgctacaagtaagcagcgtatcttactaagttttgggaagtctgtgtcaaggaagcacgttcagtcggaaagcagcttgcttatcactcccccattgacacctcctccgatgccttgggctgcaccattgaggccagggaacatagcaattcatccctcaagtcctaaacagcttgtctacaaccctagcaatagagtacctgcagtttcaacccctggacttcaccatattccatccaatggcatccagacagttttcgttgcaccacttcctatcactccaaaagctgttccatttgcatcagctgtcacattgccaaacagtacagccgcatggatcgcagaagctgctcccaggcccgcttcacctcgtttacctcttcagggtacaggggtattccttcctcctggatcaggcaatccacccccagctcagaagttgggcgtaaaacatgctgatgctaaaccatttttttccacaagaatcatctgcctcttcatctggtgtaagtgctcgtgcacataaggctaatggtagtgtttcttccaaaccaacaaggaaagatgatatggctgaagctaagccaaagtgcaatgggagttcagatggtggtagctctgttgcccatgccaaggcaactggaggtttagaggagcagaatgttgtcgcaaagtaggctggctacaagatctctgttatcttaaaagtagatagctgaagatattgaaatttctttttgtccaagtggttacaggagtttccaaacacaggctatattcttgagtaagtgctatgctcttggaaatgttgcacgacagcgtgatgctcaagatcaaatagttttgaacattgtagctatctgaaagcaaaactgcactcaccacacaacttcatcttctctacggcgtcattagagcagcgggaccaattatgatgctttttttttttggtcagagcttaagcatcaatttttgtatgttatgagcctcccatttgctcatggagtgcaatttgaggagaaattcgaaagaaaattttgtatatgatgctatatatgtcatctttgttgcataacgaatctgaaatttgcgtcct

SEQ ID NO: 2433 - DNA, 742 bp, Oryza sativa
  ref <308>: DATABASE ACCESSION NUMBER: AK060267
  ref <309>: DATABASE ENTRY DATE: 2001-12-06
acgagcccacgagccagaaaaaaaggaaaaaaagagagtcgtagttcgcctcttcttcctcctctcgttctcgcggcggcggcggagatggcgtcgttctcggaggctcccccgggcaaccccaaggccggcgagaagatcttcaagaccaagtgcgcccagtgccacaccgtcgacaagggcgccggccacaagcaaggtccaaacttgaatggtctgtttggaaggcagtcaggtaccacccctggttattcctactctacggccaacaagaacatggctgtgatctgggaggagaacacactttatgactacctgcttaatcctaagaagtacatccctggaaccaagatggtcttccctgggttgaagaagccacaggagcgtgctgatcttatttcctacctgaaggaagcaacctcttaaaaggagtggagctgtcgtaacatgagacaatcggacaattcattctacagttaaataaaaatatttagacatctgggtcgctctggttttacagggtgcaatccacgagacaattatcttgttatattttgttcttatggtttatgggttccatatcttaggtttagcaggaaaagtctttcacagcttttgctttaactgctggaaaacaccagtattttgatcaccagtcggtgagactggattgcatcccttttggaaaaatactgagatccttaaatttgtgatattttgatccattgcatttgctacggtt

SEQ ID NO: 2434 - DNA, 619 bp, Oryza sativa
  ref <308>: DATABASE ACCESSION NUMBER: AK060268
  ref <309>: DATABASE ENTRY DATE: 2001-12-06
atcaacaaatgtgccctgagctcaaaatttgcagaccatacaaagatgaaggtctcgacggtggcggtgctcgttatggtggcgatgctgatgatgtcggtggctgtttattctgacgatgcaagttctcatggagttactgaaaaacaagttgcagctgctgcaaacgctcatggaagtaatggaggaagcgtcgtcacagaggcagctagtactgattcaacagctggtgcctctggtacttcatcagctggtgcctccggtactaatattgattcaaactattacgtgactatgaaagggtacatggagtacatgaggaagtatggcggtaaacaaccctgagttcgtgtttcttctggggcctgcatatatatgtgtgtgctttctatgtgtgtaaaccttggtacctaaatgtgcaaacaaaatgcgcatagacgtatgcatttcagtatggggatgcgttgaagagtgaggtaccaagttttactggttgaaatcgtaaaacaacctaagtatttctcacatctaaataatctccagcagccaactgtcatcatgtaataatgcagtgtaatggtattctatgttgttgaattaatattatgcttattatgtc

SEQ ID NO: 2435 - DNA, 1341 bp, Oryza sativa
  ref <308>: DATABASE ACCESSION NUMBER: AK060269
  ref <309>: DATABASE ENTRY DATE: 2001-12-06
aataaccttttgtgagctggaatgatgcattttgctgcacatctaatcctttataaaagtcacgttttccttgtatcaaacatttctagttttctccctttgacgattccttttccaacctatcgtttaaacattatgcttttcgttcgattatttattttagaaagttctcttgtattaatgcttttggcacgctaactgcactttaaaactttattttggtttcttgagtgacgttgtttttcacacttgaatttcaactaggtactccctttttggaacttctctttggactttaaaactatattttagttctgtaatctcaatttcctaaattttttatgtacttatgcttactggttcgtgaaaatattgcttgcatttagtccttgcggcttttttgtgctctgatgttttaatcgtagacttataactaagttctagagttatgtttccctgtttatcgaaaaaatatcttggttgcggtctagacgtctacatttggttgcatcctgttgattttatgataaccgtagtttgcttgttccgaacgatttataggtttcttcgttgacgcttcatttttcatccataagtttaatttttttacatttagttggattccttgattctgtaatgttcttcttgcatcgattcttcaaataacctttttggagtttccaatttttttctgttgtcatggttcatcttaaggttgtttgaacattgttttctggtttataaaaacaaaatattcttttgcattgaagcctaattgatttattttgctcttataattgagttgtagagttgagtctccctgtttatcgaaaacaaataactttgttgtgagctgggcccatgcattttgttgcaccttgaagcttttatgaaaatcaaggtttccttgtgtcgaacatttctaggattctcccttgacgattcattttttgccctttcatttaaacctactgcatttagttggatttctttattttcgagcgttctcttgtattaatgcttttgacatgctatttggtctttaaaactttattttggtttctcgagtgatggttgttttttcatccttgagtttcggtttagttctgctagtttgatttcttcaattacaaagtttctctttctttatcttctctttggacattaaatctttattttagttctgaaatctcagtttctgaaattttgtttgaacttatgattaataatttttcacaagaacatatttgtgtgcatttaaaccttgtggggtttttttgtgctatgtcgttttaattttggccttataattaaattctagagttacgcctcctttttatc

SEQ ID NO: 2436 - DNA, 1749 bp, Oryza sativa
  ref <308>: DATABASE ACCESSION NUMBER: AK060270
  ref <309>: DATABASE ENTRY DATE: 2001-12-06
gaaaaaaagagggaacttttcacggccgctgaagcctctgacactccactgtagtgtgtcagtactccggccacctctctcggccgttgctctcccatggcgatgatggcgatgggcgcggcgtcctgggccccgatcccggcgccggcgagggcggcggccgcattctatcccggccgcgatcttgcggcggcgaggcggcggcgtggggcggcggcgaggaggccgttcgtgttcacgccgcgtgccgtgtcggactcccggagctcgcagacgtgcctcgatccggacgccagcacgagtgttcttgggatcatccttggaggtggtgctgggacaaggctgtatccgctgacaaagaagagggcgaagccggcggtgccgttgggtgctaattacaggctcatagatatcccggtcagcaactgtctgaacagcaatgtgtcgaagatctatgtcctgacacagttcaactccgcgtcgctcaatcgtcacctctcgagggcctatggaaacaacattggtggttacaagaacgaggggtttgttgaagttcttgctgcgcagcagagcccagagaatcctaactggtttcagggtactgcagatgctgtgcgacaatacttatggctatttgaggaacacaatgttatggagtttctcattttggctggagatcacctgtaccgtatggactaccaaaagttcattcaggcccacagagaaacaaatgctgatataaccgttgctgcgctgcccatggatgaagaacgtgctacagcatttggccttatgaagattgatgatgaagggaggatcattgaatttgcagaaaagccaaaaggagagaagttgaaatcaatgatggttgacactaccatacttggccttgatactgagagggcaaaggaattgccttacattgctagtatgggaatctatgtttttagcaaagatgtgatgcttaagcttctccgtcaaaatttccctgctgcaaatgactttggaagcgaggttattcctggagcaacagaaattggaatgagggtgcaagcttacttatatgatggttactgggaagatattggtactatagaggcattctacaatgccaacttggggataaccaagaaacctgtgccagattttagcttctatgaccgttctgccgcaatttatacgcaacctcgatacttgcctccatcaaaagttcttgatgctgatgtgacagacagtgttattggtgaaggttgtgttattagacattgcacaatcaaccattctgtggttggactccggtcctgtatatctgaaggcgcagtgatagaggactctctgctaatgggtgcagactattatgagacggagacggacaagaaagccctttctgagactggtggcattcccattggtattggaaagaatgcacacatcagaaaagcaataattgacaagaatgctcgtattggagaaaatgttaagataatcaatgtcgacaatatccaagaagcttcaagggagactgatggatacttcatcaaaagtggcattgtcactgtgatcaaggacgccttaatccctagcggaacagtcatataaaggcaaccaatcaccactgtacataaggttgggccttgcagcatatggtgatctgatctccagtgcacatcaagcaatcaacttttaacgctgtggtttattccatgctgccagttcaccaagctctgcatcaacttgcaaggatatcat

SEQ ID NO: 2437 - DNA, 1581 bp, Oryza sativa
  ref <308>: DATABASE ACCESSION NUMBER: AK060271
  ref <309>: DATABASE ENTRY DATE: 2001-12-06
atcatggtgtcccacgggtacactacaaaggaaagcagggcgggttttacatcatggttatggatatgttgggaccgagcctgtgggatgtttggaataacaattcccactcgatgtctgttgagatggttgcttgtataggtatagaggccatctccatactagagaagatgcatgctaaagggtacgtccatggtgatgtgaaacctgagaactttttgcttggtcctccagatacccctgaagggaagaaactttttcttgttgatcttggactagctactaaatggaaagatgctggtacaggaaagcatgttgaatatgaccagagacctgatatctttaggggtactgttcgttatgctagtgtgcatgcccacttgggaagaactggatgcaggagagatgaccttgaatcccttgcatacacacttattttccttctccgtggccgcctgccttggcaaggattccagggagagaataaaggttttcttgtttgcaagaaaaagatggcaacctctccagaatctttatgtggcattggtccaccaccatttcgtcaatttgttgagtatgttgtgaacttgaagttcgacgaagagccaaactatgcaaagtgcattgctctttttgatggcattgttggtccaaatccagatggaagaccattaaacaccgatggtgcccagaagcttgtatatcaggttggtcagaagagaggccgcctcacagcggctgaagatgaggagcaacctaagaaaaagattagaatgggaatgccagcgacccagtggattagtgtgtacaatgcccgtcggccaatgaaacagagataccactacaatgtagcagatgatagattagcaccacatattcaaaaaggaaatgaagatggtttgtttataagttcagtttcatcctgttcagatctgtgggctttaattatggatgctggcactggttttaccgcccaagtacatgaactctcccattactttcttcacaaggaatggataatggagcagtgggagagaaattactatattacttctttggctggttcaaataatggaagctcggtggtgatcatgtcaacaggaacgccatatgcacagcaatcctacaaagtaagtgattcatttcccttcaaatggataaacaaaaagtggaaggaggggttctatgtcactgccttggccacagcaggaagccgatgggctgtggttatgtcccggaacgctggtttcacacatcaggtagtagaacttgatttcttatatccgagtgaaggaatccatcaacgctgggatagtggttatcgcataactgcaacagcagccacatgtgaccaggtggctttgatcttgagcatacctagaagaaagcctaacgatgaaacacaggagacactgagaacatctgcttttcctggccagcatgtaaaggaaaaatgggcaaaaaatctttatttaggctccatatgctatggaagatcagtgtcgtgaagtgcattttcccgagctggtcctttgtaagattaagatctaataatatgaacaaccggttttgtgacaagat

SEQ ID NO: 2438 - DNA, 1836 bp, Oryza sativa
  ref <308>: DATABASE ACCESSION NUMBER: AK060272
  ref <309>: DATABASE ENTRY DATE: 2001-12-06
ttttttgattatttcgctatggagttcatggtttgatttctgttgtgggggttgtttgattcttgcgcaggtgtcgagagggatcgagttggtctacggtggcggcagcgtcgggttgatgggcttgatcgcgcagacggttcttgatggcggctgcggtgttctcgggttggaaatttcggcccatgccctgttcatcttcaccaatggcacagtgtggattaatctataataaaaacttgtggctgttcttcttgattcttttgcagggtgattccaaaagcactcatgcccaccgaggtatgcaattcttttttgtcttctcttcttctttgtgcattgttcagaagtatttattgccgactttccactatgccttctaatctagcagcacctaattggctaattggttattaggcacaagggtctatcacgtactcgtatagaatgtaaaatgactgaaaatctccccgtttaaacaaattaaggagtgatagcatcttagaacgcttgctgtcagatgggtcatctcaatccatgccatcgatgtatcaaggttttcatgagcattgcatcagctatacagctcttatatcagtggccactagaatcaacacgactgttagtccagcttgattcacctttgcctatcagcttagagataagtggtcattaaggaaataaggagacaaggaattcggactagaatttaggtggtataattgcagaatttaggtggtgtaattgcagcctaacagtttagacttttgggcagtacaacttggcatttttaaactttgccactcggtggatgtgatataatagaatctgtaacttgccaataggacagcacaagttgtgagaaaaaagtaacaagcagtaggtaattcaaataatgtaatcgctctggtaggcaggtgacgataggcattggaatgattgcaaatcttagttcagaaactgaacatatgtagtcatggtcatatggatagggtaaacgtaaacaaaacgatgctctctcgacctttatcaaggtgaagttatatctccagaattttctgacgacatgtactgtaactgtttgcccatgtttgaagaatagtgacaagtcacaaaagattaagagtagtctcaaaaacttatccttgaaactacgagattacggcctacttatgttaccatttgacacaccaaaactctaatgtagatatcaggtgcaagtgttggagaagtgaaaattgtgtctgacatgcatgagaggaaagctgagatggcacgccaatccgatgccttcatcgctcttcctggagggtatggaacaatggaggagttgttagagatgataacttggtcacaacttggaattcatgacaaaccagttgggttgctgaatgtggacggttactatgatccgttgcttgcgctatttgataagggtgcggcagaaggatttattaaggccgattgcagacaaataattgtttcggcaccgactgcgcatgagctgctgagaaagatggagcaatacactcgttcacaccaggaggtagcgccacgtacaagctgggagatgtcagagcttggttatggaaagacaccagaggaatcgtagcataatctgctaatgtgacattgttcctgaaggagaattgcagctgctccttttatctcccattttggttaccttatcgtgttacctgtccagtcaacttcatccggtgaagaagatgcataagaaaatatgtacctaccctcggttttcctgtgggggaatgaacgcatggttatagtccgtataatatttcctgccttacataaattaagaggcatttgagc

SEQ ID NO: 2439 - DNA, 1560 bp, Oryza sativa
  ref <308>: DATABASE ACCESSION NUMBER: AK060273
  ref <309>: DATABASE ENTRY DATE: 2001-12-06
aactatgctccatccaatggtaaaacacaaataaattgtggtttgaggtactacctgggtttgaatgaatttagtattaactactttgtactgtattgctaacaaaactgacatgtttacatttatagcatcgtgttgattgcctctttctggaaaatctgacctttagtgatgaaatctgtgacaaataatttttatttgctcctttttatttccatgctgtatccatgtttactccatacaggacaccataataatctgaactctgtttcttcacttagttatctggaacacttcttgaggaaggccaggtcagatctatagtagatggaattaaagaagtaataactgcgagtgctctcagaaggagagaacgaacagacagggcaaaagctgaagattttgattcagaagaagaggatctactcagagaagaaaatgaacaggaggatgaaatcttcgatcaaattggtgattgtttgggcactcttgttaagacgttcaagacttatttccttccattctttgatgaactttccgtctatttgacacctatgttggccaaggacaaaacagtagaggaacgaaggattgccatatgcatttttgatgatgttgcagagcactgtcgcgaagcagctgtcagatattatgatacatatcttccttctttattagaagcctgcacaagtgaaaatccagatattagacaggctgcagtttatggtattggcatttgcgctgagtttggtggctctgcatttaggcctcacactggtgaggccctgtccagactatacaatgtaatcaaacatcccaatgcgttggacttggataatgcgatggcatatgacaatgctgtttctgctcttgggaaaatatgtcagtttcatcgtgatggcattgatgcatctcaggttgttcctgcttggttaagttgtttgccaataaaaaatgacttaatcgaggccaagatagttcatgaacaactctgtacgatgcttgagaagtcagatagggagcttttgggtcataacaaccagtatcttccaaagattgtctctatttttgcggagatattatgtgcgggtaaggatctggcaacagaacaaacttttagtaagatggttaatttgctaagacagcttcagactacattgcctccttcagtactggcgtcaacatggtcttctttgcagccgcagcaacagcttgccctacagtctgtgttgtcatcatagctgaacagtaacctcagcaatgttgagcatgtggccttcacatattgccttcttttttgggttttcatgtggttttgtgcttgggttcctggagtttgtgcagcatacaaatgccctgagcttttgtatgaagggcatggtttgcatcagaagtgtatactgtcacagaacatcatggatgtgtatggggctgagcaatctctgcttcacagcaagtgaagttgtaaagcaatatgttcattttactaggaattagttgggttgaagaaaatgtaaattaacaattttgatcgttgatgttttgatatcatattatttc

SEQ ID NO: 2440 - DNA, 1433 bp, Oryza sativa
  ref <308>: DATABASE ACCESSION NUMBER: AK060274
  ref <309>: DATABASE ENTRY DATE: 2001-12-06
accgatctccctcccccctcgccggcggcgcaccgaccgaaccgaaccgcgccatggtcaccgcgcgcaagggccgcggaggcagaggccctccccgcccccgcgtcgtcgacggcggcggagggagcatggtgtcgcgcgtggccgtgctcgcattctgcgtcgccgggatctggtcggcgtacatcacccagggcgtcctccaggaaaccctgtcgacgaagcggttcgggccggaggcgcggcggtccgaccacctcgcgttcctcaacttcgcgcagaacgtcgtctgcttcgtctggtccttcataatgatcaagctgtggtcgagtggtgggagctcctccgctggccgcgcgccgctgcggaagtactggggcgtcagcatcaccaacactgtcggcccggccatggggatcgaggcgctcaagttcatcagctacccagctcaggtcctggcaaaatcttctaagatgattccagtaatgctgatgggaactatactgtatggtgtcaagtacacatttccggagtacatttgcacctttcttgttgctgggggtgtatcatcctttgcgttgttgaagacaagctccaagactatcaagaagcttgctaaccctaatgcgcctctgggctacacattgtgcttcctcaacttagcttttgatggttacaccaattcgacccaagatttgataaagtctaggtatccaaagactaatccatgggatataatgcttggcatgaatctctgggggaccatatacaatgctgtgattatgtttgttgctccattactattcagtaattggccttacgccaacggttttgaggcagtgagattttgccaggagaacccagaggtggcatgggacattctcctgttctgcctgtgtggtgccgtgggtcagaatttcatcttcctaaccatcagccgatttggctctcttactaacactaccatcaccaccacccgcaagttcatgagcattgtcatctcctccgtcatcagtggtaacccactctccttgaagcaatggggaagtgttgtgatggtcttttctggtctctctttacaaatctttctcaaatggaagagaaagaaggtcagagaccacaaggaatgagtttaatattttagctcattccaatttgtagcttcgattggacatgtttgttgttgggttatatgggagataattattgcagcccattactgattcaggagaagttttacatcgataaaaaaactgagatgtatggtaatagctaaaaaaatgctggtagtttctgttctacaggaagtcaggaagaagatgcaatgaattgtattgcactgagtagtagaattgtatggcgccctgtatttttgttctctccctaaaggaatcgctaattatcaaaacgataattatgtttctgccactgat

SEQ ID NO: 2441 - DNA, 604 bp, Oryza sativa
  ref <308>: DATABASE ACCESSION NUMBER: AK060275
  ref <309>: DATABASE ENTRY DATE: 2001-12-06
aaaaaaaaaaaaaaaaaaaaaaaaaaaaaaaaaaaaaaaaaaaaaagtgcaagaacagcgctgacggcgagtacgagatgaagcggccgggaagctcgacggcgccggcgcattcagcgtgccgctcgccgccgacctccgcggcgccgacagcgtggctcagctccacagcgcggcgaaacataacgcggcatgccccggtcaggagccgtcgaggatcatgcagctgtcggagagaaccttcgttgccgtcgccggcaagacccactgcacgtcgccggtgtgcgcgtcggcgaccatctgcaagcccatctgccagccgcgtcgtcgaccaagccggcgcccaagccgcaccctggccagccgccgcacccaacgccgatgctgacgccgtcgtacggaacgccgagcccgtaccactcgccggcgaggaactaattaattaatgccgtcgagctcacacattattatgattttttttctgctctgcactagcttaatgccatttatgatttattgttgtcaaggttggagtagcgcagatagcttatgtattcgttgatcttgagtttcttgggtcgatcgaataaagttccaggttgat

SEQ ID NO: 2442 - DNA, 858 bp, Oryza sativa
  ref <308>: DATABASE ACCESSION NUMBER: AK060276
  ref <309>: DATABASE ENTRY DATE: 2001-12-06
ctcctctcttcttcttctccaacttcttttttctcttcttcttctcctccattccattccatttctcctcacgctaccgccacaggtgtccgcgccgcgagaggcctcgggctcggctggtggtggaagaatcggatcaggagaagcaaaccaagggatagaaattcctccccccagaagatctctcatccccgtgcgctgctgctgctgtgtcgtcgtccccctcctcctccgccgccggcacctcctcctcctccgccgccaccatctccttccatccccagccgccgccaacgacgaaggaggagcagctcatactcagcaagccgcccaagtgccccgacctcaacctggacctctgcatcagcccgccgtcgtgccaggaagaagacgatgactatgaggcgaagccggcgatgatcgtgagggcgccggagctgcagcgccgccgcggcggcctctgcttcggctgcagcctcggcctccagaaggagtgcaagtgcagcggcggcggcgccggcgccggcgccggcaacaacttcctcggcctcagggctggcatgctcgacttcagaagcctccccatgaaatgaaatgatcctgcaaaccaatccatgatcgttacactttctcttctcttttgggttcttgatttcttagctagctttggttactgcttagtgttagtccttcttaattaggatcagatagaggaatacttcctttggggagatgatcagtgatcttgttgatcacttcctccattttgtgtaaatactgttccactcatacttagttcagttgatgatatggttatttaggttgttggatgtaaatttgttctcggtctgaaaatct

SEQ ID NO: 2443 - DNA, 1740 bp, Oryza sativa
  ref <308>: DATABASE ACCESSION NUMBER: AK060277
  ref <309>: DATABASE ENTRY DATE: 2001-12-06
aagttaagcccgacggtgttacgtttattggggtgctaagtgcatgctgccatggtggcttggttgatgaaggccggaagcaattccatgcaatgagggaggtttatcagatagaaccaagagttgaacactatagctgccttgtgaacctcctaggtcgtgctggtctactagatgaagctgagaggttgatcggtgacgttccaattaacaaggatgctatgccactgtttggtgcactcctcactgcttgcaaggctcatgggaatgttgagatgagtgaacggttaaccaaacgaatctgtgagcaagattcccaaattactgatgtgaatttgctcatgtctaatgtatatgcaacagcaagtagatgggaggatgtgataagggtacggggcaagatggcacaccctactgtcaagaagaatgcagggtgtagcttgattgaggtgaaggggtactgaggagttgttgaagcatataatgcttggacaaaggaattgttgaagcatccattagtttgactggaccaacagaagcatgatcaatcactggaagccgtttcattagcaattttgaagaaccttgtctgaacagacattcgagtgatcaggcttgtacagttagttaatttgaggactactgaacttcagctagcttgtttcaggcttgtagcagagctggattttttttactcttgccaggaaatggaacacggttctgcagatgaaaaaacaaggcaatggcttcaccgaggttccgttcgtcccagtggagctcttcgacgtcgtctggttctccgacatctctggctccatgtagaaccgcgctcgaaacgcagccagatgcgcatagtatgcaggtggaactgttggaccaggaaaaaagaaatgcaagattcaccttcagaattcgtgtccaactaataataacacatgaatacaaagaaaatgatggaaaaatgttcagatcatttcagaagaacgtaccaacagaaacagagcgtgtgcaccgtgcataactgcatcagcaaatgtaccaagtcagacaatttctatagagagaagctcagagtgcaaaggataaacttaacaagattcagtaatgccgtacgtgtagcaaaggttgtttgtcaatgtctgcatttcgtctgcagtgaaattgttctcatcccaaaggacgtggtagtgagctggcctacttgttccctggaaaactcacacacatcagtcatttcagtacatggaggacaaacttggggaattatattccagcgctactacagacagaatatttgctgatccaagtactataatgtacaatcacatgattaaaaatttgaccatggtatagtaaaaaaaaaaaaaaaaaaaggccaccctactggaaaattccccaacttgacggcttggtccgctctctcctaacctaagcgacgacccatgttggtgtgaagttgtcgatgctacctacctgataaggacgaatataagcctaattatcgccattaatactcgaggcttatgaaaaaattctccctctttctttcttttttgccgtttgagttaagtgcacttgggctaggtgtgtttctgcttgaacgacattgtaagtttgtaaaccgtttgttttgttagtttttcctactcgttcgttggtccggtgtgatgtcatctgcttttagttgtgatttacatgttttgacgaaaaaaaggttaaagaaaattaagagattatctc

SEQ ID NO: 2444 - DNA, 1438 bp, Oryza sativa
  ref <308>: DATABASE ACCESSION NUMBER: AK060278
  ref <309>: DATABASE ENTRY DATE: 2001-12-06
ggcgatataggtggaagaggtactgatcatctgaaacaccataatgtggaagatgtcacaagtcgatgagtggaagccgatgatcgcaatgctgttctttgacctcatatctgctgtgacaacagccttgctcaagaaggcgctcgcggaggggcttgaccgtcttgtactcatcacgctgcgacaactagtcgccacgatcttccttgctccgattgcctatttcaaagaacggggtaaaagacctaagctcacactggagatccttgtgtacctcttcttcagtgcagcacttggtgccgcgctatctcagtacacattcttctatgggttgcagtacacgaccgcaacattcgccataactttcaccaacatgtcccctgtgatcaccttcctcattgctgcactcctaagggtggagtcactgaacatgaagaacaaggcaggagctgcaaagatcatcggaacactcatgtcattcgccggtgtcatgctcctcaccctctacaagggtgtggccttgacacaccaagttgtgtcttcagtgagctcagatcatcaccatgcagaaatagaagaacccagcaaaaagagctggacactcggtactgtagcattactggcaaactgcctttgcttctccttttggcttctgctgcagaccaagcttaccaagaagtacccagcactgtactccagtactgcatacatgttcttaatcagctccctccaaggtggggccctgacggcatcgatacaaaggcgagcatcagtgtgggttctgacaaggacagtggagattgttgcagtactatatacaggaattatggggtctggagtgggctacgtactgatgacatggtgtgtcgaaaagagaggtccagtgttcacttcagcctttattcccatcatccagatcatggttgccataattgatttcttctatctacatgagaacctctaccttggaagtgttgttggatccatattgatgattctgggcctatatattcttctgtggggaaagaacagggatacatctgcagcagcatctgccaaagaagccaaagaagaggaagaggacaaggagaagcaagtcaaaccattaggaccaaactaagttggtattgtactagtttgggattgtagaacatgaaaaatagttcatcctcctactaccagtagtgttggtattgtagtttcttttactgggaaacatgatgtattctcccaatcaccgcagttatgtttaattatggaacactgtaaatcaccctgctccctgcagctcaaaattcacttgatgcttaaccctgacttctggggcaggttatgcatgtgtacttgtgtagaacctcttttaggccttcatcctcgcttcgctcaaaaggttttaacatgtaagcgcaacacattggaatgactagtattaattact

SEQ ID NO: 2445 - DNA, 1319 bp, Oryza sativa
  ref <308>: DATABASE ACCESSION NUMBER: AK060279
  ref <309>: DATABASE ENTRY DATE: 2001-12-06
tatgaatgagcaaccagttgtttctcttaaagcctctacatgtggtcttgatgtgctggacgacatcttattgggctataaagttgattggccagtgaacatcgtcattacagaggaggcacttaaagcatatgctgaaatatttcggtatcttgttcaggttaggcttgcagtgttttctctgactgaagtgtggcgatttctgaaggagttaacacagttaatcagtcgttccagccataatagacctgatgttttaaaggaattgagttctgtgatgaaactgagacatcaagtttatcactttctatcaacactacaacagtatctccattgccatttgtctgatatatcatggcgccgttttcaacattcacttcaacatcaggtgagagatatgctggatctcgagtatgtgcatctatgttatgttactgatgcgcttcacatatgtttcttatctgctgaaacaaaaccaattgctgccataattaatagcattctacaacaagctttggagttgcggtcatgttttaagagcctcaattacatttctgagtcaacagtaaaacaacttaatctggattctcttataaatttctctcaggtggacgctattagaacgaagtttgagggtaatatcaaagatttgtatattttgcatttgaagtcttcgaaatatggggagattggtctttatcgtttctgggggtatcttaactacaatgagtatcattccttgatgatcaacaaagatatgggctgcttctatttctaatgggaaatcgtttttaaccaaagctcaagtatcccctttatcttctgtggctagcttgccttttacaacaatttgatgacagcatgttctgcctttgattgtactgctagtaagaagaggtgcatccctttggtctgctcaatcagttcacattttgcaccctcggtgacacaggtatgtttgtacaattgtctgtttctgaatatgcatcactagagcacgctgctgaggcttctcgtttcccttcatttcggaaaggaggaacacactgctagtctgctaccatcgcagagcatgaacttacctgaagacagtagttccttgtatgaactttcctgaagtaatagtgatctttagagtttgagcattgtatggagttttcacttgatagaatagtggttttgtggaaaatacgaggctaggaatgaacttcaaacatccaattaaaaggaaaaaaaaattgacgtgactgggaatgcatgttactattgtatagctgtaatctgagacatggcctggtaaattaaagctgtgattgagt

SEQ ID NO: 2446 - DNA, 1170 bp, Oryza sativa
  ref <308>: DATABASE ACCESSION NUMBER: AK060280
  ref <309>: DATABASE ENTRY DATE: 2001-12-06
aaaatctcccaattccccaaccctaacgccgctctcgccaccaccccccaaatcccgaatccgccgcctcttcgttcgtcgtcgagctcgctcgctcgcccaaccctagcgcgccagatctacccgcccccgagcagccgccatggcggagaccctcgacatgacgctcgacgacatcatcaagaacaacaagaaggccaacccctcgtccggccgcggccgccgcggatctgccgctggcggcggcggcggcgggggtgggggtgttggtggtggcggcggcggcggcgtggggccgacgaggcggcccttcaagaggtcggggaacagggcggggccctaccagccgcccaaggcccctgaatcggcgtggcagcacgacatgtactcggatgtcgcggcaggcggcggcggcggcagcggcggaggcgggagggtctcggctatcgagactggcaccaagctctacatctccaatttggacttcggcgtctcgaccgaggatatcaaggagcttttctctgaattaggtgatcttaagaaatacgtaattcactatgacagaagtgggaggtctaagggaacagctgaagttgtatttgcaaggcgtggcgatgctgtcgcagcagtgaagaaatataacaatgtgcaacttgatggtaagccaatgaaaatagagattcttgggaccaatactcctacagctgcagctgctcttccagcaaataacggaggctacgttagaaatgttgctaagagtgcaccaaggggtggcccagctggactaccgcagggtagacctcgtccaagggggggtgggaggcgccgtggtggcggaggaggcagtggtggtcctggtggatccggtggtcgccgtggcaaagagcgtagccagccaaagtctgctgaagaacttgatgctgacttggagaaataccatgcagatgcgatgcagaccaactagatcttcacggtgttgatatttcaacatgaaatctgaaggatgtttatctgcttgttcctgctatttgtgctaccatgttcagtggcaacaacaaaacctttgtttgtcgggtcttggtttactgaattgtacggttttatgtgtctacatagaactagagttaagtggatgctggtgaacactgttatgaatattacttggttgcc

SEQ ID NO: 2447 - DNA, 1593 bp, Oryza sativa
  ref <308>: DATABASE ACCESSION NUMBER: AK104280
  ref <309>: DATABASE ENTRY DATE: 2002-08-28
gatcccctctcatccgctcgcggacacagaatctctcctctccctctcggcgcccaggttctcgccgccgcccgccccttccttctcttctcctcctacgtacgtaaataatccacctacgatagatacgaccaaccccattatgagctctctatgcccctttgccaaactcgcctccgctggcgccacatgccccgtaaaatcatcatcagacaacaaaaccaccatcaatcacaccgacgacgacgacgacgacaatgaaaaaactggcaatgctaacaccgatcctcgtgtggtgccaccaaagtgcccctttggctatgactccaacaccttcaagcttggcccactcagctgcatggtctgccacgctctgctacatcaaagcagcaaatgcaccccgtgctcccacaagttctgcaaggcatgcatattgcgctttaaggactgtccattgtgtggtgctgacatccaagggatcgagcccgatgatgagcttcaaggccttgtcgaccgcttcattgatggccatgcccgaatcaagagatcacatgctgcaggcgatggggaagccgcaagtgacaacaagaccaaggtcatttacgaggatgtctccatggagagaggggcttttctggtccagcaagcgatgagggcctttcgcgcacagaacattgaaagtgcaaagtcaaggctcagtatgtgtgcacaagacatcagggaagaattgaaatctaaacaagacaaccaagaactgtgttctcaacttggagctgtgttaggaatgcttggggactgctgtcggaccttgggagatgctccttcagcaatcacttactatgaagaaagtgctgaattcctctcgaaattgcccaaaaaagatctggagttggtccatactctctcagtttcactaaataaaattggagatcttcgctattatgatggggacctccactcagcaagaagctattatgcgcgttcgttggatgttcgcagaagtgcagcaaaagaacactcagctgtggcttcccaggtcattgatgtagcaacttctcttgccaaagttgcggatgtcgatagaaatcttgggaacgaaagcatggcagttgagggttttgaggaagcaattaaatgccttgagaatttgaagctggaatctggagaggccagtcttgagcagcggcgtctctcggttctcgactttctacaaaaacaattggatgacaagtgatatgcacggttctaatttgaagagcacactcacaggatatatgcactatccataatgaggatcagctccagtacgtagtctctgtgatgcatatggaagggagttgctccagatcgaatgaatggtaactggtgtgtatttgaggtttgctgcgacacagaataaatactttcgagttgtatatgtttcttgtgtctgccacgggtggagacctctttgagtccctgaggcaccacggagacgaaacttctcggaagtactgattccttgttgcctctgccgtgttatgtgaatgttatcccactgtatatttattgatgatataatataagaaaagaacagcacagatgttttgtatc

SEQ ID NO: 2448 - DNA, 1514 bp, Oryza sativa
  ref <308>: DATABASE ACCESSION NUMBER: AK060281
  ref <309>: DATABASE ENTRY DATE: 2001-12-06
acctcgtcgacgtctcgacgacgacgaccattccggcgccctccacggtgagtgatttctcgccctcccgtccgccgctgcttccatgtttccaactccctttcgacatcgattcttcttatccgcctcccttgtggattcggatttagctaattaggtctctttcccccattattaccttttaaattgggattgtgagcagcacagaacggcatggcgacctctccagcttatcctccccctggatccggtgagggtttctccaaaccgcccgctacaggtaacgctgcctaaacttgcccttagtctcaacccctggatacaaagcatgcgcttctttacctttgaaagttcaagaaatacagtgaataagataaggcagatttatttgtttcgcttttggtacaaagatgtgatttttaaaagaaactaacagggtataacaggaatgcctattttctactgtgatttttcgctcagttgcatcacgtgaataggattacagtaaacgtgttctcaatcagtatttgatctttgcgtttagtcgtctctccggatctgaaagatttggccttcacctggtaatcatttcgatgcattcatttccctatccaggaggtttttgaaccttgatccacttcaatctccaagcaacagtctaaatttagcttcaaattttgggttacctgtatctttttttctttcatgaaatggaattatttccaagcttgtggtggcgtctgtattgggtttctttctccaagttatattaagtttggcttccaaagaagaacttatatttgctttactacaaaaaaatcatcggaaaagggctcttctgttgtacaccgatttatttatttgatgcatgtatataaattgctctctaatgcattataaagcaaatagcaattgatgtttacaatgatcagatccttgttcaagtggccattggtcagacctcccagttgaaaataacagattggtaagattaagatctgcggttgcagcagcagcccttcgggagcatgcgatatttgttggacaaaatcattcggtgtgtttgcccatcagggattttccagagcttaggtccagctgtgtctacttcacaacaccttgcttgtgtaacgatgatcattttccttctaggcgggaaggttggaaaggtgtagggatttacgacttgcaaaatcagatatttgaggatgttttcccttcttgtgagcgtgggtattcgacctatctccctatttctgaagtttggatcacccccagccccggcctttgaaagagtaccacatagccttttagaagtttgctggaagcgtggaacggatcattgctgccgtgtgcttacattgacttgtacttaacttatcaatgttattgttatatatattgttttgccgccttttagaagttcgctggaagcctggaacagatcattgtcgtgtgcttacaatgacttgtactgaacttatcaatgttataagcatccgagtgttgtagcc

SEQ ID NO: 2449 - DNA, 1905 bp, Oryza sativa
  ref <308>: DATABASE ACCESSION NUMBER: AK060282
  ref <309>: DATABASE ENTRY DATE: 2001-12-06
ggttggttgaggagagaggagggcgaatctgtgggatgaggatgcggtggtgggcggcgccgctcgccgccgtgctcgccgtgatcctgctgccgtcgtccaccgccacgctctctcccgccggcatcaactacgaagtggtggcgctgatggccatcaagacggagctgcaagacccctacaacgtgcttgacaaccgggacatcaactccgtcgatccctgcagctggaggatggtcacctgctccgccgacggctacgtctccgcgctaggtctgcccagccaaagcttgtcaggcaaattatcccccggaattgggaacctcaccaggctgcaatctgtgctattacagaacaatgcaatatctggcactattcctgccagcataggcaggttggggatgctgcagacgcttgacatgtcagacaatcagattactgggagtatcccgagttcaattggcgatctcaagaacctcaactatctgaagttgaacaacaacagcttatctggagttctacctgattcattagccgccatcaatggccttgctctagtagatctttcattcaataatttgagcggtccattgccaaagatttcttcaagaactttcaacattgtgggaaatccaatgatctgtggtgtcaagtctggagataattgctcttctgtatcgatggatccactttcataccctccagatgatcttaagactcagccacaacaaggcatcgcaagaagccaccgtatagctattatctgtggagtcactgttggttcggtagcatttgcaactatcatagtcagtatgcttctttggtggcggcataggcgcaatcagcagatcttttttgatgtaaatgatcaatatgacccagaagtatgtttgggtcatcttaagcgttatgcctttaaggagcttcgagcagctaccaataatttcaactcaaagaatattttaggtgaaggcgggtatggaatagtatacaaaggttttctacgtgatggtgcaattgttgctgtcaaaagattgaaggactataatgctgttggtggggaggttcagttccaaactgaagttgaagtcataagcttggctgttcatcggaatctccttagactcattggattctgcaccacagagaacgaaagattacttgtttatccttatatgccaaatggaagtgttgcttctcagttgcgggaacttgtaaatggcaagccagctctagattggtcaaggagaagacggatgtttttgggtttggagttttgttggttgagttgatcactggtcagaaggcattggactttggaaggctagcgaatcagaaaggaggagtgcttgattgggtaaagaagcttcatcaggaaaagcagctgagcatgatggtggataaagacctgggtagcaactatgacagggtcgagctcgaggaaatggttcaggtggccttgctgtgcacacaatactacccatctcatcgtcccagaatgtcggaggtgatcagaatgctggaaggggacggtctcgcggagaaatgggaggcatcacagaacgtcgacacaccgaaatccgtttcgtcagagcttctacccccaaaattcatggattttgcggcagacgaatcctcccttggcttggaagccatggagctctctggaccgaggtgatcggtgtcgatattcgttctttgcgacaaatgtgtttgatttgattagagctcttgagccgcccaactaagggggatgagaattttccaaattgagtagagccatattgttgtctatagccgaggtggtattcatttgtacatacagtaagcattatgtgaggtgagcccatccttgttgcacatctataggtggcaaagagagatgagattgatgagcaaatatag

SEQ ID NO: 2450 - DNA, 692 bp, Oryza sativa
  ref <308>: DATABASE ACCESSION NUMBER: AK060283
  ref <309>: DATABASE ENTRY DATE: 2001-12-06
gatgcgaatgtaaatcccaagaaaaccactgtgttgttcagaggctattcagcatcccatttcagtggtgggcaatggaattcaggtggtagctgtgacaaagagacagaaccaataagaaatgaacagtacctgtcaacctacccaccaaaagatgagcattttagaggatgtgatccacaagatgaaaactccagttgtttacttgaatataacaaggatgactgactatagaaaggatgcacatccttcaatctatcgcaaacggaacctgactgaggacgagagaagatcaccagagagataccaggactgcagccactggtgccttcctggagtaccggattcctggaacgagctgctttatgcccaacttttgatcaaacagcatcaaatgctccaacaataaaggcaagtatggggttttctggatgagggtgcttgtagttgtatatgaactgttcgccatgataataatcaacacgattaccaaaagtaaggtcgatagagacctagggattttgaaatccctatagagagtaaagttgccagttgatgagatctctcaatacgcacacaaattcttgtgttagaggcttctaggacttcatattgtaaagttcatgtgtagttctaatgagtaatagacaatagtatagatgctatgatataaaaattattccttttttggc

SEQ ID NO: 2451 - DNA, 1572 bp, Oryza sativa
  ref <308>: DATABASE ACCESSION NUMBER: AK060284
  ref <309>: DATABASE ENTRY DATE: 2001-12-06
aaatgatgttgaccacgcagcagttaccgtgcttgatcgctggaatgttgccatcaaagagaagaatggagcagaagatcaatgtaccaagcaagttaaatttatgactaattatataggtgttggatgtgatgccaaggttgcatatgacttccacactacgagagaggaaaaaccagataaattttgcagccagtttgtcaacaagctgatatatgctagagaaggcgctaaggatatcatggataggtcatgttctgatttaccatggcatgttagtcttgaagttgatggaaagaacgtcgaaattccagaggacgcagaaggtgtgattgttctgaacattcctagctacatgggcggtgttgatctttggcaaaacgacaatgaacatgatgatgattttggtttgcaatccatgcatgacaaaatgcttgaggttgtctgtatatctgggacgtggcatctaggaaaactgcaggtgggactctctagagcacacaggctagcccaagggaaagttataaggttgcatctccacagttcattccctgttcaggttgatggtgagccatggatccagccacccgggtgccttgagatatctcatcgtgggcaggtactttatctctctagatgaactagatacgcatggagagtttatatattatcttttttacacatgaagatgcttctttatgtactggtggaaaatgattttattcgcgctttgtgaaatagtctgtggttttcttgagaactataaggtagctgtgacttcaattagtatttccaaatttctgttgtatattatgtgatcttaaagcatcctattttgtgttagtcaaatcatgatatacaacctacaaagtggagttcattgaactgacaaccaacttcatgcctgtttcagcactctgcatctgatattcacatacacaatcatattgaagatgtatgtaaaacttattacaatggcccaactgacgatgtcttgctcttgtgctcagatgttcatgttgaggaggacatccgaagaacccaccgggcatgccgctgctatcatgagcgaggtcctcatgaatgcagagtgcaatggtgtgattgatgctgctcagaagagattgctccttcatgagatcgcactacgtttgtcctcctgacagtccagcccgtcccctccatctcttactcgccgtactaatgctgataccgaatccactcccttttgtgttgagaagttccccttgcacaggtgagaaaggcatacggtaggatgttacacagaggaaatagaagatttcctgttttcatgatttgacgtatacatacatagattaccttttcacactaggtgatctgcttctttgtttactgggctgtgggctcatcaaggtgagtattcaccagtttacgaagagttttgtagcgcgtagaaacactgttactgcatgtagggttcaatgagcattgtaagctgtatctagggtgtatcggtggcctatacaaaaggtatgaatgtaagtttaatccctcgttttttgacagaagaaagattgtggattttgttcc

SEQ ID NO: 2452 - DNA, 1512 bp, Oryza sativa
  ref <308>: DATABASE ACCESSION NUMBER: AK060285
  ref <309>: DATABASE ENTRY DATE: 2001-12-06
aacattaaaaaggctcgaaatctacttgcaaaaggtctaaaatattgtggaggaaatgagtacatttaccagactcttgctctgcttgaggctagagcagagcgctttgaacaagcacgaactttattccaacaagctacccaatgcaatcccaaaagctgtgcaagttggctagcatgggctcaggtagaaattcgtgcagaaaacaatgccatggcaagaaaactctttgagaaagcagtgcaggcaagtcctaagaacagattttcatggcatgtctgggcactatttgaagcagaacaaggtagcatcgacaaagcaaggaagttacttaagattggtcatgctgtgaaccctagggaccctgtgattcttcagtctcttgcactactggaatacaactactcatctccaaataccgcccgtgttttatttagaaaggcatctcaaattgatcctaggcaccaaccagtttggatagcttgggggtggatggaatggaaagaaggaaacgccagaacagcaaggacactgtatcaaagagctttgtcagttaattcaactaatgaatgtgctgctcgatgtcttcaggcttggggagtcctagaacagcgggccggtaactacaccgctgccagaagattgctgagatcttcactgaacataaattctcagagtgaggtaacatggatgacatgggctgcactagaggacgaacagggtgatccagttcgagctgaagaaatacggaacatctattttcagcagcgtaccgaggttgtggatgatgcctcctgggtcatgggcttcctcgacatcattgatcctgccttagacagcgtgaagaagctcctaaacatagaccagccttcggggcctgcaacacgagacaatccgaaaagcactggagagccaagcaatacagctaccgtccggacttctgccgatgcagagttttctggcggttcaagagcagaaggatcggacgcttcggaccttgctaacgccgatgacaaggagagcgatgacgctgcagagacaccagagagcgatttcgacgtggatggattcatcaggaggcggctagccctggacccggccgagctggacgcggtgcttgagggttctgatcccaggggagttgtttccaggaggaggacgcagaggttgcccaggaagccccttcctcttctccctgttccgtaaatatttccacttcagttcaacaatgcacatttgccgtctacgccgtgcgaagcatcgaccactaacagtaacaggtaccgtgactcgcgagatagttgaacatacatatctgtgtatatctctcagaagaagagcgcggcggctgccattagcagccacatgtttgttactagagttgttattggtccacccaggtgtatgtaattctatcattcttcaggagcagtgtatctgtgtacataagcgcaatctatcaatttgtatgtgctagtgaagaattcaaaatctgcggatatcacttcaatc

SEQ ID NO: 2453 - DNA, 1719 bp, Oryza sativa
  ref <308>: DATABASE ACCESSION NUMBER: AK060286
  ref <309>: DATABASE ENTRY DATE: 2001-12-06
ttgtaaacaacccccgggtcgtcctccatgccatgtgccttctgttaggttttgacgatgagatcagctgcgcgtttgttcagacgccgcagaaattctacggtgccttgaaggatgatcctttcgggaaccagctggaagttagtttgatgaaagttggacgtgggattgcagggcttcagggcatattttattgtggaacaggctgctttcaccgcagaaaagtcatttacggcatgaggacagggcgagaaggcaccacaggttattcgtctaacaaggagctccatagtaaattcggaagttcaaataattttaaggaatcagccagggatgtcatttatgggaacttgtcaacagagccaatagtagatatatcaagttgcgttgatgttgccaaagaagtagctgcctgcaactacgagattggcacatgttggggtcaggaggttggttgggtctatggatcactgacagaagacgtgttgaccggacaacggatccatgcagcgggttggagatccacgctgatggaaatcgaaccaccagcattcatgggttgtgcaccaaatggagggcccgcctgcctaacccagttgaagagatgggcatcaggttttttagaaatactcatcagtcggaataacccaatcctcacaaccacatttaagagtctccaattccgacaatgccttgcatacctgcacagctatgtgtggcctgtgagggcacctttcgaattgtgctatgcattgttggggccttattgcttactatcaaaccaatccttcttgccaaagacatcagaagacggtttctacatcgcattagctctattcattgcctataacacatacatgttcatggagttcatagagtgtgggcagtctgcacgtgcatgttggaacaaccacaggatgcaacggatcacctcagcttctgcttggctactggcatttcttaccgtcatcctcaagaccttaggcttctccgagactgtgttcgaggtcacccgcaaagacaagagcacatcagatggtgattccaacaccgatgagcctgagccagggaggttcaccttcgacgaatcgacggtgttcattcccgtgacagcacttgcaatgttaagtgtcattgcaatcgctgtaggagcatggagggtggttttggtgacaacggaaggcttgcccggtggccctggtatcagtgaattcatctcctgtgggtggctggtgctgtgcttcatgccattgctgagaggtctagtgggaagtggtcgatatggcattccttggagtatcaagatgaaggcctgcttgcttgttgctatattcttgctcttctgcaaaagaaattaattgcagctggtgtgcagcaacaattagtccatactattatttgagcatgcaaacactaggtttcatcttcatattattatgtccgcaaacgttgactaagctctagaaaagggaacaattcaatcactaattcgaagcaaaaactggttgtttactgtaagagagaatctactcgtccatggcaagttgtcccaccggtgcaaacttgatcttagtggcatatatatagtagatttcctcttattgtacggcctgtatgcatgcatgaatccttcaaagtagaagcattggagcggtcccgtgcaaatttattttcttggatggatctactattataaaaattgaagatgtttttgctgat

SEQ ID NO: 2454 - DNA, 1764 bp, Oryza sativa
  ref <308>: DATABASE ACCESSION NUMBER: AK060287
  ref <309>: DATABASE ENTRY DATE: 2001-12-06
aaaccatggcgacgcaagcgacggcgagagaaattgcggtggtgggagtgatcggcgcggggcagatgggctcgggcatcgcccagctcgccgccgccgccggctgcggcgtcctcctcctcgactccgacaccgccgccctctcccgcgccgtcgactccatctcctcctccctccgccgcctcgtcgccaagggccagctttctcaggcctcctgtgagcattccatcgagcagattaagtgcgtctccagtgtgcaagagcttagggatgcggatcttgtgattgaggctatcgtggagtcagaagacataaaaaagaagctgtttgttgagctggataagatcactaaaccttctgctattcttgcctccaatactagctcaatctctataacccgattggcttcagccactaatcgcccctgtcaggtttccctgatctccacgctgtcttttaatgctgctagttccttcctagactcaattgccaatcatatgcttacttgttacttttgtgttggtataacatattgttttggggcaacctcctggattgaaaaggagaatgcgcttgtttagaatttcatatcgggttagtgatgcacctgtgcgttaacttttgggttgcatttttgccagaagtttgtaaggtgggacagccagtggtggtgattagtattgcgttctgaatttaggtacagatctgtttacttcatttcaaggaaggtagaaaaggttattgtatatactaaagctaacttcaaaacatgctcttgaagatagaatgcaaatttggtggatatacctatcatgcatgctccgtttggttgcgaaattgtctgaacctccggtttacatgtctttcattttgtagttcgatttgtgtatcacttaaaacttgcctctgtttgaatgctcagatctttgggagtaataaatcagagagtttttcttgctgcaggtgattggtatgcacttttttaaccctcctccgataatgaaattgattgaaatcatacgtggggctgatacatcagaagaggtttccactaaagtcaaatctttctctgaaaggcttgggaagacggtaatatgctcacaagactaccctggtttcatcgtgaaccgcatcctcatgccaatgatcaacgaggcgttctgggcactttacactggagtagcgactaaagaggacattgatacggggatgaagctaggcacgaatcatcccatgggacctctgcagcttgctgatttcattggtttagatgtctgcctttcagtgcttcgggtacttcataatggcctaggagatagcaaatacagcccttgccctcttctcgttcaatatgttgatgctggccgacttgggaagaagcgtggacaaggcgtatactcgtataggacaaggtcttcatccattaaaccgaggtcatctctgtgaaaatcgatgtgcctgctgagcagagaaaagaatgctctttatggactttgtgtatcaatgtgaaaaaataagaaatgtgcagtttacaggtccaacataaacacctacaagttacgcctttgcaagttgcaacaacaggatactgcaggccatgtttgggctatgtaaacaaagtactcgggaaaaatggcggccgtgtgatgtaagctaatatgaaatgtatagatactgagcagatcatgccttaggacttctgtaatctcctatgcagaacttctcgcacggtttgcattttcagtcagcacatatacgcaccgg

SEQ ID NO: 2455 - DNA, 524 bp, Oryza sativa
  ref <308>: DATABASE ACCESSION NUMBER: AK060288
  ref <309>: DATABASE ENTRY DATE: 2001-12-06
gcatacattgtacatacaccagcagaggtcgagatcgagtaggttttagttgagatcgattgaggctgagcatcgtctatggcgccgccggcggcgagcacggactgggggccgatcatcgtggcggtgatcctgttcgtggtgctgtcgccggggctgctgttccagctgccggcgagggcgagggtggtggagttcggcaacatggcaaccagcgccatcgccatcctcgtccacgccgtcatcttcttctgcctcctcaccatcttcgtcgtcgccatcggcgtccacgtttacgccgcctaattacttaattacttgaacttcttcttcttcccgttctgcctgcttgtttggtcagttcttgcgagtagcattaagcaggaacaggatgtgcatgcgtatatttgtatagtccttggtgaagagaaattaaaattaccgtttgtttcagcctgtgtgtatttacagaacagcggcggacgcaactttaaaatatagatgggacgaagaacgatttgttc

SEQ ID NO: 2456 - DNA, 1717 bp, Oryza sativa
  ref <308>: DATABASE ACCESSION NUMBER: AK060289
  ref <309>: DATABASE ENTRY DATE: 2001-12-06
aatgcgaaagaatcgttggaggaacagctatattcagcaaacactgaagtagagagattgcatgtcattgtcaaagaactggaggatgaggtagaaaaagagaagatgaggcaggaagaactcgtggcagaattagaaatgaagatggaaacagctgtcgaggctattaaagaatcattggaggcacaactatgtgcagcaaacactgaagtagagagactgaatagcatagttcaggcactagagaacgatatagaaaaagagaaggcgctgcataaagaactgacagcacagttagaggtgaagtttgaagaagagaaagctcgttctgttcagactgttaaggaatcaatggaggcacagctatgctcatcaaacaccgaagtactaaaactgcgtgacattgttaaagcactagaaaatgaggtagaaaaggagaaggcactgcatgaagatctttcagcacagttggaggcgaagatcgaagcagagagaactttttctgtggaggctattaaagaatcatttcagtcagaactccagtcagtgaactcagaagttgtggagctgcgcggtatggtgactgcacttgagcatgaggtggtaaaggagaaaacattttctgcagagctccaaatgcagctagaagctctggaggcaataaaaagggtgttggagtctgagattgagtctgcacatcaggataacagaaagctcaatgataaggtgaagtcttttgaagcaaaactgaaaaaacaggtgtcttcagcggtggacttcacagccaaggaagaagccatgcagtcagagagaagggccatgaagcaacaacttgaagcagcaaagatggaagttggaaagctgacaaacaaggtgagcttgctccaaggggaggtgttacaggagagattgttatcagaagagttcgaacaagaataccacaagctggaggctcggctgtcaagggatagccgggacgcgaagctctggcgactcgcaaattcaaatgggggtctgaaggccaagcaggagaaggaacttgcaaatgctgctgggaagctcgcagaatgccagaagaccatagcttctctcggccgtcagttgaaatcattgaccgacatcgacaatacgattgtggagcctgagagactggaacccagagaaatcagagaaatgccgctcgattttagaaatagtgatgctgactttgcagtatttgcagatgagttatatgattttgatcttccaaaggtcaacagcagctgcttttcgccgttaccgtcgatccagccctcttcgccaccttcagaaatgtcagtatttgcagggggcctgtcttcacttagtagtttcagaagcaaaagaagaaagtaaagagctggtgaaaacaaactgtccagatgctactaacagttcatggatgctctcatctgtaggtagatcagtgtacatttacagaaactgattgtagattctgtgtgctgaattccgttccagcaagctcagtttttttttcacagccttcttgatgagatttttactgtatcagtgttggctgttttggtgccagaaaaaatgggaagaaaaatgtaaactcagtatcagtgtgagactgcagaagtgcagatacattgtggtgtatttgtgttgtgcggcttatacttgctgtgtgaattgtgatctccatattaccaatcatacttattctgcctgattg

SEQ ID NO: 2457 - DNA, 1056 bp, Oryza sativa
  ref <308>: DATABASE ACCESSION NUMBER: AK104281
  ref <309>: DATABASE ENTRY DATE: 2002-08-28
aaaactcacactcgctcgctcatcgccatctctctcagctctcacagctcactgcatcaatggccgcggccaccatggcgctctcctccccggtgatggcccgcgcggcgccgtcgacctcctccgcgctcttcggcgaggcgcggatcaccatgcgcaagaccgccgcgaagcccaagccggcggcgtcgtcggggagcccgtggtacggcgccgaccgcgtcctctacctcggcccgctctccggcgagccgccgagctacctcaccggcgagttcccgggcgactacgggtgggacaccgcggggctctccgccgacccggagacgttcgccaagaaccgggagctggaggtgatccactcccggtgggcgatgctgggcgcgctcggctgcgtcttcccggagctcctcgcccggaacggcgtcaagttcggcgaggccgtgtggttcaaggcgggctcgcagatcttcagcgagggcgggctcgactacctcggcaacccgagcctgatccacgcgcagagcatcctcgccatctgggcggtgcaggtggtgctcatgggcgccgtcgaggggtaccgcatcgccggcgggccgctcggcgaggtcgtcgacccgctctaccccggcggcgccttcgacccgctcggcctcgccgatgaccccgaggcgttcgcggagctcaaggtgaaggagatcaagaacggccgcctcgccatgttctccatgttcggcttcttcgtccaggccatcgtcaccggcaagggccccctcgagaacctcgccgaccacctcgccgaccccgtcaacaacaacgcctgggcgtacgccaccaacttcgtccccggcaagtgaagtgggggaccgtagcttagcagtggttaattgtggttggatggatttgtggccagcgagttcgttgtctttgggttggggaagatgggtttagtgcgacgagatgatgatcgagttggtgttgtgtacactaagaagatgaagaagaagatgatgtttttgcaataatgattttattcgtttcccaaaaaaaaaaaat

SEQ ID NO: 2458 - DNA, 527 bp, Oryza sativa
  ref <308>: DATABASE ACCESSION NUMBER: AK060290
  ref <309>: DATABASE ENTRY DATE: 2001-12-06
atgttcaaggagggcgacctcgtcgacatctccggcaagtccatcggcaaggggttccaaggtggcatcaagaggcacaacttcaagcgagggctgatgacccacggctccaagagccacagagctctgggatcgatcggtgccgggacgacgccgggtcgggtgtacaaggggaagaagatgcccgggaggatgggaggaaccaagaccaagatcaggaagctcaagatcgtcaagatcgacaacgacctgaaagttgtcatgatcaagggcgccgttccagggaagcccgggaacctcctccgcatcgctcctgccaagatcgtcggcaagaacatccccaagaactagactatttttctcatgtgtttcgtcctgttctgtgagatttgtgatctgttgtttactgaattactgtaaattggagatgttctttgcccatgtccaggttttgtatacgcgtaactttgaatttcgtaaagctaattttttttctactcaatcttatcgatctcccgttctcagtt

SEQ ID NO: 2459 - DNA, 1497 bp, Oryza sativa
  ref <308>: DATABASE ACCESSION NUMBER: AK104282
  ref <309>: DATABASE ENTRY DATE: 2002-08-28
accacaccaccaccgatcccctctctcagcggctgcctgcctgcctgcctgcctgaacgaggaatcgctcatcgctgcatcactgccgcagacgccggcgtggtcgggatggggcggccgccgagcacggggggcccggcgttccggttcacccaggcggaggtggccgagatggaggcccgcctgcagcagctcaacaacgccatcccgcaccgctccgtcatccaggccctcgccgacaagttcacctcctcccccgcccgctccggcaaggtcgccgtccagcccaagcaggtgtggaactggttccagaaccggaggtactcgcaccgctccaggagctccaggggccccccgacgctgatgcagaccaagatgctgcccacggggtccgacgagcacaagtcgcctcccttcagggctatgccctctgcctctgcgcactccggctcgccctcagggaagggttctttggagagcggccaggttgaatttgaagcaaagtcggctagagatggcgcatggtatgatgttgctgccttcctgtctcatcggttgttcgaatctggtgatccagaagtacgagttcgcttttctggatttggagccgaggaagatgaatggataaatgtccgtaaatgtgtgcggcaacgttctcttccgtgtgaatcaactgaatgtgttgctgttcttcctggagacctcatactttgctttcaggaaggcaaagagcaggctctgtatttcgatgcttgtgtccttgatgctcaaaggcgtagacatgatgtacgagggtgtcgctgtagatttcttgttcgctacgatcatgatcactctgaggaaattgttccactgaggaaggtatgtcgccgaccagaaactgactacaggcttcagattctgcatgctgctagagcagcaggtatggctaaagaggctgtggttgacttggtgtcgcacaatgataagagctcagcggagcagaaacccccaaagcagcacaaaatgatggatgtgaacactgatgaggtaaccatggtttctaaccaagaccaagaagagccaacaggcaagcctgctgctaccttgccagcagcaccggtcaaaaccctgaatgattcagcttcagcttcagcttcagatgtccaaatgggcgaggcacaggctgctccaaaagttgaatcttctgatgaagtagaagacaagatgaaagagggatagttggttgcctttgctgagcattatgtttggctggcggctgcagtaaacagcatctggttaaatgcattggcatctgatcacctgttctcctgctaggctgctacacacatgttgtgacttccaacgcaggaatgtatgtcttcagtcttcacaacacatgttgtgacttgtgaagatttagtaattgcttaggaaccctctcaaaagggtaaatatgattgttaggaactttagctccaaacataaattgattgcataggaactttagctccgaag

SEQ ID NO: 2460 - DNA, 365 bp, Oryza sativa
  ref <308>: DATABASE ACCESSION NUMBER: AK060291
  ref <309>: DATABASE ENTRY DATE: 2001-12-06
agatctgatgtgccatcagttgaaagcattgccatctcgctgctgtcaagctgactctaactcatacatacatctgacatgagaatttttcaccgagagtagatgaaaggctgcaagcactttgagctagtgaacttcgttcaaccaaggcaggtgcatgacagttgaggtttctggtgcagctcaagggagtggagtgagtgatagtagatagatccctgtagttttgtttttcctttgctgttgataggtagaggtgttgtatgttcattctttggaaatatctcgtctttgtgccatactgtcaagttccagaaacccctgggaggaaaaaaaaaagtgctcgaccaccatttgagctgtct

SEQ ID NO: 2461 - DNA, 1726 bp, Oryza sativa
  ref <308>: DATABASE ACCESSION NUMBER: AK060292
  ref <309>: DATABASE ENTRY DATE: 2001-12-06
gatgtgcaggaagccactcgagagctttctctttctgtgtgtagtgtgtgcaactaggaggcttgttccatactagtttgctaggtcatggaagagagcgagattttcgtaggagcacactcatatgcagctatatgtgcttttacactcatcataggatggttagctcactgggtatacagacggataaatcctccatgcaatgggaggcttcctccgggctcaatgggcttccctattgttggtgagaccttccaatttttcagaacaagtccatcaatagacatgccaatttactacaagcgaagactggagaggtatggacctatattcaaaactaacataggaggccagcacgtggtcatatcccttgatcccgaggtgaaccagttcatatttcaacaagaggggaagttgttccaatcctggtttccagaaaccacactaaacatctttggaaagaagacactcaccacgtataatagaactgctcacaagttgatccggagcttcgtatgcaagctctatggccctgaaaacgtgaaaaaatcactcctgccagaactagagaactccatgagggaaagcttggcgtcatggataggaaaacctagtgtcgaggtgaatgatggcgtgtcaaatatgatcttcggcctagctgccaaacatttgattggcctcgacatcaccaattcaggagaattgaaaaagaactttcaggaaatatttcaagtgatggtttccatcccattcccaatatattttccagggacctcgttttaccgatgcatgcagggtaggagaaatgtatggaccacattaacaaatgtaatgaaaaagaggctaagtgcacctggaaacaaattcggcgaccttgtcgatctgatagttgaagagctacggagtgaaaatccaacaattgatgaaagttttgctatagacactctatctgggctcttgtttgctagctttgcaccgctatcgtgcaccttgactacaacttttaagttcctcaacgacaatcctgaagtttttgacaagctcaaggaggagcacgaaatgatactgaagaaacgagagggtgcgaattctgggttcacatgggaggaatacaagtccttgaaattcagtactcaggttgtgaatgaaattaatcgaatcactacggttatacctggtggtttcaggaaagcactaacagacgtgcaagtaaacggatatacaattccgtctgggtggctagtcatgattagccccatgggagtgcatctaaacccaaaattgttcgagggtccactcaaatttgatccatggagatggacggaggagaagagaatctcgatgcaaaggaatttcatgccatttggaggaggaatcaggatgtgtcctgcggcagagtttaacaagctttttatcacactctttctccacatcgtggtgaccgagtatagatggaaggatatcgacggagggaatgtaaagcgtatctccgaggttttggtcgctcaagagtatcatattcaactagttcctcagacgtaacatacctatgggatattcatctataaaaaaccaagtgtcaatggatcctacggagctattcgtacatgtacttcaatattttcatcatatggtcctcttatgtgtgtgtgtgtgcaagtttgaatttccatatattgttccatacttccattaaagtctcatatgattttcctcgaatttgatg

SEQ ID NO: 2462 - DNA, 1808 bp, Oryza sativa
  ref <308>: DATABASE ACCESSION NUMBER: AK060293
  ref <309>: DATABASE ENTRY DATE: 2001-12-06
ttataaggagcatgagtgtttggtagaaggacctttgaacaacttaaagcagagtatggtgcaatttcaaaagccaaaaaagatctacaatgatcgacgactcttcctgggtggcggtcaaggtgttatgcaaggagctagttttggtgctgcaggcacaaacccagtggcagataagagaagtggtagggggaaagggcattcctttgttccatttggcccaccaaatggggctcataaacctggtgtgcacccatctggctatcctttacctcgtatgcctttccctccatttgctggggctcattctcaaccctatgctattccaacccggggatcattgcacggaccgattggagctgttccacctgtgcctcaacctggaaacagaaactttggacctcgtggaaatactggtggccctattggtgggcaccttgctcaccaacagagttctcagcaagctatgggaggcatggggtcagcttttaactttcctggcctggagaatccgagcagtcagccttctggtggaggtccaatgtcccagactggattgatgacacaggacttctttggagatgatttcaagagccaaggatctcatgtggcatacaacattgctgatttttccactcaggcttctcaaggaggctatggtgttgactactctcaaggaccccaatctggatatcctgggaattatttgaaccaaaatgcacacccagggtattcccatatgggtgcagcaaatgacattgtctctcaggatcacatggcccatggttcacatggaatgtttacacaagcgggatacaatgactcttcacaagatgagtcatcacagatgcattttggaatggctggtcctggtcttcagtctcagcccatgatgaacccgctctactctcagtcatatgctcattacaacacccaaccgcagtctctccaacctcctccccagtgatcaggaaagcttgtgatataattgctgaagccgcattaagttttggaagtttgatgggttgtatccttggcccacagcagcttggttgtgcctttctgcactgtaatgcagaaacgatggtgcatagacatcagttgcaagtattgggcacaagcatatgttggagcactacatggatatttattgaggcaagctttgtacaagatggctatggctgtcgaccattgaccattgctgaggagcacaaggattgcaacacatctctttcttgtcatggtagttcacagtggggcttgacaacaagaggtggcaacttgtgcactgagagatgctgacgacgctacccacatcgcttcacctgtatagaagacaaaatggagcttatagtggtacgatgtcaatacttcaggattggctggcgccgtgaagtctaaggtgcagccgctatcgcctgcctccatggtaccacgaaaacgcttgcagattggctttgtataggggtatagatggggggtggccagccctttcagaactctcgcacatggccattatatttatctgaacattatgtatgctttctttatagtttttgatatttaggttcacagaaatgatgtttggtgatcttgcctgaaagaacgaatgctagagcttgtagtcattgatggagatcgcgtgattttcttttttggatcagctgtcattttatggagctggctggatgctggtaaacccgtgatgggttttctgcgtggttgattccacaaccgtgagagcaaatgttctgtcacatgttttgataatactatatttggcctgtgttctgctgcgattgtttttc

SEQ ID NO: 2463 - DNA, 1639 bp, Oryza sativa
  ref <308>: DATABASE ACCESSION NUMBER: AK060294
  ref <309>: DATABASE ENTRY DATE: 2001-12-06
aatcagaaggccagaccacccccaaaacctcctcgttggccgtccagtgcggcggagagagagagggagggaggaaggaggccgccgcgcgatggggggcgacctgtacgcgctcgacttcgacggcgtcctctgcgacagctgcggcgagagctccctctccgccgtcaaggctgcgaaggtgaggtggccatgggtgtttgagcaggtcgacgctgccatggaggagtggatcgtggagcaaatgtatacccttcgcccagtggttgaaacaggatacgagaatctgttgcttgtcaggttgcttattgagattcggataccctctgcccggagatcatcggttgcagatgggcttagcatccaagaaatactggagaactggttaaaactgaagcccacaattatgagtgaatggaatgaagatagggactctctagttgatctctttggcagcataagggatgactggattgaaaatgacttgtctggttggataggtgctaacagattttatcctggaacagccgatgcattaaaattttcaagttcagaagtctacatagtcactacaaaacagggccgatttgctgaagcactattaaaagaattagcgggaatagaatttccctctgaaaggatatatgggcttggcactgggttggtgcagtattttttttattttttattttcacctgttaatcattttattgaatccgtgagtttatgctccagtccaaaggtaaaagttctccagcaactgcagcaaatgccacagcatcaaggcctgacacttcactcctgtgcttgcgctggagagctggccacttccccagtccccactgctgctgacctccgactgatcctgcacaagcttcactctgtatgtgagcttctgcggatggcgatggaagggaactatgtggcggcaatggggatgcgaaggctggagaactccatgaccttgatgccttgatggtaagcgcactgctggacaggatgaaggctgtgagcttggaggcggaggagctgttgctggtgcctctagtgttgatgaggaggttaggccattgggtttcaccaggtaggaatggacgggcacatgaggccctatgtgggtcttggtgagcaataattgagctggcgtcggctcagctcaggctctgatggtgttgatcaagctccactgcaaccaccggacagcaatggtcctgcttcgctaatcgtcacctcttctttctagaccgagctccaagtaactttcttccccttggcttgagctccaccttggtcagccaggttggaagcagtcaagcacatggaagccagaggtccacagtgccagcccaatggctgtgggtaagccaacaagaggaggttcagtgctggaggaaggagaagagtaaacttgatattttgctagggtaaatgttattagttagtgaaaggatttgcaccaaattatgtggcaaaagagcaaagccgatgaagtgtgtggcaaatataagtacgccactgacctttgtggcaaaggagcaaatttctcaaaagaacgatgttcccttgtcagatgacaataactttgtaaatcatattttgaactatttagatatattgtttacaaatgtataacatggac

SEQ ID NO: 2464 - DNA, 1198 bp, Oryza sativa
  ref <308>: DATABASE ACCESSION NUMBER: AK060295
  ref <309>: DATABASE ENTRY DATE: 2001-12-06
aacatctggatcatccaaagaaaggaacagctgcaacttttttggtcagaaaatggctacaggtgttctgtgctccagggaatttgctctctgcctggcttgtgtgctcctggccgtgccattgctagtggctcaggacccttcaagcctgagcttggagcactactcaaagacctgcccgaattatgagcatgtcgtccggactgagatggaatgtgctgtgcgtgcggattcccgcaatgcagctctgatgcttcgtcttcatttccatgactgtttcgttcagggttgcgatggatcagtgctgcttgacgacactgcgaccctgattggagagaagaaggcagaacagaatgtcaactcgctgaaggggttcgagctggttgacaagatcaagcagaagctggaagctgagtgccctggaacagtttcctgtgcagacttgcttgccattgcagcgagggacgcagttgtgctggttggtgggccttactgggatgtcccagttggaagattggactccaagaaggcaagcctggacctagcaaacagggacattcccactgctcaacagggccttgtcaccctcattgccaagttctgggagaagggcctcgatgccactgacatggtagcccttgtcggatcccacacaatcggattcgcccggtgcgccaacttccgggacaggatctacggcgactacgagatgacgaccaagtacagcccgatctcccagccctacctgagcaagctcaaggacatctgccccctggacggcggcgacgacaacatcagcgccatggacagccacaccgccgccgccttcgacaacgcctacttcgggaccctcgtcaacggcgagggcctcctcaactccgaccaggagatgtggtccagcgtcctcggctactccacggccgacaccgtcagcaagtactgggccgacgccgacgccttcttcaagcagttctccgactccatggtcaagatgggcaacatcaccaaccctgcaggtggtgaggtcaggaagaactgcagatttgtcaacacatgatcatatgcatgctcaatcaaaaggactgcacatttgttctttttaatttgatggctggcttgtcctagatagaaataagaaatgctttgatgatgaggcccttgtactggtacatataatacgcgttgttgtcattttgtc

SEQ ID NO: 2465 - DNA, 1720 bp, Oryza sativa
  ref <308>: DATABASE ACCESSION NUMBER: AK060296
  ref <309>: DATABASE ENTRY DATE: 2001-12-06
cttgtatctatgtaggacagcacgagagagatgctgcagtccaccgctgccaccgacggagccggccgtggccagagccgatgttgcccccagtcgctgccgaagctgaggtcatccccttccgccgccgcactccaccactgaccccgctggagccgaggtctgccagagccgtgctcttccccatccgccgccggagccgatagcgtaatgttaatcatattttcatattgtgtgaaatattttgttgtataaattaatgtatggagtcatgagcaatatgctctagaaatacatggttatgatgctaccttcaacttgctgctgctggcctgatcttcccttggtgatgaacaacaggatacatgggagaatggctctgccagccaacattgttgacaaggacaggtaaatcagattcactatgttgcaacttcaatccaaaaatattatattgcacacacaattcacatatggtaaatcaaattcccttgccgccgccgaactccaccgctgccacaggttttgcctcggaggtgttcgactgaatgccactcaaccaatatggtttctatttattcctaaccattgcctcatatattttattgttcataggtctatctatctccttacagtggagggatacatcgttgggctaggactaacagcttgcggcttgttcaccattcagctttaagaaaatattgtacatggtttatccagttgacgatgatacatgttggttggttttcatactactttagttgttgctctattaacctccagggaagatcaaggaggttgttcctacgaatacaaatcatgctcagacgctattaaatcagccactgattcacatattcacaaagcttattttacatgggtacatactctctagcattattcagcaaactatcttttggttgaacagagactattgatgaggctcttcaagacctggatgattgcctaacaattgtgattttgtttacaactactaggagatgatggtgtgtgaattgagaatccttaattgtcatcggttcagcgctataaactcccctataaaacttaccatgaggcatattttcaagaatttatcatgagtttaactctcaattgttcgcaatgctagcacaggtgcagtaatgacatatgacaatgaagatttgattcggcaatggaggcaaatgcagtccttttcccttcccgtacctaattcgtatgctttctatttaatccttgcaattgcctcagaagttgaatgaatctaatcttgttttcttcctaggctcctcggttatcttattggtttgttgtttgcttgttaggactgagttgacgacaaatcgaactgaagaagaatttgtgggcgaaaagtgctactggtactgttattaagtgttttcagtcgtttttcaccgatcgatacctattcagtcattgatttcaatcttgatggttttccacatgtacttttagcatattgtttcttgcatgtgaccttctttatgattgtattgcacaactacattcttcttgtgagcattcatttatccaattctcaagaagtcaaccaggctcctgtttttaatttatttctacatatctgtgtatttatgaataattgttccaattcttatttggttaccactgcttcaatctttttcaattttaaaaatgatttgactaaggtaagggcactgagattttggaaaac

SEQ ID NO: 2466 - DNA, 308 bp, Oryza sativa
  ref <308>: DATABASE ACCESSION NUMBER: AK060297
  ref <309>: DATABASE ENTRY DATE: 2001-12-06
agctgcactcgttcgactggcggctccccgacggcgaggacaaggtggacatgtcggagacgttcggcctcgcgctgcccaaggccgtcccgctccgcgccctcgtcacgccgcgcctcgcgccggccgcctacgcgtgacggccggccggcgacgacgaggacgacgccgtgtatgtgatcgatcgagttcgccgcggcggcggcggcggcggcgatctgatgttgcggttgtctgtacgtaaatatatttttcgtttgttggtttcgaaagcaaaacacaattaagaacgcccaaatattgcaagc

SEQ ID NO: 2467 - DNA, 1537 bp, Oryza sativa
  ref <308>: DATABASE ACCESSION NUMBER: AK060298
  ref <309>: DATABASE ENTRY DATE: 2001-12-06
agaggaagaggttaggattcttgaacgttctgtggaagaacttgaatctactataacagttctggaggaagaagtatgcaaccttaaagaggaagtgaggagctatcaaatatataaaaaatctgaagctgaacaagctcaagagatgttcattgtagatagcacatcaaaatgtgatgctacagagcaattgtgtccagggagatgccaattagaaaagaggttgaaagcggagattattgcacatcaggatgctagaagaaagattgaatgtctcacaatggaagctagttgtaaagatgaggaggtaaggcaatacaaagagcacatagctgagttggtcctgcattcagaagcacagtctttgctgtttcaggagaagtatcaggaaatggagcacatgatttctaaacagaagtttggtctacatgaatctaattctgatactggccataccaaattcgaaaagccttcaggacggactagaggatctggttcacctttccgatgcatatctagcattgttcaacagatgaactctgaaaaggatcaagaaatctcagtggcacgccagagaattgaagaactagaaggattggtttgtaataaacagaaagagatctgcatgctaacatcaagactggccgccgttgatagcatgacacatgatattataagggagttacttggtgtcaaattagacatgacaaactatgctaacatgcttgatcaggaagagttgcagaaattgctaatggcttcccagcaacaaattgaacagtcaaaggcaaaggatgtggaacttgacatgctaaaagaacaatttgatcatctcattcaagaaagagacagcttgtttgatgatatggaccaaagaaaggcggacttgttggagagccaactgctcatagaacagcttgagcaacgggagcaaatgcttgaagcccagaacggaattttacagatggagaaagataaccttcaacagaggatcatggaaatggacgaggaaatccaattgctagttggctcaaatcaagcgattgctgagacaacgttccaaatggggagcaaccatcgttccgccaacagtgaattcagcaggaggctggctcaatcggatatgcttctctcccacgcgagacatgagcattcacgcttgcaagctgctaaaagctccaggacgcgtcgtggtagtcatcaatgaaggctggagcggaacatgaatcagatcagacacttcttgtgtctgcagcaccacctctctgacgctacaggcctacttttttctgaagatgtagggttaaaaatggtgatgactgcaagaaacattgtatatgaggtacatccatccagtgtatttatgatttgtgcagatttccgtcgtatgtacagtactaccgtacatggtagcaacggcttattgaaacttttctccaacgagtgagtcattgagggggtgtttggcccctttcacagaaccataagtctctaggggagggaattatacttttatgagagagaccaaagtttaatc

SEQ ID NO: 2468 - DNA, 1102 bp, Oryza sativa
  ref <308>: DATABASE ACCESSION NUMBER: AK060299
  ref <309>: DATABASE ENTRY DATE: 2001-12-06
aacgactccgtcaccaagagcaagtttgacaacctgtatggttgccgccactctctccctgatggtctcatgagggctaccgatgttatgatcgctggcaaggttgccgtggtctgcggttatggtgatgttggcaagggctgtgctgctgctctcaagcaggctggtgcccgtgtcattgttactgagattgaccccatctgtgccctccaggcccttatggagggtctccaggtcctcaccttggaggatgttgtctcggaggctgacatctttgtgaccaccactggcaacaaggacatcataatggttgaccacatgaggaagatgaagaacaatgccatcgtttgcaacattggtcactttgacaatgagattgacatgctcggccttgagacctaccctggtgtcaagcgcatcaccatcaagcctcagaccgaccgctgggtcttccctgagaccaacactggcatcattgtccttgctgagggtcgtctcatgaaccttgggtgcgctactggccaccccagttttgtcatgtcctgctcattcactaaccaggtcattgctcagcttgagctgtggaaggagaagagcactggcaagtacgagaagaaggtgtacgttcttcccaagcacctcgacgagaaggtggccgccctccacttgggcaagcttggtgccaggctgaccaagctctccaagtcgcaggctgactacatcagcgttccagttgagggtccctacaagcccgcgcactaccggtactaggctgcccagcacgactagcggctgtggcatgagaagtgtcaacttgaagttcgccatgacgactctggagtatcctgctttgttttcatcatcttatatgccgtcacttaggaggatttgttgtggggtttatggtttgagactggtgaaggggaggaatgggaagccgtttgcttttgcccagaaataatggcgtaattgggtggagttggggaggtgtgctttggcagatacagttttgtcttgttgactctacttatctgatatcatttgcaagcgttttgataaaaatcatgcgtcatttatgaataatattcttgcctttaaagat

SEQ ID NO: 2469 - DNA, 1241 bp, Oryza sativa
  ref <308>: DATABASE ACCESSION NUMBER: AK060300
  ref <309>: DATABASE ENTRY DATE: 2001-12-06
agaaggtttcaattttggtaggaacaccatctcaagtgcttatttagcagatatttgcttgtggcgagacagaaattggccctgtttgtgcaactaattcctttcttctgtaaccaagacagttcgcatttggcaaaagagcgagggtggaaaatataattgcatccacacattgaaagatcatactgctgaggatattccgccattcgccaccatggctaacatcagaaccgtctccagcctcggggaggtcaacggtgccctgcaagagatgggtatcaatacgattgatcaagctcatcaagttcaatttcgtttacacaagcaaacatcccttaaagaagcaacagaaataaagatgatgatccaaactggaaggcatggattcaggttggttaaccctgagcttttagattgtaagtttgatgccagggttaagctagaggagtggtacaataccatgctcgacgcatgcatggcacagtgtgatcatgagctgttctcgcttgaagctagcattgcggagctaaaggatctcatgctttccacagacgatcagattccacatattggacctgaagttcaccacaggaaccgtggagtgcaacaaatgctctacccaaaccctccattcccgatcgatcctgattatgagtttggtactccgcaacaacgagtcccatatcaagcggcatacactacagatgcagagagaaatgacgcagtttctcgtgacaagcgtgctcagagggcggtttggaatactaatctccgtcttctagaggtgaagaaatccgccctggagaagaagaagactgagctggagagacgcctgaaggcggagttcaagaaagtgaatgagcagcaatctgacttgggggttggatatgcgaactaccagtctccttaccaggcataaagaggagcatccgtggtgctgaggttggtcaggttgcacagacgaagatggtggtggcatgccattgccgggcgctcatggaacctgtggggcatgtggcatgccattgccgggcgctcatggaacctgtggggcaaacatgccccatcaagccactagctagtgtcatgcttgctacccaaccattgcaatatggtgttggctataattcttcttgtcacatcccacaagtttggatgataaataaaacttgggaaatgatgtacgaactaaaatgaacaagtacttttgcttataattttaaacttgtatgtttgtgcat

SEQ ID NO: 2470 - DNA, 655 bp, Oryza sativa
  ref <308>: DATABASE ACCESSION NUMBER: AK060301
  ref <309>: DATABASE ENTRY DATE: 2001-12-06
ctgctctcttactttcatagggacagactaatggtagctgcaaaacatgtttatgcagatagtttgtttctcttctttttgctgcataagacatgcttctaccgtgccatcaactgtcttacagtttacatctgctaccaaaatttctgcaaagtatgtaaacgatcgattggtagccgcttgtcatgtactgtcctgttatgcttaattagagaagaattgtgtatatgtttgtttctgtacttttgacatattgctatgcttagaacctgtcactgcttcagcttctggagatctgcactacaagtgtttatgacactcattttaccttatagtgccaacccacccttatcgatcatcattacactgatgggcatttcattatgttgagatgccaacactcagtgatgtatgattgttgggtggtcagtgcgtagccatgtttccttgtgagcatgtgtttacatgcatgcgttttttgagttagcaaggtagtttgcaagtgggcttttaactcaaggaaaatgctcgggtgattttatatcatggaatgcagtaatgcacatcttattttatttaatctcatttttctagtgatcagattgtttgcatatacagttatgcaaggtaatacaattttaatgtattttttctt

SEQ ID NO: 2471 - DNA, 1080 bp, Oryza sativa
  ref <308>: DATABASE ACCESSION NUMBER: AK104283
  ref <309>: DATABASE ENTRY DATE: 2002-08-28
aaaaaaaaaaaaaaaaaaaaaaaaaaaaaaaatcaccacacgcgcacacgacacgacgcaccaatggcgctcgtctccgcctcctcctccaccaccgccgtcgcggcgctccccggcgccgccagggcctcctccttcctcggcggcgccggcaggagcggcaggctgctgctgaggcaggccgagtcgtcgtccgcgcgggcgtcgttcgccgtgcgcgccgcggcgcccgacaggccaatctggttccccggcagcaccccgccgccgtggctcgacggcagcctccccggcgacttcggcttcgaccccctgggtctcggatcggacccggagagcttgcggtggaacgtgcaggcggagctggtgcactgccggtgggcgatgctgggcgcggcgggcatcttcatcccggagttcctgaccaagatcggcatcctcaacacgccgtcgtggtacaccgccggcgagcagcaatacttcaccgacaccaccaccctcttcatcatcgagctcatcctcatcggctgggccgagggccgccggtgggctgacatcatcaagcccggctgcgtcaacaccgaccccatcttccccaacaacaagctcaccggcaccgacgtcgggtaccctggtggtctgtggtttgacccgctcggctggggcaccggctcgccggagaagatcaaggagctgcgcaccaaggagatcaagaacgggcggctcgccatgctcgccgtcatgggagcttggttccaggcagagtacaccggcaccggccccatcgacaacctcttcgcccatctcgccgaccccggccacgccaccatcttccaggccttcacccccaaatgaggttcttcaggtgttggagtgttagcaatggctgccaatggaggaagatgaaaagactgttcgtcgacgcgacttacctctcttttttgggatcggagtaggctgtgaatggtggtggtgtattgggatgtaattgtggatggagcactgcatgccttgttgattgtgtacctgtactatgatgtaaccgatgtaaaaaacaagttgatactcttttagaaaaac

SEQ ID NO: 2472 - DNA, 1013 bp, Oryza sativa
  ref <308>: DATABASE ACCESSION NUMBER: AK060302
  ref <309>: DATABASE ENTRY DATE: 2001-12-06
gttattaagagcgaagctttcttcatatgcaattcaattggagggcttgttggtctacaggcagctgctatggaaccacagaagtgcaagggtatctttttattgaatatttcattgaggatgcttcatatcagtaagcagccatggtttggaaggcctttcatcaaatcattccaaagtctgctacggaatactgttattgggaagctgttcttcagcgctgttgctacaccagaatctgtgaaaaatattctctgtcagtgctaccatgacacatccgcagtgacagatgagctagttcagtttattctgcagccagggcttgaccctggtgctgtggatgtattccttgagttcatctgctactcaggaggtcctctacctgaagaattacttcccagagtgaagtgtccagttttggtagcttggggtgagaaggacccatgggagcctgtggagcttggaagagcttacgcatcttttgatactgttgaagattttgttgtcttgccaaatgttggacactgcccacaggatgaagcacctgaccttgtaaatccacttgtcgaatcatttgttacacgccatagttagcacatggctggggctgctttctctttgtattaaagcccctgacccactaaaatctggtttgctggaaaacgggaacaactattttatctcaggataccagatggtcccctctttgtaggccatgtacttgcatttgagtattggtgataacacacctgactgattgaatttcaagggatgacgaaggaatctgacttattggagggaacaaagaacctgtcttctcaaagcagaggggttagtaccagcagcatggaggttttattctgtttttaagttataacgaaaataatggcaagttcataaatgtgaaatttccactattctctctgcaatcattcttacttgtaatctgacagtatgtatatatatgccactagtattagcagtcccctcagtaaattaattctcttatggcc

SEQ ID NO: 2473 - DNA, 1253 bp, Oryza sativa
  ref <308>: DATABASE ACCESSION NUMBER: AK060303
  ref <309>: DATABASE ENTRY DATE: 2001-12-06
atcatcgtgttcgtttcctcgtcaaaagggcaaaaagaacacgaagaagaggggcgtccaaatccgccgccgaattccccacccgtcgcgtccaaaatccaaatccgccgccgcgatcgaggccgacgaggagaggttgaggttgaggtgagagccatggtgagcgccttcttcctgctgtgcgggtgcgtggaccaggcgagcgtcgcggtggtggagaagtggggccgcttcctccgcctcgccgagccgggcctccacttcttcaacccgttcgccggcgagttcgtcgccgggacgctctccacccgcgtccagtcgctcgacgtccgcgtcgagaccaagaccaaggataatgtctttgttcagcttatctgcacaatccaatatcgggttgttaaggaacatgctgatgatgcattctatgagttgcagaatccccaacagcaaattcaggcctacgtctttgatgtggtccgagctatagttccgagaatgaatcttgatgatctttttgagcaaaagaatgatgtggcgaaagctgtacttcaggagctagaaaaggtgatgggagattatggttacagcattgagcacattctcatggttgacatcatccctgatgctgctgtacgcagagcaatgaatgaaataaatgcagcacaaaggcttcagcttgcaagtgtctacaaaggagaggcggagaagattcttctggtgaagaaagcagaagcagaggcagaggcaaaacacctttccggtgtcggcattgctagacagcggcaggcgataactgatggcctgagagagaacatcctgaacttctcgcactcggtttcaggcacctcagcaaaagaagtcatggatctcatcatggtcacgcagtacttcgacaccatcaaagaacttggggatggctcgaagaacaccacggtgttcatacctcatggcccaggccatgtcagggatatcagcgagcaaatccggaatggtatgatggaagcgtcctgcagcaacgtgtaaatcggtatcgaatgcggaaccaaggttgggggtggttcagatgggaggtcctgtttatagtgaatagtacgaatgaatgctagtagcatgtgttgtttgcacgcgcgccctggagttgtatgcagtggtagatagagttcgagttttggcataataatattgtctgaattttatgtaaaagaaaatcacatgtcttccttttgtgagttaaaagttgcaccgatttatgc

SEQ ID NO: 2474 - DNA, 1574 bp, Oryza sativa
  ref <308>: DATABASE ACCESSION NUMBER: AK104284
  ref <309>: DATABASE ENTRY DATE: 2002-08-28
atcgatgaacctgaaatagacatggcttgccacttgagattatttccctttactcaactactagtattggttctgtacaaaatcgccgccgtaggggcagatcctgcaaacgcagaactatccacaaagatcacccaacactctccattgtacaacccacagcctcaagactttccaaacgaggagctctaccgcaactatctagtcatccagcggttcaagaagacaatcacttccgaccccaagaacatcaccgccacctggaccggccatgacatctgcggcaacacgacctacctcggtttctactgtgcagcattgcctgggcgtactaagaagcccacggtcactgtggtgatctttaacggttatggcctgcgtgcaccgaagctggaaggatttattgaccatctccccgatcttgcacttttccatgctgcctccaacgacttcggtggtgacatcccctacctcacaggcctcgcctacaactacaagatcaatgtcgacagcaatctccaaatacaggatgattttagtcgtgacatggtcgggtcgcatgtaacaactaaagttcatggttattgcgttaatttagatctagatatcacatttcacctccggcccggaaaagacgacaagaaaggacgaagcatccccggtgccacagattctaaggcgctcctcctcaactacaatcacctgtccgggccattaccggtgaacatcggtttctccaagttaagctacctggccctcgccaacaacaggctcaccggcgcaatcccgccatcaatcttgcatttgcaagactccctcctcgaggtgctcctcctgaacaaccagctctccggctgcctcccccacgagctcggcatgctcaccaaggccgcagtgttcgacgccggcatgaaccagctcaccgggccgatcccctcctctttctcatgcctcaccagcgtcgagcagctcaacctgggcggcaaccgcctctacggagagatccccgacgcgctctgcaagctcgccgccgtcccagccggccgcctcgccaacctcacgctgtcgagcaactacttcacgtcggtcggaccggcgtgcttgtcgctgatcaaggacggcgtcctcaacgtcaggaacaactgcattccgggcttcgccaaccagcggcggccggcggagtgcgcgtcgttccacagccagccgaaggcgtgcccggcggcgagcgccacccacgtggcgtgccccgccggagctgccaacgctgcggcggcgccggcggacagggtggtcaaggactactccagctacgtgacgtacgccaccctgcacgagtgagcccggcgccacggcacgggcgcacgacgtgcgtgcatgcatgcagtaggggacagctagaagctagcgtctcggggtggtatttgctcttgtattcttgtgttcgtttgttgtgctcgtgagtcgtcattgtggtttgttttctctgcacgtgtggctagctatggctgtcacgtctagatctcacctcctgtactcttgtgtactgtactatgtgaaaatcattggtgattact

SEQ ID NO: 2475 - DNA, 1130 bp, Oryza sativa
  ref <308>: DATABASE ACCESSION NUMBER: AK060304
  ref <309>: DATABASE ENTRY DATE: 2001-12-06
agctaccacgcgagccgcaagtacccatcgcctcgtcatccggagagactagctcccactttccagtctcccgccgccgccgccgctgttcactccgcaccaactccgacgatcccacggccgtgcggttccagcgccgggtgctcgccaccaccgcgctcctcaggaccgccgagctccggcccaaggagcagggcctgcccgagacgctcgactaccgcgtgttcctcgtcgacggcgggggccgcaaggtgtcgccgtggcacgacgtgcccctgcgcgcaggcgacggggtgttccacttcgtcgtggagatccccaaggagagcagcgccaagatggaggtcgccaccgacgagtcattcacccccatcaagcaggacaccaagaagggcaacctccgatactacccgtacaacattaattggaattatggattatttccccaaacatgggaggacccaactcttgcaaacaccgatgtcgaaggagcatttggggataatgatcctgttgatgttgttgagattggtgaaagacgtgctaacattggagatgttcttaaggtaaaaccgttggcagctttagcaatgattgatgagggtgagcttgactggaaaattgtggctatttctttggatgatcctaaagcatctcttgtgaatgatgtggatgatgttgagaagcattttccgggaacattgactgccatcagagactggttcagggactacaagataccagacggtaagcctgcaaacagatttggtctgggcaacaaacccacaagcaaggaatatgctctgaaggtcatagaagaaaccaacgaatcatgggagaaattggtgaaaaggaatatccctgctggagagctctcactagcctaatcttgtccatgagaagccatcagattcttttggtcatttacctaagcatgttgttttcataagctataagcatgctgcttcttgcgaactctttggtgacctgtgtgcaacaggaacagcttgtggagtgaataaggctttctgagctagtttttctaagggaattgggtgttcttgagcagcgattgtgtttggaacaagctttacaaagtgaacaatcagtttagaagttgaatgataagc

SEQ ID NO: 2476 - DNA, 1274 bp, Oryza sativa
  ref <308>: DATABASE ACCESSION NUMBER: AK060305
  ref <309>: DATABASE ENTRY DATE: 2001-12-06
actaagcgttggcacactgaagaagtaaccatgtccgggcacgccgcgccggcgccgcacgtcgtcgaggactatcgcggcgtcatccagctcctcagcgacggcaccgtcgtccgctccgatgccggctccggcgccggcgccctgctgccgccggaggacttccccgacgtgccgggcgtccagtggaaggacctcgtgtacgacgctacgcacgggctcaagctacgcgtgtaccggccgcccaccgccggcgacgccgagaggctgccggtgctcgtctgcttccacggcggcggctactgcctcgggacgttcgagaagcccagcttccactgctgctgccaacgcctcgcgtcggagctccgcgccgtcgtgctctccgccgactaccgcctcggccccgagcaccgcctccccgccgccatcgacgacggcgcggctgtcttgtcatggctgcgtgaccaggccatgtccggaccgggcgccgattcctggctcgccgaatcggccgacttcgcccgcgtgttcgtcgccggcgagtcggccggcggcaacatgagccatcacgtcgcggtgctgatcggctcgggccaactcaccgtcgacccgttgcgcgtcgccgggtacatgctcctcacccccttcttcggcggcgtcgagcgcgcgccgtcggaggcagagccaccggccggcgcgttcttcacgcccgacatgtccgacaagctgtggcgtctgtcgctgccggagggggcgacgagggaccacccggtggcgaacccgttcggaccggacagccccagcctagcggcggtggcgttcccgccggtgctcgtcgtggtggccgggcgcgacatcctccatgaccgcaccgtgcactacgcggcgaggctgaaggagatggagaagccggtggagctcgtcaccttcgaggaggagaagcacctgttcttgtcgctgcagccatggagcgagccagccaacgagttaatccgagtcatgaagcgatttatccacaaagatgaaggttctaataacttctaaatccaagtaaattaagttggatcagtagagatgcatggttggtgttctcatgtggtctgaatctgtgttctgtttcatcttttgtgtaagtgtgcaacttcgattctgtaaaacttggcaagtagatgaacgatgtcatttatatgcgtgtagcttgtcaaaatacaaagtagaaacctgtatctgaataagatggcattcatgaaataatattatcgattgaacgaacg

SEQ ID NO: 2477 - DNA, 1002 bp, Oryza sativa
  ref <308>: DATABASE ACCESSION NUMBER: AK060306
  ref <309>: DATABASE ENTRY DATE: 2001-12-06
gaggaaaagctgttcgtctccccaaccccaaccgcgacgaactagggcgacgggccatcgccgtcgtcgccgccgccgccgcagctcgcgctcgctctcctcctctggcgccgttcctctttctcctgcgtcgccccatcgacctcgaccgctcagcgtctgtttgtaactttctgttatgggtgactacaccatccagattagcaccaagctaatcgaccagcttgctcgtgatgacgagaagatcaaaaagaaaaccaggaaacccaagcctaagaagactgtcaaacaacatcaacaagagccccaggacaactcaagggaactcccagcttctgaacccaaggctcctcctggctggccactgcagcctcccatgtatctccccgtaacccctgctcctccaccacccccacctgctttttcagagctggaagccatccgtgccgttctggaagagagcgaaaaggttcaggagaagctggataagcagcatgctgggatgcgtgatgaactcatcaagaaatcaaaagacctgcgtgacaaggagttcaagctgccgtaccaaaaccccacgccatgcactgaggagaggtcaaactgccgccagtgttacgtgagcaatgcacaggacccactcaagtgtgctgaggcagtcaagagatttgaagcatgtgttcgcctggcgaggcaaaggggcaacacaaaagttgctcagtagccctggaagatttgtgatgaggaaagaactgatatacgattttgctttgctgtgatgatttaataacctggaattttgatgagacctaagacatatttctacaattctaatggcatcgcaccaggctaggtgaggaagctacagatccttgagtttagggattctgtattgcaaatattgggtaaaaatgaaacatgaattctgggtgtttttctctgattggtatcatgagtgaaagcgttatccatacataatctatgctgttgccatttgcgttttgc

SEQ ID NO: 2478 - DNA, 1316 bp, Oryza sativa
  ref <308>: DATABASE ACCESSION NUMBER: AK060307
  ref <309>: DATABASE ENTRY DATE: 2001-12-06
gttccctcctctcctcctttctctctccctcctcccgcgcgcggggtctcgccttaacgtttgccgcatatgggggcgacgagcaaagcgtaggccggagggagggacagggagagagagagagagaggctttctggctcgctctctctgcacgatctctcgtcttgttggattatacagccatgacatggtgcaacagcttcaacgacgtgcgcgccgtggagaacaacctggccaccgccgccgccgtggccgcggccaagaagcagcagcagcagcagcaggtctcccagcacgtcaacctcatcaagacctgcccctcctgcggccaccgcgcgcagtatgagcaggcagcggcggcggcgacgatccaggacctgccggggctgccgccggggtgaagttcgacccgacggaccaggagctgctggagcacctggaagggaaggcgaggcctgacgcgcggaagctccaccccctcatcgacgagttcatccccaccatcgagggcgagaacggcatctgctacacccatcccgagaggcttccaggagtcggcaaggacggcctgatccggcacttcttccaccgcccgtcgaaggcgtacacgacggggacgcggaagcggcggaaggtgcacaccgacgagcagggcggcgagacgcggtggcacaagaccggcaagacgcggccggtgttcaccggcggcaagctgaaggggtacaagaagatcctggtgctctacaccaactacggcaagcagcgcaagccggagaagaccaactgggtgatgcaccagtaccacctgggctccgacgaggaggagaaggacggcgagctcgtcgtgtccaaggtgttctaccagacgcagccgaggcagtgcggcggcggctcggcagcgacggccaaggacctctccgtcgacctcgtcgccggtaacaacatcaaggctagcaatgctgctgctgaacaccaccataacgacggcgtcggcggcggcggccacggtggcaacaacagcagcatgctgaaggaagctgcaggcattgtagatttctacaacccagcggcggcgctaatcggctacagccaggcggctcctaacaacagggcggctgcttctgctcatttgacgatgcctaactttgaggtgcacacaggaggtgcaggctttggcccctgatggatggaagaaaacaaagcaaattaaacatatttgactgatgatatatataggttagatggagagggcagggcaggtatatgatggcaaatgtgcatcatgcatgctagcatggtgtaatttgcatcgagtg

SEQ ID NO: 2479 - DNA, 983 bp, Oryza sativa
  ref <308>: DATABASE ACCESSION NUMBER: AK060308
  ref <309>: DATABASE ENTRY DATE: 2001-12-06
ctcttgtatcgtgggcggcggggctgtggcgcgctgccgcgctggggatgtgggcacggccatggagcagccccggtgggatggtgccggtggggatgttgccgctgaggttgacgtagcggaggttggggtgcttcacgagtgacggtggtatggggcagagggcgagcgcggcagtggtgggctttgctggctcggcaacctcgggcggccctgccgccaccgacgaggaggtggccgggagtgggcgggcgggaggcgcgatggctccacctcctcttccaccgctttcctcctgcgcagatctagctgccactccgccctacatgtgcggatccggcggcggtgctgcggatctggcacgggcgatggtgggaggcgcggcgggtgagagggaggtgcggcggctccacctcctcctccactgccttccttctgcgcggatctagccgccgctccgccccacgcgggcagatccgacaatgtcgcatcagatctagcgcgggtgacggtggaaggcgcggtggcgggcaacggttgtctcggtgctgccgccatcgaggcggtggccaggagcgggctggcgggaggcgtggctccgtcagctcgctgagcaccgacggcacgcgtgcggcgtcgtcggggaggtagaaaagggctagctcagtgatgctgccagactccttggagcagaagacggcgggctcccaggtgctgcaattggtcgatggctgcttgacagggtcgcccagctacgcggggcggcgaggacggaaagaaggaagaagaagcgagaagggcttggccggcatcggaggaggaaagaagacgggagaaagaaggaataagatggaaaagggaggagttggatggaaaatgtaacggtagtggcacggttctaattttgtaaaattttaatggcactgctacgaatagacgaattgtagtggtatttttctgaataggcaaatttgcaacatcat

SEQ ID NO: 2480 - DNA, 1060 bp, Oryza sativa
  ref <308>: DATABASE ACCESSION NUMBER: AK060309
  ref <309>: DATABASE ENTRY DATE: 2001-12-06
aattcgctccagtacattcaccacctctggtgcatcgccggcttcccacaccaacacgtacgacgtgagcacgtcaagttccaatcttctcaaggtttcgtccatgaaggtgatgacactgcggcgcggcggcgccggcgccgggatacgcatcaagaagaaggcccgcggcttcatgtgcggcggccgcggcggctccaaggccgtctccgtctccgacggctccgacaagcagtcgcccatggccacgccgccgccgaacacgtcgagcactaccactaccacgaccacggggagcgccgggaacaagacgacggcggcggcggggtcgtcctcgttctctccctcctacgactacgactacgtcgacaccgacgccgacacgagcgtggggagcacgccgagcgtggccgcgctcctgcggcagctcggcgagctggagcggagcgtccggtcactgcaaggcgcggtggcagaaggccgcggcgccaagaacgacggccgcggcggcgggaggcggcacaggcggacggtgagcgacggaggcggcggcgggtcggggagggtggaggagagcgtggcggtggtgaaggagtcggccgacccgctcttcgacttccggcgatccatgctgcagatgatcgtggagaaggagatcgtgggcggcgccgagctccgggagctcctccaccgcttcctgcccctcaactcgccgcaccaccaccacgtcatcctccgcgccttcgccgagatctgggaggaggtcttcgccggctacgagcgcacgccggacttcctcgtctcctcccgccaccgcaggccgacgaagaagaagctcccggcctcctacaccgccgccgacgatgatgacgacgactcgtggaacgccgcctaattaacaaacgctcaagtttttcgtcatcgtagccgttgagaaaattcagcaccggttccgttagcttctcgatgcatttctttcgtcgatttcagttcgtattttcgtaggcgtgtgtacagaacagctgagtggtttttgcaaactccaaaagccttcgtttcg

SEQ ID NO: 2481 - DNA, 1332 bp, Oryza sativa
  ref <308>: DATABASE ACCESSION NUMBER: AK060310
  ref <309>: DATABASE ENTRY DATE: 2001-12-06
attctggaacttgcttcccagccaccaagtctctctgcagcctctccccacccctctccccactatcatcatggttctcggtgccttcaagaagctcgtcgtccttgccactgtcgctgtcgcctcggcctcggccgctacgcccaacgctccgttctacaacgagaagggcattctcgtcctcggtgctgatgaactgcttaacatcacggccaacgccgctgccaacaacgagcacatcatttcgcaccccggtgcgagctacatctcggtcaagtttgagaatgtcaacctcccggagggtgacgtgttgatcgtgcgcagcccggacagctcggacggctacgtgtacacgggcaagggtcgtggcgacttgggcacgttcgcgtcgtcgcccgtgcgtggcacgactgcgatcgtcgagtacttcgcgctgaactcggctgcgcagaagtctacggtgagctacaagattggtggctacgtgcgcggcttcagctcggcgcttgagtcgatctgcggtgccgcggaccagacccgtcctgctaagtgctaccagggctcgtccacactgccgcaggcgtacaccaaggcccaggccgtcgcgcgtcttctcatcggcggcaagttcttttgcacgggctggttgctcggcaacagcggccacatggtcacgaacgaacactgcatcgaaaaggccgccgacgccgcgcagatggacattgagtttaacgccgagggtggctcatgctcaacgctctgtaacacgcaactgagctgcaagggcacaatggaggccacgtctgccacgtttgtgaccaacagcaacccgatcgactacgcggtcgtcaagctcccggctgcgctcgcaacaaagtacggcttcttgcagttccgctcctcgggtcccaagaacggcgagaagatctatatcccgcagcacccggacgggtggggcaagcgcattgtcgacacagttgacggtggggccgcggcgaccatccgtggtgtcggcttggacaacacgggttgcggtaacaaccagatcggctacctggctgacacgcagggcggctcgtccggttcgccggtgctgtcggcggtcgataacacggttatcgcgcttcaccactgcggcggctgcaacaacctcgcggtggatccgcgcgacgtgctcgccgacctcaagaagaagggtatcacggtgcccagcagcacggtctaaggagtgaacagagagattgaccgaaggtggcaggcaccctcgtagtcaagtagtgagtgtacaaaaccaccgtagtgggacatatcaatcgatgtgttattatttgc

SEQ ID NO: 2482 - DNA, 1213 bp, Oryza sativa
  ref <308>: DATABASE ACCESSION NUMBER: AK060311
  ref <309>: DATABASE ENTRY DATE: 2001-12-06
aaagccaaaaacccaagaaaggagacactgatcattcttgccatatattctaccatatatacatacatatacacacaatttctgtatatatttcttgctaaccattgttgctgctagttgcttcttcttcttctcctctaccttgtcatcgtccgtagtagaagtaatcaagaattcaagattctcattggctgctgctgccatgaaggaacgccgcggcagcgccggcgtcttccccttctccatcggctgcatgtcgcagtccgccgtcgacgtcgccgacccgcacgacaagaagtcgacgacgacgacgcagaacgacccttcctcctcctccgcctccgccgccgccatggccgccgccgcacagagtgagttcttgatcaccgagtagtactgaagatgataacatcaatcttttcaacgacatcattagagtacgtagctgctaacctgcaattgatcaaaaggcgcggaggaagaaggcggcggcgagaaggtgaaaggcgccacggcggcggcggcggcggcggtggcgtcctctggcatcgtggccaccggcgtgcagcggctgatcaaggggatcaagagcctgtcccagattttcgccatgtacgacgacgaggaggaagacgaagaggagagggagatggtgatcgggtacccgaccgacgtgcagcacgtcggccacatcgggtgggacggcatgaacaaggtcggaggcatggtgaacgccttctccctcccatcctccctctccctccgacagctcgagatggccatggaagcagctcatgcctgaactgaacacacactgcaactctgaattctcagtctcctctccttgctggcttgctgcagtattagctagcaaaagaaaagcattattactgctgcatcatgaatccatgcatgcatgcaactgatgaatgattaacaacatgcaggcatggggtagtgctcttgatttgatttgcatattgattagtagtttccatgtggctgtgttgaacatcatttcaattctctgaatgaattggtactacatgcatgcatgcatggctgtgtttccttcttcttcttttttttttttggtttggccttcaattcatttggttgggcatcaacgtgttcagtagtgtgtacatagttacatgggcatgtgaacctgtacaaattgtcatcaacgatattgacagtgcttgctatctgt

SEQ ID NO: 2483 - DNA, 1118 bp, Oryza sativa
  ref <308>: DATABASE ACCESSION NUMBER: AK060312
  ref <309>: DATABASE ENTRY DATE: 2001-12-06
aaaaccgcagcattcaaagccaaaaaccctcgccttctccccctttgcccagatcgagcgaatccaatccacccccgaatcgaatccgcgatggcgacccacccggcctccccggtcgccggcggcgagaaggccacgccgccctccacgccgccgccggtgcgcctggcggggggtgcggcggcggcgatccagcccaactcgccgcggttcttcttctcctcgctggcggcggcgtccgcgtccgcctcctccccgcaccgccgcatcgccatcgccgtcgacctctccgacgagtccgccttcgccgtcaagtggtccgtgcagaactacctccgcccgggcgacgccgtcgtgctcctccacgtccgccccacctccgtgctctacggcgccgactggggctccatccccgtctccgtcgacgacgacgactccgcccccgacgccgcccagcacgccaacgcccacgccgccacgcgcgacgagcccgaggaggccaagaagaagcgggaggaggacttcgacgccttcacctccaccaaggcgcaggacctggcgcagccgctcgtcgccgcgcagatccccttcaagatccacatagtcaaggaccacgacatgaaggagcgcctctgcctcgaggccgagcgcctcggcctgtccgccatgatcatgggcagccgcggcttcggcgcctcgcgcagggcgggcaaagggaggctcgggagcgtcagcgactactgcgtgcaccactgcgtctgccccgtcgtggtcgtgcgctaccctgatgatggtgcggcggctggcggtggggaggccgtgggggatgagctccgcacggtgcctgaggatgaacccgtctaccatgaagctcccgagggtcagaaagaaaattgaggtgaaaagagacgcatccagatcacaaggagagcgtgcgacttgctaatgccgatccctgtgtaactgtgtggtcgcttctatgttctgctccgcgatgcatttcgagcatgtatcagacttgtagatcgttgccctttgctgccatttgcttcctgagagatatttattatgttgtccggaggagaataatctatttctgaaagaattgtagctgttgt

SEQ ID NO: 2484 - DNA, 1101 bp, Oryza sativa
  ref <308>: DATABASE ACCESSION NUMBER: AK060313
  ref <309>: DATABASE ENTRY DATE: 2001-12-06
acaaaacgaaaacctaaagaatcaccagccttgcaaaccaatcaacctgtctagattaatttttgcatgctctctggaatggagaaacaacctgcaatgcttctcgttcttgtgacactctgcgccttcgcatgcaagcgatccgtcgcacagtctgcctttgccacgttctacggtggcaaggacgggtcgggcaccatgggtggcgcgtgtgggtacggtaacctgtacaacgccgggtacgggctgtacaacgcggcgctgagctcggcgctgttcaacgacggcgccatgtgcggcgcgtgctacaccatcacctgcgacaccagccagaccaagtggtgcaagcccggcggcaactccatcaccatcacggccaccaacttatgcccgcctaactgggcgctgcccagcaacagcggcgggtggtgcaacccaccgcggcagcacttcgacatgtcacagccggcctgggagaacatcgccgtctatcaagccggcattgtccccgtcaactacaagagggttccgtgccagaggagcggggggatccggttcgcgatcagcggtcacgactactttgagcttgtgaccgtgacgaacgtgggcggcagcggcgtggtggcgcagatgtcgatcaaggggtccaacacgggctggatggcgatgagcaggaattggggcgccaattggcagagcaacgcgtacctcgccgggcagagcctgtccttcattgtgcagctcgacgacggccgaaaggtcacggcctggaacgtcgccccgtccaactggttcttcggtgccacctactctacctcttgggtgcagttctgaagtactgcaacgtacgtacaggtttagttgataaattatacacatgctgttcatggacataattaattaattactagccatcccggccgtttgtgcatgttctgctaggttgtgtgttgcgtggcattaacttgtttttctctgttaccagtcgttttgtcaaacgcgttggttgtggcaagcgcgattgaatgttttgcccaccaattaatgtaactgatcgtatgggtgttgagttaataaattatgtttaattatgcggatgcc

SEQ ID NO: 2485 - DNA, 1042 bp, Oryza sativa
  ref <308>: DATABASE ACCESSION NUMBER: AK060314
  ref <309>: DATABASE ENTRY DATE: 2001-12-06
aatcatgagatagattttgccccagaacttggtgaaacgaagccattcaagccatacagctataggtaccccacaccttataaggcttccggtagcacggcacctttctggtattctgtcaaaagagcatctgcttatattattgtcttggcatcatattcatcatatggaaagtatactcctcagtacaagtggcttgaagctgagtttcccaaggttaacaggagtgaaacgccatggttgatagtgctattgcatgctccgtggtacaacagctataactatcactacatggaaggtgaaagcatgagagttatgtatgagccgtggttcgtcaagtacaaagttgacctcgtgtttgcaggacatgttcatgcctatgaacggacacacaggatatcaaatgtcgcgtacaacattgtgaatggccagtgcactccagtccatgatcagtctgctccagtctacataaccatcggagatggaggaaaccaggaaggactggccaccaacatgacggcgccgcagcctggctactcggccttcagggagtcgagcttcgggcacgccatcctggacatcaagaacaggacgcacgcgtactacacgtggcaccgcaaccaggacggcaacgctgtggcggctgactccatgtggttcaccaacagatactggcagccgacggatgaatctttggacgactcccagtgatctgagtcgttcgtacatggtttactcacacctgctcctcctccctagtttgtgttgtggttcttctacgtgaataagcactggctcgatttgaacacacaggacggactcacggacgcctccggttcaggcgtcgtgatctaggtggttctttctccgctccagctccctcgtggccgtgtgctgcttgtgtatagaagaagcgcagctcacgtgcagcgagaggaaaagaaagctgagaaattgcgagttgatacttgataggcttgtgtacgttcgtactcgtctagatgttgaataaacacattggtttcgtggcgttgcgacttgc

SEQ ID NO: 2486 - DNA, 1101 bp, Oryza sativa
  ref <308>: DATABASE ACCESSION NUMBER: AK060315
  ref <309>: DATABASE ENTRY DATE: 2001-12-06
cgtggagttgagatctcagcatgttggctactgatcatgaatgaaaaatatcccgtcctctgcttctctctcgtgtgctctgcttctttcttcttcctcacgcctctgaattcagttggatctccggcaaacttcgccgccggcaatcggggttgtaacaacttggtatcagttgctttcggtcctgtttgctccctcgcactctctcgaccgtctggtggtaattcctgtggccgagttggtggctgacctccaggttgcgccgccgtcaatctcgtatctggttcgccaggtttggagtaggtgacgcaacggcacccgcgaagcaaagtgttcaggtccgtcaaatggtggcggcgatggaggtgatggaggcgcgcgtcatggaagtgttgacgaagttggcggggaaggtggagggcatggacgtcatcaccaatcacttgggggagattgacgccaagctcgtcacgcaaggggagcggctggatcgggttcaagcgaagatggatctctcgattactttgttgggtcaggttcagcaagagcagtcgcgccctgaaggcggtagcggctgctccagggccggaggcgccatcaattccatcgcatcgccagccgccgttgctggagactccgcgaggggcatttgcggcgtctacttcgacggcaccacctccgccaccgccgccgcctcctccgccgtttctgcgtcggttgcgtaggtatcgggttcccctttgcctcatacttctgttgagggtggggattcggcgccgcggtgccaatggtcgcctaagatggattttccccgttttgatggtacagacgtgagagtgtggctggataactgtgaaacttactttgggttttatcaaatcgctgagggttttcaagtttctgccgcttctctgaatatgattggggatgccgctaattggtatcaagcatggaagttagaaataggtgtacatgattgggccactttgaaggcattagtcttaactgaatttgaggtatatttgcaaaatgtgaagatggatgaacttttgttgttgcatcaaactggttcggtgactgaataccgtttcaaattcaatc

SEQ ID NO: 2487 - DNA, 1126 bp, Oryza sativa; identical to SEQ ID NO: 2058
  ref <308>: DATABASE ACCESSION NUMBER: AK104285
  ref <309>: DATABASE ENTRY DATE: 2002-08-28

SEQ ID NO: 2488 - DNA, 1223 bp, Oryza sativa
  ref <308>: DATABASE ACCESSION NUMBER: AK104286
  ref <309>: DATABASE ENTRY DATE: 2002-08-28
cttcgcgccgccactctctccgagctctcgcctctcctcctcccccgtcttcccttcgcgcgcgccacccccacacacgcgaccatggcggcagtggcaggaggcgcagcgcgggcgctgtcgcaggcggagcaggacgtgcagatgatgctcgccgccgacgtccacctcggcaccaagaactgcgacttccagatggagcgctacgtctacaagcgccgctccgatggtatctacatcatcaacctcggcaagacatgggagaagctgcagctcgcggcgagggtgattgttgccattgagaacccccaggacatcattgtccagtcggcccgcccctacggccagcgcgccgtcctcaagttcgcgcagtacactggcgcgcacgccattgctggaaggcatacgcctggtacatttaccaatcagctccagacctccttcagcgagccccgtctgctcatcctcactgacccaaggaccgatcaccagccaatcaaggagtctgctctgggaaacatcccgaccattgccttctgtgacaccgattccccaatgcggtatgtcgatatcggcatcccggccaacaacaaggggaggaacagcattgggtgcctgttctggctcttggctaggatggttctgcagatgaggggtactatcctccctggccacaagtgggatgttatggttgatctgtttttctacagagaccctgaggaggccaaggagcaggaggaggaagctccagcacaagactttgctgccatcactgattacaccgcacctgaacaatggtctgctgaccagtggacctctgatgtggctgctcccccagctgctactgttggtgattggggcgcagctccagctccagttgctgctgccgaaggatgggatcaagcaggagcacccgtagccactgaagccgccgtcgttccaccggttgcgcctactggatgggacccggcagctcaaccagctgctcaaggctgggattaggctaggcaatcactttgagatgtcttccgcagcttaagttaaatatttcccgaggcatgaatgaacacccaaaatccaatgtgatcatctatagctacaccatgaactcaactgtttttaggaatttctagctgaacctgtgttgtttgtccgtccctatttcgaacaacaatgctgtgagggtgagctcggcaagatgtgtggtatatgttaagctttct

SEQ ID NO: 2489 - DNA, 1252 bp, Oryza sativa
  ref <308>: DATABASE ACCESSION NUMBER: AK104287
  ref <309>: DATABASE ENTRY DATE: 2002-08-28
atcgcagccatttttacccctagccccctccgcttcctcctttttacatccaaacccctcttccactcccctcgccgccgccgcctccgccgtcggggaggatgggaggggcgcacttccccggtgagggcgaggtggtggccggggagggcgacgccgtcgtccccctccgcgacatgggcaagatggagcacgggtgcgagcattacaggaggagatgcaagatcgtggcgccctgctgcggcgaggtgttcgcttgccgccattgccacaacgatgccacggcttcaggtgatcggcataccatttgccgccaggatgttgaaaaagtagtatgtctactctgtgatactgaacagccggtgtcacaagtgtgcataaactgtggtgtcaatatgggagagtacttttgtgatgtatgcaagttttatgatgatgatacagagaaagggcagtttcattgctacgattgtggcatatgcagggttggtggcaaggaaaactacttccactgcgcaaagtgcgggtcttgttatgctgttgctctgcgtgataaccatcagtgtgtggagaactcaatgaggcagaattgcccaatttgttatgagtatctatttgattcattaaaaggaacacgagttctcgactgtggacacacgatgcacatggaatgcttttctgagatggtggaacataacaaatacacttgtccaatatgctccaagacagctcttgatatgacacatcactgggcattgttagatcaagagattgaagcaacaatcatgcctcccgtctaccgttacaaggtttgggtgctctgtaatgactgcaacaaggtctcagaagtggacttccatgtgattggccacaagtgcagccactgcaactcgtacaatactcgatcgacatcacggcctgcggatttatcaggaagcagttctccctcgacgtcagattcgtccgaaaacaatccgtagataacatgccatgttggtgcccaacaagatctacagtttagacaatcaagtcccagattcatacatatacaagtagtagaaggaacattgttttgcggctagcctatccaagtgcctacccaattcttcaagattcaattgattccttgaatcttcatgtgttggaactgctactagacaaaagctattgtgatgataccatatgttgtgttgaatctttaatcacagccatggctgttatcagtgtgggtgaaagtgaaacccatcatgtt

SEQ ID NO: 2490 - DNA, 1361 bp, Oryza sativa
  ref <308>: DATABASE ACCESSION NUMBER: AK060316
  ref <309>: DATABASE ENTRY DATE: 2001-12-06
attagagctagctagcgagagctctagctacagctatacatacgtgtacccaacggccacggtcacccgcgcgagcgagcacgcgcaccaaccgatcgagcccaacaagctcgctcgctcttggtgcgcgcgcgcgcggcgagttcgatcgatcggtgtatacgcgtatcgtgttgtgtatgcaaggcggtgatcacggaggcatggagatgggcgtggggtcgttcaccggcggcggaggaggctgctgcggcggaggagcggcagctgctcaagggggagatcgcggtgcacccgctgtgcgagcagctggtggcggcgcacgtgggctgcctgcgcgtggcgacgcccatcgaccacctcccgctgatcgacgcgcagctcgcgcagtccagcggcctcctccactcctacgccgcgcaccaccgccccttcctctccccccacgacaagcaggagctcgactccttcctcgcgcagtacatgatgctgctgtgctcgttcagggagcagctgcagcagcacgtccgggtgcacgccgtggaggccgtcatggcgtgccgcgagatcgagcaatccttgcaggacctaaccggtgcaactttggaggaagggacaggggcgaccatgtcggaggacgaggatgagacggcgccgatgctggagggcccgatggatatgggctcggacgggcacgacctcatgggcttcggcccgctcatgcccaccgactccgagcgatccctcatggagcgggtcaggcaagagctcaagattgagctcaagcagggcttcaagtcaaggattgaggatgtgagagaagaaatattgaggaagaggagggcaggaaagttgcctggggacaccaccaccatactcaagcaatggtggcagcaacactccaagtggccataccccacggaggatgataaggcaaagcttgttgaagagactggcctgcagctcaagcaaatcaacaactggttcatcaatcagagaaagcgtaactggcacaacaactcacagacatcaacccttaaatcaaagcgtaaaaggtaaagggcagaaaaaaatgtatacctgacgtactcgctaatcaaatcaaaagaagacatggtgactcataagtaataagatcatcttaaattgtatatctagttattaattagtcagaggtgacaaattcatgacatacatactagtctgaccactggcatatgcgttgtaatttttgagcagatatgctcaagcaaattcttcttgttggtatagtttttaattttgttgtcgtgggtgtacctgcatgcatacataaccccaagactaattcatttgctgtgcatatacattgaccattctat

SEQ ID NO: 2491 - DNA, 1021 bp, Oryza sativa
  ref <308>: DATABASE ACCESSION NUMBER: AK104288
  ref <309>: DATABASE ENTRY DATE: 2002-08-28
aactcacactcgctcgctcatcgccatctctctcagctctcacagctcactgcatcaatggccgcggccaccatggcgctctcctccccggtgatggcccgcgcggcgccgtcgacctcctccgcgctcttcggcgaggcgcggatcaccatgcgcaagaccgccgcgaagcccaagccggcggcgtcgtcggggagcccgtggtacggcgccgaccgcgtcctctacctcggcccgctctccggcgagccgccgagctacctcaccggcgagttcccgggcgactacgggtgggacaccgcggggctctccgccgacccggagacgttcgccaagaaccgggagctggaggtgatccactcccggtgggcgatgctgggcgcgctcggctgcgtcttcccggagctcctcgcccggaacggcgtcaagttcggcgaggccgtgtggttcaaggcgggctcgcagatcttcagcgagggcgggctcgactacctcggcaacccgagcctgatccacgcgcagagcatcctcgccatctgggcggtgcaggtggtgctcatgggcgccgtcgaggggtaccgcatcgccggcgggccgctcggcgaggtcgtcgacccgctctaccccggcggcgccttcgacccgctcggcctcgccgatgaccccgaggcgttcgcggagctcaaggtgaaggagatcaagaacggccgcctcgccatgttctccatgttcggcttcttcgtccaggccatcgtcaccggcaagggccccctcgagaacctcgccgaccacctcgccgaccccgtcaacaacaacgcctgggcgtacgccaccaacttcgtccccggcaagtgaagtgggggaccgtagcttagcagtggttaattgtggttggatggatttgtggccagcgagttcgttgtctttgggttggggaagatgggtttagtgcgacgagatgatgatcgagttggtgttgtgtacactaagaagatgaagaagaagatgatgtttttgcaat

SEQ ID NO: 2492 - DNA, 983 bp, Oryza sativa; identical to SEQ ID NO: 2316
  ref <308>: DATABASE ACCESSION NUMBER: AK104289
  ref <309>: DATABASE ENTRY DATE: 2002-08-28

SEQ ID NO: 2493 - DNA, 1013 bp, Oryza sativa; identical to SEQ ID NO: 1860
  ref <308>: DATABASE ACCESSION NUMBER: AK104290
  ref <309>: DATABASE ENTRY DATE: 2002-08-28

SEQ ID NO: 2494 - DNA, 1064 bp, Oryza sativa
  ref <308>: DATABASE ACCESSION NUMBER: AK060317
  ref <309>: DATABASE ENTRY DATE: 2001-12-06
acggcgagcgcgaggagaagcaaccgagccgaagcgagccatggctggtggggtcgtcatcggcgtcgcgccaccggcggcggcggaggagcccgagccgcacgtcgagcggctgccggccgacctcctcgcgcacgtgctctccctcctcccatccttccacgacctctccatggcggggggagtgagccggcggtggcgcagggcggtggagaggtcgctggcggggcggcggcggatgagcttcgcggggcagcgcaccggcgacgactccaccgcgcgcttcgtccgcgccgccgtcaacctccgagacctcgacatttcacgaagctgctggggctgccagatcactgatcaaggattgatcaggatttccaccgccgattgcgtcaagaacctcacctccatctctctctggggattggctgggatcaccgataatggcgtcatccagctggtttcaagagcgcattctttgcagcacctgaacattggtggaacatttatcacagatgaatcgttgtatgcagttgcaaaaagttgtataaatctgaagagcatcatagtgtggagctgccgccacgtgacggaggccggcctggtggcgctcgtcggcggctgccggaggctggagtgcatcaacgtcggcgggatgagggtgccgccggagagcttcgccggacttctcgccatcagaccggcgctgcagatcaggtccatccctcagatcctcaatgccaacgtccaggtctcatgaaagacctgatgaaaaataccatccatttcataaagtaaatgggaaaaagaaagaaagattcgtgaatgattcacttttgaatcgaataagattcatgaaagggactcgtgctgtgtcttgattctttgtgttgtgttgatttattgttttattttacatgacccttgcgttgtgctgatgtgttgtgttgtgtatattttggcttgtacattagtgcgcatacagaaatacagaataaatgtatactatacagatttatggattcattattatttctatacggaaattgaacgagaattctttgcat

SEQ ID NO: 2495 - DNA, 1298 bp, Oryza sativa
  ref <308>: DATABASE ACCESSION NUMBER: AK060318
  ref <309>: DATABASE ENTRY DATE: 2001-12-06
actcgcttgcttagctcgattgctttgctctgatctggttgatcgatctcgtcgtcggcgatggagaagttgctttcctcctccggcgccgccgccgccgtggcgtcgcagggccagctcccggactgcttcgtgttcccggccgaccggcgcccaccggcctccaccgcggccgtgtcgctccccgtcatcgacctctccggcccccgcgacgccgtccgccgcgccgtcctcgacgccggcaaggagctcggcttcttccaggtggtgaaccacggcgtgccgccggagacgatgcgggagatggcggcggtgtgcgaggagttcttccggctgccggcggaggacaaggcggcgttctactccgacgcggaggagaaccccaaccgcctcttctccagcaccatctacgaggtcggcgaccagcgctactggcgcgactgcctccgcctcgcctgcggcttccccgtcgccgacgacaccaacacccactggcccgacaagccccaccatctccgggatgtcacggagaagttcttcgtggcgacgaggggattggggatcgagctgctgcggctgctgtgcgaggggatggggctcaggccggactacttcgagcgcgacctcaccgccggcgatgtcatcatcaacgtcaaccactaccctccatgcccggatccgagcctgacgctgggcttgccgccgcactgcgaccgcaacctcatcaccctgctcctccagggcgacgtcttcggcctccaggtctcctacaatggcgactggatcaacgtcgaccccgtccccgacgccttcgtcgtcaactttggccacctcctcgagattgcgacgaacggagtgctgaagagcatcgagcacagggcgatgacgaactcggcggtggcgaggacgtcggtggcgacgttcatgatgccgccgatggactgcctcgtcggaccggcgaaggagctcgtcggagacggcggccagccgcagtatcgcaccgtcacgttccgcgagttcatgcgcatctacaagaccgtcggcgcgcgccgcgacagcgtcgagaaggccttcaaaatctgatcctgacagcggccgccatgggggaatatgtgtatctgttacagtaatttacgaagatgaagctgattattagcaaccgataagtgtttcatcagcaattatatatgttgttgatgtactgattatatgtacatcgatgtaactgtacctgtaacaccctcaagaacctttaaaaatctataaatctaaataaaatgttcaaatggatttgatgc

SEQ ID NO: 2496 - DNA, 1648 bp, Oryza sativa
  ref <308>: DATABASE ACCESSION NUMBER: AK060319
  ref <309>: DATABASE ENTRY DATE: 2001-12-06
gtcccgcgtcctaggcgcccctcgaccgcgccgcctcctcaccgccctcgaccacagtcgccccgcgcgccctcgaccgccgccgcctcctcgccgccccgcgccgcctcctctctgccctcaaccgccgacgccccgcgccgcctcctcgccgcacccaactccggttgcgccgtagtgtccaccgccgccgcccgccgcatcgtcgtcctccccatcacccgccaccaacgcctactccgtccacccgccaccgacaccgaatcctccgcccacccgcaaccgccgccaacgcccccgccgctgagtcagctccagatccgctgtcgggctgactcctcctcctcctccctgtcgcggacgccgccgccgccgatgcctactactccgctccgagccccatctagcgaacagagcagggatgggaggggcgccgtcgtcctactgcatccttggtgttggacttgataaagcttggagatcatctcagtgaacgggaggatgctgatctctataggattgggattactggtgaatcacttggagataatcaagaactatcatgatcttttgtgatcaaaagcccatagtccactactatgttttactacttccagattaatggagtggtattgtggtttctcagccatggcaatgtggcgagcgtcgtcgtcgtcaggtcctccactgctgttcagtccgccgccacctacgccggtcctctcgcttccaggtgacgaactctggttgatggcatcgcactgctggtaccaggtgattcattttgctgccttcaattgtgaaatgagaaatacctgtaagtgaaggcctaagctcaaggaataatttgttctttttgaaaacaaaaagctcataggtagaatgttcaccaccaggcaagtcaaggagcgaagtatggggacagtgtgtgctcggaagatctttgccagcttgtgttttgacttctgaaggcatgcacagatgtgaagatatgaacttctaggggagctttataaaccgagaatagttaaggcaatacttgatttactttggactgcaaattacttgatcggataatcaatatgtggcgagctttacacagattggctttgatgaatcattaaagggctatcggcggggtgaatatctagctttgaacatgatttgttttgattcctgttgcaacgcacgggcacacaactagtaagttgtaaattcatcttgcaagcagctgggagaaatgttttgaacaatgaatggaatgcaaaatctttctaatacctgtaaactgaatgaaatggcttatgaataactgaattcctgtaaacgcaatggcttctagatcccagtagtattcagagtctcagacaagaacatgatgtgagagtaatgtcagctttgcccaaggatgcgaagaactcacggagcagcaaactcaagcgatgacacacacgcacgagcaacaaattgtagtggacacacacaatagatctctggagatgaacacacagaagtgcacacacacacatagttgttaaattcagaccggtgatcgaaacagtgagtctacctgttcaaaggctccctggtccaaccgcttgttcaccggtttaaccgtcggttcaataaataactacattacattctt

SEQ ID NO: 2497 - DNA, 1694 bp, Oryza sativa
  ref <308>: DATABASE ACCESSION NUMBER: AK104291
  ref <309>: DATABASE ENTRY DATE: 2002-08-28
acacatgcacctaattattagtagcatacacacatataccataatggcactgtcactgacgccctccctgcaagatctcgtatcatcactgatgatactccttgttctcttgtacatatcgtactggagatcaaagtatcagtccttgttcccagtggactggccgatagtaggattgctccctaccctcgtcgccaacctgcaccgcttgcatgacaaaatcaccgaatacctcgccgcctccggccatagcttcacggggaacggcccggcggcgagcaacatgcgactgttcgtcacatgtgaccctgacaatgtccggcacatcttcaccaccaaccatgacaactaccccaagggccacgagttcgccgagatcttcgacatcatggccggcgccttcttcaccatggacggcgatctctaccgccggcagcgtgccaagacccatagcatcctcagcgacccgaggatggttgcctcgatggcgtcgagctgtgtcgacaaggttcgggatggtctcctcccgttattgacatccatggcgagcacccggacaccgttcgagttgcaggatctggccacgaggctcatgttcgacgtgacggccatgacggtgttcggcgtggaccctggccgcctgtccccggacatgccgtcgatgcatgtctcggctgcgatggacacgatcatggaggtggggctgttccggcacaccgtgccgccgtcctgctggaaggcgatgagacggctcaagattggacccgagaggaagctcgccgcggcgcacgcggcgctgcacgtcttcgtctccgagatgatggagaaggcgaggaagcaagaggcagcgccatcctccatgtccatggacgttctctcctcctacatcaacgacccggactacgtcggcctcctgcactccatcctcatcacctacatggtcgccgggcgcgacacggtgggcaccaccttgccgtggttcttctataacctcgccatgaacccgcgcgtcgtgtccggcatccgcgaagaactggcacacaatattgcaacaagcacctgcaatggcgatggcgtgccggtgatgttctcaccggaggacacgaaatccctcgtctacctgcacgccgcgctgttcgagacgctcaggctgtacccgccggggtggatcgagcggaagacggtggtcgccgacgacgtgatgccgagcgggcacgaggtacgtgccggcgacgccgtgctcatctcgatctactccatgggcaggatggagagcctgtggggggaggactgccgggtgtaccggccggagaggtggctgtacgactcccgcggcggccggaaaatgcgacacgtgccgtcgcacaagttcctgtcgttcaactccgggccgaggatgtgccccggcaagaacatcgccgtgatgcagatgaagatcatcgccgccgccgtggtgtggaacttcgacttggaggtggtggaagggcaggccgtggtgccgaagctgtcgtgccttctgcagatgaagaacggggtcatggtgaaggtgaagaagcgtgctgtgtaaccgagttattactacgttctcaggaaggcatgcgtgcgagtgcgacaggctcagtgtcttttatcatccgacagtatatatatgtatgcaaagatttcctacttgaataaaggatgtgttcaaatat

SEQ ID NO: 2498 - DNA, 1108 bp, Oryza sativa
  ref <308>: DATABASE ACCESSION NUMBER: AK104292
  ref <309>: DATABASE ENTRY DATE: 2002-08-28
gagcaacaaggtcgtagccatgacgaacgggtacctgttccgggagtacatcggcgcgcagttcaccggagtccgcttctccgacgtgcccatcaacccaaacctcagcttcaacttcatcctctccttcgccatcgactacacgagcccggccggcggcgccacgccggcgccgaccaacggcgtgttctcgccgtactgggacacggccaacctgtccccggccgacgtcgccgccgtcaaggcggcgcaccccaacgtcagcgtcatggtcggcctcggcggcgacagcgtgcaggacaccgccaaggtcttcttctccccgacctccgtcgactcgtgggtggccaacgccgtcgcctccgtctccggcatcatcgacgcctacggcctcgacggcgtcgacgtcgactacgagcacttcaacgacgacggcggcgccggcgtcgacacgttcgtggagtgcatcggccgcctcctcaccgagctcaaggcgcggcacccgaacatcaccacctccatcgcgccgttcgaggacgccgtggtgcagcgctactaccagccgctgtggcggcgctacgccggcgtgatcgacctcgtcaacttccagttctacggctacggcgacaacaccgacgtgccgacgtacgtgatgttctacgacgagcaggcggcgaactacccgggcggcaaggtgctcgccagcttcaagaccggcgacgtcgccgggctgctctggccggagcaggggatcgccggagcgaaggagttgcagcggcaggggaagctgccgggattgttcatctggtcggcggacagctcaaaggtcagcagctatggctttgagtacgagatcaaggctcaggagatcatcgccaaccactgatcgctgatcggacggtcgagatatcgctgtggttggatttggtatgaatgaatgactgaataagcggatatatttgcccagtacagttctgggcacgcatggtgttctaatacttattgcgtatatatgcagtgagatggatattatatatatctacagaatataaataagtttcttcaacatatatgctatttctccaatctatgaattagtgacagacat

SEQ ID NO: 2499 - DNA, 1097 bp, Oryza sativa
  ref <308>: DATABASE ACCESSION NUMBER: AK060320
  ref <309>: DATABASE ENTRY DATE: 2001-12-06
gtgtacgccaaggccaagacgacgacgacttgggaattcatttgcatcggcaacgacgatgaagctcgccgtggtcgccgtcgcggcgctcctcctcgccgccggcgtcgcctccgccgatgaattcgacttcttctacctcgtccagcagtggcctggctcgttctgcgacacgcaggctgggtgctgcttcccggacaccggcaagccggcggcggagttcggcatccacggcctgtggcccaactacgccaagtgccgtcccgccgccggcgccgtcgccgacgacgacgacggcgtggtggagatggtggtcgacggcggcgccgccgtcgagcgccaccaccggcggcggcagaagtgctggccggagtactgcgacgacggcaacaagctgcggccgtgggagatcaaggacctcgtggcggagctcgatgcgaactggccgacgctgtcgtgcaagggcggcaagagcttcgagttctggagctacgagtggaagaagcacggcacctgctcgggcatgggccagcacggctacttcgcggcggcgctggagctcaagaagcggcacgacctcgccgccgtcctcgccggcgccggcatcgtcccctccgacgacgagagctactccctcggcagcatccgcgacgccatcgccgccgccacgggcgcggtgcccaacctcgagtgcaaccgcgacgccgccggcgagacgcagctgttccaggtgtaccagtgcgtcgaccgctccgggaagaagctcgtcgactgccaactcccgatgcagggcaagtgccgcgacaaggtcaagctgcccacgttctagctagctagctcccccgtcgccatcgtcgccggcgagagctcgccgtcgccggcatggcggcgcgccggcggctggctggtcttggatgtctgatggatgtcacgtgcgtttgcgttgttgcgtggtgcggttttcagattacgagagattcgaggatttgtccagttggattgctacatgtgtacgttacatttggcactatctgctgacttgctgaacagttgaataataacatatcaagttttaccagttgagatgaattcgattg

SEQ ID NO: 2500 - DNA, 1140 bp, Oryza sativa
  ref <308>: DATABASE ACCESSION NUMBER: AK060321
  ref <309>: DATABASE ENTRY DATE: 2001-12-06
ctgtctgcttgcttgccgtctcccacctcccaccgccgatccctttcttggcgctccccttctcctctgcatcctccgctgcgcgtgccaccacccatgtctggcggcgctcgacctccactcctcacggccgtggccgactctccagccttccaccccgaccaccgcttaacgtccctgctcgccgcccgcctggccgccttgtggagtcccgtcgtctcccctcactccggtgcctctaccctactcgagctcatcctctcccgcccctgcctttgcaccgacgactccatctttaaccgcacgcatgccggtagtgcttggaggaggagcggcaccgctcatccctcgcacgcccgccatgaccaacgagcaacgagtggtcgagtgcggaggtggtgtcaatgaggtcaggcggtgcgcgggacgcacgcacgccgtttctgctgggagaaacgccgccgctcgtccctcgcgcgcctgccgtgaccgaggaattcctcggcgaggtggcacagcttcacttacatgtgagtggtacgccctggctgagatgatacggactttgatccggttctccgtgtcccagttcaagaactagtcgctcacaaacacctacagaaccaaatctagttatcgaactattggtgcaaaaatgactgacatgatcattggaattcagagagcttgtcccggactctgctagcgtcgccagcacacaggtgtgtgaagattataggtaccccatacccacacgacatggttatccaactagttataggggataacttatatctatggaatatgtacggatcatgacttgagtattacgtttccttgtatattatagaacggcataaagtcttagtttgataatattgtaaagtagatttagtaaaccgataccgtattgattaaggtttctatcttgtaatcttgccccccatcctatataaggcgggtaggaagccctctaggatagaggattcacaacctgatcgtcagattaatactgcacctgacggattcaagcccccaaacaggccagtagggtatgaactcttatcgagagggtttgaacctatctaaaattcgattttgctatagatttgtcgtgtgattttttctctcagatttgtc

SEQ ID NO: 2501 - DNA, 1245 bp, Oryza sativa
  ref <308>: DATABASE ACCESSION NUMBER: AK060322
  ref <309>: DATABASE ENTRY DATE: 2001-12-06
ctctctctcacatcctcccatcgcgccgccacctctccccaaccctagctagctccccctccttccccggcggcgacatcgacgatggcggcggctgcggcaggcggcggcggcggcggcgccccgcgggcgctctcccagcgggagcaggacatccagatgatgctcgcggcggacgtccacctcggcaccaagaactgcgacttccagatggagcgctacgtctacaagcgccgatccgacggcattttcatcattaaccttggcaaaacctgggagaagcttcagctggctgccagagtgattgttgccattgagaacccacaggacatcatcgtgcagtctgctaggccttatggtcagagggctgtcctcaagtttgcacagtacaccggagctcatgccattgctggcaggcacactcctggtacatttaccaaccaactgcaaacctcattcagtgagccacgtcttctcatccttactgaccccaggacagatcatcagccaatcaaggagtctgctcttggaaacatccccactattgctttctgtgacactgattctcccatgcgctatgtcgacattggtattcctgccaacaacaaggggaagcagagcattggttgcctcttctggctgcttgctaggatggttcttcagatgcgtggcacaattctccctgggcacaagtgggatgtcatggttgatcttttcttttatagagatccagaggaagctaaggagcaggaggaagaggaggctgcagtaggtcctgaatatgctgcagttgctgagtatggtgctgctccaactgacaattggggtgaccagcaatggggtggagaggtccagcctcctgccctccctgctgcaccgactggggaatggggtgctgctccagctcctgtggctgcagaagggtgggatgcagttgctgttcctcctgccgccgctgctgctgttgcacctcctgccgcccctggatgggaggaaggcagtgctccggcacctactggctggtaggaaatgtgcggatcatcattcgtcagctactggaggaaaactgagttacttaacattatgtaatgtatttggtagatctgtttaagtagctccatgttaaagtattgcataatgttaagtgagaatcaattttgaatgccgatgcatctggttactgcgtgttagcttccttcctgtcaacgttcatggattacattgcttcaagtgcattttgtgagc

SEQ ID NO: 2502 - DNA, 1065 bp, Oryza sativa
  ref <308>: DATABASE ACCESSION NUMBER: AK104293
  ref <309>: DATABASE ENTRY DATE: 2002-08-28
atccccttcttctgccgctcgttttccattgccgacgcgcagcacgcagctgcgcagccacacctttgcggctgtcttatcttgttcttgagttgtgttcttggttggggaggaggaggaggagatgaagatccagtgcgacgcgtgcgagagcgcggcggcggcggtggtgtgctgcgcggacgaggcggcgctgtgcgcggcgtgcgacgtggaggtgcacgcggcgaacaagctggccgggaagcaccagcggctgccgctggaggcgctctcggcgaggctcccgcgctgcgacgtgtgccaggagaaggcggcgttcatcttctgcgtggaggaccgcgcgctcttctgccgcgactgcgacgagcccatccacgtccccggcacgctctccggcaaccaccagcgctacctcgccaccggcatccgcgtcggcttcgcctccgcctcgccctgcgacggcggcagcgacgcccatgactccgaccaccacgccccgcccatgggctcctccgagcatcatcaccatcatcagcagccggccccgaccgtcgccgtcgacacgccctcgccgcagttcctgccgcagggctgggccgtcgacgagctcctccagttctccgactacgagaccggcgacaagctgcagaaggagtcgtcgccgccgctcgggttccaggagctggagtggttcgccgacatcgacctgttccacaaccaggcgcccaagggcggcgccgccgccggccggacgacggcggaggtccccgagctcttcgcttcgcaggcggccaacgacgtggcgtactacaggccgccgaccaggaccgccgccgccgccttcaccgcggccaccggcttccgccagagcaagaaggcccgcgtcgagctccccgacgacgaggaggattacctcatcgtccctgatcttggttgaatcttgaagaggagttcgttccagaggagaagatcctcctcctgtgttcttgggttttgccatgtccttgtgttttctgcttgtatgctagcttttgtgtttaacgttagtcctgctcaactgtg

SEQ ID NO: 2503 - DNA, 1142 bp, Oryza sativa
  ref <308>: DATABASE ACCESSION NUMBER: AK060323
  ref <309>: DATABASE ENTRY DATE: 2001-12-06
aagaagaggcggagctggatcgatctatcgttgagttgttattgccacacaaacacaaacactgacgcccatggcctccgacggcaccgatgtcgtggcgctctacggcggcgccaatggcctctcgcacaagtccggtagcttctccgtcaaggtgggcctcgcccagatgctgcggggcggcgtcatcatggacgtggtcacccccgaacaggcgcgcatcgccgaggaggccggcgcctgcgctgtgatggcgctggagcgcgtccccgccgacatccgcgcccagggcggcgtcgcccgcatgtccgaccctggcctcatccgcgacatcaagcgctccgtcaccatcccggtcatggccaaggcccgcatcgggcacttggtggaggcccagatcctggaggccatcggcgtggactacgtggacgagagcgaggtgctcaccctcgccgacgacgcccaccacatcaacaagaacaacttccgcgtccccttcgtgtgcggctgtcgcgacctcggcgaggcgctccgccgcatccgggagggcgccgccatgatccgcaccaagggcgaggccggcacgggcaacgtcgtggaggccgtccgccacgtgcgctccgtgatgggcgacatccgcgcgctccgcagcatggacgacgacgaggtcttctcctacgccaagcgcatcgcggcgccctacgacctggtcatgcagaccaagcagctggggcgtctccccgtcgtgcagttcgcggcaggtggggtggccacccccgccgacgctgccctcatgatgcagctcggctgcgacggcgtcttcgtcggctccggcatcttcaagagcggcgaccccgcgctgcgcgcccgtgccatcgtgcaggctgtcacccactacagcgatcccaagattctggcggaggtcagcagtgggctcggcgaggccatggttggcatcaacctctccgaccccaagatacatgtcgagcgcttcgccgcccgctccgactagctagcaacgtagagtgccatccttcctttccgtcccctgccaccactgccaccaattccttcctcataattactgccatatctgtgatcgatggttgtcatatattgaaaataaacaacaaacatagtgt

SEQ ID NO: 2504 - DNA, 1097 bp, Oryza sativa
  ref <308>: DATABASE ACCESSION NUMBER: AK060324
  ref <309>: DATABASE ENTRY DATE: 2001-12-06
tctcttgccattgcaagccttacacgtgaccctgcgcatgctgcgtgtccccgagcagctgtcgcacagaagcagttgcaacctgcgagcggaaacccacctccaccccgtcgccggcctgccgccgccgccgccgccgcttgccctcctccgccttactcggcctccggcgcctcctgaccccccggccatgggttgctcttcgtctctgccagctaataatgctggaggggtaggtactatcagcaacgagaattctggtactgatctgaagaacttgcgagtgaagttggtattgcttggagattcaggtgttgggaaaagttgcattgttcttcgctttgtccgtggtcagtttgaccccacttcaaaggtgactgttggtgcatcatttttgtcacaaacattggcgttggaggattccacaacagtaaagtttgaaatatgggatactgctggtcaggagaggtatgctgcattggcacctctttactaccggggagctggtgccgcaattgttgtgtatgacataacaagttcagaatcatttaacaaggcacaatactgggtgaaggaacttcagaaacacggtagtccagatatgatcatggctttggttggaaataaggctgatctacatgacaatcgtagtgtatcctctcaggatgcacaagagtatgcagagaggaacactatgtttttcatcgagacatcagcgaaaacggctgataacataaaccaactattcgaggaaattgcgaagaggttgcccaggccaacaccatcctgaattcctgattggtaactgacccaggaaacaggctggcaactgtgtattgtacaacagcagtaaaagctctgtatgcacattgtttggaaatgcaacaactgtcatgtaaagcaactactttgctccttgctgcttctgtttccagcttggtcaagtgagctcagtgttttgctcagcacaagctgataggctatacgcatggccacatggtcattagcagttgcattatgctgcaggaatttaaccgtttcctgtgaaaatcttgtgaaattcctgcgttcaaaacagagcctttatttccagtgcc

SEQ ID NO: 2505 - DNA, 1060 bp, Oryza sativa
  ref <308>: DATABASE ACCESSION NUMBER: AK104294
  ref <309>: DATABASE ENTRY DATE: 2002-08-28
accatgatttgcctccgagccgccttccccttgacctcctcccctctccgccgcctcgccctcaagccctcctcctcccgcgccgccgccgccgccatgtcgtccgccatcgccgcgccggtcgagcacatcgtgctcatcaaggtccgcccggaggcggcgtcgtcgggcgccgccgcggcgatggtgtcatcgctgcaggcgctgtccacggcggtgcccgggctgtcgtacatccacgtcggccccgtgctccgcctccggtcgccggcggcggaggcgctgggtccgacccacgtcctccactcccgctacgccaccaagcccgacctggcggcgtacgcggcgcacccggcgcacgtcgccgccgtgcaggggcacgtcctccccaacgcgctcgactccaccgccatcgactgggtcaacgccgccctggtgccgtccccggtgaacccgggctccgccgtgcggctctccctggcgaagttgaaggagggtgtggaggcgcaccagctcgcggagaagctcgccgcggcgacggcggcggccggggaggcgaagggcgccaaggtgagcttcggggagaacttctcccccgcgcgggccaaggggtaccagttcgggatggtggcggtgttcgacagcgtggaggggctcgacgcggtggacggggacgggaaggtggaggcggccaaggccatagtcaggccgctgctcgacgacgtgctcgagctggaattcgtcgtcggacctgccgccgcggaggctccggcgccggccaacctctgagaggtttgcctttggttcgaaaactctagttgccttgtttgatcggttgagaataatacaatccttgtgattgggtgtgctgtggcctgtggttagcaatggcaattgattttgaaatgaataagaattgtacctgactacctgaactaggaattaggatggccgctcttgcttggacgtctaccgaacaagagcttgctgtcttcagtgttcatcttttcttctcgctctgcaactgcaaatttgtatgtcagataattttaagactcgc

SEQ ID NO: 2506 - DNA, 1157 bp, Oryza sativa
  ref <308>: DATABASE ACCESSION NUMBER: AK060325
  ref <309>: DATABASE ENTRY DATE: 2001-12-06
aagaattcctcctcctcttcctcggattccttccccctcttcggcggcgggctcccccaccggcaccggcgtccccgctcccggcgtcgccattggcctcctccctcgtctctgctcgacggaatatgaagttaaggccaaaaagacctggatggaagtcacttatgcctctgcagttgagcaggaaatctgcactgcgtttctttttgtttcccaaggttcaggctgcgggtcaatctccagatgacacaccagtttatcttaatgtgtatgatttaacacccatgaatggctatgtatattgggcaggccttggtatatttcactccggaattgaagttcatggtgttgaatatgcatttggagcacatgactacccctcaagtggagtatttgaagtagagcctcgtcaatgccctggtttcagattcaggaaatcgatatttctcggtacaacatgcttagatcccattcaagttaggcaattcatggagctacagtcagtgaactacaatggagatacttaccaccttatcacaaagaactgcaaccacttttgcaaggacatgtgttacaaattgactggtaacaaaattccaaaatgggtaaatcgcctcgccagaataggtgccatttgcaactgccttctgccagaatcactcaagatatccccagtcggccatgatccaaacagtcgacctgaagattgtgagaaaaggcggctgaggaacccgttgagctgcttctcttcgatctcgagccagaggcagctgcccccatcttccccgttcccgacatcacctgtgaaagagcctcttgcgtacagttcatcaaggaaatccagcgctccatcactgaggaataggtagcctggcctcccttgtgtaacttttgataccaagttaggctaatttggtcagtggcaacatctggagggcactaccctgcatgctgccgcaactgtcagctaattctttttgctcggtatcagtcaaaatgcttggtggtgttgttgtatcatgtaagtggaactaatgcgagtgagtcacctggagaggtgtctctgtgtgggtgagagtgaatgcctctcaattctacccaccccctgtactgatcatgagacacgaaccgggatgtattttgtatattattaatcc

SEQ ID NO: 2507 - DNA, 1538 bp, Oryza sativa
  ref <308>: DATABASE ACCESSION NUMBER: AK060326
  ref <309>: DATABASE ENTRY DATE: 2001-12-06
aagattgcgagcggcggcgcctcctccacccgctcttcgactcctcccgattctccgggttttctctcgatttccgccgaatttcgctccgctccagcaatgggcgaattgggtgctctccagtccatcgtctaccaccgcggatcgctccgcctgcttgatcagaggaagctcccactcgaggtggactacatcgacgtcaagtgctccggcgatggatggaacgcaatcagagacatggttgtccgtggcgctcctgcgattgccatagcagcggctttggctctggctgtagaggtttctgggttggaggatttcaccggtacgcctgcagaggcagcagtttttgtttccgagaaattggagtaccttgtatcgagccgcccaactgcagtgaacctatctgatgctgcaaccaagcttcggagtttagtttcaaggacagcagaaactgagaaagatgccaaagcaatctttcaggcctacattgatgcagcagagaccatgctagttgacgatgtgtcagataacaaggcaattggctctcatggagctgagtttctcaaacagaaacttgaggtctctaaagatatttctgttctaacacactgtaatactggcagtcttgcgactgctggttatggaactgccttgggggttattcgtgctcttcactctggaggaattctagagaaggccttttgcactgaaactcgtccatttaaccagggttccaggcttacagctttcgagttagttcacgacaaagtacccgcaacgctgatagcagattctgctgcagctgcactgatgaagagcgggtgtattcaagctgtaatcgttggagctgatcgtatcgctgccaatggtgatactgctaacaagattggcacatacaacctcgccatttctgcgaagcatcacggtgtgcaattctacgtggctgcgccgataacttcgattgatctctccctcccatctggtgagcaaattgtgatcgaagagaggtctcccaatgagttgctgaactctgaaggtggcctaggtaagcaagtcgccgcgtcaggtatatcggtgtggaaccctgccttcgatgttactccggcaaatctgattaccgcaatcataacggaaaagggtgtgatcacaaagtctgatgctgatgagactttcaacatcaaagatttcatccagtctgcaaaattgtactctaccatgcagtgaggggtcacctctttaggatgaagaagatccatcctctatctcagggaggatcgtagagtgctcttggaataaggaagatggctgttgggtctgcatgcgtatatccgataaatcaactccaaatgatatcttagggaggattatcaattatgtcccttttgtcaaggtgactcgcctgcaaaatgaaggatatagttgggggggggggggggggggttcggctgctgatggacatctgtaaagttttctataaccactgtatccaacatggtattggtatatcacactaaaggagcaaaaaagttcgccttatc

SEQ ID NO: 2508 - DNA, 975 bp, Oryza sativa
  ref <308>: DATABASE ACCESSION NUMBER: AK060327
  ref <309>: DATABASE ENTRY DATE: 2001-12-06
aagccactcgccactgcaaagcgctctctctctctctctcgcatcgcgcgcagccttcctcatccccgtcctgatccactccacctccctaatccacagcgcgcgccagaggaaatccggcgccggtcgaggcggccgcgccgcgccgccgtcacgcccagcccactcgattcggtcgcgtgtgcgctaggaagttcgtcatacgcctcgcggttttcacttcgtgtgtttttcttttaaatttttacctgtgcttcgtttaaagcctctcttgatcttaggtatagctttgctcgatctgattataggtatgttgtatgtttctggtctcccgtgattgcgcgtggattgtgattatgactaatttgcttgatctgaatatctgattgtggtggtggtgtgtgtgtgtgtgtgtctgatttgtctgatctgttgtggattattattgtatgatttaccgtggttttatgttgtttatatataagcgtttgccatgagtctgattaattgtattgttgcggtttttcctaggtgtcatactgtcatgctcgatttttacaaggtttagtgcaaactgatagatgatgtccatccccaaaactccgtctaccagtattggttcatgtgcgagcacacgggatagttcgagttcctgtttgatattgattcgctggcgctggttgtttggttggtttattagctagagttgtttgtgtgcaaaggtgggatcatggttgcaaaggcatattgatgaatgacgattcataagcgtggaaagcaatctctgtgcaaggggttattaggattctttgtgcgtattcactctaaaccgatagtcttgtattgctatcagcaccacgttatctatttcctaaccaatgttttctgcatatggactctgcattttgcttcctctccttgtaccacacccagtaccctatgtttgtgcctctcccatggtccatctctcctgtt

SEQ ID NO: 2509 - DNA, 1266 bp, Oryza sativa
  ref <308>: DATABASE ACCESSION NUMBER: AK060328
  ref <309>: DATABASE ENTRY DATE: 2001-12-06
ctctgccgcacctgcgccaccaccaccaccgttcgtccgctcgccgcgtcgacgagctcctcctccgcttcgcgcttcgtgtcagggtttggagtggagtggagggggaaggaaaagggggagggatgatgcacgcgaagtcggagtcggacgtgacgagcctggcgccgtcgtcgccgccgcggtcgccgaagaggggcggcggcgtgggcgtgggcggcgcgaactactacgtgcagagcccgtcgcgggagtcgcacgacggcgggtacaagtcgtcgtcgatgcaggcgacgccggtgtacaacagcccgaacgagtcgccgtcgcacccttcctacggccgccactcccgctcctcctccgtcagccgcttctccggcaccctccgcgacggctcccgcaaggccggcggcgagcgcaaggcgctcaacgacaagggctggcccgagtgcaacgtcatcgaggaggagggcccctacgaggacctcgccggcgacaccggcctctcccgccgctgccagatcgtcctcggcttcctctgcttcgtcctcctcttcaccgtcttctgcctcatcatctggggcgccgctcgcccctacgagcccgacgtcgtcgtcaagagcttgacgatggatgatttctacgctggtgagggcacagaccacagtggggttccaaccaaattggttacactgaactgctctctgcacatagctgtatacaaccctgcttcaatgtttggaatccatgtcacgacgggtcctattcgccttctctattcagagatctctatcggggttggacaggttcgcaggtactaccagccgaggaagagccaccggttggtgacggcggtggtccacggcaacaaggtgcccctctacggcgccggcggcgggctgatgctgtcgagctccggcggcgcggtgccattgacgctggacttcgacctcacctcccggggatacgtcatcggcaagctggtgagggtgacgcacaaggtgcacgtgacgtgccccatcgtcgtcgacgccaagaagacgaagcccatcaagttctccaagaaggcctgcgccgtctacaagatctgagaggccatcgtcgccgccgccgtcgccggtcgtcgtccatcacgccggcggcgggcgtcgcctgcagtgatcgatcggcgacggagccgttcttctgttcttgcagttgttgtatgtattatgcttgtgaagaacaataagcgtttatatggtcacttgttaattttacttg

SEQ ID NO: 2510 - DNA, 1166 bp, Oryza sativa
  ref <308>: DATABASE ACCESSION NUMBER: AK060329
  ref <309>: DATABASE ENTRY DATE: 2001-12-06
atccatcccgctctctctctctcgacgagagagagaaagtgcgaagatatgctttccgtcgcccgccggcccctctccgccgccgtccccgtcggcaacctcctcggcatccacctcttccaatgccctgacacggtgggcattgtggcgcggctgtctgagtgcatcgcctcgcgtggtggcaacatccacagtgtcgatgtctttgtccctgacgacaaacccgtcttctactcccgtagtgagtttacctacaatcccatgctatggccgcgcgatgtgcttcgcaccgacttcctcaatctgtcacaacacttcagcgcacaaagatctactgttcgagtccctgatcttgacccgaaatacaagatatctgtactcgcttcgaagcaggatcattgtttgtttgacttgctctatagatggcaagagggaaggcttccggttgacatcaattgtgtcataagcaaccatgatcgacttaaagataaccatgtcagacgtttccttgagagacatgggatcccctatcattacctaccgacaagcccaggaaataaaagagagcaagagattttagaattggttcaaggtaccgattttgtggtactggcaagatatatgcagatattatctgaaggctttctcaaggcttatggcaaagatattattaacatccatcatggtcttcttccctcatttaagggagggaatccttcgagacaggccttcaacgctggagtaaaattgatcggcgcaaccagccattttgttaccccagaacttgatgctggcccaatcattgagcagatggttgaacgggtgtcccacagagacacgctacagagctttgtggtgaaatctgagaacctagagaagcagtgcctagcagaagctataaagtcgtactgtgagctccgtgtgctaccatatgaattgaagaagacagtagtgttctgatatcttttgaaggaagcgattttgtttgtttgtttttatttgttgataagaggaaattactacagtacaaaattttgtggtgttgattgctttggtgataaggaggtgggtgtgtgggcgtggctggacagtgcattttgtaattgattgagtataacaatactccaaagcaaataaaatgataatgcataatagtagtaattggt

SEQ ID NO: 2511 - DNA, 1254 bp, Oryza sativa
  ref <308>: DATABASE ACCESSION NUMBER: AK060330
  ref <309>: DATABASE ENTRY DATE: 2001-12-06
atttaggattttccctcaagtcgcccaagccaccgaagaaacccttatcatcaccatgagcgctgcccaacctacgtacaagccgctggccaccgacgccatctcgttcctccaggacttggctgctggtggtgtcgctggcgccatctccaagacggccgtcgcgccgatcgagcgtgtcaagctcctgctccaggtgcaggccgcttcgacccagatcaagcccgaggaccagtacaagggcattgtcgactgcttcgcgcgtgtgtcgcgtgagcagggcgtcggctcgttctggcgtggtaacttggccaacgtgatccgttacttcccgacccaggcgcttaacttcgccttcaaggacaagtacaagcagatcttcctcggcggtgtcaagaaggaccagttctggcgcttcttcatgggtaaccttgcctcgggcggtgctgctggtgccacctcgctcctcttcgtgtacccgcttgattttgcccgtacccgtctcgccgctgatgtcggcaagggcaagtcgcgtatgtacactggtcttggtaactgcatcacgaccatctacaagtcggatggcttcaagggtctctaccagggcttcggtgtctcggtcggtggtatcattgtgtaccgtgccgctttcttcggtggttacgacacgcttcgtgatgtcatgctcaaggaccccaaaacgccccggtgtggcagaagtggctcgtggcccagacggtcacgacggtcgctggtattgtgtcgtacccgttcgatacggtccgtcgtcgcatgatgatgcaggctggccgcaaggacatcctctacacgtcgaccatggactgcttcttcaagatcctccgtaaggagggtggcggtgccttcttcaagggtgcgggctccaacatcatccgtggtacgggtggtgccatcgtgcttgtgctctacgatgagttcaagcgcctcatcgaccccaacgccaagccgtcgtcggagtaaggtgtttgtcggcggtggagcgtgtcgtgaggtagcgacaccgagaagctcgcgtgcagttgaagactgctgcatcctgctgaactgtgttggtcatcatcaagacgtgactaggaggagggggagatccgtcttcatttccagttcgatagaccaggtttttatggctcttgctgcgtgctttggcgtgcagctaacatcataaaaaccatctcattatgttttgtattaccatgaccatgtccgccgcgttcg

SEQ ID NO: 2512 - DNA, 1201 bp, Oryza sativa
  ref <308>: DATABASE ACCESSION NUMBER: AK060331
  ref <309>: DATABASE ENTRY DATE: 2001-12-06
aagttgctaagccaggtgcaggtccaggtggtgccgtggtggtagtagcagtagtagccagggcaggaatatctatcgatcgatgagcagcagcagcggcggcgatgggggtgggtacaattactcggaggattgggtggtgaattcgcgagggatgcggctcttcacctgcgcgtggattcccaaggagagcagtagaggcgtggtttgcctgtgccatgggtacgcggtggagtgcagcgtgacgatgcgcggcacggcggagcggctggccagggcgggctacgccgtccacggcatcgactacgagggccacggccactccgacggcctccagggctacgtccccgacctcgacgccctcgtccgcgactgcgactccttcttctccaccgccaccgcctccttcccccgccgcagattcctcctcggcgagtccatgggcggcgccgtcgcccttcttctccaccgcttgcgccccgacttctggaccggcgccattctcgtcgcccccatgtgcaagatcgcggaggagatgcggccgcacccgatggtggtgagcgtgctgaaggtgatgacaagcatcataccgacgtggcgggtggtgccgacgaatgacgtgatcgacctggcatacaggatgcaggggaagcgagacgagatccgagggaacccactgtgctacaagggcaggccccgcctcaagaccgcctacgagctgctccgcgtcagcatcctcatcgagtccaccatcctcccccacgtctccctccccttcctcatcctccacggcgccgccgaccgggtcaccgacccctccgtcagcgacctcctctaccgctccgcctccaccaccgacaagaccttccacctctacaccggcatgtggcacgccctcacctccggcgaactccctcacaacatcgatgccgtcttccgcgacatcatcgactggctccaccacaggacatcccccacctccgcttcacatgtgcaggaccacgacttaagtacgtctttcgaggcggagcgcaaggccaagcacgacgacaccatccattgcggcaagcaaacatcatagtgatcacctacctactatataatatggctagctagctgctatacttactagcatgtatgtctttactatactacatatatccttttaaaaaaatatataatgctattgacttttagactt

SEQ ID NO: 2513 - DNA, 952 bp, Oryza sativa
  ref <308>: DATABASE ACCESSION NUMBER: AK060332
  ref <309>: DATABASE ENTRY DATE: 2001-12-06
gatcgcccgccacgtcaccacgccacaccccattcgctcgttaacgggtccgcatcaagatccgctaagacccttcttcttcctctcctccggcgacagagaggccaccggcggcggcggcgggcggagatgttcctggtggactggttctacggggtgctggcgtcgctggggctgtggcagaaggaggccaagatcctcttcctcggcctcgacaacgccggcaagaccacgctcctccacatgctcaaggacgagagattggtgcagcatcaacctacgcagtatccgacttctgaagagctgagcattgggaagatcaagttcaaggcgtttgatttaggaggccatcaaattgctcgccgtgtgtggaaagactactatgctaaggtcgacgcggtggtctacctcgtggatgcctacgacaaggagaggttctccgagtcgaagaaggagctcgacgccctcctctcggacgactccctggccaccgtccccttcctgatcctgggcaacaagatcgacatcccctacgccgcgtcggaggaggagctccgctaccacatggggctgagcaacttcaccaccggcaagggcagggtgagcctcggcgagtccaacgttcgccccctggaggtgttcatgtgcagcatcgtccgcaagatgggctatggggatgggttcaagtgggtgtcacagtacatcaagtagggtgttgttagtttttgctggaaaaatgttgaggtagtcttcatagttcatactcctgtttcaccttaccacagagatgattttaggagggagctagagctatagctagcaatctggtcatggtggttcatggttcttccggtacatatgtggtggaagcagcgaaagactgggatttgtgctagatttttcttcagttaattaaaaagtgtgacttttaaagatatagaaacatcttttt

SEQ ID NO: 2514 - DNA, 1040 bp, Oryza sativa
  ref <308>: DATABASE ACCESSION NUMBER: AK060333
  ref <309>: DATABASE ENTRY DATE: 2001-12-06
gcttttccgaaccctttccattttttccacccacacagcggcggcgagggtttccgatggagaatggagacgagacgttcgcttcccccaccgccggcggcggcggcggcgagttcgagcagccgctgaccaacggcgggggaggaggagggggcggaggggtgtaccccgccgccaaggcctacgacgcgggcgagttggacgcgctccgcgaggcgaagcgcgacctggaggacaagctcgccgccgtggagcacgagaaccggttcctcggcgcggaggcgtaccgcctcgaggggatcgtgtcgcaggccagggaggacatcgccaccgccgagcacgccatcgccgcctccgagggggaggccgccttgctccgcgacgaggtcaagcgcgtgaaggagctcctcgccgccgagaagtccaaccacgaggccgagcggcgcagggccgcggacctcgacgccgagctgaagggcgtgcagaaggaggtggcggccctcgaggaggagatcaaggccctgaaggcatccgccgccgccgccgatgcagaggatgaggatgaggctgctgctcccgcgacgccatctaaggaagcggaggtaggttatcacgggctgatggcagctgccgccgctggagccgccgccacggccgtcgttgcggtggtcatccttcacctgaagaggtaatctggtgctgtgacgcgtaagaagttttggtctgctgctatggcttacatgagattggattacccccttttgccgtggtgctggtattactggaggtaatattactttagcattccactcgctagcatttagagtcctagagaggtggagacttatcgtgagtccgtttcggttctgcatcctcacatggtaataagaatgtcaagacaattctgagtgagacgcatgtggttgtgttatgttatgttattttggtgctgtactgatttttaattctgtcccatggattcttgcattgctctgctgtttgtgtgtgaaattactacgattgcagaattaatgacctac

SEQ ID NO: 2515 - DNA, 1008 bp, Oryza sativa
  ref <308>: DATABASE ACCESSION NUMBER: AK060334
  ref <309>: DATABASE ENTRY DATE: 2001-12-06
aattcaccctcttctcatctctgtgtgttgttacgtgcaacttggcagctggacctgaagggccatgtgtacgggctgctcgcggcgcacccggtcgcgccgctggtgtcgctgcaccacctcgaccggctcaaccccatctcccccaactggctcaagcggctgcccgccgtccggtccctcgtcggcgcgtcacgccacgacccgtcgcgcacgctgcagcaggccatctgctaccaccacgacgctcgcggcggcggtcgccggcggcggcggcggcggcaattcaccctgtccgtgtccgtttcctggggatacatggtccacctctacccggccgccgtcccgccgcacgagctgcagacgccgctgcgcaccttccgcgcgtggtcgggctcgccggcggggccgttcacggtgaacacgcggccggaggccacgccgaacgcgacggcgctgccgtgccacaggaagcccataatgttctacctggaccgcgtcacggcgatgtcgacgtcgaccacgaactggaccttgacggagtacgtgccggaggtgttgtccggcgaacgctgcaacaccaccggcttcgacgcggccaccaaggtgcagatgatccaggtgatcgcgcttaagatgaaccctgccatttggaaacgggcaccacggagacaatgctgcaagatgcagaacgcaaacgaaggggacaagttgatcgtcaaaatacacgagtgtaagcctgacgaggcaacaacttcagtatagacaaatgagaggtcgcgcgcgcgtgcctgacttggttaatcgtgatgaagtaaaaaaaaaacagttttccctgaaagaacgggaagaaagattttgtttggtttcatttgtagacatagcttcattccttcatgtgtgtgggatacattgattgtactaatgtacttttatctgactgccttgttaatcgataaagagatatcaagctatatatttcttttgtgttttgccaatgcggcagat

SEQ ID NO: 2516 - DNA, 1603 bp, Oryza sativa
  ref <308>: DATABASE ACCESSION NUMBER: AK060335
  ref <309>: DATABASE ENTRY DATE: 2001-12-06
tgctagagtaaactggatgcataatagtgctattgctgttcaagttctcaacagaactcactcaaaacttaagctacttaagtttgacatcgcttcaggtaaaagggaggtcatactagaggaagagcatgatacgtggataacattgcacgattgttttactcctctggataaaggagtgaatagtaaacatccaggtggatttatttgggccagtgagaagacaggatttagacacctgtatcttcatgacaagaatggtgtgtgcttggggcccctcacacaaggtgattggatgatcgaccaaattgctggtgtcaacgagagttctggagttatatattttacaggcacattggatgggccattggagacaaatctttactccaccaacctatttccggattggagccttcccttgcaagtccccaagaggttgactcatggcacaggacgtcattcagtaattcttgaccatcagttgctgaggtttattgatgtgtatgactcaataaaatctccacctgtgatcctgctatgctccttgcttgatggaagtgtgataatgcctctatatgagcagcctctggctgttcagccgcttaaaaagtttcagcagctgtctccagagatagtacagattgaaggaaaggatgggactgctttatatggaactctttatctccctgatgagaaaaaatatggaccacccccatacaaaacactcgttaacgtttatggcggtcccagtgtccagcttgtaagtgactcatggataagtacagttgacatgagagctcagttcctgcgtagtaagggtatattagtttggaagatggacaatcgaggaaccgcaagacgcggtttgcagtttgagggacagctcaaatacaacatcggtcgtgtcgatgctgaagatcagttagcaggtgccgagtggctaataaagaaaggcctagcaaaacccggacatataggtctctacggctggagctatggtggctttctctcggcaatgtgcctcgcgagatttcccgacacgttcagttgtgcagtttctggcgctccggtgacagcatgggatgggtatgacactttctataccgagaagtacatgggtctgccctcggagcagcgcgacgcttacagatacgggtcgatcatgcatcatgtgaagaacctccgagggaggctgctgctgatccacggtatgatagacgagaacgtgcatttcaggcacacggcgaggctcatcaactcgctgatggcggaggggaagccctacgatatcctcctcttccccgacgagaggcacatgccgcgccggttaggggaccggatctatatggaagagaggatctgggattttgtagagaggaacctgtgaatgtgaagagaggaagagagagagagaactacctgtggtgtataaatcttttgctcgctgtgggcatgacttgggatgttgttacagtatgttgaagctatttcatttccatcatcatcatctgtagttatccgcagactccagggatatgattcttttggctgtgataaggatggcagatagatgttaatttcacattgccttcctctttcaccc

SEQ ID NO: 2517 - DNA, 1082 bp, Oryza sativa
  ref <308>: DATABASE ACCESSION NUMBER: AK060336
  ref <309>: DATABASE ENTRY DATE: 2001-12-06
aacaaactttctcgcccaaatccatccagcccgtcgccgcccgccgcccgccgcgcgcgcgcgcacccgagctcccgctccctcccctccgatggcggcggcggcgcgctccctcgcgctgctctcgaccgcctccgcgtccctcggcctcggcgtcgcgcgctcctccgcccgccctcggtccccgtttgggcggggcctcgccctccgcggcctgtcgtcgtcctcgtcctccttcgccgccaccgccgcggtgatggggaaggccggcaccgcggaagccgccgacgccgggatggacgccgtccagcagcggctcatgttcgaggacgagtgtattttagtggacgaacaggacaacgtcattggccatgattccaagtataactgccatctcatggaaaagataaattctggtcatgtcctccacagagcgttcagtgtttttcttttcaactccaaatatgaattgttacttcagcaaaggtctgctacaaaagtgacatttccacttgtctggacaaacacttgctgtagccaccctctataccgcgagtccgagctcattgaagataaaagcctaggggtcagaaatgcagcacagcggaagctattcgatgaactgggaatacaagctgaagaactacctgttgaccaattcattcctcttgggaggatgctttacaaggctccatctgatggaaaatggggcgaacatgaactggactacctcctattcatggttcgtgatgtggagctcagcccgaatcctgaagaagtggccgacgtcaagtacgtgaatcgtgatgagctgaaggagttgctcaagaaggcagatgctggtgaaggcggcattaagctgtccccttggtttaggctggttgttgacaacttcctcatgagatggtgggatcatgttgagcaagggactctggaggaggccatcgacatgaaaacaattcataagttgtagagtataaatcgttgggcaacgtccttagaaaataaagaattgttgctttaaccttttcacggaaataatccagaaagaaatacatgttcttatgcaggttttatgaggt

SEQ ID NO: 2518 - DNA, 1203 bp, Oryza sativa
  ref <308>: DATABASE ACCESSION NUMBER: AK060337
  ref <309>: DATABASE ENTRY DATE: 2001-12-06
tgtcctatgtttaggaactaggtgggagctgtaatctggattggtccatagccagattcagggctcagaaaaccaggtctgcagattactcctgcttgtaatatgcctctgttgtcactgaagaatggggggagggtggctattgtaaatcttcaggcaactccgaaggataaaaaggcaagccttgtcattcatggacttgtggataaggtaggtcattgctggggttatgtatatgatgaatctgcgtatccttccatatattcgtactgactttgttcaaattagtctccggaactcggtcaaaaaaaaatgcgtgagaaggactctccgagtaacaagcattcatggcttgcgagcacctttgccatttcttcgatcagttgaggtttcctttcctgaaagacctgacatgaagcctgtagtactaaaggagcaaccattttctttgcagagagaaacatcaatgaatagaccgtttgtcatgctattgacattcaactttagtgatggttgcggctgttcgagctcttccattgaatggcctgttgattttctgaagcaaaaagacagctttgtcagggatagaagtctagtcctgcaagagttgcaacatgctgcagagcatcgatcacgtgcagggcagcatgcaattctggagagggagggtgtgccaagagctgaaacgtcaattcatgcacttgtgaccaacatcgtcaggtatgatactgaagatagcaaggcggcagttcccatggctacatggatgaacagcaacggcagcctttcgaaacggcatatggatgccattggttgcaacccagcatcgtcaaaaaagcagaagttggttgctactcgtcatcggcgaaagggcttgaaccctgctactcagaaagtttgatggctgtttgttctagttgtcagactagagttaggatagatgcatgagatgttcacagtagctagagtaaggtgttaacaacttctagtgcatgtgaaagctggtagaattttaacttgacaagcccaacgtaattcagcaaccatctcaaaagaaactggttgtggggcttgatggtatgttttgtaaagctcgggaagatgaacaaacctctaaatcattaaggatgatctgaggaactggaggtaaagtgaaccgtacaaagaaaataaatggaaggcgagacaattttttattgctgc

SEQ ID NO: 2519 - DNA, 1182 bp, Oryza sativa
  ref <308>: DATABASE ACCESSION NUMBER: AK060338
  ref <309>: DATABASE ENTRY DATE: 2001-12-06
acctcacactcgcactgtcacgacgtcgcctctgcaatctgaacttctgcggcgaggagggagctcgagccgcccggaagccatggccacggcggagcagcagcagcagatcgagcacgtccacctccccgtgcggggctcaccctccacgtcgcgcaagccggcaaaggcgagctcgggacggtggtgttcctgcacgggttcccggagatatggtactcgtggcgccaccagatgctcgccgtcgccgccgccgggtaccgcgccgtcgcgccggactggcgcgggtacgggctctccgaccagccgccggagccggaggcggcggagtacgacgacctcgtcgaggatctcctcgccatcctcgacgccctcgccgtgcccaaggcctttcttgttgggaaggactttggggccatgccagcttatagttttgctctctgtcatccaaatcgtacatgtggtgtgatgtgtttgggcatccctttcggcgttaatagttcatccttaaacaccttaccagaaggattctacattttacgttgggcgcaaccaggaagagcagaagctgactttggcaagtatgatatcaggagagtcgtgcgcactatctacatactcttctctaggaacgagatccccatagctaaggaagatcaagagatcatggatcttgcagacttatcgacacccctccccgagtggtttagtgaggaggatcttgatgtctactcatccctctatgagaagtctggttttcgatatccgctacagatgccatataggtccatgcatcaaaacaaaccaattggagatgcaaaatttcaagtcccggtgtttgttgtcatgggagagaaagattatgtcttcaagatacctggtatcgagtctgttatgaaagacggcagcatggagaagcatgcaccagacctaaagatcacctacattcctgaaggaagccattttgtgcaggagcagttccctgagtttgtgaatgagcttcttcttagcttcttgaaagaccatcctatggctgtttagaaactccacattgtgcctcacccttactacaacttcgctacaagaacactatattgttcgatattatgatgtgaattatcaatgaaggaactggtatggttgatgttactttcagcaacgccagttgtgtttgaacttgtt

SEQ ID NO: 2520 - DNA, 1580 bp, Oryza sativa
  ref <308>: DATABASE ACCESSION NUMBER: AK060339
  ref <309>: DATABASE ENTRY DATE: 2001-12-06
atgaggaaaatgcagaaggtgactggttacatctttggaacgatatggtggggattcgggcttaatcttttcgcctatttcattgcttctcacatcgcaggtggatgttggtatgtccttgcgattcagcgtgtcgcctcctgcctccaggaggaatgcaagataaagaacacttgcaacctaacatcacttgcttgctccaaggagatgtgttttcaccttccttggtcagataagaatggactggcatgcaacttgacttcttttggccaacaaaacattccagactgtctaagcggcaatgggccctttgcttatggaatctacaaaggggctctgcctgttatttccagcaattcacttgctgttaaaatactctaccctatattttggggactcatgactctcagtacttttggtaatgatcttgagcctataagcaattggcttgaggtgattttcagcataatcaatgtacttagcgggttgatgctcttcacattgctgattggaaacatacaggtcttcttgcatgctgtcttagcaagaaagcgaaagatgcagctgcggttccgggacatggaatggtggatgcggcggaggcagttgccgtcccgcctgaggcagagggtccggaagtacgagcgtgaacgctgggcggccatcacgggagatgaggagatggagatgatcaaggacctgcctgaagggctcaggcgagacatcaaacgctacctctgcctcgagctagttaaacaggttcctctgttccatggcatggacgatctcatcctggacaacatctgcgacaggctgaggccgctggtgttctccagcggcgagaaggtgatccgggagggcgacccggtgcagcggatggtgttcgtcctccaggggaagctccggagcacgcagccgctggccaagggcgtggtggcgacgtgtatgctcggcgccggcaacttcctcggcgacgagctgctgtcgtggtgcctccggcggccgtccctggaccggctgccggcgtcgtcggcgacgttcgagtgcgtcgagacggcgcaggcgttctgcctcgacgcccccgaccttcgcttcatcacggagcagttccggtacaagttcgccaacgagaagctcaagcagacggcgcgctactactcctccaactggcggacgtgggcggccgtcaacatccagctcgcgtggcgccggtacaaggcaaggacgacgaccgacctggcgtcggcggcgcagccgccgtccgccggcgggcccgacgacggggaccgccggctccgccattacgcggccatgttcatgtcgctcaggccacacgatcacctcgagtgagagcagccgtggattgggaccgagagtgacggggcatatgcaatgcaaccgtacgcgcatggagcggaccaccctgcgccggccatatatcattgattccattgtagtacgatcgtatcctgctgccggtcttgacaattgattagcatttgtcattgtataagatgaccaataatggttatgatgtagttccaacaaaataatgcaatgtgctccttggttggcgccgc

SEQ ID NO: 2521 - DNA, 669 bp, Oryza sativa
  ref <308>: DATABASE ACCESSION NUMBER: AK060340
  ref <309>: DATABASE ENTRY DATE: 2001-12-06
actccagtactccaccacaagctctagcttacagctcactaccagtgtacattgttgctagttagctagagctagatctcgatcgagacaatggcgggtgctcgcaggacgatggcgctggttgcgttggtggcggtggtggcggcggcggtggtggcggagagggcgtcggcggcggtgagctgcggcgacgtgacgtcgtcgatcgcgccgtgcctgtcgtacgtgatggggagggagagctcgccgtcgtcgtcgtgctgcagcggggtgaggaccctcaacggcaaggcctcctcctccgccgaccgccgcaccgcctgcagctgcctcaagaacatggcctcctccttcaggaacctcaacatgggcaacgccgcctccatccccagcaaatgtggcgtctccgtcgccttccccatcagcacctccgtcgactgctccaagatcaactaattactagcttgatcatctccagctgagatcgatatgtatgggaagatctagagagtgactgttcactgctagctttgtttattttcttgctgcatgcgtacgtgcactatataatgtaataatgcgtttcaatgtttacatgtagtgtactatgtacactacttatatatttttcatatataataatctaataatgataataatgtcgtactg

SEQ ID NO: 2522 - DNA, 557 bp, Oryza sativa
  ref <308>: DATABASE ACCESSION NUMBER: AK060341
  ref <309>: DATABASE ENTRY DATE: 2001-12-06
aactccacatcgatcagcagcagcagcagcttgcacactcgagcttagcttagcttttgcaagagagatcgagctagagatggagaagtcgagcaagatgatggcggtggcggcggtgctggtgctcgcggtggtcggcgcggcgggggcgaggaacatcaaggcggcgccgacaagcaggccaagaagccatgagagacctcgccgtcgccggcggcgtcgccgctgctgcgcgggtaatgtgctctatgtagcgcacggcgttgcatgcaatatggatggctatatgacgcgcgcgcgttatatcttcatatgtgcagttagcttgcactgtgtctagctagcgttctattatgagtagtgtctcttctatctcttttctttacatgcatttggaggaggattattctatctgtttgttggttggttgtgtttgtttgttttaattaggtcccttcttatattttgtgttttaattaagttcgtgatcatgtagtagtactaccactgtttcgagctcgaggcatgaataatgctaaatgtgatcattattgtgt

SEQ ID NO: 2523 - DNA, 978 bp, Oryza sativa
  ref <308>: DATABASE ACCESSION NUMBER: AK060342
  ref <309>: DATABASE ENTRY DATE: 2001-12-06
cttatttgttatacagaatattcccacctgaaataaaggacactcctgaggcccctgcaatagctgcacaaaaactgaagaacatgggaccagtaacaagaaatgaatggatcatggttgctacaatgattcttgctgtttcactgtggatttttggggatactatcggtgtgtcaagtgttgttgctgcgatgattggtctttcaattcttcttctgcttggggttctgaactgggaagattgcctgaatgaaaaatctgcatgggacacattagcttggtttgctattctagttggaatggcagggcagctcacgaaccttggaattgtatcatggatgtcaaattgtgttgcaaaagttctccagtctttctcattgagttggcctgcagcatttggtgttcttcaggcctcctatttctttattcactatctctttgcaagccaaacagcacatgttggagctttgtattcagcatttcttgcgatgcatttagcagctggcgttccagctatactgtcggcacttgctttgacatacaattcaaatctctttggtgcactgacacattatagtagtgggcagtctgcagtatactatggagcggggtatgttgatcttcctgatgtattcaaactgggttttacaacagcagcaatcaatgctgtgatatggggagtcgtcggtacattttggtggaagtttttagggctttattgagtcattgcaagtgttaagttgaccaaaagtgttccttactacacctgtaattcatggctccctttctggagtggtagtcattttttcttcagaggagtttgatgagtgcataataatggaacgatgttcctcattagaagtcttgaacatgatacacttgtacaacccagaagggttctcataggcgttttgtacaactcccatgcatttctcatgaacgaaattaactgcaggaatgagtcttgattccttgagc

SEQ ID NO: 2524 - DNA, 1652 bp, Oryza sativa
  ref <308>: DATABASE ACCESSION NUMBER: AK060343
  ref <309>: DATABASE ENTRY DATE: 2001-12-06
ctctttgtgtttgattattcgttccggtgtgcgcgaaagcggggaaggagcggggtacgcatctgtacctgtacgggatcccggcgagattcaaccttgcaacctcatgtccttgtgttcatgtgctcgtacgatacgaaaatagaattctgatacgtctgtataatataggggtgagagggtgccactgccaactggtcacctagcccagaaacccggcaagatgcagcgcgcggcggcggcctcgcgcgccacggcatggagcacggcacggcacggcgccgcccgcgtcaccgcctccgcctccttctccgacggcggcggcatcgtcgccggtgcggcgctgccgctccgtgttcgcggcggccagctcatgtccctgccgctgctgtcgggtggcagggcggtcacggcgagggtggcggcggcggaggcgccgttgccggcggacgacgccgacgcggcggctgggcgggagagaggcgcactcgcggagacggcgcagctgggcgccatgatcgtggcgtggtacctcctcaacatctacttcaacatctacaacaagcaggtgctgcagccattgccgttcccctacaccatcaccgccttccagctcgcgttcggctccttcgtcatcttcctcatgtgggcgctcaagcttcatcccgcgcccagaatctccatttcacagctggccaagatcgcgccgctcgccgccgggcacatgctgggcacggtgttcaccaacatgagcctgagcaaggtcgccgtctccttcacccacaccatcaaggcgtccgagcccttcttcaccgtcctcctctccgccttcttcctcggcgagacgccttcgctgctggtgctgggctccctcgtgccgatcgtcggcggcgtcgccttggcatcgttgactgaactctctttcaactggattgggttctggagtgcgatggcatcgaatcttctataccaatcaagaaatgtgctcagcaagaagcttcttggcggcgaagaggaagcgttggatgacataaacctcttctcaatactcactatactgtcatttctgctgtctttgcctctgatgctgttctcagaaggggtcaagttcagcccaggatacctccggagcactggccttaacctccaagagctgtgtgtaagagcagcactagctggcttttgcttccatggctaccagaagctctcctacttgatcctggccagagtgtcacctgtcacccactctgtcgccaactgcgtcaagcgtgtggtcgtcatcgtggcgtctgttctcttcttcagaaccccaatttcacctgtcaatgcactaggaactggtgttgcattgggaggagttttcctgtattccaggttgaagagaacaaaaccaaagaatgcctgagaagagaggacacgcttaattacagttctcgcagtttttgttttgatttgggatacatagattaggcttgtacatcgacgaagaaaatgagttgggttcggttttagcaccgattgtactacacgacctacagtctcatttttcacaaaattgtaagaacattgctgaatattctcagatctcgagagaaattcattagtgtccaggcgcaaaatcaataaagctatcacttgagtgtacgcttgag

SEQ ID NO: 2525 - DNA, 1200 bp, Oryza sativa
  ref <308>: DATABASE ACCESSION NUMBER: AK060344
  ref <309>: DATABASE ENTRY DATE: 2001-12-06
gggggtcgcagtgaccaggcccgggcgactgtttaccaaaaacacaggtctccgcaaagtcgtaagaccatgtatgggggctgacgcctgcccagtgccggaaggtcaaggaagttggtgaactgatgacagggaagccggcgaccgaagccccggtgaacggcggccgtaacaataacggtcctaaggtagcgaaattccttgtcgggtaagttccgacccgcacgaaaggcgtaacgatctgggcactgtctcggagagagactcggtgaaatagacatgtctgtgaagatgcggactacctgcacctggacagaaagaccctatgaagctttactgttccctgggattggctttgggcctttcctgcgcagcttaggtggaaggcgaagaaggcccccttccgggggggcccgagccatcagtgagataccactctggaagagctcggattctaaccttgtgtcagacccgcgggccaagggacagtctcaggtagacagtttctatggggcgtaggcctcccaaaaggtaacggaggcgtgcaaaggtttcctcgggccagacggacattggtcctcgagtgcaaaggcagaagggagcttgactgcaagactcacccgtcgagcagagacgaaagtcggccttagtgatccgacggtgccgagtggaagggccgtcgctcaacggataaaagttactctagggataacaggctgatcttccccaagagtccacatcgacgggaaggtttggcacctcgatgtcggctcttcgccacctggagctgtaggtggttccaagggttgggctgttcgcccattaatgcggtacgtgagctgggttcagaacgtcgtgagacagttcggtccatatccggtgtgggcgttagagcattgagaggacctttccctagtacgagaggaccgggaaggacgcacctctggtgtaccagttatcgtgcctacggtaaacgctgggtagccaagtgcggagaggataactgctgaaagcatataagtagtaagcccaccccaagaactctgcccattggttcaagaagttcctcctgaaatgataaaaaagcaccattgcactcattgcttttctcattgaataataaaagaatatatgttttgcgtgaatttggtacaagagatggaagtaatccagttaaataataaatccctctcttactgc

SEQ ID NO: 2526 - DNA, 952 bp, Oryza sativa
  ref <308>: DATABASE ACCESSION NUMBER: AK060345
  ref <309>: DATABASE ENTRY DATE: 2001-12-06
atttttgacgagacaccaggcgaaaaagctcgaagaacactaagcgccctacgccagtctccccacccccagcatcgaccatggggttcagcgacagccgcgtgaactggccgcttttctttggctgcattctcattgccttcggtccgctcgcgacgctcttcttcctcgtcgtctcgaagcgcgcgcagctgctcatcatctctctcttcggtgcattcatctggctcgtctcgatcctgctcacggccacattctggcgcgtgatcccgccgctcaaggactcgatcgaagccacgatcccgctcggcgtcgtgctccaggaggcctcgcgctttgtcttcttccacttttacgtgcgcaccgagggcgccgtccaaaaggtcacgacggcgacgcaccaactgccgctcaatgacgtgacatcgtccatcgcggccggcgtcggctattcgctcatgcacgggctgatgatgtttggctcggttgtcggcgcgtccacgggccggcgtggtgcggcgttctcgccgtcctgcgagagcgtgccgctcgtgtttgcgtcctcgctctcggcgcttgcgctcacggtgctcgacgtggcgctcatggtcgtggcgttccgtgggtaccgcacgcgcagcattccgctcattggcggcgtcgccgtgctccacatggtcgtcgccgtgtcggcgctcgccaacaaatcgaccaatggctgctacgtctcgatcccggtccactatggtggcgcgctgctcgcgtgcggcgctgccatcacgtgcatcaagcgcagccgggccacggccgcggccagctaggcgcgacagtaaacagtacagtacagtacggatgccctccctcgctcgagtatgagaggctacatgttgttttgttcacactactgcggaccccccaccaagagaaatcgtaagacacttgaaacctttgc

SEQ ID NO: 2527 - DNA, 1132 bp, Oryza sativa
  ref <308>: DATABASE ACCESSION NUMBER: AK060346
  ref <309>: DATABASE ENTRY DATE: 2001-12-06
acttcctcttccgccctcctcccgaccatgagcgcttcgtcttccactgctgcgctggtaggcgacgcgcagacgcgcacgcaggcgtacgtggcgcgtatcgacccgacggacgtgctcacggccacgtcgctcgccagtgtcgccgccgagatcccgtcgttccgccacattgtgggcaaggtccgcgacatctacgtgttcgccgacaaggtgctgctgatctcgaccgaccgccagagcgcgttcgaccgcgcgctcgcatccatcccgtacaagggccgcgtgctcacgctcacgagcgtctggtggttccacgccacgcagcacatcgtgcccaaccacttgatcagcgcgccgcacccggcggccatgctctgcaaaaagtgcaccgtcttccccgtcgagtttgtcgtgcgcgggtacattaccggctccacgagcacgtccatgtggaccaactacgccaagggcgtgcgcgacttttgcggccacacgctgagcgacggctggacgcagcaccagaagctgccgcacaacatggtgacgcccacgaccaaggacgatgtgcacgacgagctcatctcgggccaagaggtcgtggccagcggccgcatgacgcagcagcagtgggactactgccacgcaaaggccctcgagctctttgcgtttggccaacagcaggctgccacgcgcggcctcattctcgtcgacacgaagtacgagtttggcgtggacgacaacggccagatcctgctcatcgacgagatccacacgcccgactcgagccgctactggctcgcgcactcgtacgaggagcgcatggcgcaggggctgtctccggagaacattgacaaggagtttctgcggctctggttcaaggaccactgcgacccgtacaaggacgccgtgctgcccgatgcgccgaccgagctcgtcgtggagctctcgcgccgctacattctgctctacgaactcatcacgggcgatcgctttgtgtttccctcggcggcttccagtggtgcggagcagacccacgacccgcaggcgcagctcatcgagagcgtacgggcggctctggccagcaagtaggcagaacgcagaaagaatatcgacatgctgctttgtgggt

SEQ ID NO: 2528 - DNA, 1240 bp, Oryza sativa
  ref <308>: DATABASE ACCESSION NUMBER: AK060347
  ref <309>: DATABASE ENTRY DATE: 2001-12-06
aaggaccccgagaggtcgtcgaatggcaactccgcctccctcgaacccgacgacgacgctccgagtcggctctcactgatcgcttctagaagcttccggaaggctccgaccccccgccatggccggcgcccttcttctccacgcctttccagccctacgtctaccagagccaggaaggatctgtgacggcgttccagatatccggcggcgatgtgcaggtcctgcaggtgatggttaagtcacaggaaaagttgaccgtgaaaccaggtacaatgtgctacatgtctggtaatattcaaacggacaacaactacttgcctgaaaatgatggaggtgtgtggcagtggatttttgggaaaagcataagcagcagtgttttcttcaaccctggctctgatgatggagatgttgggatttctgcaccatttcctgggagaatactgcctatggatctagcaaactttggtggagaacttctttgccaggcagatgcttttctctgctcagttaatgatgtgtcagtcacaagtacagttgagcagaggccgcgaaacattgaaattggtgcagaggtgatcctcaaacagaagcttaggggtcaagggatggctttccttgttggtggtggatcagtcatgcagaaaattcttgcccctcgtgaggtgattacagttgacgctgcttgtattgtggctatgacaaccaccatcaactttcagttgaaaacccctaaccaaccgagaagagtagtcttcagtgggggtaaccagcttacagcatctctcacaggaccaggcgtggtcttcatacagagcctaccctttcatcggctttcacaacgcattgcaagtagatcagtggccgctccgagcttgagggacaatcccaagttcttcatccagattgtcatgttcttcttcctcgcgtatgtcatgattgtatcatcgataattctgacagatgtttagatgctgcaacaagctactagtcgcgtatgtcttagagagtcatcaaattgaaagagtaaaatctcttgcaagtttgcaactcaaagtgcattctccaccaccgacccccttgtagatgtgtctcactggctccgtttcaagttgaaaagaaggcagtgcacaactgttgttagaaagttaaatgcaaagttcaatgaatcgttcttttgtaatacttgcagcggcgagatcttgttggtcaatgagttcaattttcacagcatatggtgaat

SEQ ID NO: 2529 - DNA, 1559 bp, Oryza sativa
  ref <308>: DATABASE ACCESSION NUMBER: AK060348
  ref <309>: DATABASE ENTRY DATE: 2001-12-06
aaccatccatggccccgcgcctcctcctcgccctcgccctcgtcctgctcgcctccggcgcaagcgcggcgagcgtgggggacacgtgctcgtcggagggagactgcggcgcggggctgcactgcagcgactgcggcggcggcggcggcggcgacaagacgtgcacgcgcgccaagcccatcgacccgctcacgcacggcacggatctccccttcaacaactactcatggctgacgacgcacaactcgtacgccctcgccggctcctcctccgccaccggctccgccctcatcacccaaaccaaccaggaggacaccatcaccgcccagctcaagaatggtgttaggggcttgatgcttgacacttacgacttcaataatgatgtctggctgtgccactcatttcaagggaaatgctttaacttcacagcctttcaacctgccatcaatgtgttgaaagaaatccggacgttccttgacggtaacccttcagaagtaatcacaattttcttggaagattatactgcttctgggtctctgccaaaagtattcaatgcttctggactcatgaagtattggttcccagtggctaaaatgcccaagagcggtggcgactggcctctactcaaggacatgatcagccagaacgagcgcctgctagtcttcacatcaaagaaatcaaaagaagcaagcgaggggatcgcttacgagtggagttacgtcgtggaaaaccaatatggaaatgaagggatggtagagggtaaatgcccgaatcgtgcagagtctccagccatggattccaaaagccagtctcttgtcctgatgaacttcttcacaacagacccaagtcaaacaggggtttgcgcaaacaactcagcgccacttgttagcatgctgaaaacctgccatgatctctcgggcaatcggtggcccaattacatcgctgttgatttctacatgaggagcgatggtggaggagctcccttagctactgacatcgcaaatggtcatctagtatgtgggtgtgacaacatcgcatactgcaaggcgaattcgacattcgggacatgtgtgatacctccaccttcaccgccgccgtcgcctcggaaggcacccagcggcggcaagggcacaagtgcaggcggcagctccagttccagcggcgcaatggctcgggttgtactaccaaagctgagcttcttcttcggagtggcacttctgatcctggtcatactctcttattaagagcagacccattcacttgagcttgtgctgtctttgtgctctgctggtacaagcacatactgtactgccattctgaggcaaaattttctgctctttttttagccacctgttccattggtttgtaacttctttttcttttttgttaatgagagctgtagatgccagattagctggagaaattgttcatgtgccgagctgtagatcattccttttatttgaggcaatatttttctgcatatcaagtgatcttattgctcataaaataactgcaatcgcattgtaaaaaaatgttgtggtaagaccttttacaggtgc

SEQ ID NO: 2530 - DNA, 929 bp, Oryza sativa
  ref <308>: DATABASE ACCESSION NUMBER: AK060349
  ref <309>: DATABASE ENTRY DATE: 2001-12-06
gtcctcctccatccccaaactccgccgccgccgccgtcaccgccgctcgccaccgccgcggccgccatgagggcgctcgacgagaaggagacgaagatggtgttcgagaagctgttcaagttcacggggccgaacctgaagcacctcctggagcggccggcggtggaggggcccgacccgcaggccgggcgctactgcctccgcctccacaagaaccgcgtctactacgcctccgaggcgctcgtccgccgcgccaccgccgtcgcccgcccgcgcctcgccggggtcggcacgcccatcggcaagttcacccacggcggcgcgttccacctcaccgtccacgccctcgacctcctcgccgcccacgcccgctgccgcgtctggctcaagcccgacaccgagcgctccttcctcttcggcaactccgtgcccaagtcctccctcgcccgcatcacagagaacaccaaggccaacgacggcgtcgtcgtcatgtccatggccgacgtcccgctcggcttcggcatcgccgccaggtcggcgcaggactgcaggaaggccgacaccaacgccgtcgttgtgctgcaccagtctgacgcaggcgagtacctccgccgggaggaggagctcatgtgaggtgttgaggtttgacacattggcgtgactgcaggactgaaggatgcgcttcctcttcatgcgataattcgaagtttttctaccaccagtaaatgtgcgatttttacctagttttaagatagtggaggtctgttgtatcatctatctagtagaaaaattttgttcccaggctgttctatgggcctaaaagtgttctgttaagctgtaacttatcggtaagctactgcatgactgaatgctgcaggcctgcagtaacatttgatcgtgatcaatgatatacttgtcttatggaccct

SEQ ID NO: 2531 - DNA, 864 bp, Oryza sativa
  ref <308>: DATABASE ACCESSION NUMBER: AK060350
  ref <309>: DATABASE ENTRY DATE: 2001-12-06
attccgacaatttcttcatcatgggtcgcgtgattcgtggacagcgtaagggtgccggcggcattttcaagtcgcacaccaagcaccgcaagggcgccgcgcagttccgtgcgcttgactacgtcgagcgtcatggctacatcaagggtgtcgtcaaggagatcatccacgacgctggtcgtggcgcgccgcttgcgcgcgtgacctaccgtgacccgtaccgcttcaagctcaagcacgagctccttgttgcggccgagggcatgtacacgggtatgttcatctacagcggtaagaaggcgaccatgacggtcggcaacatcctcccgctttcggcgctcccggaaggtaccatcgtctgcaacgtcgaggccaaggtcggcgaccgcggtgtctttgcccgtgcctcgggtgactacgctgtcattgtctcgcacgacgaggacaagggcaagaccaagcttcgtctgccgtccggctccaagaagaccgtcccctcggcgtgccgtgctatgatcggcgtcatcgctggtggtggccgtaccgacaagcccatgctcaaggccggccgtgcctggcacaagtaccatgccaagcgtaacgagtggcctcgtgtgcgtggtgtggccatgaaccccgtggagcacccccacggtggtggtaaccaccagcacattggtcacccgtcgaccgtgcgtcgtgatgcccccgcgggtaagaaggtcggtctcatcgccgcccgccgtacgggtcgtctgcgcggtatcaagaaggtcgagaaggacaactaagcggtctgctaagttaccatgtccatttgggtccgaagcacaatacaaacccattcgtcgggaattgtcacag

SEQ ID NO: 2532 - DNA, 1311 bp, Oryza sativa
  ref <308>: DATABASE ACCESSION NUMBER: AK104295
  ref <309>: DATABASE ENTRY DATE: 2002-08-28
ctcgccactctcccccctcccatcctcttccactctctcctctccccttcgtggcggcggcggcggcggcggcggcgtgacgaggaggagcaatggcgatggcctcctccgcctacgccccagcgggcggcgttggcacccactccgcgccgggcaggatcaggccgccgcgcggcctcggcttctccaccaccaccaccaagtcgaggcccctcgtgctcaccaggcgtgggggaggcggcggcaacatctccgtggctcggctgaggtgcgcggcgtcgtcgtcgtcggcggcggcgaggccgatgtcgcagccgcggttcatccagcacaagaaggaggcgttctggttctaccgcttcctctccatcgtctacgaccacgtcatcaacccgggccactggacggaggacatgcgggacgacgccctcgagcccgccgacctctacagccgcaagctcagggtcgtcgacgtcggcggcgggacggggttcaccacgctcgggatcgtcaagcgcgtcgacccggagaacgtcacgctgctcgaccagtccccgcaccagctcgagaaggcccgggagaaggaggccctcaagggcgtcaccatcatggagggcgacgccgaggacctccccttccccaccgacaccttcgaccgctacgtctccgccggcagcatcgagtattggcccgatccgcagcgaggaatcaaggaagcttacagggttttgaggcttggtggagtggcttgcatgattggccccgtgcacccaaccttctggctgtctcgctttttcgctgacatgtggatgctcttcccgaaggaagaggagtatattgagtggttcaaaaaggcagggttcaaggatgtcaagctcaaaaggattggaccaaaatggtaccgtggtgtccgaaggcatggcctgattatgggatgctctgtgacgggcgtcaaaagagaacatggagactcccctttgcagcttggtccaaaggttgaggatgtcagcaaacctgtgaatcctatcaccttcctcttccgcttcctcatgggaacaatatgtgctgcatactatgttctggtgcctatctacatgtggataaaggaccagattgtgcccaaaggcatgccgatctaagggagatgaactgagctgcaagagaggatagccaatatctgaattaggcttctctatattaggcactttctgtcagttctgtatttacttctgttgtccctgttgttatgtacttcttttactgtggttcttgtttgtggggaaataatattatgagaccttgattaagctc

SEQ ID NO: 2533 - DNA, 1150 bp, Oryza sativa
  ref <308>: DATABASE ACCESSION NUMBER: AK060351
  ref <309>: DATABASE ENTRY DATE: 2001-12-06
attcctacgccgaggtcttcttccccactctctccctcccacgccgccgcccccgcaaaccctagcgaacgcagcggagagaggagagagcgccatggccgtggaggtggcgacgcagaagatcaggtggggagagctcgaggaggacgacgagggggacctcgacttcctgctcccgccgcgcgtggtctccgggcccgacgagaatgggttcaagaaggtggtcgagtatcgcttcgacgacaaggggaacaaggtgaaggtcaccaggaccttccgcgtccgcaagatcgcccgcgcccgcctctccaagagcgccatcgagcgccgctcgtggcccaagttcggcgacgccgtgcaggaggacgtcggcgcgcggctcaccatggtgtccaccgaggagatcgtccttgagcgcccacgcgccccagggagcaaagctgaagaaccaagtgcttctggtgatccactggcaagcaagagtggtgcagttctcatggtttgcagaacctgtgggaagaagggtgatcactggacctcaaagtgcccctacaaggatctagctccccagacagaagcttttgtggacaggcctcccactgctgatggctctggacctccaggtggcgccgtgaagggagcatatgttcctccaagcatgaggtctggtgctgttgatagggttggacatgacatgaggcgtaggaatgatgagaactctgtccgtgtgaccaatctatcagaggacacccgtgaacccgacctacttgagctattccgcacatttggtccagttagccgtgtctacgttgcggtggatcagaagactggagcaagcagggggttcggcttcgtcaactttgttcacagagaggacgctgagaaggctatcagcaagctcaatggttatggttatgataaccttatccttcgtgttgagtgggcaacaccaaggccaaattaattttgttactccctgcaagcgttacatacttttcatgaatgttcgatcagtatgtctcttgaaatagtacttttggtttgcgcatatcctgtgtcctgaacttaagctgtactatttttgcttggacgagaataactgaactcgcagctatttcctatatcagctgatatttgcaagtgtgtttgt

SEQ ID NO: 2534 - DNA, 941 bp, Oryza sativa
  ref <308>: DATABASE ACCESSION NUMBER: AK060352
  ref <309>: DATABASE ENTRY DATE: 2001-12-06
atactgaacttctctgaattgaagaagcttccagctgagctgggggatcaaaatggaggtgcttcttccccttctccttgcctgctctctcctcttcaccattgcaacccctatcagagacatcaccgacgtttgtgcctcacagatcagtgatttccagcccctgctcgccggcgccgctcccctccgacctccccttctccgccgtcgtcacccacgacgacgcccgcatcgcccacctcgcctcgcgcctcgccaacaaccacccgacatcgccgtcgtcatcgtctctcctccacggccaccgcaagaagaaggccggcggcgtcggcggctcgcaggcgtcgtcgtcgtccgtgccgctgacgccgggcgcgtcggtggccgtcggcaactacgtgacccgcctgggcctcggcacgccggcgacctcctacgtgatggtggtcgacacggggtcgtcgctcacccgcttcgccgccggcggctgcagctgaggacccaaactgcagctggccgactcaagctaggtaaaagagcaatgctgcttcttctgctgctgccgccgcctcctatctctgctcaggcacagaagtgacaacttcttaactgcaaattcattcatcacatgtaaatgcatatacatgtgccaggaagttacgagtgtggctctaggacctagttttacatgtcataaacaaatatagatgtacaaataaatacagggtaactactttaggtgaagataatacttatcaatgtgaaagattattatgttatatggctgcttgttagcaatcaagccaaaatgttcatcatgtacatgtaaactatgggtgtgtttgggttctaaatgttcagggtgaaaagaaaagcagtataagaacatgaagatttgagttatcatttatcattggttaattgatatgtaagtctgagtc

SEQ ID NO: 2535 - DNA, 960 bp, Oryza sativa
  ref <308>: DATABASE ACCESSION NUMBER: AK060353
  ref <309>: DATABASE ENTRY DATE: 2001-12-06
ctcgcttgcgtcgtcgccgcctcagcctcctcctcctatcgctgctgcgccggcgccaccccctgtggatctagccacccagaggaaggagagggtcgccctcttctcccctctcatctccaagccatcactgcctccctctttctctcccaatcctcggtgagctgcagatccggtttgggggccatcggaatcgatgttcttggcctccccaacggtctccttgctggtgaatccgcgcccctcaaaggtgacgcatggaagccgaagccacccccaccgccgtcttctcccgccaccgcccatcctggcctccttctccaccctcttcctcaccttcacctcgatgccggatcttgctttagggtcgccagatttggtaagggaaggacataggagcgttggggctgagtgattggagaggcagcagctcgggcacgacattgacgacggtggttgcggcccggcgacgatggcaggtgcaacgacaacggcagcagtggctcggcagcgtgatctgcaatcattgggggtgatttcttctccaaaacaagcaggtgactttctatagtccaccaaggagtgatggcaggataaaagtgactcttctctaccatggtgatccatcccagaaagcttctccgaccactacatcctattttacattgagagttcaggttaaagtttccaatccaaccatacgctcattcatttcttccttaaaatagaaatatttgtgttggagcattttcagaattcaaacaagcaaagttctgtatagtatcacaactacctagcatcagtgataaatatagatgctactcaaagctttttagtatagtattccttttcaccagagttgatatgggagagaaattatagaactcctggaaagtgatgcagttttgtatagatgtgggatatttaagtatcttaatctgttgatttaaaattattgtc

SEQ ID NO: 2536 - DNA, 1164 bp, Oryza sativa
  ref <308>: DATABASE ACCESSION NUMBER: AK060354
  ref <309>: DATABASE ENTRY DATE: 2001-12-06
aaccatcgtcagaccaaccccaacctcttcaacagtccacacctcgcctccgatcccatttcccccaccatccgtcgtccggtcgtcgtcacatatcgcgatacgcgccatgtcggtcaaattcgagaaggagactgtcgagcggacaacctccgccacggccgccgcggtaggcaagggcaaggatgacttcctgcacgaggttggcgaagctatcaccaagggcggcggtcctaatggatatctcgcagcctacctcaagcagctccagagcaaccccctgcgcaccaagatcctcacctcgggaacgctctccggcctccaggaattcctcgcctcgtggattgcgcacgacaggagcaagtcgggccactacttcacctcgcgcgtccccaagatggccctgtacggtgcattgatcagcgcgcccctcggccacgtcttgatcagcatcctccaaaaggtgttccagggccgcaagagcttgaaggccaagatcctccagattcttgctagcaacttgattatctcccccatccagaacagcgtctacctggtctcaatggccatcattgcaggtgcccgcaccttccaccaggtccgcgccaccgtcaaggctggcttctggcccgtcatgaaggttagctggattgtatcgcccatttctctcgcttttgcccaacaattcttgcccgagtctacttgggtaccgttcttcaacatcattggcttcatcatcggcacatacatcaacgcacacaccaagaagaagaggctcgctgctttgaggaggaagcactacggcgacggacgtgacggacgcgatgacaggcgatctgttggacccagcggcaggcctgatgaatatggccgcccagacgataggccccgctactagaacggcgagtgctcggtcgatctctagcaaatacttcgacagcatcgtttcggcattgaactcccatggggacctggatcgcagcccatcattggatatggctaatcccatggaccttcattatcaagcggatccgttacatatgcatcgctacaaatcatgcgcactgactgaccatgctgtatatccttacgttctgttgtttcatgattggaggtaactggtgtttattctgggctctattaaatacatattctatacccttg

SEQ ID NO: 2537 - DNA, 1420 bp, Oryza sativa
  ref <308>: DATABASE ACCESSION NUMBER: AK060355
  ref <309>: DATABASE ENTRY DATE: 2001-12-06
gagcctctttgcttacatacaattcagtagtgtagtaattcactgcagcagctgcatttgttttggtgctgcactcactcactcgtcttttggtttcttgggggtcaactgtgctgtgctcttccatctttcctttctcctcctcctctgcttctttgattgctttgcactgtttcagctgggatcggatcggtacaatacagccattccatccataaaggtggccaaacctcatctttcagattcagcttggttgttttgctgcgtgtgagcaagttttctgagcttttcttttgtgcaagaagcaaagaacaagacaagaatctggcttgcttgttctttatcgttagaaggaatctccgcttgctgctgcttcgtttctgcatctgtttctgttcttctaatggtgaatgaataatccctagagcgagagagagaaagctgtagatagagttaaagatgagagctctgagcagagtcggcgtcgggttggcggtggtgtccgcgctgctactgctcgcgctcgccgccgagctctactacctcttcgtctacaagcgccgccgctccgccgccatctccgacgccgcctcctcgccctcctcttcttctcgcgagctgctccagcttttctgcttcaagaagccgcccgcgctcgcctcgacctacgcgcaggagccgcacgccggcgaggcggtggtggccgtggccgtcgacgacgacgacgacacggtggaggcgcagctgatgcggctgggcagcctcgtcggccccacgcggctgctcttcaccatcaaggaggagaccaaggaggacctcgagtccgaggacggccggagccggtgcgggaggagccggagcctcgccgagctgctgcattcgtcggagacgccgttcatgacgccggcgtcatcgccgctgccgatggacaagtccttcaaccctctgttcgagcccacggtggcggcggccgtgacggtgtcgccgccgcccaagtttcagttcttgaaggacgccgaggagaagatgtatcggcgggcgctcgccgaggaggccatgagggcgcggaggtcgccgcagacgaggtcaccggcggcggccggagaggaggacggcgggtacatcaccatcatggtggggaagaacaacaaggtcatccccttgccgtcgcctcccagcaatggtgatggtgatctgcagtagtgagttctttgcaaaattttaattaagaaggccttaattaactttgttcatccagtgttctagtgtagctccttgcctgtaattttctctctctctctctctctcttttctttttggtttatggtcttctgatcatgccaaattggatggttggatgtacataacatgaatattatcagcagccaagaacttcagatcaatatatttttcttcttct

SEQ ID NO: 2538 - DNA, 932 bp, Oryza sativa
  ref <308>: DATABASE ACCESSION NUMBER: AK060356
  ref <309>: DATABASE ENTRY DATE: 2001-12-06
gtacatctacaccacaataccgtaccctacatctctcacacaggtagcagtagtacgtagccagccagtagttacacacgcgctctgctcctctcgcctacccacgattccaaggagaagagcgcctcccgcacagcggagcgcggcaaccgctgaccgcaccgcgcgccagcaatggagtcgtcgcgggggaagcccggcctgaacggcagcggcggcggcgccgccgccttcgactacagcagccgccggggctactacacgggcgccggcgcggcgctgccgccgttggccgctggttccagggcgccgccggtggacccgtgctgcgtggttctgcgggtgttcgtcctgctggggacgctggcgtccgctgtggtgatggccgccgaccggcagagcaccaccgtccagatcgccgccggggaggagctcgcgccgccgctgcgggtgcccgtcacggccaagtggacctactcctccgccttcgtgtacttcgtggtggcgaacgcgatggtgttcgcgttcagcgcggcggcgctggcggcggtgcggaggcggagcgcggtggtgccggtgatggtgggggacctggtggcgatggcgctgctcttctcggcggtgggggcggcggcgcagttcggcctcctcggcgagcgcggcaacgcgcacgtgaggtgggccaaggtgtgcgacgtgtacgggcccttctgcgagcgcgccatggccgccgtcgtcgtcgccctcatcgccgccttcgccgacctcgtcctcctcatgctcaccatcctcaccatccacaaggcctcctcctactactagccatactctattttgctttgcatgggtcttcgatatggatgtcatgtgtgattaactgatttgatgattatattgcgattattagtcaattagaggcaacagtggtcgtt

SEQ ID NO: 2539 - DNA, 959 bp, Oryza sativa
  ref <308>: DATABASE ACCESSION NUMBER: AK060357
  ref <309>: DATABASE ENTRY DATE: 2001-12-06
gtattatctcttttatcctaagctagtgtacattaactggagacctcgccaaggaggcaagcaagagcaggttccaggtatcaggcagccccggtaagcaccagtggctacagtcagcgtacaccagcggctgttgccgctgctccgtgctcaggggcttcccttccctggtgatggtgtacaccgacggatgcgcgtcgacccggagctcggagaggcgggtgatgttgaggtacgtgacgggcgtcctcgtgctccggatgttcctctcgacgatggacaccaggcccctcgggaaccatgggacgatcttcgtctcgtccgtgattggggacgtctggttgtagcaccagttttcgctgcatttgcaggtgttagatcagtcatcagaggtgtccattgtggctgggtgccgcgggtggtgcaagttaacttttacctcttgtgttctggggagatgcttcggaagaagaccctggtcctggccgagtccacgttttggtcgacccagctcgcccatgtcccaagtgcctggttgaacgcctcctcgcctcccatctcgaccggcttcccgtccgcctccagatggtcccacctgcagtaacacactcggcttcactgccctgctggagagagagagagccagagaggagacgctctggagcggagtggcttacgctctgaggttgccggtgtgggtccaccagtggccggtgttgaagacgaggacgtcggcgccgcgcagcttctccagcgtagccgggagctggtcaagcttgagcgccctcgtccggtcctgcttcgtctcgagcgtcaccaggaacgggctccagaagaactccaccgagcagttgtagtcctgtgcatgtttgagtcacatatgtaatcagaactttagaaaggtcctgcttgtcattcgatgtacggattgataactaaacgaacactggttagttgat

SEQ ID NO: 2540 - DNA, 1251 bp, Oryza sativa
  ref <308>: DATABASE ACCESSION NUMBER: AK104296
  ref <309>: DATABASE ENTRY DATE: 2002-08-28
atggcaggaaacaatagccttcttgccatggactccaagctctccatgctcttcttgttgctaggctttgtggcatgttctgccactgctagtcaccatgatccttccgttgtcggatactcgcaggaggatcttgcattgccaaataagcttgttggtctcttcacatcatggtcagtaaaacatagcaagatctatgcaagcccaaaggagaaggtcaagaggtatgagatcttcaagcgaaacctgaggcacattgtggagacgaacaggagaaatggcagctattggctcggcttaaatcattttgctgacattgcacatgaagaattcaaggccagttacctgggactgaagccagggttagcaagaagggatgctcagccacatggttcaacaacattcaggtacgcgaacgccgttaacttgccctgggcagtggactggaggaagaagggagcagtgacaccggtcaagaaccaaggagaatgtggaagttgctgggctttttcaacggtggcagctgttgaggggataaaccagattgtgaccggcaagttggtatcactatcagagcaggaactgatggactgcgacaacaccttcaatcatggctgtcgaggtgggctgatggacttcgccttcgcatacataatggggaaccaggggatctacacagaggaagactacccatacctcatggaagaaggctactgcagagaaaagcagcctcattccaaagtcatcaccataaccggctacgaggatgtcccggcgaacagcgagacaagcctactgaaggcactggctcatcagcctgtcagtgtggggatagcagctgggagcagagactttcagttctacaaaggggggatctttgatggggaatgtggcattcaaccggatcatgcactgacggccgtgggctacggctcgtactacggccaggactacatcatcatgaagaactcgtggggcaagaactggggagagcaagggtatttcaggatcaggaggggcaccggcaagccggagggagtctgtgacatatacaagattgcttcttacccaaccaaaaacgtcactggctggggttcatagctagttttgtaggcgatcttgtaatccatttgtctctgacaagaaagaaccggcctaagcaacgctgtgcaattcctggatgcttcggagtggagctcttaagcagcacagcaatggtttattatataatgacagcttgggtttttaagc

SEQ ID NO: 2541 - DNA, 1288 bp, Oryza sativa
  ref <308>: DATABASE ACCESSION NUMBER: AK060358
  ref <309>: DATABASE ENTRY DATE: 2001-12-06
ctacattgggctccggcaaaggcgtgctactggcaaggagtaccatgagctcatggaagaatttatgagtgccgttaagcaaatctatggtgagaaagttctgatacagtttgaggacttcgccaatcacaacgcatttgatttgcttgcaaaatacagcaagagtcatcttgttttcaatgatgatatccagggaacagcatctgtggtccttgcaggtcttttatcatcactaaaggtggttggtggaaccctggctgaacacacttatttgttccttggtgctggtgaggctggaactggtattgcagaactcattgctcttgagatttcaaaacagacaaaggctccaattgaggagtgccgcaagaaggtttggctgctggattcaaaggggttgatcgttaactcacgaaaagaatccctccaggcatttaaaaagccttgggcacatgagcatgaacctgtaacgacactgttagatgctgtccagtccatcaaacctactgtgctgattggaacatccggagttggcaaaacttttactaaagaagttattgaggccatggcttcctttaacgagcgacccgtcattttctctctgtcaaaccccacatcacactctgagtgtactgctgaagaagcatataattggagccagggtcgtgcagtatttgccagcggcagtccgtttgaccctgtggagtacaatggaaagatacatgtgccaggccagtcgaacaatgcctacattttccctggattcggcctcggtgtcgtaatctctggagctgtccgtgttcacgaggatatgcttctagctgcctcggaaacactagctgatcaggccactcaggagaactttgagaagggatcgatcttcccgcccttcacaaacatcagaaagatttctgctcgcattgccgcaagcgtggctgcaaaagcctatgaacttggactggcgacccggctgcctcaacccagggatctggagaaatacgcagagagctgcatgtacacccccgtataccgcagctaccggtaacgccgcggaggtcaaattttgcagtaataaaacctaccaatgcagtaggggatactgctatgttgtgttgccattgtcgccgttggccgttgctgctgcaaggcattgtatctgtctatataaatcacctgttgtaacgttatggaagcaatctccatgtgtaccaccagtgtttcattctttgatcgattataaagagtgcaataagaacatagttttagctcccattgtaatgggcagcat

SEQ ID NO: 2542 - DNA, 1334 bp, Oryza sativa
  ref <308>: DATABASE ACCESSION NUMBER: AK060359
  ref <309>: DATABASE ENTRY DATE: 2001-12-06
agcaatactctcctcattaacttcttccgcgggacgagacacgagagagagagagagagagagagagccaaccgcacactacttgaatccaatccaatcgaatcaaattactagcctctcttccacgccacgcacacgcacccaatcctctatcgatcgagacatggcctccaccaccgccgccgccggcaacggcagcggcagcatcctccccacccacaccatcgccgccacggcgccacccttcagaacccacaaggacgccgacctggaatccaggaggcgacggcgccggcgacgctgcctgtgctgctgcctgctcgtcaccctggtggtactactcgtgctggccatcaccctcctggtcctcttcctcacggtgctccgcgtccgcgaccccaccacccgcctcgtctccacccgcctcatcggcctctccccgcgcctctccttcccggccatgtcggtccagctcaacgtcacgctcctcatcaccgtggcggtgcacaaccccaacccggcctccttcacctacgccacggggggccacaccgacctcacctacaggggcgcccacgtcggcgacgccgagatcgacccgggccgaatcccgagccgtggggacgccaacgtcaccatggcgctcaccctccaggccgaccgcttcgccggcgacctcacgcagctcgtgacggacgtgatgggcgggtcggtggcgctggaggcgagcactcggatccccgggagggtggccatcctgggcgtgttcaagcgccacgcggtggcgtactcggattgccatttcgtgttcggcgtcacggagatggccgtgcgtagccagcagtgcagcgaccgcaccaagctctgattgatcatgtgattccaacttaatttgcaagtttccaagcacgcaacgtaaggtgggcatgccacatcgcgacgtgggacaagacgagaagccatattttgttgttttgtttacaccacgcaactgctactagaagtacatagagtattactatattctacacgggtggcacattagttcgttattacagatagtataagatcaggaattcaggattcaggacttccgattttcttcagtatttcttgatgggtgttgggattgattcgattcatgtatataacacggtgtgtcagttttgacatatacgtacatatacagtatttcactattctcatgtttactagctactaatccaaaaattcctaatccaaagcaccaaacttcagtttaactttaacagacctttctccacagcatgcccacagcggcaaactgccagcacacacaaaactaggcccggcgc

SEQ ID NO: 2543 - DNA, 958 bp, Oryza sativa
  ref <308>: DATABASE ACCESSION NUMBER: AK060360
  ref <309>: DATABASE ENTRY DATE: 2001-12-06
acgatggactgggacgcgcggatgcgcgccgcgctgtcggccgcgcgcggcgtggcgcacttgcacgccgcgcacagcctcgcccacggcaacctcaagtcgtccaacctcctgctccgcccggaccccgacgccaccgcgctctccgactactgcctccaccagctcttcgccccgctgtcggcgcgccccaacgccggcgggtaccgggcgccggagctggtggacgcgcggcggccgacgttcaagtccgacgtgtactcgctgggggtgctgttcctggagctcctcaccggcaagtcacccgggaacgcgtccgtggacggcgacggagcggtggacctcccgcggtgggtgcagtcggtggtgcgggaggagtggaccgcggaggtgttcgacgtggagctggtgcggctcggcgggagcgcggaggaggagatggtggcgctgctgcaggtggccatggcgtgcgtcgccaccgcgccggacgcccgcccggacaccgccgacgtggtcaagatgatagaggagatcggcagcggccacgggcggacaacgacggtggagagcgaggaccggtcgagggggacgccgccggcaggcacgacgccgtgaacactctactctctctactggtgtcgtaatgcagcagcacatgtcagggtaaattgatgcatgaacagcttcgttcgttcgttcgtggcgaagttctctcactctgtttttttttttgtcctccatttcttcagtttatagcctctcttgacttgatctagtaattcttccattgtttcgtcgatcaaatgagttgttactacctgttcgttcctcttcagccaagtgtaatttttcagtccgtatctactaccaccattgtagctcttcgtatatgcatcttcattttgatgctgtgaagtatatgtaggagtatgacacatgaataaacagaaaacctgtg

SEQ ID NO: 2544 - DNA, 1465 bp, Oryza sativa
  ref <308>: DATABASE ACCESSION NUMBER: AK060361
  ref <309>: DATABASE ENTRY DATE: 2001-12-06
agcagccagcagccagcagaacacccagacggatattaatttagaatgagtattgtggtgagcaagtcagcgccggtggtcgtccggccatcggagccggccacatcgacggccgacaagatccttctgtcaactttggacaagcctgttgccacgataccagtgaccgtgctacttgcgttcgaccaccccatccatgacgccaccgcggagaccatcaagacggctctcgctcaatcactcgtccactactatcctatcgccggccgcatttcctgcgacaatgacgacggcggccatttctacatcgactgcaccggcgaggatctcggggtcacgttcgtggccgcgtccgccaactgcaccatggaggagctcatgtgtctcgtcgacgaccaggctcccgacgacgagacagcggtggtgcagcagctcgccttcaactgcacgcccgacgaccttcatcaccgtctgctgtgggtgcaggtcaccactctcaactgtggaggcttcgtcgtcggggtgacatggagccatggcgtggctgacggtcccggcatagcacagttcatacaagccgtcggcgagctcgcccgtggcctgccatcgccgtccgtcgtcccggtcaggttggacgacaagatcgcaacccaagccgtacctcccttcaccatggccgttcatcgcttcatatccggcctcaagccagtatcaaacctcgacgtacgcaacgtcaccgtctcatctagccttatcaaccacatcatcgtcggagctcgtcgtcgtgccaccgtgttcgaggcggtcgccgccgtgctctggcagtgccgtacacgggtggtgatgacggatcctgaggcccccgccgtgctgctcttcgcggtgaacgcacgcaagtacctcggcgccaaggacggctactacggatgctgcaccgccatgcacatggccgtgtccaagtccggcacggtggccaacggcgacatcatgaagttggtcggcatcatacgccgcgccaaggagcagataccggagcagctgaaggcagacgacggcgagatgatgctacggacgatggtaggggagaagcaggtgaatggatacgagagcctgctctacttgacatcctggcgaaacatcgggttcgaggacgtcgatttcggcagcgggaagacggcgagggtgatgacctacccgccgaggatgctgtccatgatgcccaggattgcgcccatctgcttcatgctcaaggccacagaggaaggggtcagggtcatgtcagactgtgttacggctgaccacgccgatgccttctatcaagaaatagccaagctcaaagccaccacctgattataactatatatgcgagctatctataccttcttcaatatgccaattatgatttatctacaataaaaatttgaatatatataccgtgcaagagcatgcatgaacaagtaattct

SEQ ID NO: 2545 - DNA, 1304 bp, Oryza sativa
  ref <308>: DATABASE ACCESSION NUMBER: AK060362
  ref <309>: DATABASE ENTRY DATE: 2001-12-06
catcgcgccgggccagaccagcaacgtgcttctcaccgccaagccgacgtacccgggcgccagctactacatgctggctcgcccgtacaccaccacgcagggcaccttcgacaacaccaccgtcgccggcgtcctcgagtacgacgacccctgccccaccaccgccgccggcaagatcgtccccatcttctcccctacgctgccgcagatcaacgacaccaacgccgtctccaacttcaccgccaagctccgcagcctggccagcgccgggtacccggcggcggtgccgcagcaggtggatcaccgcttcttcttcaccgtggggctcggcacccacccctgcgccgtcaacgggacgtgccagggacccaacggctcccggttcgccgcctccatcaacaacgtctccttcgtgctcccggcgacggcgctgctccagtcgcacttcgccggcaagtccaagggcgtgtacgcctccaacttcccgtactacccgctgaacccgttcaactacaccggcacgccgccgaacaacaccaacgtgatgaacgggaccaaggtgctcgtgctgccgtacggcgccaacgtcgagctggtgatgcaggacaccagcattcttggcgccgagagccacccgctgcacctgcacggcttcaacttcttcgtcgtcggccagggcttcggcaactttgaccccatcaacgacccggccaagttcaacctctacgaccccgtcgagcgcaacaccgtcggcgtgcccgccggcggctgggtcgccatccgcttccacgcagacaacccaggtgtgtggttcatgcattgtcacttggaggtgcacatgagctggggactgaaaatggcgtggctggtgctggatggcagccgtcctgaccagaagctcccgcctccaccgttggatctcccaaaatgctaggaataaaactcaagatcatatcaatagtcaagattggttgcatttgcatcgcttcacacagaccccacttactgttgtccgatcagatatatattttgctgcttcggtttctcatcgtcgatcgacatgcgtgcttcatttgttgctttttttgataaactgattttctcatgcaattgacagtgtgtttgtcagctagctccggtatttgcatgaagtttcaatttctttcgtattttgaggaaatttgatttctttgattggcagggcttgactcttaggactgcttactgtaactcaaagcgatcgcttgctttgcatcttgtaatgtatcccagtgtattttggtgcaataaaatctagttctggt

SEQ ID NO: 2546 - DNA, 1078 bp, Oryza sativa
  ref <308>: DATABASE ACCESSION NUMBER: AK060363
  ref <309>: DATABASE ENTRY DATE: 2001-12-06
atcgaccatcacctctcccacacggggcgtacgtgctaagctgcagcacaacccaaagccatatatctccgataatggcgaactcaccgacgctgacaatgctggtgttcctagctattgggctatctctcgtcctctccgcagccggcgtgtctgtggagagcgtggtcaccgaggcgttcttcaacgggatcaagaaccaggccccgaacggctgcgccggtaagagcttctacacacggcaatcgttcctgaacgccgcccgctcctactcgggcttcgccaatgaccgcaccaacgacgactccaagcgcgagatcgctgccttcttcgcgcatgtcacacacgagactggacatatgtgctacatcaatgagataaatggggcaaacatggactattgtgacaagagcaacaaacagtggccgtgccagccgggcaagaagtactacggacgcgggccgctgcagatctcatggaacttcaactacgggccggcgggaaagaacatcgggttcgacgggctaagggacccagacaaggtggcgcaggacccgacaatctctttcaagacggcgctctggttctggatgaacaacgtgcaccaggtgatgtcgcaggggtttggcgccaccatccgggccatcaacggtgcgctcgagtgcaacgggaagaaccccggtgccgtcaacgcaagggtaaactactacaaggactactgccgccagttcggcgtcagcccggggggcaacctctactgttgagttgcatgcacacgctgctcggctcatcgtgatcgactgaataatgaacagagtaataataatgaataaaacgtttggtgcgtacgtacattgcatacgtgcacggtacgtacatgctggaagctaagtgacgtcaaagagtttagtactaaaaagtgatctttctattcgatgttactctatcttagggcggagtaagtataaatgtgtaataagaaataaaatgttaggatcgcgggatcgaaagatgagtaaacatgtgtaccggtggaccacttaaataattatttctccaacccaagtactttcatgct

SEQ ID NO: 2547 - DNA, 1030 bp, Oryza sativa
  ref <308>: DATABASE ACCESSION NUMBER: AK104297
  ref <309>: DATABASE ENTRY DATE: 2002-08-28
aaagcaagcagcccagcccggcggccgcggtgcacgcgcgcgcgacgaccacgccgacgccgacgccgggggaagacgagcagcaggggagcgccctcgaagccgagaggagggggaggaggaggacgacgacgaggcgcgcggcggagggcgccatggacaccttcttcctgtcgcacggcgcgcccacgctgtccatcgacgacaccatcgcggcgcagggattcttcaagtcgtggctgccggcggcggtggcgggcgcggagttgccgcgggcgatcctcgtcgtgtcgggccactgggaggcggccgcgccgacggtcaacgtcatccgcggcaacaacgacaccatccacgacttctacggcttccccaaggctatgtacaagctgaagtaccctgcgccgggcgctcctgatctggcgatgaagaccaaggagcttctggagcaagccgggttcgggccggtgaaggaaaaccacagccgcgggcttgaccacggtgcgtgggtgccactgatgttcatgtacccggaggcgaacgtgccggtgtgccagctctccctgcagagcggccgcgacggcgcgtaccactacgagctcggcagggcgctggcgccgctccgcgacgacggcgtcctcgtcctcggctccggcagcgcgacacacaacctccgcaggatggggcccgagggcacgccggtgccgcagtgggcggcggagttcgacgggtggctgcaggaggcgctgctcggcgggaggcacgacgacgtgaagcggtacgaggagaaggcgccgcacggcagggtggcgcacccgtcgcctgaccacttcctcccgctgcacgtcgcgctcggcgccgccggtgagggggccaaggcggagctgatccaccgcagctggagcaacgcctcgctctcctacgcctcgtaccgcttcaccaccgccaagaactgaaaaccggtcgacgcgatgcacgccggctcgccgcatgcaaccacgtgtttgcttgtaacatatttgactcgaac

SEQ ID NO: 2548 - DNA, 1152 bp, Oryza sativa
  ref <308>: DATABASE ACCESSION NUMBER: AK060364
  ref <309>: DATABASE ENTRY DATE: 2001-12-06
attgttgaatttgcccaccaaacgaaacaacagcgctgtctccaaccatcatgatctaccgtaccctcgaagtgcataccaagtccacggacttccgcaaggccacgcgcatcgtcgaagtcaccgagcttcccgccgcggccgagggccacgtcgtcgtcaagaaccactacgtcggtatcaacgcaaccgacgtcattatcaccaacggcctgtacgatcgcccacttccgttcagctgcggtctcgaaggtgttggtgaggtcgtcaccgttggcgaaggcgtcgagaactttaagatcggcgatgccatcgcctaccagaaaatgggtgcgttcaccgagtacattgcagtgccagctgcgacggcgcacaaggtgccggccatcgacccctccgtgctaccagtgcttgtgcaaggcatctcggcagcagtggcgcttgagcaggtaggcgagatgaagtcgggcgagacagtactggtcacggctgcggctggtggcgctggccagtttgtcgtgcaactcgccaagctagcgggtaaccatgtcattggtaccacgagctcggacgagaaggccgaagtgctcaaggaactgggctgcgaccgtgtgatcaactacaacaaagaagacatcgatactgtgcttaagactgagtacccgaagggcgtggatctcgtgttcgacactgttggtggcgagacgttcaaggctgctgtccagaacattgccgtccgcggccgtttgatcgtctttggcaatatctcgggttaccttgaagaccacaaggctgctgagcctcttctctcgagccaggtcaacgcgatcttgctcgatcgcgcgtcgtcggtccgtggcttcaacctgagcaagttcgctgaccgcattccagtcaatcttgccaaactctttcagctcattaacgagggcaaactcaagccgggtgtcgacaagaccgagttcaggggccttgagggaattgccgatgctatcgagtacatgtttgcccgtaagaacgtcggcaagctcgcaatcaagctggtgtaattgcgtctaggctgctcgctcgtggagcttgtgctatcgcatctaggcattcttgccttcagaatggaaaaaatatgaacacgcatgccgttgagctgccgcc

SEQ ID NO: 2549 - DNA, 1391 bp, Oryza sativa
  ref <308>: DATABASE ACCESSION NUMBER: AK060365
  ref <309>: DATABASE ENTRY DATE: 2001-12-06
gataccgtcatctcaccacacaaacgcaggcacacaaacacagagagcagcccaaaccgaccaaaatcactgcagagttcaggcacttcttcagatagttctccccctctgtttctttctctctttatttctttctcgagttcagtttgagagatggatttggcgtggtggttcgcggtggccgtggtggtgtgcggccttgtggggggcggcagcgccgggctgctggagaccaacccgggtttggcgtacaacttctaccagaagtcgtgccccaacgtggactccatcgtccgcagcgtcacctgggcgcaggtcgccgccaacccggcgctccccggccgcctcctccgcctccacttccatgactgcttcgtccaggggtgcgacgcgtcgatcttgctggacaacgccgggagcgagaagacggcggggccgaacctatcggtggggggatacgaggtgatcgacgccatcaagacgcagctggagcaggcgtgccccggggtggtgtcgtgcgcggacatcgtggcgctcgccgcgcgcgacgccgtgtcgtaccagttcaaggcgtcgctgtggcaggtggagaccgggaggcgcgacgggcccgtgtctctggcgtccaacaccggcgcgctgccgtcgccgttcgccgggttcagcacgctcctccagagcttcgccaaccgcgggctcaacctgaccgacctcgtcgcgctctccggcgcgcacaccatcggcaaggccagctgctccagcgtcacgccgcggctgtaccaggggaacaccacctccctcgacccgctgctcgactccgcctacgccaaggcgctcatgtcgtcgtgccccaacccgtcgccgtcgtcgtccaccatcgacctcgacgtcgccacgccgctcaagttcgacagcggttactacgccaacctgcagaagaagcagggcgcgctggcgtccgacgccgcgctcacccagaacgccgccgcggcgcagatggtggcagacctcaccaacccgatcaagttctacgccgcgttctccatgtccatgaagaagatgggacgcatcgacgtgctcaccggcagcaaagggaatatcaggaagcagtgccgctccgcctcctgaatcctgacgatcaccatacaaacatattttcttcttggtttcttgaattttttttttcttcttctcctctctcgtttcatcggcgctgatcaaaatatattgtgcgccatgatgattaattaaggtcccaagatctgtattaatttgttaagtgctcgattcgatcgttcaaggtgtgacattttgttcatcttggccttcgtcgcgcgatctaatcgaagaatgaaagaatgcagctcgttctttccactgctgcttcaaac

SEQ ID NO: 2550 - DNA, 1394 bp, Oryza sativa
  ref <308>: DATABASE ACCESSION NUMBER: AK060366
  ref <309>: DATABASE ENTRY DATE: 2001-12-06
gatactgacgtgcaaatcgttcgtctgacttgggtgtaggggcgaaagactaatcgaaccatctagtagctggttccctccgaagtttccctcaggatagctggagcccattacgagttctatcgggtaaagccaatgattagaggcatcgggggcgcaacgccctcgacctattctcaaactttaaataggtaggacggcgcggctgctccggtgagccgcgccacggaatcgggagctccaagtgggccatttttggtaagcaggtcgcagcacacagacatcggcgaagcaaagcgcaccacgcacacggaaagagaggagaggtcacatcgcggcggcggcggcaaggatgttggcggtgtttgatccgacggtggccaagtgcccggagggcctccggagcccgccggtggccggcggcgccgtggcggccggcggcgcgggcgcgctgatgaagggcttcgccggagcgcacgccgacgcggtcaccgtcagcctgggccccgccggcgccctcgcctactcggcggccaaccagagccccctcgtccccaggttgtttggtgctgtgaatgacatattctgcctgttccaaggacacattgagaacattgccagtctgaagcaacactatggtctgagcaagacagcaactgaggttaccatcctgattgaggcctacaggaccctcagggacaggggccctctcccagctagtcaggtcgtgagagatctcagcgggaagttcacgttcatcctgtatgacactctgtcaaaatccaccttcgttgctgcagatgctgatggtagcattcctttcttctggggcgttgactccgagaaccaccttgtgttctctgacaatgttgaccttctcaaggcatcctgcgggaactcgtttgcgccattccccaaaggctgcttctacaccacctctggagggctgcagagcttcgagcacccgctgaacgagctgaagcctgtgccgcgggtcgacagccagggccagatgtgcggctccaactacaaggtcgacagcgaggccaagaaggactccgggatccctcgggtcggcagcgccgcagactggtccaaccatttctgaggcaaagataccattgagatggcttccattttaccatttcggcatttccagttgtggactctgccctgtatgtctgatgctgaagtactcaagaaccactcctgagacgacgcgctaggttttactttcaggcgtccgtaaaactcttctgcaaacattcagagcattgctatctttctacgtcatagtactgaatactgatacttatgtaatctgatgataccacgttgtggttgaggtctatctctcgtgttctgataaataaagctcaatgaaagcttcagat

SEQ ID NO: 2551 - DNA, 797 bp, Oryza sativa
  ref <308>: DATABASE ACCESSION NUMBER: AK060367
  ref <309>: DATABASE ENTRY DATE: 2001-12-06
tctcatacaatcattgtctacgaatccagagtttctcaaaaacaaggcttcccaagctaattcagttgttgatttcaaagattggcaaattccacttggacgacgctttagatcacttaagctatggatggtcttgagactttatggtgtggacaacctacaaagctatatccggaaacacatacatttggctgaacattttgagcaacttttattatctgattcaagatttgaggtagtgactccaaggactttttcacttgtttgtttccgacttgtgcctcccacttctgaccatgaaaatggacgtaaattgaattacgatatgatggatggtgtaaattcaagtggaaagatcttcctatctcacacggttctttcaggtaagttcgtcttgagatttgcagtaggagcgccacttacagaggagcgacacgtggatgccgcttggaagcttctacgagatgaggccaccaaggtcttggggaaaatggtgtagataagtgaataccgctcactgattcagctcattgtttgcccttcgagtattgaaggtgccaaagttcatacaaaaagtttctgttaaggacaatacacgatagcataatttattcagttgtgaaacagaaatactgaatactttctatgattcttttagtgggttaggtcgtttgatcgacctgcaatttttttcgagttgatattaaactccctgcattatggatggtagtgtgaggtggcatgcagtataacatttaacatacaaattttaccaagattacgcagctccccatgag

SEQ ID NO: 2552 - DNA, 1421 bp, Oryza sativa
  ref <308>: DATABASE ACCESSION NUMBER: AK060368
  ref <309>: DATABASE ENTRY DATE: 2001-12-06
agcatcaacctacgaccagcagacccgctacagacctacaaagacaaggactggcttgttcagcgctgaaaaattgaccaaggaccgcttgaacgactcgactgccccgcacaagcgctttcgttgccacacgcggacaaaggcgagattatcaagcacgcaagcgacctggcccacggagcctcagcaggccatcttattaaggcatatatcagcagcggcctgcattgctttctacgcttggtcataaaggccacatagtctcgatcaacccggtatcacccacaccaacatctgcccttctcggtcgagcctttcgcgtagcactcgctctgcgctccggcccgccactcgtcgaccgcaccatggcgactgcttcaccacctccggcccaggccgtggcctcctcatccgccactcccaaagcaaacggcgcaacagcgaagaaggtcatcaaggtggacatcaccagtgacggtatttgccccttctgcatgctcggtctgcaaaatctgcgcaaagccatctcatgctcacggaccgcacaacttggcctcgatttcatcatcgagtatcacccgttcctgcttgatccgacactcggcgaggagcccgtgtgcaagcggacgaggtacatgcaaaagtttggcaaggacaggtttcccgtcatggagcgcgtcatgcatgagcgtttcaaggctgcaggacttgaggtaaccatgagcggcatgctgtcccaaactacaacataccaccggctcctcacctatgcttacgccactggcggccaagatctccagctcccactggtcgatctgctcaacaagggctacttccaggagggcaaggacctcggtgacaagcagttcctcgcgcgcgaggccgtttccgtcggcgttttcaagagcgaggaggaggcggtcgagtggctcagtggcgacgacaagctggaagaggtccagcggggatacaagaaggcgcaggacctcggcatctcgggcgccccctttttcgttttcggcaacaagtatgccatctcgggcgcacagccccccgaggcattcttcgaggtgttccaagagatcgccaagggagaagttctgcactgcccatgtgccggcgccgactctgaggcacggaaagacggcgagcgcgcgacgacgcccaaggagatgccgcgcgagctagtcgccaacgcgcgcgagggcgagaccgtcggcgtcaagtgcgattcagcagcaaccatccaggcacggcaagcgtgcgtcgcataggcaggcagaggtgtgatcactcgttgtatgcaatttcgaccctttcgcctaatgtttcctgtctacgcggttcccggttgtcaatacctattgtagtagtcagccgatctctccataggcttggctatatcataacgtccaaacacg

SEQ ID NO: 2553 - DNA, 1304 bp, Oryza sativa
  ref <308>: DATABASE ACCESSION NUMBER: AK060369
  ref <309>: DATABASE ENTRY DATE: 2001-12-06
aagctcaagctcagcctcagcgatcgacaagtaagtagatccaaatccatccatggaagccaccggcacacggctgacgcgctccgcctccctctccccacgcctccgccgctcccccacagccttgtgcgtctccccgcgcagcatgcatcatcatcatcagcagcagcagcagagcctccgccgcgccacctccgacgccgacatcgccagatccgcgcccgcgacggcatcatcgccgctgcccctcctcctccgcgacatcctggaggaggacgtggtcgtggtggtggacggcgccgggcgcggcaagggcaacgacgacgacgacaagacgtccgggcgcggcggaggcggcggcgggcacatggacatgggggagtactaccggcgggttctgagggtggagccggagaacccgctggtgctgcgcaactacgggaggtacctgcaggaggtggagggcgacctgggcggcgcggaggagtgctacgccagggcgctgctggcctcccccgacgacggcgacctgctcagcctctacggccagctgctgtgggagacgagtcaggacaaggaccgcgccgccgcctacctggagcgcgccgtccaggccgcgcccgatgactggtactaattattactactaaatttgctgattgattgattaaagacagagaatcaaacaattaacgaaacggttggatttgatgcgtgcgtgcgtgcgtgcagctacgtgcttggatcgtacgcgagtttcctgtgggacgcggaagaggatgaagacgacgaagcagaggatgagatgaaaccgccgctggtgccggcgtcctgctaacccaacccggcgtttgcctttgcttgtgtacatatgagagcttgcttttgtcaaaggcagatcgagacacgatccatcctggtgtgcctgcctgcctgcctgcgcttgtacaaattaattactagcacatcgatccttgctccatcagtttgcttcttctgtacatactccagtagctagcgccttcttgatgatggatcgttggctacatccatcgtcaatacacacactgatgaacaccagagatcaattcaactgcagtgcaagccagggcgcgcggcggcgagcagatcgagcaatttggaagatgcaaatcaggccgccgagcagagcagagcagctcagttcaagtgcggacggacggctggatgattcatccacaccgtaccacactttgcacatggatgaccagacttgttgcttctttatgtaacacctcataataaattcactctgctaattaatt

SEQ ID NO: 2554 - DNA, 1016 bp, Oryza sativa
  ref <308>: DATABASE ACCESSION NUMBER: AK060370
  ref <309>: DATABASE ENTRY DATE: 2001-12-06
cacgcccactcccacgccttcgcgcgcgcgcgcgcgcgtcgtcgtctccctcaccactcgccccgatcgatcgatcgatcgagtcgtcgtcgtcgacccgttttctctcctcttctcgatcgttatatcgcgaccagtacgcgctactacttctcactctttgccgctcgtttcgctcggagtagccatgctccaggcgagctcggagttgcagcagcagccggcggcggcggcggcggcggccgggatgtgggtgcccgggatgagcccgcaggcggtggacgccgggctgtcggcgagggcgcaggagatcgcgcggaggcgggaggagatgctcgggatgctgcatgacctccccgagtccgagtacgagctctcgctcacggacctcgtcgagaaggccggcggtgtcggcgtggcgccgccttcgccttcgccgtcggaggggaaggcagagccgggcccggcgcggacggcgtccggcaggcagtcggagcagcagcagcaggcggcggcggcggcggggaggccggagaggagggggtcggcgaggcggtgggacagcgcgggcggcagcagcttccgcagcagcagcgacggcgtcctgctcaacttctacatgccacgctccttcacccgcagcttcaccgcgccgcgcaccactggccccggccggccgccgtcggtctccggcggccggaccgccagtgtctgctccgatcgcgacaagagggagagagatggcgagaccgtgcggtgctggtcgctgctgtgggatcggcggtggcgcaagtcgagccggggagatcacggcaacgagtccgccatccgggccgcgatcctcaaggcggcgaaacacaacgcttcttccccaaagaaaatctgaatgctgctgctagcgtccatcgttttggtcttagatagctagcgcagacttatctgcctgccaccactgggtgtatcaatactaatgtatggttttgtacatacttatgagtgtccattttgtgcttgtg

SEQ ID NO: 2555 - DNA, 1444 bp, Oryza sativa
  ref <308>: DATABASE ACCESSION NUMBER: AK060371
  ref <309>: DATABASE ENTRY DATE: 2001-12-06
atcttatttgacagtgcaacatctagcgggatactcgatggagctatagattcagaagctaggaaacatgtcgacttcaagggtttgcgactcttggaatcattgtactcgtcagtcaatgcaagagcttaccctggctgcatgaaagctggttcaatcctggttcagaaccattcttaggagtgtaagaattaaagataccctgacgctgagtattgggaatttggcgaacgggggaacaaaaacttacatcatgcaatcgatcaattctatgcaatctcgaaggatttggtttcttacatattaatcaatcagggtgacatttcaatcctgttccacacaaatatgctaatgaggatgtatcattaggagcttcgcttatcggtctagatgtcagtccaacacatcggcgatgtaggctttgctgtggtactcaaccagtcacagattttacagaagtgctctggttcagtcacagatcacatgcacgatgctgatcctgccacttgccctggtggacgcggtcgtctttgcggccgcgcactgcttcactaagcatatgcgcaagctgcagtgtgctaccgtcaccgtccgcgcgcggtgccaggccgatggccgcctcaccttctgacagctcctcgacctcgtgtatgggtcccgcagctgttttgtccccgcatcctgatcgatgtctcgaagatcgacatgtccgcaattgttcttgggttcgagatatcaatgcccgtaatgattgctcccagtgccatgcagaagatggctcaccctgacggagagtatgcaactgccatggcagcttcagcaggaggaactataatgacagtcatcttgggctacttcaagtgttgaggaggtcgcctcaactgggccttgaatctgtttcttccagctatatatgcagccgtacaggtacaggaatgtggttgagcagttcgtcagaagagccgagagagctgggttcaaggcgattgcactgaccgtggacactccgtggctgggacgtagggaggctgacatcaagaacaggtttatatactaatagaacggtgattccaaacaatgcttgctaccacttggttccttgcataattttcaggcggctagacttcaattatgggtaatgcgcctcggttgagcccatagtctggcgtagaactattgccaccaatgtgtatatacaatctttttagaaaatgagataaacctggcctctacatccaaccgaatgtacacgaccaaatgtgtatgtacagtctaccagcctctgtagtcgtattgattttgaaattgtcttatgctatatccgatgtatgtgcctgtttaattatactagcattgttgtacatgaccaaccatatgtacattagaaagtacgaacaagatgtgcacattatccttatcgtcgcgtttgactatagcttttgtc

SEQ ID NO: 2556 - DNA, 1601 bp, Oryza sativa
  ref <308>: DATABASE ACCESSION NUMBER: AK060372
  ref <309>: DATABASE ENTRY DATE: 2001-12-06
aacttgggattttggttgcacgagcctgcgacactgttactggtggaaatcagttggagaaaagcattactgactttgggaccgcaaaggcaaggctcattcactaccactctgagttggataacattattatcaagaatagtagcagcaagagaaaagttccgataaataaaatcgcaaaggcaacagcttatgagtcatgctctcgaaggtctgcatcatcacaaggatcctgtatcagatcagaatgtgctatgacggacacattaaaggattccaatgataagtcgattcatggtcagggtagtgttgtttctctcacaaacttatggcaagagtggcactatgactatggggtccttactgttttaacagcaccattattcttgtgctccacaatgggagaagattgttccatcaacaaagaatgctctcctcctgacgagcacacgtacttgcagctattcaataggaggaaggtattctcggtgagatgctctccagagagcttcattgtgcaggtcggggagacagcagacatcttgtcaggcgggaagctgaggtctacacttcatgctgtgagtagaccatacggctcaacaaacatcagccgggaaacttttgtggtcttcttacagccatcatgggacaaaaagttgccttactctggtcactgttttgctggtgatgatgaacctagtgaaggcgatgactcaacattcagtgatgggtcagacatgttttcgagtgagcatacattgatgcaagatattttgaaaaagatcccccctctgtcatcaagggtaaaagaagggatgacgtttgctgaattttctcgacagacaacgaaacagtattatggtggtggaggtatccaacaaaacaattaaaaagcagtactatgctacctttggattgaggcccacaggagatctctgcatgtcacctagttattccaactgcagaaatgaggacgcttgcaaagcaattatcaatggaatgattcttcaatcagtaaaatcaggtgttccatgctcatcatctcaagtcatggagaacgtctttggacattttattatttggcactaccgcaagcaccagacaagtccataagccgtatcacccctgtcgtgtaggagcggatgccatcctctgatgatgataactggatgccatggtagtaactaggactacggcgaggccaacacgcacagtctagcgggagctggagcaccttgacagagcaagccttctccaggtttggtgtggcatggagccgagaagggagttctatggtgaagttgccattctcatcagttactgtgaatacagagttagccatcgtctttatacctccagtttcacaggccactcctactgcagctcctgcttgaggaaaatcacaaggttagctcatgattccctttgcatagtatttcagcaccaaaaagaggttacaactatgtataaattaggtgtttagcttgtaactttgttattttatagttatgatggctttttctcatatgtaatgaacctcaaccatacatcagaacagaaaaatttgaagtggtcggcatgcacaatgctaatatccaagt

SEQ ID NO: 2557 - DNA, 673 bp, Oryza sativa
  ref <308>: DATABASE ACCESSION NUMBER: AK060373
  ref <309>: DATABASE ENTRY DATE: 2001-12-06
accgcgcacgcgcacgcgcaatcgcagcatcaccagcatggcgtcccacgcccactgcgcccccgccgccaacctctcgccgtccccgggcccgtgcctcccgctgcgcctgcgccgtcgcgaccgcgagctccctcgcccagctcgcgccgcgctccagcgccgtcacgccgtcggcattgtgcggacgaatcgccgccgcggcgccgtcgcctgcaggaggcggcgggtgcggcacgaggaggaggacgaggaggagtacgggcacaacgaggagatggcgcggttggagcggtacaacgagggcgcgcgcgaccaagcactcctcgtcaaggccagggtcgacgacgaggtggaggtcgtgctcgtcttcaagggattctcgtcgaggctgagcgggagaacggcggcggatccagcgatgagcgtgctgccggagagggcgatcatacagacggtggacgtggtgaggggcccgttcaatcccaccaacatcgagtacctggagaaggatcttccatgggacgacttcaagagccgcctccattagcaaaaaatgtagctctaccaagaatgcggatcctttcagttggcaacaaggcatctaaaatctctcatgatatatcagtggaggtgctaaatcaacaaagaatatatatatctgcattcatat

SEQ ID NO: 2558 - DNA, 406 bp, Oryza sativa
  ref <308>: DATABASE ACCESSION NUMBER: AK060374
  ref <309>: DATABASE ENTRY DATE: 2001-12-06
tgctagatgagtatgcttatgtgatggaagtgggaggaatcatatatacaatcacagatgtggaggagctcggagaatggatgcggtcatgcctggagaaacacccgctgttcgaagctatcccagaggaagagacaaaagcagacccagttgtcaagctactgtctactgccactgaagaaggtcagaaggttgcaagaaatggaggtcagactttccaggccatctttagacgcatctccttgcaagagtaggcaactcttgaatttactagcctgcagtgccattgcacctattgtatggattttgtgtcatctctacaaatttatgttgcatgaattttgctgtttaaggtgtactagttactcataccatagtaatgatgtgtgaaatgtttgtctacctt

SEQ ID NO: 2559 - DNA, 1194 bp, Oryza sativa
  ref <308>: DATABASE ACCESSION NUMBER: AK060375
  ref <309>: DATABASE ENTRY DATE: 2001-12-06
tcacaacatcctgacatacacctcacacacactccccttcttgttggtttctcccccaattcgagccgaggttgagctgagctgagctctcgcagagacagggcgatgaacatcttgaaccagccgatcaaccctggcggccacccggcgttcccggcggcaagggggaccggccagctgatgccggcgtcagtccgcttcgacggcctgtcgacgcagcagagcacggccgccgccgtggggcgggcgcacgccgggcagtccccgcggtggcaggcgcagacgctgcgccggccaagcagctacgtcggcgtcgagcacgacgagccggcggacgccgccgccgccgccgcgctggcgccgttccagccgctgacgctcgacttcctgcggtcgctcctggacaggaacgctgccgtggcggccgaccagggcggcggcgcggacgtcgcgccgccgccgccgccgctgcacgcgctgcgggtggtggtgtcgtccgccgtggagctcgacgcgcgccagaccgagctcatcgcccgcaagatgcgccggatcaccgggttcgcgagcctcaccatcgagaacgtcgtcgacccgtcgctgatcgccggcttcgtcgtctgctacggccccggcgagtcccacgtcatcgacctcagcgtcaagggcaagctcgccatgctcaagaaccgcgtcgactccttcgaccagaccatcgcccacccgcaccaatagttccacacacacacacagcacattagcgccgtccgccgccggcggctcgccggactatatccaagtatagctccgccgtaaacccagtaaccatatcccatgctgaactctacagaagaacaacaccgacgacgcgccgtcgccaacaacagtttttcctatctattgttgttgccaatcgtgagacgctagctactcgatatggttcagctgagccatatattgtactggtaatattcccttgttcttgcagtatatttttggcggaaattaaacagcgggttctctatgctgttgcaaggttgcggtttgtatgcggaattcgggagtcacagctctgtaaaatgttagagcagagactgatgtgaggaagcacaggagttgtataacagacatgactattttcaaatgagaacatgtatcagcatctagccagtaactgcgccatgaaattcagct

SEQ ID NO: 2560 - DNA, 1459 bp, Oryza sativa
  ref <308>: DATABASE ACCESSION NUMBER: AK060376
  ref <309>: DATABASE ENTRY DATE: 2001-12-06
agcaaggagatgctcaccttctccacttcatcctcatcacagccacattgcattcgcaaccactccaccatctctcgccgatggagcaggcacgcgttggctcagccatgatcttcctactcctcgctttcctgtcagaggtttctgcatccatatcgcagcagcagcagcagcaatgcggtggtgcatcgtctgcaggagtgagagctggcttctggctgccatcctcgagccactactcgcctctcggcagcatcgacacctcgctgtacagccatctctactacagctcgctctccatcgacgagacccgctgcgccgtcgcgccgccgtcctccggtgaagagagctccattctttccaatttctcgagcagcatcaagtcctccggtgggggtttcgctgtcaagaccatcttgtccattggcacggatgagttcagggaggatgtgtccaatgccgccttctccaggatggcctcggagaagaaccttcggagagcgttcatcaactcgtcgatcgaattggctcgtgccaatggcttcgatggcctcgacttggcgtggaggtttcccgcaacgcagctggacatggagaacctcggagatcttctcgcggaatggcgagccgagatcatggaggattcgacgaccagatcgaccgagcctctcctgctgacggctactgtttacttctcgaaccacctgttcggcatggccgacactaacctcaactacccgatagacgacatgtcgagcagcctcgattgggtgaacattatcacgttcagcctgcacaagaacagcaacgtcaccacggctgacgcgcctctctacgacaaggattctcacttctcggctagctatggtgtcatctcgtggctggatgcagggctccctccatgcaagcttgtgatggggatacctctgtttggaaggtcttggttcctcagaaacaaggacaagaacgggctaggagcaccaactgcagctgctggaacaaagcagagaaagagcaaccagatcggcgtaatcgcgtacgcagagatcgaagagtacctgaagtctcagagtgtttttgttactcatgacaaccagtcagtggcagactacttctacagcggtgatctctgggtcagcttcgacagtgccgtggttgtgcaggagaaggtggagtttgtggcgaagtctcagttgcttgggtacttcctctcgaccatcagctttgatgactcaaactacacattgtccaagcaagcatcacagtcctggaatcaatatcatgtttcttcatatgcgcaaggtagttttggaattatgcaagaaggagctataatccaagatctgcatgcatcaacagggtcaccaagtagttggtattcaaaaactctcagctacttgttattgtcaataatacttgtattggaggttctataataccaagaacagccgtaatttgt

SEQ ID NO: 2561 - DNA, 1180 bp, Oryza sativa
  ref <308>: DATABASE ACCESSION NUMBER: AK060377
  ref <309>: DATABASE ENTRY DATE: 2001-12-06
aagagaggctcttggtatacaagtatatgcccaagggttcactctatgatcagctacaccaacagactagtgagaaaaaggcattggagtggccattgaggctcaaaattgccattgggtctgctaaaggtttggcatggcttcaccacagttgcaatccccgcatccttcaccggaacattagttcgaagtgcatattactcgatgatgactatgaccctaaaatttctgattttgggttggcaaggcttatgaaccccatcgacacccacctgagcacatttgtcaacggtgaatttggagacttggggtatgtagctcctgagtatgcacgtaccctcgtggccactccaaaaggggatgtttatagctttggagttgtgttgcttgaacttgtcactggtgaagagcccacacaggtgaaaaatgccccggaaaacttcaaaggaagtttggtggattggataacatacctgtcaaacaatgctatccttcaggatgcagttgataagtccttgattggaaaggatcatgatgctgagctgcttcaattcatgaaggttgcatgctcgtgtgtgctttccgctccaaaggaaagaccgacaatgtttgaggtttaccagctaatgagagctattggagagaaataccattttagcgctgcagacgatgaattgacgatgcagccgcagaatgctgaagccgaaaagcttgatgagcttattgtagcaaactagatgagggtgatgaatggatgttgctcagatgcagtagctactgtgaagcttctagataatcagggtgatccgaactgaatggaatcctgctcagtatattttttccagcaattgcactgctgagcaacactaggtaaagctgtaagctccaagatatgcatgccatttggtttgtaagatctgtatcaattagccatgttaaaactttttctgtacattcttgccttgctgtgtactatctctaggattggcatgtcctgctgttgtaagatggatcaactgtatcagcatccgaatttagttgtagtagctcttagatttagcaatgttgaacagtactactgggttgttgatcctccacatttttttcggtgcgttcctttgtcatttttgttagttaatgtggagtgagcccctacaataatctgatgagatgtgggatt

SEQ ID NO: 2562 - DNA, 1719 bp, Oryza sativa
  ref <308>: DATABASE ACCESSION NUMBER: AK060378
  ref <309>: DATABASE ENTRY DATE: 2001-12-06
ccctagaacctcccgcaacaaataccccctccttcacccctctggacgcgacgccggcatcagtaattgagcgccgcggcggcggaggcgggcgaggctgcagacgccgacgagggctgagccggacccacccacccaccgagcgccgtggcttgggcggccggggagagggagggagtggttggtgagctctaatggcgggcctcccctttctcctcgcgctccacatcgcactgctgctgcttcttccctgctcctgccaggttggggattcgtgctcgtcggcgcgcgactgcggcgccggcctctactgcggcaattgcgccgccaccggcaagacccggccgtcctgcatcagagacctggcgatccagcctacctccattgtgaagggactgcccttcaaccgctactcatggctggtcacccacaactccttctccatcataggcgagccgtcgcacaccggagtcgagagggtcacgttctacaaccaggaggacactgtcactaaccaattgaggaatggagtgaggggattgatgctggatatgtatgacttcaatgatgatatctggctctgccactccttgcaaggccaatgctacaacttcactgcttttcaaccagcaattgacacattgaaagaggtggaagcatttctatctgagaatccgacagagataataacaatattcattgaggattacgtccattcaacgatgggattgagcaaattgtttactgctgctgacttgacgaaatattggtaccctatctcagaaatgccaactaatggaaaggactggccaagtgtcacagatatggttgcaaagaaccacaggttgctagtgtttacttctgattcttcaaaggaggctagcgaaggaatagcataccagtggagttatctgctggagaatgagtctggagatccagggatcactggttcttgtccaaatagaaaggaatcacaaccactaaactcaagatctgcatctctgtttatgcaaaattacttccccacaattcctgtagagaatgaagcgtgtaaagagaattctgttggactaccacagatggtccaaacttgctatactgcagctggaaatagaatccctaacttcatagctgtgaattactacatgcgaagcgatggtgggggtgtttttgatgttcaagacaggatcaatggcgtgacactatgtggctgcaacaccattgctgcttgccaggctggggcaccagcgggcgcatgcaaggacaccggagcccctaaccggacttcctcttctgtaaatggaaacgtatattcaggaactatagaattcaagtcacctgcttcagcagccagcatttcgaatgctaacatccctagtaaatttgttagtttgctactgctaggtcttgtgttgatcattaagccgttttgatctttcaggcattctttttttcttttgatgagtttgccacgtttctttttcgtttttaatgtctcctatgtgatgggattacaattacagtaagtaatcttgttagccatctaggctagaatagattcagagagttacggtctggtctgtttggctgtctgacctgagaaatttcctctcatgcctgctcgatatgttctaggctagcaccttacgttgtacccatcacgaagtaatacaaagaaattgagtggattaatggtcctatgggttggcaccaatgttc

SEQ ID NO: 2563 - DNA, 1127 bp, Oryza sativa
  ref <308>: DATABASE ACCESSION NUMBER: AK104298
  ref <309>: DATABASE ENTRY DATE: 2002-08-28
gacgagacttcacgccggccgccctgctcgtcgtcgccggcggcatctgcggcgcgcgcgcgtcatcctcatccccagctaagtggcctcaccgtcaccgagcgcccgcgtcggatcgcgtgcgggagagagcggggggcggagagatctggtgcgaggtcgagtcggggcgccggcgatggcggacgacgcgggcggcggcaggcgcgagtacagcatcatcgtgcccacctacaacgagcgcctcaacgtcgccctcatcgtctacctcatcttcaagcacctgccggatgtcaactttgaaatcatagttgtggatgatggaagccctgatggaactcaagacattgtaaagcagttgcagcaaatatatggtgaaaaccgtgttctgctgcgagctagaccgaggaagctaggacttggtactgcatatttacatggactaaagcatgcctctggggacttcgttgttatcatggatgctgacctatctcaccatccgaagtacttgccaagcttcattaggaagcaaaaggaaactggtgctgatgttgtaactggcacccgttatgttcagaacggtggtgtccatggttggaatctcatgcgcaagttgactagcaggggagcaaatgttctagcacaaacattactacagcctggagcttctgatttgactggatcattcaggctatataaacggaatgtcctagaagatttaatctcctcgtgtgtcagcaagggatatgttttccaaatggaaatgattgttagggctaccaggaaaggttatcacattgaagaggttccaataacttttgtcgatagggtttttggaacttcaaaacttggtggatctgagatagttgagtatctgaaaggccttgtttatctgctgctcactacatagggaaaaaaccgctaggcgcttaactgtatcagacacaactcgtgatagaggaacttcaatttgttatatctacagttttgagttgcgtgaattactgattttctgacttgccagtgggttctcgtacagtgtatttggtgtgtaagtacactttcatgagcaagggcaagaacacaattgtaccatctatatatgaactgcagagaaagctttgggt

SEQ ID NO: 2564 - DNA, 1037 bp, Oryza sativa
  ref <308>: DATABASE ACCESSION NUMBER: AK060379
  ref <309>: DATABASE ENTRY DATE: 2001-12-06
acagtgcgttgtccatcacaattgctaattaactaagacacccttccttgattgtgacactagcacgacgcactttcctctatatacatatacatatatcctccttccgtccagctaacggtttatatgcttagctagctgtttgttttggcgataccatttgcattgcttgcccagcatcgtcgtcgtcgtcgtcgggagcaaggaggaggagagaccatcgatcttgattgatttgaagctagatggcggaggaggcgaagaaggtggaggtgaccaaggacatcgccgaagagaaggcagtggtgccgctgccgacgccgccggccaccgagcacgacgactccaaggccatcgtcctcgtcaaggaagctgaggctacaggaggttcagctgaaagagatgcttatctcgcaaaaattgtgtcggagaagagattggtactgatcaatgcctgggaggaaagcgagaaagctagagcagagaacagggcggccaagaagctgtcatacatcacttcatgggagaatgcaaagaaagcagagatggaggctgagctgaaaaggatcgagcaagaactggagaagaagaaggcggcgtacgaagagaagctgaagaacaagctggcattgctgcacaagacggcggaggagaagagggcgctcaccacggcgaagcgtggcgaggagctgatcatggcggaggagatggccgccaagtaccgtgcaaagggcgaggctccgacgaagctgttcgggctcttgaaagcctgagagaaatcatgaggagttcatcatacatatatgctgggatttggtgttgttgattagtctgtgaacttacagaaatttgtatatgtgcaatgcatggcatccgtgtttgcgtcgtgtgtatgtcgtctaattgaagggccatttggtttgtattttgtcagttgggtggtttgatttctggtgcgttttgtaaaggaattgtgtatatgcataggggagtgcaggcaggggatgatggattatgaatacgcttattctttcatg

SEQ ID NO: 2565 - DNA, 1961 bp, Oryza sativa
  ref <308>: DATABASE ACCESSION NUMBER: AK060380
  ref <309>: DATABASE ENTRY DATE: 2001-12-06
cagacagtgaaccatcagaaaatgagcctgatgatctgtatatgccttctccagatcagagtttgtctaactctccagatatcgacagaatcattaacagcatatgccctagttcatcccctaggcatatgacccctgaaaaagtctctaatgagtttgacaacgtccagttaactacaccaccaccttccgatatcgacatgtctgatcctgagcattttgcatgtaactacgttccgcaggaagttagaaaggcccttgcgaagctaagatctagtaattcatcatttgagcgtgcgatgtcacaggcaagttctggtgatgtgcatgcattaagtgattctgaagattgcgacgaacgctggaatgttggtaccaagaggaatcaggggtgtggtcgtggtcgtggtcttacactctgtctcaaggtgtggaatttgcctaagggtgtccgcattccagtgctattgaacgcttcgggggagcctgttgggaaagaggcaggcaccttatctacctttctgggtgcattagcacgtgacggaatattggcacctctgacacatcaagattggagacgtgttccagagaaaaacaaggatgtgatgtatcatattgtcaagctcaaatttgacattgctccagctgctgaattctggatcatgaagtgtataggaagaaagtggaagagttggaaagctctcttaaaacaaaaacattatgatactcatgaaacggtggaggaatgccttgctgatcaaaatcctcgcgttctcaaggaacagtggcaatatttagttgcatattggggtacggaaaaagcgaaggctgtgagtagtcgaaataaagcttgtcgggcaaatgtaaccgctacgcatactgcaggaacaaagagctttgcacggataattgaggaggagaagcagaagcggcctaacaatgaggagcccactgctgcggatttgttcctattgactcatacacacagaaacgggaagcctatgaagaaggaaaaagctgatatcattgcacgagtccgtgaacaatctcataagcaagccgaatgctcaggaagtgactctgcagcacacaaagtcggacttgaatcctgctccattggcctgcgtgggaagaggggtcatcgtcggaaggcagtcttgcaggcatccttcaaggaagctgaggaggctaaaagaaaggctgaagacgaggcagcgacgctgaggaagaagatggtggcaatggaagaaagtcagaagaaactgcaagaggatttggcgaatatgaagagtacagttagtgctatgcagaaggcgacgtcaactggtgacctatcggatggtcaaacgcaaaactttccacaggtccaaaattcacgaagcgctcatgagattttgcagccatatcttgactactctgcactgtacgatccttctgcctcccctagtccacgatttcgatgataatcgcaccacagacaatgccaatatgcatggttgattccatcttgatcgtggaatggtgtatgaaacgaagaggtttagacgtttagttggccgttcatgtgtaatgttggctctctaaacccggagcccagtgcttgtactcttctgttttattggctactgtaacaggatactctcttctgttttgtttacactgactagaactacttcacttcgcatttcccttcctgtgaaatgattttgggcgtgtttagtgaagcttgagattctgagaagcagttaattggtagccagtttctgagaatatagaaaagttgggtttctcagcttctgccttcgagcttatagttcattttctggattctatatctacaacttctcagaatctgtaccaaaacatagactatttaagggagcttttggttatgggagaagttgcagcagctagaaactcccccaaacatactctctatagggttataccttgtgttttct

SEQ ID NO: 2566 - DNA, 1736 bp, Oryza sativa
  ref <308>: DATABASE ACCESSION NUMBER: AK060381
  ref <309>: DATABASE ENTRY DATE: 2001-12-06
aagaacagagttatgatgtcgagatggacgtccaaaaatcattggaaactgatgaagagctcaaaaggaacacttgtgatttggaagcaccagtataccaagataatgcccaggatgaaatttctagcaaactgatatcagccaaggcagctgatccgatcaaaaaaatggaagctagagactttgaattggatgaagagtcatttgatacagtttgtcaggaaaacgtggaagcagcaacagaaattgaagacggaagcttgaatagggaccaagatgacataacaagcccaaaggcttcacaagaggatgctttggaggaagtaggaacagaacttccgcatgagtctttacatgaaaatagacatggtgcaaaggatgagcaaacactctccttgatagaacccgatacaggcaacgctgaaaaattgcctaacgaggctgacagtgttcaaagccctccttgcacagaacaagaagagtccattgaatcttcctatgttgaagtgagaagtactactgagggtcaagtggagagtgaagtaatagaaacgaatgaggaggaccagcatacgaccgcaggtggacatactgaagaacagatagaaaatttacatgatgataagtcgaaagaaacatgttctgaagaaatatctgatgagcaggcacctgaaataactgaaccagttagccacactgatcgaaattttgcttatgaaaaggaaattcctgcaagttcgacatgcatggacaagaaagagagtatgatctcaaacaatgaagtcagcaactttgaaaaagcccttgagacacactcagatagtccaaatttgcatgttaaccaagataagaaagatgaaacagctgataaccaaactgtggtggaccataacaccgtgttagacaagcttgaagattctaatcggcaggaggagcaggaaactgctgcacagaagttaccaaaagaaactgaaggaaaccaggaatttatggcaataacagagcctgtgatcaaagaagagaatgtacatgaaacagttgaaggtaacactcaagcagtgaagataaaatctaatgaagagaaagaactttttgattcacaggttcaggaacgtggtctcaatgtggtttcacccaaagcaacttctgaggccgacgaaaaatttgtggagataacaaagccagaattcagcacagatgaagaacatagtccaaaggcggatgaatcaaataagccagacgagaatacttgtgatgagaaaacaaaggctgaagaggaaactaataatatcactgatgaagcaacagtgaaaatagaagaacgaggagcagaacagaaggtatcacataaaaaacataacattttgtctggtgttggatcaaaggtgaagcatcaactagcaaaagtgaagaaagccatcataggtaaacctgggcacacaaagtctgaatcaccaaaatcataaaattgattcaccttagagcatgtaattcttgtacaatatgtatttttgtaaggaatttatgtgaggtgtaggatattgcaatgggtttagtgaaccatctgtaattttgtatgaacgattcattcaaaggttgtgttcttaaggacgcttgtaaatataggcaggcagtgtgtagttcaagtttccataaactttgtaattgtttcaccaacttggtgtgaggtgaacaacatgtacatggcatattgtttttgttacttcctcattgat

SEQ ID NO: 2567 - DNA, 622 bp, Oryza sativa
  ref <308>: DATABASE ACCESSION NUMBER: AK060382
  ref <309>: DATABASE ENTRY DATE: 2001-12-06
aaatagaagcagacttaagtttcgaagtaattacacataataaaaaaatggactcaggctcaagttccgaagtaattacacatatagaaattcaaaaagaaatcgatacaatccacgtcataatccatattggattccccaatttattaaagaaaaaaggagcaatcgaagaattagagaaagatctacaaaaagaagttaattctgtaaaccagagacttaatattgggatcgaaaaagtgaaagaaccttatagacaacctaacattcttgcagaatatatagctttccaattaaaaaatagagtttcattccgaaaggcaatgaaaaaagccattgaattaactaaaaaaacagatataaagggagtaaaagtaaaaattgcaggccgtctcgcgggaaaagaaattgcgcgtgccgagtgcatcaaaaaaggtagacttcccctccaaacaattcgcgctaaaattgattattgctgctatccaattcgaactatctatggagtattaggagttaaaatttggatattcgtagacgaagaataaccaaccctgtcttcccattctgttcagtaatagaataaaaaatgacaagagccttattttccctaaaatccctg

SEQ ID NO: 2568 - DNA, 1456 bp, Oryza sativa
  ref <308>: DATABASE ACCESSION NUMBER: AK060383
  ref <309>: DATABASE ENTRY DATE: 2001-12-06
aacttttctcttctatcttgttataggaatgccatgaatattatgaaactgcctattatgttgaggtctgctgtactgaactgcctattatgaaacttgatgcagaattgaaggagctgagatcaataaaagtttgcttgctttaaaggaatgcatcagagcactagataatgaccagacccacattccatttcgaggaagcaaattaactgaagttttgcgggattccttcattggggactcacgcactgtcatgatatcatgcatttctcccagctctggttcttgtgaacatactctgaacacattgagatatgctgatagggtgaagagtctgtcgaaaggaagcaacaccaagaaagatttgtctttggctgctgcacctttaagggagtcaagtccttccctattggcttcagctgtgccctctttctcatcagccgaggtgatgaatgatatcactgaaaggagcaactttggttggaccaagcaacagtatgtcaaagagcaccaagcaccaacatttgtggatagaatgcaaaaggtgaaagaagataccgaatttagtctgtcaaatggtggttatttcaaggaacaaagaacaaagggtagtgtgccagtgggcatagctgaagtacctgatacagtgtaccagcagggaaggcaaccaactaggaaggctcgtgatttaacttcagacaataatatgagaaattccattgcttatccaattattagaagggttgtaccagatgaagatgagcatctgaacgaactcctccaggaagaggaagatttggtgtctgctcatcggaagcaggtggaagagaccctagacatgatcaaagaggagatgaatttattagttgaagcggatcaacctggcaaccaactagacgactacatcacaagactaagcggtatactctctcagaaagctgccggaattgtcgacttacaggcacgtcttgcgcagttccagaggcgcttaaacgagaataatgtgctgctatatgcccaatgcccttgatcaaaggaagtacctatttgtgatgagaataacgtgcagtatatctgtataccagagcccttgatcagaggagttgcctatttgtcttcactacgaggctaatcagaaaagttggctgtgccactgtttgctggtatgctccgtagagatgcggccttgcctggcctatacagctgcagttcagaacccatagacgcaagacaaacgcagaactagatggctagtttactgcactttgggatcggccgacttcgtaagctatttgtacccgagttgcgccagttgtgtccttctgttacatccttgtgtatatcgtgcaaatcgtgtcgtcacaggattgtcctgttatttgttgctcaacaaatacacttttttttgtctgatgtatgatgaattcagagttttgtgataatccattttgcaccc

SEQ ID NO: 2569 - DNA, 1167 bp, Oryza sativa
  ref <308>: DATABASE ACCESSION NUMBER: AK060384
  ref <309>: DATABASE ENTRY DATE: 2001-12-06
agctctcggttccttgctcctccaagtctccgtcggatccatcctcccctaccccgcgaaaccctagcctcccgagcccctcgccgccggcggatggcgacggcttgatcggccctggacacccgccccgcctcgcctcgcctctgcctctccccgctccccccgcgcatctgatgttcctctcccgcatcgtcctccgcgacctggactccatcgactcccccgccgcctccatggcgtcctccaagaagctggtgacgcgtgacgagtgggagcggaagctccgcgacgtcaagatccgcaaggaggacatgaaccgcctcgtcatgaacttcctcgtcaccgagggcttcgtcgacgctgcggacaagttccgcgtcgagtccggcacccaaccggatattgacctggccaccatcacggatcggatggaggtgaagagagcggtgcaatcagggaatgttcaggaggccatcgagaagattaacgatcttaatcccacgattctggacacaaatccccaactgtactttcatctgcaacaacagaagctaatagaattgattcgtgcgggaaaaataaatgaagctttggagtttgcacaagaagaactcgctccaagaggcgaagaaaatcaagtctttcttgaagaaatagagaaaactgtagcacttttggtttttgaagatataaagaactgtccatatggggaactattggatgtttcccaacgattgaagaccgcaagtgaagttaatgctgccattcttacaagccaaagtcatgagaaagatccaaagctccctagccttctaaagatgttaatttggactcaaaaccaactggacgaaaaggcagcatatccacgaatcaacaatttctccactgccgcgcttgaagatccagcgatttgaggccgctcgggaggggatggctaaagaatgtaggcaccataccatgactgttttcacacattgtacttcctggatctgttgtgctcttcacctgcaaggctgcaacagtgaatccagtgctttcttcggtctttgatctcaaatgcaaaaaacgtggaatcagaaaaaaaaatcgctcgtgttgtacatgatgtagaagatgttcatcacattttaatctgtgaaaaatgttcgatttgatttgagttcattc

SEQ ID NO: 2570 - DNA, 1653 bp, Oryza sativa
  ref <308>: DATABASE ACCESSION NUMBER: AK060385
  ref <309>: DATABASE ENTRY DATE: 2001-12-06
taaactgttttgcggagaatgggctgttacatgaagctgttgccttgtttggcaagatgctgaatgcaggcatccaacccgattctgtagcactagttggtattctgggagcaattgctggattgtcatccttgacaaaaggaaaggaaattcatggtttccttatcagaggtaaatttcccgtggaaggtgctgtggttagctcccttgtggacatgtattctggttgtggaagcatgaactacgctctcaaagtttttgatgaggcgaagtgtaaagatgttgttctctggacagcgatgattaatgctactgggatgcatgggcatggcaagcaagccatatatattttcaagagaatgctggaaacaggtgtatctcctgatcatgtttcttttcttgctctactctatgcctgtagtcattcaaaacttgtcgatgagggtaaattttatctggatatgatggtaagcaaatacaagttacaaccatggcaggaacattatgcctgtgtagttgatcttcttggtcgctcaggacagaccgaagaagcttacaagttcattaaatctatgcctttggaaccaaaatctgtggtgtggtgtgcactccttggggcatgtcgtatacacaagaaccatgagcttgctatgattgcaactgataaacttcttgagttggaaccagataacccaggtaattatgtccttgtatcaaatgttttcgccgaaatgggcaagtggaataatgtcaaggagattagaaccaagatgacagaacagggtttgagaaaagacccagcatgcagctggattgagataggaaacactgtccacactttcactgcaagagatcactctcacagagactcacaggctattcatctcaaacttgccgagataactgaaaaactgagaagagaaagtcagtatgtcgaggatactagttttgttctgcatgatgtgagcgaagaagagaagatagatttgctgcataggcacagcgagaggcttgcgatatcgtttggtttgatcagcactgcctcaggtacacctctaaggattgccaagaacctcagagtttgcggcgattgccatgagttcaccaagctagtgtccaagctatttgaaagggaaattgtggtccgagacgccaacagattccatcatttcagtggaggcacttgttcttgcggtgacttctggtgagtggccttagacagttagattgtagaagtatagaacattgatagcaagaatggtgaagaggttagaacaaaggcacatgagtgatgaactggctgagaatggggaagaaaagaagaagagagaaatggcttgtcctgctccctgacaaataggatctcgtttgccgcccattccggattgagtttattcaccatctgtttttcatctctagatggatcatagagcaactgaggaagagtctgaatggcacgaggacttgtgatttatagcgtcaaaatgtaaaacgatgtaaaggattcttttctgtaaaatttcaatagctgattcctttcactgttcataatcacttgagttgagaggccttctctcagttagcgttcatatgtcactctagggtttgttccatggtctgctgaaaattagtttttgggccaaaactgttggc

SEQ ID NO: 2571 - DNA, 1321 bp, Oryza sativa
  ref <308>: DATABASE ACCESSION NUMBER: AK060386
  ref <309>: DATABASE ENTRY DATE: 2001-12-06
atgcatgctcttcatgtgttattacaaaacgtacccttgacacttttaccatttttttaaccatcctttttttcccatttactgtatagtcaaagtttcacaacccaaacaagcaaaagtgaagagaattacatgaaggagacggcactgaactacaacgcggatgaacaaataaaatttaatattagggcattcctttcatgtagtcttgttaagattcttttcccttctctagagtgttctggtgttgtaggcaaccacagcttagtggcttcctttatcatgccaaataagaaagagataggcctctgcttttgttagtgtttccccgtgcaaaggaggagttttattttgtcacaaaattgaaaggtagcaaccattgtgacatataatacaccttttttgcatggaggaggagaagaaagcatctattccagccctgcctttttgacaatgcttagttgtccaagaggggtttgtttatatctcgctttactgcatgattaaacggaaaacgctggtcattgtccatattagcaaaagcttaattagttaacagattcatctagaatcaacatcttgagccgccccggggtgggggggggacaggtattttgatatgtttttgtcacacagggaaaaggaaaattcagccatccttgagatatcatgcacttgcttagcactgagaaattaattagattgtatgcctttattggagaactaacttctacattgtctcatggcttatgtgcatgctgaggtaatgaaccgctatacaaagatgtaaacgtaagtggcaaaaatgaagccggagagagatgcacatcttggtgataagagattgcgacatcgtagccatcctgatttctgcagttctcattcaagaaaaggaaaaggagactttgacccatcgactttttaacaccgtcgatttcaggaacaaaaaaaagaaaaagccatcacggtcaggagtggttcacgtcgtcgtctggtgagttcttgttgagttctgggaggagtgaagaatatggcggcctcggccggcgtcagtgacgagcacgtatgcggtagcacagcagcgacagaaaatattcagaaatagaagggatgcatgcagagagataggtgcgtggcgtctgccgtttggtggtaacgtagagccgctttaactcctgcagctaaaatatttattagatgttcttttgcactgtcaaatttgttttttttaaaagaaatcctcgagctgcaaattcgaatttgttaggcacatgtctcattctcattgttgacgagttaatcattctttttttttttcttc

SEQ ID NO: 2572 - DNA, 947 bp, Oryza sativa
  ref <308>: DATABASE ACCESSION NUMBER: AK060387
  ref <309>: DATABASE ENTRY DATE: 2001-12-06
gaaccctagtcgccggatcgcgtctctcccatcctctcgcgcatcctcctccgactacctcggttgggttttgggggcggctggagatgtcggactccgaggagcaccacttcgagtcgaaggccgacgccggcgcgtccaagacctacccgcagcaggctggtactattcgcaagaacggtcatattgtcatcaagaaccgcccatgcaaggttgttgaggtctccacctccaagactgggaagcatggacatgcaaaatgccactttgtggccattgacatcttcaatgggaagaagcttgaagatattgtgccctcctcccacaactgtgacgtcccccacgtgaaccgtactgattatcagctgattgacatttctgaagatggatttgtcagcctcctgactgaaagtggaggcactaaggatgacctgaggctccctagtgatgaggctctgcttactcagatcaaggatggattcgccgaggggaaggatctgattgttaccgtgatgtctgccatgggtgaggagcagatctgcgctctgaaggatattggccccaagaactagaataccttgttaccgtgtttggctacctgtctggtcgctttaagtttggagctggtcttgagattatatataaacttttgatttgagcgtaagttaagaagacatatgggccgttgttccatcttgcggtttataccgaatgatttggatgtacctttgctatatgtaatgctattttgaaccagtagttttacagtctttatggttatttatatacaatgttctttgggttatatgcaaaatttcttgtaatccatcctatattctgttgcatcattttttgggtgctctttgacttagtcgaagtgatcctcttgacttcttacgtatcggtttcgattattttggttattgtgttgaacaattgtgaatttc

SEQ ID NO: 2573 - DNA, 1542 bp, Oryza sativa
  ref <308>: DATABASE ACCESSION NUMBER: AK060388
  ref <309>: DATABASE ENTRY DATE: 2001-12-06
accacctcacctcacgaaaccggcaatggcggccgccggagcatcggctctccggccacacctcgcccttctccccgccggcggcggtggaggcggaggcggcggaacccgtagctatgccctccaagcgctatccttcgtctcgcccctcctccctcattgcggccgacgacgccgctgcgtgctccgctccaaggcctcttcgtctccgtctcccccgccatcgccggggaaggaggcggtggctgtcccgacggcggagtcgtgcgtcaacctgggactcgagctcttctccaagggcagggtgaaggatgctcttgaacaatttgagaatgccctagagctgaatccaaatcctgttgaagcccaagcagcactatacaataaagcatgctgccatgcatttagggaagaaagcaacaaagctgcagattgcttaaggacagctctgcgagattataatctcaagtttggtactatacttaatgatcctgacttggcaccgttcagggcatcaccggaattcaaggaacttcaagaagaggcattgcgtggtggagaagatattggttctgggttccgaagagacctgaaactcattagtgaagtacaagcaccatttcgtggtgtccgaaggttcttttatgtggcgttaactgcagcagctggaatttcaacattctttaccattcctagacttatacttgcagttcaaggtggcgatggtgcccctgatctgctggaaactgttgggaatgctgccatcaatattggaggtattgttgtgctcgtggctttgtatttctgggaaaacaagaaagaagagcagcagatcacacaaatttctcgcaatgaaaccctttcaaggttacctgtccgcctgtcaaccaatcgcattattgagcttgtgcaactccgggacattactaggccagttatactggcaggttcaaaagcatccattactcgagcaatgcaaagagctgagagatatcggactgaactgctgaaacgaggtgttcttctaattcctgtgatctttggtgcttctcagaaagcccaaagtaagccaagaggctttggaagttcaagatctgctgcatcagctccttcagttggggatgactttgagaagcgtactgaatctattgcagcgaaatcacggttaaaagctgaagagcgatttaaggctgatattgtctctcctgaacaatgggaaagttggatacgtgaccagcaagagtctgaaggtgtcactcccggtgaagatgtctatataatcctccgattggatggtcgtgtcagaagatctggaagaggcatgccaaattggaacgacatattgcaggaacttccacgacttgaagaactgctgagcaaacttgaacgttgatgaaggtgtgtatacaactgcagtttgatcatccatatgtttctccattgtattattaattccctaatctatgtatagaccataccaatgtaattttgagggaaaattttgtttatgccactaatatatgaattcccaacttctgacgt

SEQ ID NO: 2574 - DNA, 1481 bp, Oryza sativa
  ref <308>: DATABASE ACCESSION NUMBER: AK060389
  ref <309>: DATABASE ENTRY DATE: 2001-12-06
atcccctgaaaaccactcaccgtccatttcccctctccccacctccgcgtctcctcaccatggcttccgccttctcccccgccaccgccgcgcccgccgcgtcgccggccctcttctccgcctccacctcccggcctctctccctcaccgccgccgccgctgccgtctcagcccgtatcccgtcacggagagggttccgccgcggccgcttcaccgtctgcaatgtagccgccccctccgccacccggcaggaggctaaggcggcgggcgcgaaggagagccaacggccggtgtatccgttcgcggcgatcgtggggcaggacgagatgaagctgtgcctgctgctcaacgtcatcgaccctaagatcggcggtgtcatgatcatgggagaccgtggcaccggcaaatccaccaccgtccgctcgctcgtcgacctactcccggatatccgcgtcgttgttggcgaccctttcaattccgaccctgacgatcccgaggtcatgggccctgaggtccgggaacgcgtgctggagggtgagaagcttcctgttgtcacggccaagatcaccatggtagatcttccccttggtgccactgaggatagagtctgtggcaccattgatattgagaaggcgctcaccgatggtgtcaaggcgttcgagcctggtttgcttgccaaggccaacagggggattctttatgtggatgaggtcaatttgttggatgaccatctagtagatgtgcttctggattctgctgcgtcaggatggaacaccgtggagagagagggtatctccatctcccaccctgctcggttcatcctcattgggtctggtaaccccgaggaaggggagctccggccacagctgcttgaccggtttggcatgcacgcgcaggttggtactgtcagggatgctgaactcagggtgaaaattgttgaagagagagctcggttcgacagggatccaaaggcgttccgtgagtcctacttggaggaacaagacaagctccagcagcagatttcatctgctcggagtaaccttggtgctgtgcagattgaccatgatcttcgtgttaagatttctaaagtgtgtgcagagttgaatgttgatggattaagaggggacattgtgactaacagggctgccaaggcgttggcagcactcaaaggcagggacactgtcactgtagaggacattgccactgttatccccaactgcttgaggcatcggcttcggaaggacccacttgaatcaattgactcaggattgctcgtggttgagaagttttatgaagtcttcacctaaattattctggaggtaaatggttttctatcagaaagttcggcaggagggcttttgtttgagtttaatgacattgtttcagaggcttgaacttgatgtctatttgtacatctatcattagtatagattttattccccttcaatcgaaatgcctgctatgagttgcagacggttcgt

SEQ ID NO: 2575 - DNA, 1161 bp, Oryza sativa
  ref <308>: DATABASE ACCESSION NUMBER: AK060390
  ref <309>: DATABASE ENTRY DATE: 2001-12-06
cttttgggaatcttcggcctccccagcggcaggcaggcagcgcggcggcacggcagcctctctcccctcctcctcctgctgcccgcgtcccccctttacctcgcatccgccgcggatctccgcctctcccgccatgatggacctggatccccgcctctacgagaacgtctccgtgagtgataacgatgtccgcaacatagtgttgtcttatcttatgcacaactgttttaaggagactgctgagacattcttatccagcactggtttggaactgcctgttgattacactgtagatgtagataagcgtaaagcgatttttagttttgtgttggaaggcaatgccctgaaggctatagacctgacagaagagttggcacctaacttgctagagaatgatatggatttgcattttgatcttttaagtcttcacttcattgagttagttcgttctagaaaatgcacagaagctcttgagtttggtcagaaaaagttgacgccatttgggaaagtgcccaagtacgttgagaaactagaggactttatggccctcctagcttatgaagagcctgagaagtcacctatgtttcatctactaagcccagagtacaggcagaatgttgcagatagcttgaatcgggctgttcttgcacatgctaatcgaccagcatattcatcattggagagagtgatacagcaagcaactgtggttagacaatacctacagcaggaagttggcaaggattcttacccgccattttctttgaaggcctttctgaacaagtaaggtgcaaccaatcaatcgttagaaagatcacctccagggctccagtcctatggccaccagagttcccttcagaatgtgtaaaacagttgcgtgaaagcaagcgacgggatgctcatgcacatattattcagagaaccgccttctggattaaacgatatcatcagtggtgtaccaacaatatcatctgcatcgaaagaggaatgttgtataactgttgtttcctcatttacagttccccatttcccctttacccgttgacgccatcgaaagttgtacatatcagaaccttgagctattctgtatgttcgtgcagagatatcgtcagtttgaaccaatctgcagtgcacttattactatgcctgatgcttggtctctac

SEQ ID NO: 2576 - DNA, 1654 bp, Oryza sativa
  ref <308>: DATABASE ACCESSION NUMBER: AK060391
  ref <309>: DATABASE ENTRY DATE: 2001-12-06
gaaatttcagagccccagacgcggcaccgcggcagagcggcatcttcttcttcctcctcgcgactcccaccctccggcctcggtcgccgccatggccgagacccccgacgaatccgcggccgcaatcgaggtacgccgcctcaaggcattccccttcgatctcctcctatcctcccaatccttgcttcttcaatgctatcccgtcgaccgccgctcgccggctcaaccgattggcctttcgggatgctcttaccctcacgatggcgattttttttttggtcctgcaggcgcgaggatggagctcgcacccgttctcgttcccttcccagccgccggatatcaagaactggttctcgagctatgagtacgagtcgccggaggtgccggagctggttggtggcaatggcggcaatagcggcagcgagacccaagacccgctggagaatatccaggtcggggtgcctgtggattcgttgttggaaccgaccacccatgatggtgatggtgatggtgatggtgattctgctttgaggggaaaccaatgtggacagcaacacgagcatgaggtttctgctattagagagttcattcccattagtaagagcaaagtggagcgtggcacgaagaggaagcaaagcttgcggagcttgttcggagatggctttcttgacaacatcggtgagacttctgaaactgaaactcaggcggtgttgtctgttcagagaaatgaagccgagcctctgccagatcgcaatgccatgggcttgcctgatgatgatgatactcaaggaggtcaggaaggcgcgatcgaatgcagtgagctgccggtggattgtaatggcatcgatgtaggtgatactcaagaaggttcccaggttgatcaggagaaagagcagagcaaactgctaattggtgatggtatgagttcatgtcatgctgacaaaatcaccccgaaagatggtaatgagcagagcaaactgtcagttgattgtactagaacatgcaaggatcgcaccaaaaggcggtttgacggaaatggcattaagagcagcctaccatccatcggttgtaatgatatcatcatacctaacactgaagaaaattctccaggagaagaaacttgccatggcaaccctgcaatggatgacaaagagcaggaagaaacagttgcagctgatggttttgttgccatcaagagaaaggagaaactagaacaaacattcaacacaaacaaaattcctaagcccccaacgagaagagcgaagtccacgacgttgcaagagaaccgtgacattgtggaacagaaagtcgtagtccaagaacgcactagcagaagccccttagcagacatgactaatgtttcagaagtagcagctgctccaacaacgacagagatccgcggtaaatggaagtgccctcgcaaagggaagcactatgttggtcctccgttgaaacagcagcgtttggggcaatggttgcgccgactggattgaagcatatgcattgttcaggttgaagcaatttttccttttgtattggcaactggtgatttggtgccatgttttcaggtttggtgtttttacccagcctgttgtacgagtgcatgccactatatatgtcaggcagaaaacactatatgcctgcttctatggtc

SEQ ID NO: 2577 - DNA, 1261 bp, Oryza sativa
  ref <308>: DATABASE ACCESSION NUMBER: AK060392
  ref <309>: DATABASE ENTRY DATE: 2001-12-06
ttaacttacaagttaatcttgaacgttgagtgccacaggcccaggaataagattgaaaggtccgatttcctggtacaggaacaggaagatcaaggtggtaaccagactataagaatgcaacctcaacaaggtagattttttggaagagaggaaatgagcaatggagtagaatacgatgctgcatatgcagccacagtggctgcggtagcgtatgctattgcagcaaaagaggaggagaaacaggcaacagaagagacccgtgtgaaaaagaagttaacatctgaaaagaagcctgtcgcgaacgatgagccttcgaccacaccaactctcaaactaccacccaacagacaaggaatcttgaaaaggcctaggcaaaccgaggggagcagaatcacaaggcggtttagtggtaaggagattgtacccgatgaagaagacgacggactagaagctaatgtatcggtgaggaggccggtgagaacggcacaaaagataccagaaggtggaatttcaggtcaaaatatggtagggaaggttcttgattctgtcccaagcataagaaaggctccgagcttcgccaagcctttaccagaaaagaaggggagcatgaaatttgagcaagagcaggcaatcccaacggtgccaccgaatgttaggccgacagctttatttccccgagagaagaaagagagcaagaaatttgatcaagaccaggcaatcccaagggtgccaccagatgttaggccaacagcttcattttcccgagagaagaaagagagcaagaagtttgagcaagacaaggcaaatcaaatgccatctttggcttccgcgccgacgagttcatattctagtgaggctgaagcaatggcagatacgtgggagaaggaaaagatggcaaaaatcaagaagcagtacaacatgacaatggataccatcgtcgaatgggaggccgagaagaaggccaaggccaaacgccagatggagttgaaagagggcgataattcagagcggaagcgagagaaggcgctggaggagtacaacgacgagattacaaggatcaacaaggtggccgcagcatcaaggctgacggcggaggagaagcggaggagcgcagagaggaaggtgagggagaaggcagagaggattcgggtgacgggaaagcttcccggcgcatgtggctgcttctgaaaaccatcaatgtgtcaatgtgtagtggatgtggctgtttcaaatgaaatttatgtgaaattgaaccaagcag

SEQ ID NO: 2578 - DNA, 1576 bp, Oryza sativa
  ref <308>: DATABASE ACCESSION NUMBER: AK060393
  ref <309>: DATABASE ENTRY DATE: 2001-12-06
aatttttttcctcctcctcccccaaaacccactcctcctccccatcgccgccgccgccgacgagggagatggcgacgctcctccggcgatccgtcggccccgcgcgccagctcctcctccgcccgcgcccgctcccgctcccccacgccgcctcctccacccgctccttctcccgctactactcccgcgacgacgtctcgaggtacgaggcgctgagcacgccggtgaactggggggtgagcatcgtgccggagaagaaggcgttcgtggtggagcggttcggcaagtacgtcaagacgctcggctccgggatccacgtgctcgtccccctcgtcgaccgcatcgcctacgtccactcgctcaaggaggaggccatccccatccccgaccagtccgccatcaccaaggacaacgtctccatccagatcgacggcgtcctctacgtcaagattgttgatccctaccttgcttcctatggtgtggagaatccaatttttgcagtcatacagcttgcccaaacaactatgagaagtgagcttggaaagattacgctagacaagacttttgaggagagggatacactaaatgagcaaattgtgaggtccattaatgaggctgcaactgattggggactgaaatgcctccgttatgagatcagggatatatctccgccacgtggtgttaaggtggctatggagatgcaagcagaagcagaaaggaaaaagcgtgcccaaatccttgaatcagaaggtgctatgttggatcaggcaaatcgcgcaaagggtgaggctgaagcaattcttgcaaagtctgaagcaactgctcgaggaatcagattggtctctgaggccatgaggaccaagggcagcactgaggctgcgaacctgagagttgctgaacaatacatgaaggcatttgctaatctggccaaaaagagcaacacgattctccttccaagtgacgctggcaacccatcatccctcatcgcccagtctctccagatatacaagcacatctgccagaccaacagcttgaagagtgggaagtacctcacagatgctctagaggagacggaaccggaggaagaagagttggactctactgacctaccttctctgagcagcgggatgccgtcccccgacatgccagatgaccatgacaagactttctccctgcagcgccgcaacaaggacaagcactgagtgagtccccctgttcgagtacctgaaggagaggagaccctttttttggcccactgtttttctacgagcatggaactgtaattgaaagcacactagcttagtagcggtagaggtttctgagtttcgacactgttgatctgggaaacgttttgaggatggtaggaaattaacaagacattggcttctggtagccgattgggagtaagtttagcgaccagaaagatttttgtccctgctaaggatggtttgggatagctctgattttcgttcttaatctgtttcagcagcaagtctgtttctgtaaatgcatggattatcagtcgttcatgaaacaagttcaccatgacggcaatggctcatggccgctttgattc

SEQ ID NO: 2579 - DNA, 1284 bp, Oryza sativa
  ref <308>: DATABASE ACCESSION NUMBER: AK060394
  ref <309>: DATABASE ENTRY DATE: 2001-12-06
attcttgatccagcacttacaagacctggtagattcgataggcatattgttgtccccaatcctgatgtgcggggacgccaagaaattctcgagctctatttgcaagataagtcagtatccagtgatgtggatgttaatgcgattgcccgcagtactcctggcttcaatggagctgaccttgcaaacctagtaaacattgcagcaattaaggctgcagttgaaggtgctgacaagttggctgctgcacagttggaatttgcgaaagatcgtattatcatgggaactgagaggaaatcaatgttcatatctgacgaatccaaaaagcttacggcctaccatgaaagtgggcatgctattgttgcactcaacacccagggtgcccaccccattcacaaggctactatcctgcctcgtggctctgcccttggaatggtcacacagcttccttcacaggatgagacttctattagcaagaaacagctgctggcacgtcttgatgtttgcatgggtggcagggttgcagaggagctcatttttggggaagacaatgttacaactggggcaagaaatgatcttcatactgcaacagagcttgctcagtacatggtatcaaattgtgggatgagtgatgctattggtcctgtgcatgtgaaagaacggccaagtgttgagatgcaatcaaggatagatgctgaggtcgtcaaactcttaagagaagcttatgggcgggtcaagcgtttattgaagaagcatgagaagcaattacacgctttagcaaacgccctgctggagcgtgaaacactcaccgcagatgagataaacaaagtggttcatccctaccaagaagagccgcagctttctttccaagaagaggattttgcgctaacttaaaggaggacctttttgttgcatcaaggcagtagacccagctgtaaatccatgtacagtagtaattggcgccttagatagcacaaagcctcttttcatttctcccatcttgcaaatcggggtgcatcacatggagttttgcaccacgcaaactggcaggaagttttaaaagatgggaagaccggttttgcaaggtgttgcacgccgaccgattattactgtggcgaggctcattgtggcgcccatctttgcccagcagcaatgctcctgggttgagaagttcatactcagcttagttaggaaaaaaggtgaaagtgtaatttttttgggaacttgtaacattgcatgtttggcgttgtagaattgtgtttgtgatatatatatttgcatatttgc

SEQ ID NO: 2580 - DNA, 401 bp, Oryza sativa
  ref <308>: DATABASE ACCESSION NUMBER: AK060395
  ref <309>: DATABASE ENTRY DATE: 2001-12-06
ccacgcgacgcgatttctctctcctcttcgctctcgcaagccaagtcgcaatccccccaaaccctcgccgccgccgccgccgccgcctccatgccgttcaccccggggccctactccggcgtcagcaccctcgccctcgtggctagggcgtccgcgctcggcgtcggcgtcgtctacggcgccgtcaagctctccatcctcaaggcgacaaaacctaacaaaaaggaggcggcaaatgcgcatcactgaggacaggaacgcgtggcggtaactccaacggaaggatgtcataaattctcattgtaccccctcgtctatacgtgcacctggtttatgatttgtggacctcttttctgaaacccagctgctgggagatacaattaatcttagttttgcttgct

SEQ ID NO: 2581 - DNA, 484 bp, Oryza sativa
  ref <308>: DATABASE ACCESSION NUMBER: AK060396
  ref <309>: DATABASE ENTRY DATE: 2001-12-06
aattcccacacggactctgctaccatcggagtcagatccattcctcctcccattctcgatcgcgaggaggaggagaccccgcccgccagccaccccggatccgtcgatcgccatggcggatgaagaacctgttgatccaaagaagtaccttgaggagcgctgcaagccccagtgcgtaaagccactctatgagtatgagaagtgcgtcaagagagtggagaaggatgatactgggcataaacactgcactgggcaatatttcgactattggtcatgcattgacaaatgtgtagcaccgaaactccttgagaagctcaaatgatgaccggctgctacttttggatcagtgacttgttctatttgcgtaaccttgttcgcacttgaaactgaatgagttaattgtgtctattgtgactgtttgggtttcatgacttgtaataaaagccaccatttcccatatcaaagcatgtggatttattcggtc

SEQ ID NO: 2582 - DNA, 1208 bp, Oryza sativa
  ref <308>: DATABASE ACCESSION NUMBER: AK060397
  ref <309>: DATABASE ENTRY DATE: 2001-12-06
ggacaagggaactgcaagcggaacagctggaaggcaaggattagctacagaaaaggttggatcatctaggcagccaatagatgaagataccctccaagaggagactgaagatgtagaagaacagccattagttagacgtcgttctagacgcatcccttctggaaacactgagtcagcacaacctgtgtacacggtcgatagtcctccctcaagttctcagcctcaaggaaatttgaatgatcgccagaataatggagatgaatttccatcagagtggggtggcatttcttctgaggagcatgatgaagctgttatgcttgaggctgcaatgtttggtggaattccagaaggacccatgtatccgttctcaatgccatctcatagaagcccaagtctttatccccatgtagagcatgctccatcaccagcattaactgaacagcggttgttacgtgagcagcaggatgatgaataccttgcatcactccaagctgatcaagaaaaagagttgaaggccctacaggaggccgagcttcgtcgcctggaagaaactgctgcaagagaagctgcccttgaaaaacagaagcaagaggaagaggaaaggcgtaaaaaacaactggaggaagaggagctagagtccagtcttgcatccaaacaagcatcattgccgtcagagccagctgcagacgaggaaggtgctgtcacacttgtagtccgcatgcctgatggtagtcgacaggggcgtcgctttctgaaatctcataaacttcagttcctttttgatttcttagacattggcaggacttataagccaggaacctacagactggtaaggtcgtacccaaggcgtgctttcaccactggtgagggcgatatgtcatttagtgatctgggcctaacaagcaagcaggaagccttatttctagaaaagattacagagtagtgaagaaagatttagtcatggttagggacaccctcagaaagttgtgtttttacatttttttttatacttgcatcttgcttttgttagtaaaaatagtacaactggtttatggttcagttgagagtcctcttctgcggtgtgaaatggcggtgatgccgtgatgttgatacttctctccttttgagttcgatgttaatgtcagggtaaaccataaacaacatggagccaggatatttataggatgatgatacctttagttaaaacc

SEQ ID NO: 2583 - DNA, 1342 bp, Oryza sativa
  ref <308>: DATABASE ACCESSION NUMBER: AK060398
  ref <309>: DATABASE ENTRY DATE: 2001-12-06
acccacttatcacgaggctaacccgcatgggcgcgcgccaaggaggcgggaggagtagcacaccgccaccatcaccagcagcagcatggtgcagctgagccgccgccggcaccgcgagcacgctccatagccctctgccatggcggcagcttccgtcctcctcctcctcccttcccccttcctccgtccgtcgtccccggcgcaccgcgcgcgctgcggcattgccaccacgacgacgacgagcacgagcgggaggagggggctcttcctcttcgcctcgcgctgccgccccggcccacggcgacgcgcggcgtcggcggcggtgcctcccgagcacggcttgtcccagccccagccacaggcgcgggcggtgggctcgtacgaggccgccctcggcgacgccaaggacgcgctctacgccgctctggaaggcatgaacagagggatattcgggatgacctccgagaaaaggtcggagattcacgcactggtggagctcctcgagtccaagaacccaacgccggagccaaccgacaagctgcaggacaaggtggatggatgctggaggctcgtctatagcacgatttcgatactggggaagaagaggacaaagttgggactgagagatttcatcagcttaggagatttcttccagatgattgatgtcaaagaggaaaaggcggtaaatgtgataaaattcagtgcaagggcgttgaagatattatctggccaacttactattgaagcttcgtacaagataactactaaaacaaaggttgatatcacgcttgatagttcgaccatcactcctgatcagctgatgaatattttccagaagaactatgatatgctccttgctatattcaacccagaaggctggctagagataacatacgttgatgaatctctacggataggaagagatgacaaggcaaacatctttgtgctggagagggcagacccctcagaagtttgacaagatttatctgaagcaaaatgcctgcatatacatggacattccggcaaagatgcctttgcacatacccgtcctgtaacacggtggtttttaacagccagtgcagatcgtgtgctcaactttccatttgcgttagattatactactgctatttttttttctttctggagcaaaaggcatttccctttgcgacaaaatcatgcaagctgggaaagctcatgcaagttcagttacactacatagagaattggtacattaagaactggtgtacttttgaattttgaaatacaccattttcaattattcatccttgtaagacataatctaatgagtgtacagcttggcaaatggcaataccctttagac

SEQ ID NO: 2584 - DNA, 1545 bp, Oryza sativa
  ref <308>: DATABASE ACCESSION NUMBER: AK060399
  ref <309>: DATABASE ENTRY DATE: 2001-12-06
gaagatgtcaatggcaaaatgatgcagcagattgcttgggaggcttctccagctttagagtcttctgaaagatatgacctattggataatcataccatggatgctttagctggagggattggcaatgctacctttggcaagagtaagaaagggagatgtactgatctgtcatcatcattaggtagggaaagcacttcagaatatgtttcacttgaggatcttgcaccattagccatggaaaagattgaagccctttccattgagggtctgaggatacaatctggcatgtcagaagaggatgcaccctccaatatcagtgcccagcctattggggaattttcctctctgcaaggaaaatgtgcagggaataccctctcccttggtttagaaggaaccgcagggttacaactcctggatgtcaaacaaagtggtggtgatgtcgatggactaatggggttgtcaatcactcttgatgagtggatgaggcttgattctggcatagtagatgaagatgagcagttcactgaccggacgtcaaagatacttgctgctcaccatgccaaatcaatggaattagttgctgaaaaccagaatgtggacaaaaagaacaggaggtctggtagaagatggggtttgctagggaacaacttcactgttgctctcatggttcaactgcgtgacccactacgtaactatgagccagttggcacgccgatgcttgctttaattcaagtggaaagggtcttcgttcccccaaagcctaagatatacagtactgtcacagataaaggtaacagtgagcatgatgatgaggagcccaagactgaagaggtactagaaaaagctttggtcaaggaagaaaagattgaggaagaagaagattctgttccacaatttaaagtcgcagaagtgcatgtagctggtttcaagagcgagcctgagaagacaaaatcatggggtaatcaaacacagcaacaatcgggatcaagatggctgcttgcagctggcatgggtaagggcaataagcatcccctgatgaaatccaaagctattgcgaagccaactaaagaggcagctggtcagtcagaagacaccctttggagcatttcttcacgcgtacatggagctggaaccagatggggcgaattagctggacctaaaaggaacccaaatatcctccttcaaaaagaaaagcgatttaggtgatggcttggcaattatcagtatttagctcttgtgatttgctgtcttggatgaatctgttcagggaagagtctatttatctggaactttgtcctcactggaatacttctagtggactgttaatgtaaatgtagttcctttttcttgatacaccttgaaccatccaggtacatgcacatgcttccgatcggttgtgctccttttctccttgtacttggctgtactgagaaactggtatttctccttttcttgttacaattgaaatagtggctttttgcctgtgaaggcgcaatagcaatacagccttctcatgtatgtagtggttctagcattcatttggcc

SEQ ID NO: 2585 - DNA, 1412 bp, Oryza sativa
  ref <308>: DATABASE ACCESSION NUMBER: AK060400
  ref <309>: DATABASE ENTRY DATE: 2001-12-06
aattagttcttctttagcatcgtaccataatctgcccacacggctacagactcttgattggtttgagattgagctattgggttggttcttggcaagagaaggcaaggccaagaaaggtggcaggttcttgtcaatctccaaattttcccattaaatttgcgatttcttccccactcctccccgtcagaaccgaggttttaccaggagtgcttcagcatttggggtgtggagttattgcaaagcaacctcgattcctgcaccggttcctcgatttgatgctgaagaaattgagcaaagctggtcttcgttttggtaaaacccccagctttctcagggcggaacagtagaagaaaaagattggaggagaggagaggagaggaagggttggttttgggaggatgattcagctgctgttcttggtggtgttggcggaggcggcggtggcgctgctgctgatggtgaaggtggggccgctgcgggaggtggcgatgcgcggcgtggagcaggcgaagacggggaagggcccggcgacggtgaagacgctggcctgcacgctctcggtgatcctcatgtccagcgtcgccagcatcctcaagatccagaacaggggcctcaagctcggcaccgtcagccccatggaccaggtgctatggcggactcacctcctcgaggcctccctcatcggatttactctattccttgcatttgtcattgaccggttgcaccactacctccgaaaactgattacactgaggaaagcagccaacacatcaagagaggaggtcgagaaacttcaaatggagaaccggttattccgtgaaaaggaggagaaatcttccagtgaaatcaagaagctccaccaggagattgctaagctaaacgagagtatgaagaagctgaaatcggagtctgaagatcacgagaggaaggtgttggaagcggaggcccatgtgaacgccctacagaagcagtcggaggagcttctcctggagtacgacaggttgctggaagacaaccagattctacaatctcagcttcactacaaaggctgaaacagttaacctggggcatgcaactcaaagtgctcgttaccaagactcgtagacttaccaaatgtcagtgcagagcgaaggtattggtgaatgtgatgcttggaatccttgctctaacttgtggtgttgggttgatgtactagtgtgtgcatttgtagttttgaggagtataaaagccagggatgatatatggtgaaatggttatgaatctggtatcagttcatgtcgccatgcagggttgttgatctgaaaactgaattgaacttgtgggctgcggccatgcctctattcaggccttgatctgaaaatctgaaaaggaggaaagtttcctactgaaatgaatgctctgttagctttgct

SEQ ID NO: 2586 - DNA, 580 bp, Oryza sativa
  ref <308>: DATABASE ACCESSION NUMBER: AK060401
  ref <309>: DATABASE ENTRY DATE: 2001-12-06
ggaggcttaacaattggggactgcgtagacttgcttacaaaataaagaaagcaagacatgccaactacatcttaatgaactttgagatacaggcaaaatacatcaatgacttcaagaccctgctagataaggacgagagaatcattaggcatctcgtgatgaaacgggacgaggcgatcactgaagactgctctcccccaccagagttccacaccctgcgagctcaacaacagtatatggatgatgaatacattgatgatgaagatgatggcaaagaggagcaggagccggaggaggattgggatgacaagggtgaaatggagaacgctggttatgaagatgatgatgaacctgaaattattcttgttgatgaagtcgagcgcgataacaacgaaaacattagaagaaggaacaggacaatgaaagtagagaagtacgcagctgagaaagtcttgaggtagcttagatgtctctgttttcatttagtcttagtgtaagactacccctttttttctatacaaaggacccacctgtatgaaaatatgactacaaagtaatctcagctgagtgcattccatgt

SEQ ID NO: 2587 - DNA, 561 bp, Oryza sativa
  ref <308>: DATABASE ACCESSION NUMBER: AK060402
  ref <309>: DATABASE ENTRY DATE: 2001-12-06
aggccgtcgttgcagcccacaaaaaggcggaggagacccggagactgtggagacgcgacgcgaaatcgatcgagagattattggcgagtcgaggagagtgcgcgagagagatggcgatgagatcggcgctgacctcactcccgttgcgcctccgctcccctgctcctgtggcggcggcgtgcggcgggatgcggctgatgagcgacggcaaggggcgcgtgctgagcgaggaggagcgggccaaggagaacgtctacgtccagaagatggagagggagaggatggagaagcgcaagaagaagctcgagaaggagaaggcggaggcagacaagggcaatcccgccgcctccgacaagaatacggaggggggatccaactaggagtgatgtgcttctgtctgaagacggacttgtttcacatgcctatgttggacaccggtgttcatacatgtcctaggatgaaagaataaattctgtaaaacatttgacagagctagattcatctgctctggtttccggtgcttgttcatgattgaatgaggctctattgtgttggacaagt

SEQ ID NO: 2588 - DNA, 1059 bp, Oryza sativa
  ref <308>: DATABASE ACCESSION NUMBER: AK060403
  ref <309>: DATABASE ENTRY DATE: 2001-12-06
gctcctgtactgtacatacacacactcgatgctgctatgcttctttccaatcgcaatcccaatccgtagagcagccggggccaacaagctacggaggaaaggttaggcattcaaattatttttggtcccgtcccgcttcgcgattcttgttgatttgtggctgaaatccccccaagaatcaatgtcgggagtaggttttagtaaaattgacgggaattcgcagcaggaggaggaggagaaagaggctgacgatttggaccgggatttggggatgatgagggaggaattggggcgtgaggtgctcaacacttggctctggggcaaggacatggactctattctgaatgaagaatctgaatggcaagggacacttccaggctgggcctgccctcgagaagataattaccagtccgaaagtgaattctcggttgatccagatgaatgcgattctttcgacggatactggtatgaattccgctacgaggatggaaatccttactacgctgctgagagggaggagagatgggagaatcaggttatggagcaaatgaagttcacagtatcaattgcaaagcaacgacaaaatgatttcttttgtcctatttttgaggggtctctacatgttgaagggccatgtcatttggatccagatatcctgtcgacggagcatctattgccccagctgccaaagtggaaaaatcgttgggtaaatggatacaaccacaggaatgaaccttgtcggcgtgcaatccaggtgtatgatttgaatgtatcgtccccccatgatgaaccaatggagatctacggtatatttgcatttagagatgtacgaaacaaccaacaacgtaatcatgtctttcaatactcgagggacaaaccatataagcttcggccggtgagagatttcatgactaagtttgttttgtttataccttttgtcttaaaagggtcccctccttttctgtagttgtgctctttaaactttgacataaatctatctcctttttgaaataactgacattgggaattattcattttttaactttgtccacttgtcgc

SEQ ID NO: 2589 - DNA, 1589 bp, Oryza sativa
  ref <308>: DATABASE ACCESSION NUMBER: AK060404
  ref <309>: DATABASE ENTRY DATE: 2001-12-06
gccgcatcgcaagctggagcagcgagcaccgtagcagcagcagcagcagcctcctggtacacactgcactacacagcgcagcagctagcgatagtgtatcgcacttactggatacgcagtcgagcatctccagcagcagcagcagcggagtgatcagcgatggagagcagcttggtcgacacagccgccgccactctctgcctggcggcggccgtcggcgggcggcgccgcgccggcagcttcttgaactgctcgtgctcctccaaagagtacagggtgagcgcatcctactccattgggcggatgctgagcggggtgaggtcggcggcgcgcaagaagctgttcaggagcgagccggccgacctgctggggatcagctggtcgccggactcgccgccgtcgaacggcaccgacggcggccaccaccaccattggtggacggctctcgagaacaacttcgtcctcgagtcctccgaggacgagtacggcggggtcgtcgtggacgccgacaggctgccgtccgacaaggccgccttcgcgcgctcgctcgcggcgtcactctcctactggaagtccgtgggaaagaaaggggtttggctaaagttaccagtggatcgctcagagtttgttcctatagcagtgaaggaaggtttcaagtaccaccatgccgaggaagcatatgtgatgctgacatactggattcctcatgaagagccatgtatgctccctgcaaatgcatctcaccaggttggagttggggggtttgtgatcaacgatcaaatggaggtcctagtggtgcaagaaaagtactgtggttcatctttggatggtgcttggaaactccccacagggttcattcttgcgtcggaggaaatatttacaggagctactagagaagtcaaggaagaaactggggttgacactgaatttgtggacgttgttgcttttaggcatgcacacaacgtggcatttcagaagtccgacctgttcttcatctgcatgctaaggcctacatcaaacaatatcaaaatcgacgaaacagagattcaggcagcgaagtggatgccgctggaggagttcgtcaagcagccgttcatccagggggaccacatgttccagaagatcatggacatctgcatccagaggctcaggaagtgctactgcggcctgaccgcgcacaacgtcatctccaggttcgacggcaggaggtcgacgctgtactacaacgtttctgaacctgaggatgtgaactgcaatgcttcttgacaacggatcgcccaaccttccgtcaggttcgcgttgtgatctagcattaggctctgtgcaatgcagtgcagagtctcgagtacagcgacctgggtaactgcttgtgaagcagaaatcctctgtaaatatgaaaagaagataggatttatggcaggtcgggtagctctgaccggctgttgcagtttcacgtagattgcagctgaactgaagaagatcttgaagacttttcagaaaatttcgtttctgtgtatgcgctcacgctaagcagctgcttaatgtgtatctagtgttgctatggcgaaagcaaaggacacgtacacacc

SEQ ID NO: 2590 - DNA, 1046 bp, Oryza sativa
  ref <308>: DATABASE ACCESSION NUMBER: AK104299
  ref <309>: DATABASE ENTRY DATE: 2002-08-28
cgagagaatttgtaagaatgtacggttcagtgaagatgaggctcgctacttcttccagcagcttatctcgggagtcagctactgccattcaatgcaagtatgccaccgtgatttgaagttggagaatacactgctggatggaagccctgctccacgcttgaaaatatgtgactttggctattctaagtcttcagttctccattcacaaccaaaatccactgtaggaacccctgcttatattgcacctgaagttctgttgaagaaagaatacgatggcaagactgctgatgtatggtcctgtggtgtgactctatatgttatggtagttggtgcatatcctttcgaggatccagaagagcctaagaacttccgtaaaacaattcagcgtatcttgaatgttcagtactcaattccagaaaacgtggacatatctccagaatgtaggcatctaatttcgaggatttttgtcggggatccgtctttgaggataacaatcccagaaatacggagccatggctggttcttgaagaaccttcctgcagatttgatggacgatgatagtatgagcagccagtatgaggaacctgatcagccaatgcaaaccatggatcagatcatgcaaattttaactgaggccaccataccacctgcttgctctcgaataaaccacatcctaactgatggactcgacctagacgatgacatggatgacctcgattccgactcagatattgatgttgatagcagcggcgagatcgtctatgcgatgtaagtcatcgaccaacaagagaactgaaggggcagggtgccctgatgtgtaccttgtcaaagtactagcagccctttgtgaaaagaatcgttctgtattttgcttagtttcttgccgtggaaccccagcgatgttcccatgaactcatgatgctgttgtaattgaactggggttacttccctggaataacagctttcctcctccccccattgctgaggcctggttacctttaagcttcaacacatgcgttacaaatgtgcaagttatttaatgtcag

SEQ ID NO: 2591 - DNA, 1142 bp, Oryza sativa
  ref <308>: DATABASE ACCESSION NUMBER: AK060405
  ref <309>: DATABASE ENTRY DATE: 2001-12-06
aaccaacctagctaaccgcgccgccgcgccgttctcctccccacccggccgccgcagaagcgcagaccatcaccggatctttccgcgcgaagacgagcacgccttgtgaatggtgggagcccgcacgacctcccccgcctccccgccgcagccggagagggcctccttccgcagcttcggttgctgcatgcagggctggcaccaccgctgcatcggcctcgacccgtgaacgcctcgtcgccggcgacgagcgcgcaacgggcgcaggatttcgtcgattcgattcgactcgactctcccgcctgattctttttttttttggtcgtgagttcttcctcttcttgcgagaaaacagagagaaaaaaagaaagttaggcaattctttgattttagttggatttgttccgatttggccgttgctctaccgccgacgatgatgaagctgggcaaggcggagtccgcccgcggaaaggtggcgccggccgggtccggcggccgagcgcgcatgctggtgacggtgaccgtgctcggcagcgccgggccgctgcggttcctgatcgacgagggggagacggtcgccggcctcatccgggctgcgctccgctgctacgcccgcgagggccgcatgcctctgctcggtgccgacgccgccggcttcctgctttacaccgccaacggcggatccgacgcgctcagcgccgacgagaagatctacttcaacggctgccggagcttcctgctctggcagaaggcggcgcgcgacaccatggccaagggcggccggcctgagctggcgaatgtcgcgacctgcaatccctgcaagaaacggggcggcggcggctggaagggcggcctgaacaagttcctcctcagcttcagcttcaaggtgtgagagccaccgatgcctccgtaatccggatcgagctgatctcctcctgccggaatcgttgtccccgagttcatcactacagctggtcgggttgcgcgtaataattcgacgatgcttctttttcagtcgtcagtgtcagttgcttggttatttcgttcagttttgtcaatctagtcgcattttctcgtcctgttgcaaactcctatctacatgtcagcatcaaaattatgaataaaatcaccgtgtcccgatg

SEQ ID NO: 2592 - DNA, 416 bp, Oryza sativa
  ref <308>: DATABASE ACCESSION NUMBER: AK060406
  ref <309>: DATABASE ENTRY DATE: 2001-12-06
agctcctctttcgctttagccgcagctgcttcgctctgctttctccgtagggtttatccctttgcttctcctcgtctccctccccctcgcacgcaaaggcacaaagcccggattccaccgccggagccgacccgcttcgaggcgaatcgagagttagctttccagccagcaatcgaggatgtcgtcggtgcagctctccggtgccggagtcgccgcggtggccttcaccaagaatggcgcgtcttccttcgacgggctccgcctcgcgccgccatctgtgcgagtctgctcctccaggcgcccgtctcgtagcctcgtcgtcaaggccgccacggtcgtcaccccaaagtatacctcgctcaagcctctgggagacagagtgcttgtgaagcttggtgctgcagaggatttgtttc

SEQ ID NO: 2593 - DNA, 1749 bp, Oryza sativa
  ref <308>: DATABASE ACCESSION NUMBER: AK060407
  ref <309>: DATABASE ENTRY DATE: 2001-12-06
tgtggggctcaatcaggtttccatgtttgaagccaaggttgctagtggcaacggtgagcaaactttgagcagagacgtttatagactggggcacagattggatttctttcggatgctccctttcttttatacaaccatcgggttttatttcaacacaatgatggtggtgctaacagtctatgcatttgtatgggggcgcttttatctcgcactgagtggtcttgaggctttcatcagcagcaatactaactccacaaataatgcagcgctaggagctgtccttaatcagcagtttgtcatacaactaggcattttcactgcactgcccatgataattgaaaactcacttgaacatgggttcctcactgcagtttgggatttcataaaaatgcaattgcagtttgcatctgttttctacaccttctcgatgggaacgaagacacattattatgggcggacaattcttcatggaggtgcaaaatatcgagccactggccgtggttttgttgtggagcacaaaaaatttgcagaaaattataggctgtatgctcgtagccacttcatcaaagcaatagagcttggtgtgatattgactctttatgcttcttatggtagcagctctgggaacacattagtgtacatcctgctgacaatttccagttggtttctagttctttcgtggattcttgctccattcatttttaatccttcaggattggattggctgaagaattttaatgattttgaggatttcctaaactggatttggttccggggtggaatctcagtgaagtcagatcaaagctgggagaagtggtgggaagaagaaactgatcatcttcggacaactggtctgtttgggagcatattggaaatcatattggaccttcggtttttcttctttcaatatgcaattgtttatcggctacacattgccggtacaagcaaaagcgtccttgtctaccttctttcctgggcatgtgtcctgctggcttttgtggctcttgtgacagttgcttactttcgcgacaaatattcagcaaagaagcacatacgttaccggcttgtccaggctattattgttggtgcaacggtggctgctattgttctgttgttagaattcacaaagttccaattcattgatacctttaccagccttttggcttttcttccgactggctggggaatcatatctattgctctggtattcaagccttatctgaggaggtctgagatggtctggagaagtgtggttactttggcacgcctatatgatataatgtttggagtaattgttatggcaccagtagctgtgttgtcatggctgcctggactccaggagatgcagacgaggatcctgttcaatgaagcatttagtaggggactacatatttcccaaatcattactggaaaaaaatcacatggagtttgagctggattcatcttccttttctgaaaatgacctgccttgatggtattctattggaacgctgcccttctcaaggttcatacaggcttcccagtttagattagatggatgctagttctatgtacaggactctttatcttgattcttcttaactcaatttacacatggatttctatggtagagatgatacagtcgatcgaatgggttgtcaatttggtttatattcatggttcgagatttggtagcttattagaaattttgtagcgaaacagagctgtacaaactttatcgtgaatgcacctgcttatgccgtgcgtaac

SEQ ID NO: 2594 - DNA, 1778 bp, Oryza sativa
  ref <308>: DATABASE ACCESSION NUMBER: AK060408
  ref <309>: DATABASE ENTRY DATE: 2001-12-06
gaggcaaaccaaaccaaacccaacccctcctccgccgcggcccgagaccccaccggatcggcggcggcggcggcggcaggaggccggcgggcggaggagatgtcgctgacggaggtcaggatcggggaggaggtgtggctcacctgcctctcccacgccctcaccaccgagacggaggaggtcatgggcctcctcttcggcgacatcaagcattcgagcaggggcggggtgactgctctgatatggggggcgtcgccgcagatgaggtgcgagcggaagaaggacagggtggaggtcaaccccgagctgctcgcggcggcgacggcgcaggccgagagcttgtcggccaccatcggcgagaaaacgagggtgattggatggtaccactcgcacccgcatatcaccgttctgccttcccatgtagatgttcggacccaggcaatgtttcagttgatggagccaggttttgtgggtctgatattctcttgttttagcgaagatgctcagaaggttggaaaaatccaagtgattgcttttcagtcacttggtggaaatcagcaatctgttgttcctgttaatgatccagtcattaaccttgaatcatcttggagttcgttggatgatacctcacatccggcattgattgaaggcattgaacaagacacgggggattctaaatcttcaagaaatagcaaggtgtgggcaaaatcttctgatgtggatttctatcctcattttgacgccaatcactcagcaaaacatcaatccaaagaaaatgctatagttgcatacgatcccaataatgcacctgagacccctgttgatctagatgaatcagatatgaccccaagcatccaggaggcgttgcacaggtcaaacatggacattagtggtgcagaatatgtaagaaaggaggtgccactttatgtatttccgaccaggcatctgctaaagctggacaccacattaacttcttactgtgatatgcaacatgtcgtttccgaagaggaaaaatcagcatataatcaagccatgcatcaaaatattcgtgatgggaagatccacccacttacatctattcaccatgcatctacatacaactcatctctctgcaaattaatggaatattgtttgagccctgctataactgtacttcaggatcgtctgaaggaaaatgaacttcggttatctatgctaatggaggaggctaaacaacttgaggcagagaaccagagcatgagaaatgattctcctcgtcgcttgatgtatcatgggactagtggcaccagttctctgatggcacaggataagcaaatgagccccagaagtcctagcggcaccggccggagaaaggcttcctgatttcaatcttgttcacttgacatggtgaatatcgtgagctgcggttccaccccttgctatctgcaatccccatttttccggtgtatgaaggtgtgtacagtggctttgtacatacctcaactcctcagcaccagtgctgttgtaaaagttactgcggcctcccttggctttgtactgctgttcctcgcgctgctgcttaatttgcgccaaatccctttcccttccgagggcttattccatgagcttgtagtttgtgctggggtggttgctttctttgagctattgctaattaagatgcaatgcatttcccgtgcaggcaaagacgaagcttgtttttgctttgctgttggaacagatcatgtactattaccaatccaaaagctgaaatgctcaggcacacttgctgccaaagtgtc

SEQ ID NO: 2595 - DNA, 1146 bp, Oryza sativa
  ref <308>: DATABASE ACCESSION NUMBER: AK060409
  ref <309>: DATABASE ENTRY DATE: 2001-12-06
gcacacactcactagcgagcacgagagagagagagaaaaaggctttaaagaaagcgagctcgcagcagatcgaccgggagagatcacaagctgagagctctgagctcacctcacccaagctccaaatccttcctctcctctcgccgacacgcacgcccacccagcttcatcggatccggcacgcggcgacaatggcggcgacgacgacgatccccgcgcggccgctgctggccgccgtgctggcggcgctcctcctctccgccgcctcggccgccgacagcaaaaataaccctgccgaccagcttgtggcattgatcaacagcaaccgcactgccagcaaggcatctactcttgatgataaccaaggcctaggatgcattgctctgcagtacattaaagcatacgagggtcagtgcaaccaagtcggtgaaagcaagaagcctccggagaccagcttcgctgaaacatttgccccaaattgtggcgtccaagctgcaacactcaccaagatcaccgggaggcttctggcttgccagtctaactatgcgaccccagaccaggcgttcaacttcctggttaatgatgcgaagagcattcaggtactgcacagcaagaaccacacggaggtgggagcagctgtcagtggcacttctggcggcgggccgtacttctggtgtgtcttgttcagcagcggggagccaaccaccagcttcaaggtagatggtggagtgcccaagtctgtccgtccaggatgcttcagtggcaacaacgacgattgcatgggtgccaatgctgcagtttcgatcggtgcaggtacatggagactggtggctgcactacttttctccgcggcttgtgttttcgctttgtgagtttgagtagaaatgtgttgttgcaccattcttttgctcgtcttggacctggtttggaattttgcttctgaaaaccagtagaacactcttgttgctgccgcactgttcttttcctttcttagcagctgaactctgtcaggattaaagagcattgttttctgcacttatagatgatgaattacctgtgcaggctgttcatctgttgtatttatagtatttatctattcaaatgtactctttggaaaataattgtgattgtaagatccttttgatc

SEQ ID NO: 2596 - DNA, 1581 bp, Oryza sativa
  ref <308>: DATABASE ACCESSION NUMBER: AK060410
  ref <309>: DATABASE ENTRY DATE: 2001-12-06
aaaagaagaacaatgagaccattcttgtttttgacctgggaggaggcacatttgatgtttcagttcttgaagttggtgatggtgtttttgaggtgctgtctacatctggtgacactcaccttggtggtgatgactttgacaagagggttgttgattggctggcggggaacttcaagaatgatgaaggtattgacctactaaaagacaagcaggccttgcaacgtcttacagaagcagctgagaaggcaaagatggagctatcatccttgacccaaacaaatatcagtttacccttcattacagctactgctgatgggcccaagcatatcgagacaactcttaccagggctaaatttgaggagctatgttcagatcttcttgacaggttgaggacccctgtggacaatgccctcagagatgcaaagttgtcatttaaagacatagatgaggtgatccttgtcggtggctccaccagaattccagctgtgcaggatcttgtgaagaaaatgactggaaaggaccccaatgtgactgtcaaccctgatgaggttgttgcacttggagcagctgttcaggcaggagtgttgtctggtgatgtgagcgacattgttcttcttgatgtaacaccactttctctgggtttggagacactgggtggtgtgatgaccaagattatcccaaggaacacaactttgcccacctccaagtcagaggtcttctcaaccgctgctgatggccagactagtgtggagatcaatgtcctccaaggagagagagagtttgtcagggacaacaaatctcttggtagctttcggcttgatggaattcctcctgccccacggggtgttccacaaatcgaagttaagtttgacatcgatgccaatggcatcctttctgtcagcgccgtagacaagggtactggaaagaagcaggacattacgataactggtgccagcacattgccgaaggatgaggtggagaagatggttgaagaagcagagaagtttgccaaggaggacaaagagaagagggacgcaatcgacaccaagaaccaggcagagtctgtcatctaccagactgagaaacaattgaaggagctcggtgacaaggtcccaggcgatgtgaagggtaaggttgaggcgaagctgacggagctcaaggacgctgttgcaggtggctcgacacagacgatgaaggatgctctcgctgctccgaaccaggaagtgatgcagctggggcaggccctctacagccagcagggtgccccaggagcaggacctaccccaggagctgatgctgccgctggctctgctggcccatccgagaagccaggaggcgaggaaggtgatgtcatcgatgctgattttacagacagccaatgagcaggagagtagttaggtccgaaattttaaggaacgtttcgcgacgagtttgaaatttgttccacaagattgtaggatctggggtgtatctttttgttagatgggcacctttgcttcctatttgtggagttttgggcggcggagtttttgagttctgggaatttcacttccaaatagatgatgctttcgttgctcatac

SEQ ID NO: 2597 - DNA, 954 bp, Oryza sativa
  ref <308>: DATABASE ACCESSION NUMBER: AK060411
  ref <309>: DATABASE ENTRY DATE: 2001-12-06
acgcctaccaacgacgtcgtgatgactggccctgtagctggcgccggcgacgtgcaggccgctgagacgttccgcgtgttcgtcgggtacgactcgcgcgaggacatcgcgtaccgcgtgtgccggcgctccctgctgcagcgctcctccgtgccggtggccgtgatcccgatcgtgcagcaggagctccggtctgcggggctgtactggcgggagcgcgggcccacggagagcaccgagttctccttcacccgcttcctgacgccccacctggccggctaccgcggctgggcgctcttcgtcgactgcgacttcctcttcgtcgccgacgtcgcggagctggcgcgcatggccgacccgcgctacgcggtgctgtgcgtgcaccacgactacgcgcccaaggaggccaccaagatggacggcgccgtgcagacggtgtacccgcgcaagaactggtcgtccatggtgctcttcaactgcgcccacccaaagaaccgcgccgcgctgacgcccgaggccgtgagcacgcagagcggcgcgtacctgcaccgcttcatgtggctggacgacgccgacatcggcgaggtgcccttcgtgtggaacttcctcgtggggcacaaccgcgtcgaccccgccgacacggccgggacggcgccgcgcgccatccactacacttccggcgggccgtggttcgagcagtacaagaactgcgagttcgcggagctctgggtccaggaacgtgacgcgtatgaggccgaggcggaggaggacgaggagaaggaagagcacgagcccaaggccatcctgcatgcccctgctgcgccgtcggcagttcccgtggacgcctgagcctcacgtgcggtgcctactgttttctaataatatgattggaataaactcatgacggccacacctcaagaatgataagttctatatattgttgatcatatggtt

SEQ ID NO: 2598 - DNA, 1873 bp, Oryza sativa
  ref <308>: DATABASE ACCESSION NUMBER: AK060412
  ref <309>: DATABASE ENTRY DATE: 2001-12-06
atctcatccctctctctctcctcgcttctctctctatcgcaggcgaaggcgaaggcgaaggattcgggctcagctcctccgcctccgccgatctctcgccggagatgtgtcagccctaggagaggagaagctttctttttttggaaaatcgagtcaacaaaaggtcttgccaattaacacagtgaaggataattctggcttgagtgtttgtaaatggagagaataagcaccaatcagctctacaattctggaattccggtgactgtgccatcgcctctgcctgctatactagctaccctggatgaaaacattcccaggattccagatgggcagaatgttccgcgggagagagaattgagaagcacacctatgccacctcatcagaatcagagtactgttgctcctcttcatgggcattttcagtccagtaccgggtctgttgggcctctgcgttcgtcccaggcgataaggttctcttcagtttcaagcaatgagcaatatacaaatgccaatccttacaattctcaaccgccgagtagtgggagttcttcaacgctcaattatggatcacaatatggaggctttgaaccttccttgactgattttccaagagatgctgggccgacgtggtgtcctgatccagttgatggcttgcttggatatacagatgatgtccctgctgggaacaatttgactgaaaacagttctattgcagctggtgatgaacttgccaagcaaagtgaatggtggaatgattttatgaattatgactggaaagatattgataacacagcttgtactgaaactcaaccacaggttggaccagctgcgcaatcatctgtcgcagttcaccaatcagctgcccaacaatcagtttcatctcaatcaggagaaccttctgcagttgctataccctcgccctctggtgcctccaatacctccaacttcaagacacgaatgagatggactcctgaacttcatgagcgctttgtagatgctgtcaatctacttggtggcagtgaaaaagctactcccaagggtgtgttaaagctaatgaaggcagacaatttgaccatttatcatgttaaaagtcaccttcagaaatacagaacagctcgatacagaccagaattgtctgaaggttcttcagaaaagaaggcagcctcaaaagaggacataccatcaatagatctgaaaggagggaactttgatctcactgaggcattgcgtctccagttagaactccaaaagaggcttcatgaacagcttgagatccaaagaagtttgcagctgagaattgaggagcaagggaagtgccttcagatgatgctcgagcagcagtgcatacctgggacagacaaggcggtggatgcttcaacctcagcagaaggaacaaagccatcttctgatcttccagaatcttctgccgtgaaggatgttccagagaacagtcagaacggaatagccaaacaaacagaatcaggtgacagataatgaggatgtgatgagggtctctccaagatgtggacccaagtggccattgaatgggctcgatggctatctgactgatgtttggcaaagctaaaattaaatcgtttttgccttttcacggggaacagaacattgttgtgaacagcatatcaaagcttgccccagcgcttgtagctagactttagttgtacagtaccccaaacacggcagcgacgattccgtgttaatgggatgatctttaggtttcagaaggcagcacaagcaaatttgcactgatgtactctttgtcaggtggtttgacttcttgctttctttgttgttagggactggatagcatggattaggaatttgattatgatgaactaattcaagaaattgccat

SEQ ID NO: 2599 - DNA, 1281 bp, Oryza sativa
  ref <308>: DATABASE ACCESSION NUMBER: AK060413
  ref <309>: DATABASE ENTRY DATE: 2001-12-06
gcaaaacctagtggcatgggctcgcccactattcaaggaccgcaggaagttccctaaaatggctgatccaatgctccaaggtcgcttccctatgaggggtctgtatcaggctttagctgttgctgccatgtgtttacaagagcaagctaccactcgccctcatataggagatgttgtcactgcactctcatatctagcttctcagacatatgatccaaatgcccctgttcaacatagcaggagcaattcgtcaactcctagggccagaaatctagctgggtggaatgaagatcgacgcagtgtgcgctcgccaaatcatcattctccagatctgaggagggaagctgccaggtcatcaagagcagaggttagcaggactagttctaccggtgattctggccggagatcaggattggatgatttagacatgacagggtcgcagatgggtagtccagctcaaacaggaagaaaaagagagactccaaggactgctgatagacagcgtgctattgcagaggccaaaacgtggggggagaattctcgagaacggaagcatccgaatggtcatggcagctttgatagtacaaatgagtaaatcggagggtttttgtttcagaaatcagtctacggaggatgaatctgctcatctacacgaaacggatccaatcaagtaacattgcattggttccacacggttctttatctgtgaataagacccttgttcttccccggccatcagtgccactccacggtcactatgtcattgctatttgacatgtcttagatctcccggcgtccattccttgtgaatgtgattgtgtcatgtgtctttagagttcggctccgttcgggagtcgataaaattcagctggaaaggtaggcaacagaagagaggaacctgatgaatgccttttcttggttacctgatcgccatgctcatgctcagcaccacctgtgttacgaatgttacagcatttcaggtttggctacctgaggacgtgaagttacttccgatgagaattcaggtttggagataggacacattacctgtgtttcgtacagttttttcttttcttttcttttcttttgagttgcctgagcacttatttatttgtattagcttactgtacctctcatgtatcttagcgtgaacgttgttcgacatgcagcaagaggtttttatctgtatcaagctatttcagagccaatgtgttgtacatgtaatattttgcagtagtagtcaatcatgtgttcatcttgcaaagccaaatgagctgtatc

SEQ ID NO: 2600 - DNA, 774 bp, Oryza sativa
  ref <308>: DATABASE ACCESSION NUMBER: AK060414
  ref <309>: DATABASE ENTRY DATE: 2001-12-06
aaaaaaaaaaaaaaaaaaaaatcccaattcccatctgctcctccaactccaatccaatcgagaggtcgatctctgaatctgatctgatcaccatggtggtggcactgggtcccggccggttctacggcagcagcctcccacggccgcgcttcttctccggcggcgaccgcgtcgagccgccggtggccgtcaccgacccgctcatggcgtgggcgcacgaggcgcactggtccatgggcggcctcagctccaagcgcctccgcctgcagggccgcatcgagggctccatcgacaagctccgccgccgcggccaagaggaagcgggcgaggaagctcagcgacgagttcgaccgcgtcgcgaccatgcaggagggggaggccaagaagcagaagcccgcagcaacctctacaccggcgaggacttcaccgaggaggaaggccgccgaggtggctctcaccccggcgccggcgagggcgtcaccgagggggaaggctgctgccgagggggctactgctgtaccggcgagggcgtcgccgaggaggaaggccgcggcaaggaggacatcgccgaggatgaagcactgagagaggtggcctgcttaatgtgaaatcctagttcttgctctgttacattggtcgctctagagaatcgagatgtgattgatggatatgtaatgtgttatgtgtgtgtgctaagtatttagtgatgaaaccattgaaatgtgatgctaatctctgaattagtcatgaattcctgaatcaacacatttccag

SEQ ID NO: 2601 - DNA, 1682 bp, Oryza sativa
  ref <308>: DATABASE ACCESSION NUMBER: AK060415
  ref <309>: DATABASE ENTRY DATE: 2001-12-06
ggtgaattcaacatttgagctatttatcgaattaaatgcaactgatgaacagtgtgattttcaaacagtctatgcaagtggtattaaagggaaggctgggttatctccagaaaatttgggtgacgatcttggacccctttttgaggcaatccttagatgcataccagagccacgtattgagaaagacggtgcactgcaattgcttgtgtctaatactgaatatgatgaacataaaggacggatagcgattgggcgactgcatgcaggagaactgcagcgaggcatggaagtgaaggtttgtacaccagatgatgcttgtagaattagcaaaataagtgagcttttcgtttatcagaacttcagccgagttccagttgataatgttagtgctggtgacatttgtgcagtatgtggaatcaatgatatcatgattggggaaaccatagcagataaagtttctggaacacccttgcccaccatcaaaatagaggaaccgacagtcagaatgtctttttccatcaacacttcaccttttgtcggtaaagaggggaaatatgtcacaagccgtaatctccgtgataggttatatcgtgagcttgaaaggaacttagctatgaaagtagaagacggggaaactgctgatacatttcttgttagtggcagaggcacactgcacctcactatattgatagaaaacatgcggagagaaggatttgagtttatgattggacctccaaaggtcattaacaagacagttgatggaaagctgcaagagccttatgagatagctgctgtggaagttccagaggaatatatgggttcagttgttgagcttttggggaaaaggcgtggacaaatggttgacatgcaacctagtgggccagagggaacaacattactaaaatacaagattcctactagaggcctcattggactcaggaatgcagttttgacagcatctaggggcacagcaatactcaacacaatttttgacagctatggcccatgggctggagatcttagttcacgtgatcaaggctccttggttgcatttgaggatggaagtactacatcgtatgcacttcttaatgctcaagaaagaggtatactatttgtgagtccaggacaggatgtttacaagggccaaatagttggtatccatcagcgaccaggtgatttagcaattaatgtgtgcaagaaaaaggctgcaacaaatgtccgctccaacaaggaaactacagtggttctcgatgaggcgttaagctacagtctggacgactgcatagagtttattcaagaagatgagctagtggaggttactcctgcaagcatccgcatgtgcaagaacccgaaagtttcgaagaaaaaccgataatgcagtggaggttactcaagcatcctgcaattttttggagctgctttgctttgcaagagcagactcagatataagattactcaattttgcaatgattataagttgccaaattattatctggattcctcattggacagagaagctttgggtagtattctaggctgcagatacatattctttcacagcgatatcagctgtgttacatgtttgtaggccacatagataccatatatacaagattcatgcaactatactccttgcaatgatctttacaaccaattaatggattacatatattactttactg

SEQ ID NO: 2602 - DNA, 1472 bp, Oryza sativa
  ref <308>: DATABASE ACCESSION NUMBER: AK060416
  ref <309>: DATABASE ENTRY DATE: 2001-12-06
acggcgtcggtggacgccaccaagaagcaggccgccggtggggtgacggacgcctccggcgcgttgcaggacaaggtggccggagctggcaccgtcgccgtcgatgtccttaggaaggctattgttgctgccgaggattcactgggcagcgcagcaacatccattggatattactatggatcaaccaagtcgtcgttgccaccgaatgtgaaagatttgctgaactcctccgaggagaaagctagtctagttctgaaaccgattggaggtgcccttcaacaggtatatgtagtcgtcgaaggtattgaagagaatgttggtttggacccaagtgatcctattgttcaattggcagttctgcttggaggttcaaccacaatcgggttaacttactggctcttcgcatacggtggctattccggagacttgtcacccgaatccacactagagctgttgagaaatgatgacaaagccgtacttattgatgttcggtctgaggacttgagagtgaaagatggaattccggatctacgccgtgcagctagatctaaatatgcaactgctgcttcacctgagattaaaggttcagtaaagaggctacttaaaagtggaagagatgttgatgatgcgttgctcgcagttatcatccgcaacttgaagttggtcaaaggtgattcaaaggttataattatggatgctaatgggagccgatcaaaggccattgctaggttactgaagaagcttggtgtgcagcgaccttaccttgttaaaggtggtttccaatcttgggcaaagaaccttcgagtgaaagaattgaaacctgagaccgcattaacagtaataaatgaggacgcagaggaaatccttgaagacataaagcccactccaacacttgtccttggatctctcctgggcctctcagcagcagcgtacgctttgctagaatgggaaacgactctgcaatacataggtgttctaagccttggtctgactatctatctgcgattctctacgtacgagggttcagaggatctggagcaagatctaaaactgctgctttccccgttaagagtaggcgcggaggcgttctcgtgggcggccaagaagctggagccaagcaagattggcttggcgacttccccctccacgacggcggtccaagaccgggttctccaggccgccgcgaagcacgagtcgcagccgtctgacgccgaggcaggcagtttggtctctgaagcgtgagagtttcaggtttcagtggccaatgtgatcccaatctgtgcagctgagtgaaagtcgttagccagtagctacacgcccagtaaattctgtggaaaaatttgatgctttctcatgtagttgattgatctgagctactgtgagcagccgtggtgatgaaccggcactgtaaatttttataagcagcgttcaacaataatgaacacatgttagcacaagatgatgttaatgtt

SEQ ID NO: 2603 - DNA, 675 bp, Oryza sativa
  ref <308>: DATABASE ACCESSION NUMBER: AK060417
  ref <309>: DATABASE ENTRY DATE: 2001-12-06
cgtgatccaaatttattgaaaacactagaagtttatgatgagacggccaagttcctaagagagctagaaatggatgatgattgtctcacaaaagctattattggtaccataggtgacgttgattcctaccagctgccagatgctaaaggttacagcagtctaatgcgatacttgctgggcatcacggtggaggaacgccagcaaagacgtgaagagatactatcaaccagcttgaaggatttcaaggagtttgctgatgctgtcgaaacaattaacgacaacggtgtcgtggttgccgttgcatcacctgaggacgtcgaagcagcaaacaaggaaaatcccttgttttcagacgtcaagaagtgcctgtgaagctccttcatttctgctgcctttgcaggattttagtctagatctgcgctgagcacagaggttcttcagtctctcctcgcctacgaatgatgattctgatactgtaacatcatatcttacatagcgagagtatccagccatgattttttttctcgcaattttggggacaacagtagttcaggatgatgggcaaagtgtattcagtgtatttcacttgcattgctgctttccccatcaaacaagtcagatgtacgcgaagtttctgacagaagataaataagagattgctcaaattgttgctcc

SEQ ID NO: 2604 - DNA, 1831 bp, Oryza sativa
  ref <308>: DATABASE ACCESSION NUMBER: AK060418
  ref <309>: DATABASE ENTRY DATE: 2001-12-06
aattaagtgacggccagaacaaaatcatcattacaaaggatattgcatgcagcaacaaaaaggaaacagtagctcctacattaccaaatggcaagccagtgctattcaatggatctcccactgccaatgccaatgtgtctcccaacaatggcgtcattgagaataatcagaaggctgtagctgcagttctcacgagtgttcctgctaaaaatgtcagcagcccagcaccactttcagttccagaggtggaccatgatgggatcgaacgcaatcaaaacagcagtttagtcccagaaataactgaaaatggagggccagctattgatacaccaactactgcagctccagtggatgagcttgtgacaagcttaaataaaaaggactttcggaacaagcccttgcttcctcatggtttgaagaatacaggaaatatatgcttcctgaattcatccttgcaggcattgctctcatgctggccttttgtccagcttttacagaacttgaggaaccagaatatacctaaggctggttacccaacactgaatgcatttattgagttcatctctcaattcgacgtgctcgatgattcaaatgttaagaaagacgagaagtttgctacaatagcttcaaaatcagttattccctccatgtttgacacagttctgagaaattttactccagatgtgccagctggaacagcttctaggccaaggcaggaagatgctcaagaattcttaagttttgcgatggatagaatgcatgatgaactagtgaagcttaatggcaatggctcaaattcaaaggagggtatgattgtttcatcaaatgatgatgatgcttgggagactgttggaaagaagaacaagtcagccataatgaggagtcagagttttgttccctccgagttaactgctatttttggaggccagctgcaaagctgtgtgaaagctactggtaacaaagcatcagtcaccgttcagccttttcgactgatccatcttgacatattccccgatgctgttcagaaacttgatgatgcccttcgtctgtttgctgctcctgaatctttggaaggatacagaacagctgctggaaaggctgggttggtgacggctagaaaatcagtgaagatacactcactttcaaagataatgatactgcacctgaagaggtttagttatggaagtcatggctgcacgaaactcttcaagccaattcacttccctcttgagctggttcttagtcgtgatctgctgagttcgccatcatcagagcacatgcagagtagaagatatgagcttgttgcaaccatcacgcatcttggggcaaacccgtccaggggccattacactgccgatgcaaagtctgccagtgggcagtggcttcgcttcgacgatgataacgtcacacctgtcagtctgaacaaggtcttgcatgaccaagcatatgtcctgttctacaaacaattataagtttgggggtattgctacggagttgattagcggttctcttattgcttgaacagctagatatatactaactatatcgcccagttaatgtagctgccgtgtaactgagaatcttgtgtcaagtgcctggtttcctgcgtttatttatatatgcttgatcacatagtgggggatttttgttcaggccattgttgaggttttgtaaaatgcaaatgtcatcttggtaatgaccattaaagtaaccatgagatgatatcactcgttagccctaagaaactatattgatcatgttattgcggtgttgcatttgattatattaaaacgtgattaaaacgtccagcttgtgagcttgacgattgctg

SEQ ID NO: 2605 - DNA, 1408 bp, Oryza sativa
  ref <308>: DATABASE ACCESSION NUMBER: AK104300
  ref <309>: DATABASE ENTRY DATE: 2002-08-28
acagccatttcactagacagcttagctagcaggtagctgagagagttccttcgatctcgatctctgcacggcgacgataagataagcaatggcagtctcgtcgccggcgccgtcgtctctgcatgtgccgatggccgctgcggcactattagggatgctgatgatgatgtcgtcggcgccggagatgaaggtggaggcggccggcgggttgtccgtcgggttctacgccgaatcgtgccccaaggcggaggcgatcgtccgggacacggtgaccaaggcgttcgagaaggcgcccggcacgccggccgacctcatccgcctcttcttccacgactgcttcgtccgcggatgtgacgcatcggtgttgctggagtcgacaccagggaacaaggcggagagggacaacaaggcgaacaaccctagcttggatgggtttgacgtcgtcgatgatgccaaggacctcctcgagaaggagtgtccacacaccgtctcttgcgccgacatcctctctctcgtggctcgtgatagcgcctaccttgctggtgggctcgacttcgagatcccaacaggtcgtcgtgatggcttcgtctctaaggaggatgaggtcctctccaacgtccctcacccggagttcggtgccaaagacctcctcaaaaacttcaccgctaaaggttttacggcggaggagatggtgacgctgtcgggggcgcactctatcggcacgtctcactgctcatcgttcacaaaccggctgtacaagtactacggcacgtacggcacggacccgtcgatgccggcggcgtacgcggcggacatgaagagcaagtgcccgccggagacggcggcgcagcaggacgcgacgatggtgcagctcgacgacgtgacgccgttcaagatggacaaccagtactacaggaacgtgctcgccgggaacgtcacgttcgcctccgacgtggccctcctcgacacgccggagacggcggcgctcgtcaggctctacgccgccggcgaccccgcagcctggctcgcccgcttcgccgccgcgctggtcaaggtcagcaagctcgacgtgctcaccggcggcgagggggagatcaggctcaactgctccaggatcaactaattaactcaaattaaattcgcgtgaagtttgtgattctcatatatacaaacactactgccctgttgccatgcatgcatgaggctcatttgatttatttttccttatatgtttgtgcatgattcaatgtactactactactacaacaacttttgtttatttttattttcagtttcattttttaccttttgatgctgagtgtgccaattgggcaaaaataaattgtgcttctgaccatatatatgggtgaatttattcaaggagtaaaatgtgtgctattcatgtttt

SEQ ID NO: 2606 - DNA, 1590 bp, Oryza sativa
  ref <308>: DATABASE ACCESSION NUMBER: AK060419
  ref <309>: DATABASE ENTRY DATE: 2001-12-06
agagattatcctctttccccttccaccgccactgcgccgcaattcgccttcgctgcgggcatctgcagcagcagaatcgtgggctgaaatcgaaccactgcgcgacaagggtgccaaggataactttattgtgctgctgaaggaagacatcttattgacctgctagttctgtagatgatttttggagtgctataaatatcgaggcgcgagttcggactgcaagatacaacacaagagtgagaaaagaaaggctttagctgagttacaggatggaacaaggtcagggagatagatactggtgccaccactgcgaggaagtgatcgaacctgtggagcctgatatgaagtgtcctagctgtgacagcgggttcgtggaagagatggggtctgcaggctttgagccatcgaccaacttgaggtctgatcgtatctccctctgggcaccactgctgctcgggatgatgggaggctcatcgcggcgagcaaggcggctccgaaggcagatcatggaggatgatgacgacgacgatgacgatgaggatgatgaagatgattcagaccatgagcttgaagacttgtttaggaggcagaggaggggctcatctcttgtaaggctgctccagaccctccgggatgacttgaggggcttggatgacattggcagggatagtgacagagacagggaaagggagagaagggagagggagaggctgagggagcgggagagggagagggagaggatgagagagagggagagagaacggaggagagaaaggacagaaagcttgatactgatcaactccaacaatgaggccattattctccaaggaacatttggacctgatgacaaccaggatgactcgagcaatacaagttctggtgtttcacttggtgactactttcttggtcctggattagatatcctcttgcagcatttggcggaaagtgatcttaatcgttctggtacaccacctgccaagaaggaagctgtagaagcattgccaactgtgaacatccaggaagtgttaggctgttctgtctgtcttgaggatttcgaaatggggacagaagcgaaggagatgccttgtcaacataagttccactcccagtgcatacttccatggctggagctacacagttcttgcccaatctgtaggtttcagttgcctaccgaggagtcgaaaaacccatgtgaatcagccggtggaattgtgtcagtgaacgatgatggagatgatgctggtacaagtagtgacgtagatagtgctaaccaacctggtagtcctatattctctgctttgagtgcacttttctcaaatccatcatcctcatcctcatcctcatctgatgataatgcaccacactcttctgagagctgaagccagcgctgggcctgggcttgcaatatgtcaatggagttctgaaatgggactcctgagaggccggcatctttatatctcgtggtttctgtacatattttaaagtttaatccgctagacaagctattcgcgtttcctttatgaaacctgtgtggtttgtaatcagtttggtgcctgttatgtctaattatgtaaaataaaatttagcctc

SEQ ID NO: 2607 - DNA, 723 bp, Oryza sativa
  ref <308>: DATABASE ACCESSION NUMBER: AK060420
  ref <309>: DATABASE ENTRY DATE: 2001-12-06
gattccatccattcctcaagctctcactcctctctcgcttccatggcgctcctcgccgtccacgccatggccgcgtccccggccaccttcccctcctcccaccaccacgccgccgtctcctcctactgcgcgctccccgccgccgccgcattctcccgctcccgctctcgcgtcgccgccgccgccgccgccaccctctcggccccgctcactccagttcttgaagtttactgcgggagaggggacaagaagaccaagaggggaaaaaggttcaaccactcgtacggaaatgcgaggccgcgcaacaagaagaagggaactggccctacacggctgttcgcgccgcctgcgcctccgaggaaggaccagttcgacgacggcgaggtcaccccgatcgacatcgacgatgacatcctggaatagatcatctaattgagctaaggaaggtggtcaacaacagttatcagatggcagctgccctagacttaagtggtgccgaccctgcacggttgaatcaaggactaataagccgtatggtgtattagcaaaacaatgataatttgtgggtagcgattttaaagccaactagaaaggtagcccgcggattcgcgtgggcatgtatcgtgggctgcgttgagaacggatcatattaatcagatagcctctgccatctttcggaagtacgtttcctcgacaaatattcttcatcaacatcactttgat

SEQ ID NO: 2608 - DNA, 1335 bp, Oryza sativa
  ref <308>: DATABASE ACCESSION NUMBER: AK060421
  ref <309>: DATABASE ENTRY DATE: 2001-12-06
tgtatccctattcttcaccgagactcctactaatccatttctgagatgcatcgacattgatcttgtctcaaaaatgtgccatagcaagggagcattgctttgtattgatagtacctttgcatccccaatcaatcagaaggcactaactctaggtgctgacttagttatccattcagcaacaaagtacattgctgggcacaatgatgttattggaggctgcatcagtggcagagatgagctagtttccaaagtccgcatctatcaccatgtagttggtggtgttctaaatccgaatgctgcctacttgattcttcgaggcatgaagacactgcatctccgtgtacaatgtcagaataatactgcaatgcggatggcccaatttttagaggaacatccaaagattgcacgtgtctactatcctggtctgccaagtcacccagaacatcacattgccaagagtcagatgaccggctttggtggtgtcattagttttgaggttgctggagactttgatgctactaggagatttattgattctgttaagataccctatcatgccccatcatttgggggctgtgagagcattattgatcagcctgccatcatgtcttactgggattcaaaggagcagagagaaatctatggaatcaaggacaacttgatcaggttcagcattggagtggaggattttgaggatttgaagaatgacgttgttcaggcgcttgacaagatctaagcacctgattgcatcctcatcgtgagagttcatctatctgatcttgtttgcctctgcatcacgtggagaactttgatattccagctgagaattgcgaataagtttcttcattagttcccattatctagtctttagttccaattaagtttgtgtctctgttttttcctctcaaaatggctatgttcagaattatttttgaaatgctgaaaatccaccgttgtgttgtgtacttttgcttgcctgttgtcctgttggtagtcggaacagagaagttgctttgcataccgttgggatgcattataccagtagttttattacggtttgagccttgctattgctgacatagatcactatgggtatgggatgtatggattcaatgagaacaaagcccaatctccattgcaagggtgaaaggatgttggggcttgatatcatatgatgctgaactacgcttggttattggctcccgcatgaggttgccgcttgtagatgtccatgcgatttgtggtgagtattctgaccgtaagtggatgtatgctgaaaatttgtagcattgtgtccgtgacaaaggaaatgtaggactccagaaatttccattg

SEQ ID NO: 2609 - DNA, 1448 bp, Oryza sativa
  ref <308>: DATABASE ACCESSION NUMBER: AK060422
  ref <309>: DATABASE ENTRY DATE: 2001-12-06
cccgcgtcccccgatgccgctctcctactcagccgccgccgccgccgcgccgtcccctctcgccgcgcgcagccgcggcctcctccgccgaccgccgcgctcttcccccgtcgtcgtgaggtgcaagaagattgatcaactgagggcagtcaatggaataccaccatacgctccagtgtctaacagatcgttgttaagtcctgtgacgctgccgattatccgggatgcgaatattaagaatgatacaaggttgcgtatcttctcagggactgccaacccttctctttcccaggaaatagcaagttacttgggcttagaacttgggaagattaacataaaaaggtttgctgatggcgaaatatatgttcagttacaagaaagcgtaaggggatgcgatgttttccttgtgcaaccaacgtgccctcctgcaaatgagaatcttatggaacttctgatcatgattgatgcctgtaggagagcatctgctaagaatattactgcagtcatcccttattttggttatgccagagctgacaggaagtctcaaggccgtgaatctatagctgcaaaacttgtagctaatatgattacagaagctggtgcgaaccgtgtccttgtatgtgatcttcattccagtcaagccatgggatactttgacatcccagtagatcatgtttatggtcagcctgtgattcttgattacctcgccagcaagacaatatgttcagatgacctggtggtggtgtctccggatgttggaggtgttgccagggcacgtgcttttgccaaaaagctatcagatgcacctctagcaattgttgataaaagaaggcatggacacaatgttgccgaggtaatgaatcttattggagatgttagaggaaaagtggctgttatgatggatgatatgattgatacagctggaactattgccaaaggagctgagctgctgcatcaagaaggagcaagagaagtctatgcatgctgtacacatgctgtttttagcccgcccgccattgaaaggttatcaagtggtttgtttcaagaagtaatcatcacaaacactatacctctcaaggaggacaagagtttcccgcagctgactatcctttcagttgctaaccttttaggcgagacaatctggcgtgttcatgatgattgctcagttggtcatgagccatactctagcttggacattgactgaagctcaaggtgtatcacgcccaatccccaatttttggcttttctccacctttggtttcgtggaataagctgtgtaatctgatgctcctactagtgcaagaacttttgagtatttcaatgaaccatagtacataagatcgaaatttaggtagtttggtttgctagcatgctcagtgtaatgtacatattgtttccacgtgatccatttatttctttgcaaagatcaatgctgaatggttcaattt

SEQ ID NO: 2610 - DNA, 1497 bp, Oryza sativa
  ref <308>: DATABASE ACCESSION NUMBER: AK060423
  ref <309>: DATABASE ENTRY DATE: 2001-12-06
aaatgcagtacctgttcgacgaggatggccgccgttacctggatgcttttggtggcattgcaaccgtttgttgcgggcactgccatccggatgttgttgaggcgatggtcaaccaagcaaagaggatacaacactccacagttctttacctgaatcatgctattgcagattttgccgaggcattggcagccaaaatgcctggtgatctgaaggttgttttcttcacaaattctggcacggaggcgaacgagcttgcactgatgattgcccggctttacactggttgccatgacattatttcactcaggaatggataccacgggaatgcggctggaacaatgggtgctaccgctcaatgcaactggaaatttaatgttgttcagacgggagtgcaccatgcacttaatccagacccatatagaggtgctttcggttctgatggcgaaaagtatgcccgagatgttcaggaaatcattgattttggaactacaggaagggtcggtggtttcatttcggaagccatacagggagtgggtggaatagtggaactggcaccaggatacttgcctgctgtgtacaatatggtaaggaaagctggcggcctctgcatcgccgacgaagttcaggcgggagtcgcacgaactggaagccacttctggggatttgaatcgcacggcgtcatcccagacatagttacaatggcaaagggtataggcaatggcataccgatcggagcagtcgtcacaacccctgagatcgctcaggtgttaacccgcaggagctacttcaacaccttcggtggcaaccctgtcagcacagccggtggccatgctgttctcaaggttctggagaaggagaagctccaggagaacgcatttgtggttggctcctacctgaaggaacggctcaacaagctgaaagagaagcatgacatcattggtgatgttagagggaaaggcttccttcttggggttgagctggtgaccgatcgccagaagaagacaccggccaaagttgagatcggtcatgtcatgaaccacatgaaagacatgggtgtgctggttgggaaaggtggtttctacgggaacgtgttcagagtaacacctccactatgcttcaccaaagaggactccgatttcttcattgaggcgatggacatttcactatcgaagctgtgagtcggagagggactggcaggatcaacctgtccgcatgtgatccgtatccataaataatgttggggattggtgagatagcacctcgttgtctcgtaatatgtcctgcaaacccaccatgcgctgctcaacacatggtccaataggcgctcctccggtctctaatcagatgtgttgtgactcgtgaccaataagcgcatgtcaatgtcagatgtattgttatagttattgtttacatgctgaacgacaaaacgaaccaatcacaatgcccaggcgatgtaaatgttgaaacaattatattggcaaatgtcagtgatttcgc

SEQ ID NO: 2611 - DNA, 913 bp, Oryza sativa
  ref <308>: DATABASE ACCESSION NUMBER: AK060424
  ref <309>: DATABASE ENTRY DATE: 2001-12-06
cgactcggccgctggcccgctgctgctgctgctgcacacgccatttttgaatgtgagaaagagagggaaacccaaccaggagagggcaatgccgaggtcgtcgtcctcctccaagccgattctcgggagggccatggcgatcctggcgctcccgctgaccccgatatccaaggccaagggccccatcgccaggaacctgctgctcttcaagaagcgcggcgccgccgggaaggctcgccggatgctgtcgtcgtacgggtacaagccgcaccgccactacaactacgactacgtcggggagtaccagttctccccctccagctccccgctcatcgcgtaccctccgggcgtctcgtcgtggcggagggccaccaagaagcggaggagcaaggccaggatgatcctcgcctccctcctctgcggcggcgacggcgacctcgacgtcgccgtgctcgacggcttgcctcgagccgacgagccgcgcgccgccgtggagtgggaagagtgccgccgcgacggcggcggcgcgtacggcgagggtgatcagtacgaggaggaggaagaggaggaggacgacgagggggtcgacggccgggcggagcggttcatcgagaggttctacgaggagatgaggctgcagaggcagcgctctctggtccagcgtctcctctgaatcgagccatccagctctgctctgctcaatggcctctgctctgccttcgctgcgttggatcgcttcactgcctcttctgctgccgtagcttcttggtaggattaaattgtcgctatcttagctgcagcttcttcatgttcttgttacttcgttgcatcgttttaccgttgctgctgtatctgtttatcagtctgtggggagaactttcttttccctgcttcaattcagtctttacatttc

SEQ ID NO: 2612 - DNA, 1119 bp, Oryza sativa
  ref <308>: DATABASE ACCESSION NUMBER: AK060425
  ref <309>: DATABASE ENTRY DATE: 2001-12-06
acgccatgaacttgattcactaagaggcaaagttgcaaagcaagattccggcatttctgataagtgcagggattttgatgtcattgttagcaggttggagcaagctctgcagcatgttcatcgtaatgagattgctctgaaggagttaaatgatagatttaggactgtatcagattctcaaaaggaggtagagaaacaaaataaagttttacatgccatcattaaagaaaaggagaagggattttcatcatccatttctaaagaaaaggagtttacagaatgcatgagatgtgttgttgaatctatgagaggttttgaaaagcttgttacagaccaacaaactatcattgcacacaaagttcagcacaatgaatcaaggtgcctgtatttccattcatccagtagtttcttttgtctttattttgggtttgcttatgctgtatttatatttacaattcttattgtctatgacttttctttgttgaacttatgcaaaacaggtttagtctattgaaagaacaatgtaaaatccttgcaaaagaaggcaatactttaagaaagaaggcattgagatacaaggaaatatctgaaacaagagcctccaatcttcagaaagctgagctcgaggtagatttacttggtgatgaggttgaggcattaacagatcttcttgcaaaaatttatattgcactcgatcactattctcctgtcttgcagtactacactggtgttatggagatcttgaacatgatcaagaaacatttaaacatgtcgaaataaacttatccttcatacttatatctgctactacagtgttagcaaaggcttgacagcttgacggtttgactctgcatttatagtagtatgaggtgacttttgtagatcatgcccttcttttgatgtcaaatcaagggttaggtgatgcaaagtagtttgctccccattttagatagtagatttggtagcctttggcagcttgtaaatgagccaacattagttagtccttgtattgcgctattgatcctatgggtctggaaaagatgaattctgaaatacttttccacttgatggactaggaagaatgttggtggagtttttgaaccacattgagaaagatgt

SEQ ID NO: 2613 - DNA, 256 bp, Oryza sativa
  ref <308>: DATABASE ACCESSION NUMBER: AK060426
  ref <309>: DATABASE ENTRY DATE: 2001-12-06
gatgacaggatgacaaacattgaagcagcccttagtgtaggaatggttggtttgcaatttaaaaatgctgaggtgctcaagaaggatttatgctcgcttggagttgaatttgcacctgtgcatgaaggtgaaatacaagtccaataaggttgcactttgttaactcttctgctcatgtgtataaaattcatatatctgacccttctgtcttctgaaccttgtcaataacatgaagacccctgattgttgcagatat

SEQ ID NO: 2614 - DNA, 500 bp, Oryza sativa
  ref <308>: DATABASE ACCESSION NUMBER: AK060427
  ref <309>: DATABASE ENTRY DATE: 2001-12-06
ggtggacccattcatcttctttgttgataccatccaaggtatgcaagcatctgatccagccaggttccagagcctgatgcagactctagatttccgctaccaggcactcgcgaatggcttagctcaacatgccgaggaaagaaaagttgaaattgagaaagagaagttggaaaaggcgaatgcgcagtgaagagagtcattacttggttgtttctccagttttgccaatccgtgacactggcactggtcagtatcctgtgattcggtgatcgcaggcggtgagttattcttttgcaggcttggcctagttgtttttggcggccaattttgaggcacagatgttcttgggagagaagcagactcagttcatttctccagtgggtcatggtgggagctatattgatacttgtcatactgttttgatccaaagtctcatctcctttttggttgatggatgcttgttgtcgaacctccccaagccccaaggtgacagctacatc

SEQ ID NO: 2615 - DNA, 1351 bp, Oryza sativa
  ref <308>: DATABASE ACCESSION NUMBER: AK060428
  ref <309>: DATABASE ENTRY DATE: 2001-12-06
gcttcccaatctctccccagcgccgccgccgccgccatcctccccgagccctagctctcccctatccctcgccgcacgcaccaccaccaaccatggccggcgcgcaggagtctctggtgttggccggcgtgatgcacggccacaacgacgtggtgacggccatcgcgacccccatcgacaactcgccgttcatcgtctcctcctcccgcgacaagtcgctgctggtgtgggacctcaccaaccccgtccagaacgtcggcgagggcgccggcgcctccgagtacggcgtgcccttccgccgcctcaccggccactcccacttcgtccaggacgtcgtcctcagctccgacggccagttcgcgctctctggctcctgggacggcgagctccgcctctgggacctctccaccggggtcaccacccgccgcttcgtcggccacgacaaagacgtcctctccgtcgccttctccgtcgacaaccgccagatcgtctccgcctcccgcgaccgcaccatcaagctgtggaacaccctcggcgagtgcaagtacaccatcggcggcgacctcggcggcggcgagggccacaacgggtgggtctcctgcgtccgcttctcccccaacaccttccagccaaccatcgtctctggctcctgggaccgcaccgtcaaggtgtggaacctcacgaactgcaagctgcgctgcaacctcgagggccatggcggctacgtcaacgctgtcgcggtcagccccgacggttctctgtgcgcgtccggtggcaaagatggcgttaccctgctgtgggacttggctgagggcaagaggctgtactcgcttgacgcgggttccatcattcactcgctctgcttctcgcccaaccgctactggctctgcgcggcgacccaggactctatcaagatctgggatcttgagtcaaagcacattgtgcaggaccttaagcccgagatccctgtctccaagaaccagatgctctactgcacaagcttgaactggagcgcagatggaagcaccctctatgctggttacacagatggaaccatcaggatctacaagatctcaggtttcagctacgccggctagagatggggagtgttgttttagttatcgcgttctggtaaacgactgtggtatcaccctagtgttctttttggctgtttgaaaggcattaatctgcctgagtacttctgcttaatttacccatctatgtagtagctccagtactgagctcatggatactgtggaatagggatctgttttgcaccatgttttgttttgacttccttttcaatatattgtctgatgaaccatgcgatccatggtgcttctctcttttt

SEQ ID NO: 2616 - DNA, 944 bp, Oryza sativa
  ref <308>: DATABASE ACCESSION NUMBER: AK060429
  ref <309>: DATABASE ENTRY DATE: 2001-12-06
aacaaaggctggtcccgtttctcacttcgcaacactaggctttttgcccgaagcgactcgactctacacccctcaccctaccctaccctagcaacgaggcggccatggcggacgaggagcacgaggtgtacggacaggagatccccctcgacggggaggacgtcgacatgggcgcccccggcgacgaggccgccaagatgcaggagctcgacgagatgaagcggaggctcaaggagatggaggaggaggccaacgcgctccgcgagatgcagaccaaggtcgccaaggagatgcaaggtctggatcctaatgcgtcctcatctgaatcaaaagaggaaatggacgctcggtcggtatatgttggaaacgttgactatgcatgcaccccagaggaagtccagcagcattttaattcctgtggaacggtcaacagggtgacaatcctgacagacaagtttgggcaaccaaaaggtttcgcttatgttgaattccttgaagtagaagctgttcaggaagctgttaagttgaacgaatcagaactgcatggtcgccaaatcaaggtggcgccaaagaggactaacgtccctgggatgaagcagccccgcggaggcagaggattcggtggtcatccttatatgaggccatatggagcaccattttacaatccctatggttatggataccccagattccgccgtccacgcaggccatacttttgaagctgtcttcgtggagtcttcagcacatgacattagtccaatagcccaaagaatccgtcgttgttgctgtatttcgatacttcatagttagcaactataaagttcgatcactttcttcacagggtgttttttgttgtttaaagatatgtgcaaattcaggcagcagcattatgtactattaacttcgtttatgtggaagtgcgcactattttgggttttggctgc

SEQ ID NO: 2617 - DNA, 1143 bp, Oryza sativa
  ref <308>: DATABASE ACCESSION NUMBER: AK104301
  ref <309>: DATABASE ENTRY DATE: 2002-08-28
gcagttcgccgctgcttccactccgcctccacctccgccgccgccgctgctcctcctcctcgcgcttacagtttcctctacttccccctccttggtcttggtctgcctcctcctcgccatggacgtcaagccggtgaggactgtgaaggtcaccaatgtctccctgagtgcaactgtgcaagacattaaggagttcttttcattttcaggagacattgaacatgtggagatgcaaagtggcgatgagtggtctcaagttgcatatgtgactttcaaagatccccaaggagcagaaactgcacttcttctttcaggcgcaacgatagttgatctttctgtcatcatcgcacctgctccagaatatcaaccaccccctacttcatctgctcctccaatgtatagtgcaaccagtgtccctgtcagtgaagacaacaatgttgtccataaggctgaggatgttgtcagcaccatgcttgctaaggggttcaccctggggaaagatgccgttggcaaggcaaaagcttttgatgagaagcatgggttcacatccactgctggcgccaaggtggcctccattgacaggaagattggtcttagcgagaagttcactattggtacttccatagtgaacgagaaggtcaaggagatggatcagaagttccaggtgtcggacaagaccaagtctgcattcgctgctgctgaacagaaggtgagcactgctggatctgctatcatgaagaataggtatgtcttcaccggggcttcgtgggtcaccaacgcattcaacaaagttgccaaggctgccactgatgttggtacaatgacaaaggagaagatggcagctgaagaccagcataagggctcgggtccttctggagggcactcgtacacacccatccagtgatgactccacgctctctcatgtgccgcattgtgttgtattgatggatgtaaaacatagatatagaacagaaaaagtcccctcctggcataccacatacttctatcagtgaacttttcgcattgcaggaattttgtttccagtagaataggaaatatgatggtgatcacaatgtattccgctggtttataaggcgtatgttcaaactgtttctggttgttgtaacttgcatgaaccttggc

SEQ ID NO: 2618 - DNA, 1154 bp, Oryza sativa
  ref <308>: DATABASE ACCESSION NUMBER: AK060430
  ref <309>: DATABASE ENTRY DATE: 2001-12-06
gaatggaggtgctggggtctattctgctagtctcaagaagcattacttattggctgatgatgaatggaaggaagatattctgcctgagatattggatgggcataatgttgccgattttctggatccagatatactgcagaggtgtgaagagttggagagagaggagggtcttcgcctcgaagaggaagctgcacaggaagctttccagattgatggccatgaactaactgaagagcagcgtgaaatcttgggtcagattagaaagaagaaggcattgctcatccaagagcatagaatgaagaagaggactgcagaaagccgtcctattgttcctagaaagtttgacaaagacaggacattcacaactaatagaatgggtcgtcaactttcatccatgggttttgatcctagggcagctctggaccgagcccgcagccgttctagaggtcgcaagcgtgagaggtcacttagcagagctgctagtgatggtgatgatatggatatagatggccagcaatccagcaagaaattgcgcgcgttgtcgaggtccaggtctaggtcaaaatcaagaccacctgaggaggttgttccaggagaaggattcaaggactctgctcagaagaagaaggcgattaagaaagctaaggattctgtgaggaacaggaacaaggaggctcgtcgcggtgaggcggatcgtgtcattccaactttgaaaccaaagcatctattctctggaaaacgttctattggcaagacgagcaggcgataagtaattcagcactgctgcttagcatcactggtttcaggaagagcagtataattgcagttcggtgttgggattagggtgaaggaaggcctgtttatccaatctttaggacttgttctacgccgttattcatactgtctggtggattggtgttgtatcgcgtctcatccttcgactgagacataattttgttagcttatgtttcagctttatgctacattatatatggtttggctagtattaatagagtggtttaatttcgtcgaatggtactcactaccatcaatatcttataattgtgactttgttatacttatattccagtcctgttctactgtaccgatgctctactgtttgagatgcaatgttaaacttgttgagctggaac

SEQ ID NO: 2619 - DNA, 1234 bp, Oryza sativa
  ref <308>: DATABASE ACCESSION NUMBER: AK060431
  ref <309>: DATABASE ENTRY DATE: 2001-12-06
acagtcctaactgctacctctcacgtctcacccacacctacccaatctcccggtgcgcagcggcgagcgacatggagctccgcgagctcggcgccacgggcctccgcgtcagccccgtcggcttcggcgcctcccctctcggccatgtcttcggcgacgtcccccgcgacgtcgcccgcgccgccgtccgccgcgccctcgacctcggcatcaacttcttcgacacctccccgtactacggcggcacggtgtcggagtcggtgctcggggactgcctccgcgccgcgggcgtgccgcgggaccggttcgtggtcgccaccaagtgcgggcgctacagggaagggttcgacttcagcgccgcccgcgtcacccgcagcgtcgacgagagcctcgcacgcctcggcctcgactacgtcgacatcctccactgccacgacatcgagttcaccgacctcgaccagattgtgaatgagacgattccggtgctccagaagatcaaggagagcgggaaggcgcggttcatcgggataaccgggctgccattgagcatctacacttatgtgctcgaccaggtgccgccaggttctgtggatgtgattctgtcttactgccactatgggatcaatgataccgcgcttgtggatttgcttccctacctgaagagcaaaggtgttggcgtgatcagtgcttcacctcttgcaatggggcttcttacagataacgggccacccgaatggcaccctgcaccgaaagaactaaagttggcatgcagggcagcagcagatcactgtaagaagaaggggaaaaacattacaaagctagctatgcagtacagcttgatgaacaatgagatttccacggttcttgttggaatgaactctccagaacaggtagaggagaatgtggctgctgcaattgaattgtctacttccggtattgataaagaacttctgcacgaagttgaagcaattcttgagcctgtcaagaacatgacctggtccagtggcattgagcaagcctgatatctggcagcagcctggctcattataattcattcatgtattcattgagtcaattgtttgcattgcaatatttcaatggtgagcaaaggaaagtcatcatcggaaattcgttggtatgttgtctgtatcaatttagaagtctgtgaatagacaaacagccaaacatggatgctgataataatggaataagttgtgcccatgcaccttgctgt

SEQ ID NO: 2620 - DNA, 400 bp, Oryza sativa
  ref <308>: DATABASE ACCESSION NUMBER: AK060432
  ref <309>: DATABASE ENTRY DATE: 2001-12-06
aattttttgatgttatgaaagtgactaacagtgatctctacatgctaggcactttctattttattggcttataatctgtgtcatttagagtcatactgaatgtaaatcgagacttctcgttgaaaccacctattggagacactggcaaggatacacgagcagggccataaagattattatgcggcatggcacaggactagcagcagcgtcggcagggaggtgactgagtctggtgccggccatatccatcattgttggtggtgttgtaattttttatttgtttttgtgcattctacaaatgtatcacattgcgtgtgtgatcagacagccgttgtaattctaaatccgttcaaacatttgccggatgtgcataaatgttttactcctgtagtctaagagt

SEQ ID NO: 2621 - DNA, 278 bp, Oryza sativa
  ref <308>: DATABASE ACCESSION NUMBER: AK060433
  ref <309>: DATABASE ENTRY DATE: 2001-12-06
gtgctgctgctgccccagctgccgaggagaagaaggaggaggcgaaggaggagagcgacgatgacatgggtttcagcttgttcgactaagcagtccacagatgttagccagtccgcctatgctttgcaagactatcttatgttgtgtcttttaggttcacttaaagtactctcaagttttgagttttgatatggtgttatcgagaatctgtgtctgtgggatgagaacctcaaacctccttggatggtcctattagaatgaaaccgttctacattctt

SEQ ID NO: 2622 - DNA, 1502 bp, Oryza sativa
  ref <308>: DATABASE ACCESSION NUMBER: AK060434
  ref <309>: DATABASE ENTRY DATE: 2001-12-06
ttattccaacagtcgaggaagatgatggtatctgctatacccatccacagaaacttccaggtgtcaagcaagatggaagcgtatcacactttttccatagaacatttaaggcctataatactggaataagaaagcgccggaagataaacactggtgatcttgctgatgtccgctggcacaagactggtaagacaaggccagtagtagttgatggaaaacaccttggttgtaagaaattcatggtgctatatatgagcaccatgaaaggtggtaaacctgaaaagaccaattgggtgatgcatcagtaccacctaggaactggggaagatgaggtagaagggcagtatgttgtctctaaattattgtttcagcaacagtttaaacctggggagaagaacgcacaggacttaacctctgcagatgctttagaatctatagttgctgaagatcttccaaatattcctccacttcccctggaagaacatgtttttaccaaccaagaactagaagttcttgagaaatctgaaactatcactgaccagggaaaagagactagcgaaataaacaacgaagataacgctgtagaagatgttgcgcatatggctactgagaaacctgaggatggagataacccctcatcgcaagatccgaaatggtgggaaggtgaatcccagttcctgttagactctcagcaactggcagagaaccttgcgatttgcgatgagttccttcagagtcagagccagacctcatgcggcggtggagatgatgaaaccgataagataaagccccgtcttgctgtttatgcccagttgccagtagaggacttgaagaaggatctggaagaatgccagaggttggacccctcagatggcacaaatcttgagcttgaaaatgcgtctgaatttcgactgagccaaattgagttttcgcaggatagctttacgacggcatgggctggtggcaaggtgatcgattgacatgtctccaaggtgctgtcaacaccattttgtacattgaagaaacaactgaagcctcttccttctgcgagacaacagtaaaatgctgtcgatatatgtggtgaagcaactcttgtctcggacagtaaaaagtcataattttggcccggcggcttgccggggtaggcaaaaggtgagcttatgcgctggcttgcccctgaatcccttgatgcatatggactgtgcaccggtgactattcaatgctaaagatcacatattcctggctgtaaattgtgatggtggatgtctcattttgcttggatactctggaccatccggtggtacaaggggaacttttgcttctggttgaactgattactccaataactttcgtgttaataacttttgccatcatgatagtgcctattatttataaatgtggacacaagtcattttctggagcttgtggtaaagcagggctgagaatctcgtgcaagcttcatcttgtaaattgcagtaatcagcataagattgtgacagat

SEQ ID NO: 2623 - DNA, 1205 bp, Oryza sativa
  ref <308>: DATABASE ACCESSION NUMBER: AK060435
  ref <309>: DATABASE ENTRY DATE: 2001-12-06
tcctcattatttagccttttggaatcatgtatgtgtgcgacatccacatcagatctttcaaaacctgaagtgtcattcttatgagaaagctcagtaccacagccaggtgttggatgactctcttgatgtggcatctccctttccatatcaacaccatagcattgatctactgtattcatgacacgggctggaatacgagaaggatgataaaatgaaaggaagaatgcttcatgatcctttactatatcaagaaattcctcagttgggttcatcctgacagaagtctcatcattgccataaaatggatgtgcttcagatgcagctgctctctcatgatgcctctgaagctgcctttgaacctgcctctgaagttgcctttcaagttgcctctgaagttgcctttcaagttgcctctgaagctgcctttcaacctgcctctgaaactgctgccgagcactcaacatgtttgaatttatagtgtcatccagacccctttgttgaacatattggggtctccgttctgcagaatcaaagttcacttggtggcttcgccttgtggcttgaggtagaacagatgtggcataggcctcccttgcatgtgttctcattcttagaggcaaggtggaattaatattgtatccatctggttggtatattgaagataaaacagtgccctgatgatcaggattaccaccagaacttgaacctccagacatggaagaaagaggacttcctagcagagaactggcacctcctgatactgtattgaaagggcgaggaggacccatcgtggttgatgagctaccagaacctggtgaacatttgacagaagcactattcagttgtgaggattcagagctttgacggcgcaaaaaggaagatgctcttggcaactcgttatatgtgccaaaagagtgagattcagtgttttcacggagagaaatttgtctccgaagattttgctggttgaaatcagcatttcccatcattgtctcactctgcaagttgatccttggcaattcaccagagatgacattagtactaattctgcgagacgaggatggcctgaacagttccatctgggaatcatcatgaggtccagtccatagactgctattgctgctttcatatagggacctgtgtgatgcttgtcttgtaacccgaggagcaaactgcctctgtatattgctggctgcagactgatg

SEQ ID NO: 2624 - DNA, 1451 bp, Oryza sativa
  ref <308>: DATABASE ACCESSION NUMBER: AK104302
  ref <309>: DATABASE ENTRY DATE: 2002-08-28
acctctcctcccccggcaatcaaagacacaccccaagtactcgatcgcctgtgtagcttcttccctgatcgtgccatgggctcctacgttcaaggcgaggatgaggttcccgtgtacgaatctggagcagagatcgtccagaagctgcaggagaaatggaagtcgacggcggcgccgttcccggcgatgtactcgagcgtgctcggcggcatcatcctggacccggcgatgatgtccgtcccgctcgacgaccacatggtccaccgcggccacggcgtgttcgacaccgccatgatcctcgacggccacctctacgagctcgacccgcacctcgaccgcttcctccgctccgccgccaaggcccgcatcggcaccccgttcccgcgcgacacgctccgcagcatcctcgtccagatgacggcggcgtccaactgccggagggggtccatccgctactggctcagcgccggcggcggcgacttcctcctgtcctccgccggctgcgccgggccggcgttctacgccgtcgtcatcccgaccgactactcccagtgccgccacggcgtgcgcgcggtgaccacgtcggtgcccatgaagccgccgctgttcgccaccatgaagaacgtcaactacctccccaacgtgctgtccatcatggacgccgaggaccgcggcgcgttcgcgtcggtgtgggtggacggcgagggcaacgtcgccgaggggcccatggtgaacgtggcgttcgtcacggccgccggcgagctggtgctcccggcgttcgacaagatcctcgccgggtgcaccgccaagcggctgctcgcgctggcgccgaggctggtggagtccggcctcctcaaggccgtcaccacccgccacatcgccgccgacgaggccaagcgctgctccgccgagatggcgttcgtcggcagcggcctccccgtcctgcccatcgtcgagtgggacgaccagctcatcggcgacgggaaggtggggaagacgatgatggcgctgtcggatctgctctgggaggacatgaaatcggggccggacaggatcgcagtcccgtacaagtgatggattattggagttgggtgaggctcctcgggcgtacgtcagaaagaggtgtgctaccgacgtgtggattcatgacggtaagcttcacctgttagggattcacgtctcttcgactttatatgagaggagctacgtccatcggagataggaggagaagggcaacgtgccgagtatatatgtgtagtgtacgtacgcgtgagcgagctgagatggatatgatgcagtatcgtgtcgtttcgtttcgtttctccttgtgttcatgtgtggtttgtatggttttttatctgtacgtgtcgtcaacgtaatccttgtattttgcggtgtatcagtactgtatgagtgtatgtgtttatcgattgatcattaagtgaatgaat

SEQ ID NO: 2625 - DNA, 1694 bp, Oryza sativa
  ref <308>: DATABASE ACCESSION NUMBER: AK060436
  ref <309>: DATABASE ENTRY DATE: 2001-12-06
agaacccccttcccttacttttgcccttcccctcccctcgcttcgccggccgtctcgccgtcggcgcgcgggacaacgccgtcaccgccgccgcttcccaccctctctctcgattccctgcctgagccggaggcacgctccggccgggccctctcccccgccacgccgcctcggacgcgcgcggccgaggagctcctcctcggcgttagcaccgctgctcctgcggccggttggatcatccgcgggaggcgacgccggcgaggtgtagcaagaggcgacttggggatatggaagctagggcaaggacatacgggtcttcaggagcttccccaggaaatctgggtgatcggtacgacaattatgcgaactactcaagctacttaaatgatgagccaatgcctgatgccgcatcagaaaaggaacagggtaatgagtatttcaaacagaaaaagtttgcccaggctattgagtgctactcaagaagtatcggactgtctccttcagcagttgcttttgcaaatagagctatggcatatcttaaactaagaaggtttgaagaggcagagaatgattgcactgaagctctgaatcttgatgaccgctatgttaaagcatactcacgcagaattacagcaagaaaagaacttgggaagcttaaggaagcaatggatgatgctgaatttgctgtcagtattgatcctaacaatccagagctcaggaagcagtattctgagataaaagaattacacatgaaggaagtggctaacagaagtaagccaaccaaacatacagtttttaaatttgataaatctggagataaaaaggacacttcccatgcaccaagtagttcccagaaggacagtttcatggaagttgatccgcctagtagagttgcagtggagattagagagaaagcagatggtacatccaaaggtggatctggagtaatcttcaaagacagtaccgtacagccatctcgagatgctaaacagaagcctggaccagaagcatcaatacaagatcttgcatctcgtgctgcttcacggtatatggccagcactgtaaaaagtgtgaagacaccaaaaacagcatatgattttgaggtttcttggagagctctctctaatgacactgccaagcaaacacagttattaaagtcaattccaccatcaagcctaccagagattttcaagaatgcactttcagctgcttttctgattgatatcgtgaagtgcacaacctcaattttccgggaggacacaatgttagctgttagcattttggagaatttggcaaaagttccccgttttgacttgataatcatgtgcctttcatccatgcataaatctgaattacggaaggtctgggatcaaatattccttgctgaaactgcatcagcggatcaggttgaagccctcaggcaacttcgagccaaatatattcaggaaggattgcaggataacatgttcacttcaaattaatgatgctgatgctgagacagctcgttagaaaccttttacgctctagccaattgatattgtgtaacacccttttcctgtagaaatgaaatgctaaactcagtgtggggggtagtcaattaatggtggaagttataaagttgtctcagaaacatccatcaaagcatgcgattgtgaagctcatggacctttgctggctgaaaaggctgtaccttc

SEQ ID NO: 2626 - DNA, 1152 bp, Oryza sativa
  ref <308>: DATABASE ACCESSION NUMBER: AK060437
  ref <309>: DATABASE ENTRY DATE: 2001-12-06
acgttgcaggtcggtgatgcatttgagtacttgaatcatgatggcttactgtttggcaaccattggtgcagaatacgtgaagtggagttgaagcgcgactacgcatttattgagttcagtgatccccgtgatgctggggaagcaaggtacaaccttgatggcagggatgttgatggaagccgcattcttgttgagtttgctaaaggggttccacgtggtcctggtggttcacgtgaatatatggggagaggacctcctcctggaacaggtcggtgttttaactgtgggattgatggtcactgggcaagagactgcaaggctggtgactggaagaacaaatgttaccgctgtggggagagaggtcacatagaaagaaactgtcaaaacagcccaagaaatctcaggcgtgagagaagttattcatgctctccatcgccacgccgtggacgtggtcgcagtcggagctatagccggagccggagccggagccgcagttacagccggtctaggtccagatccctgtctggatctcccagggcacgcagagagcttgaaagatcaaggagtcttagttacagcaggagtcccaggcgatccatctccccagcagcaaatgaaaagaagcgcagccccacccctgatggtagccgtagtccaaggagtccacaggaccaggtgagcccaccacccaaggataatgctgagcgtaatggctcagatcacggtgacagcccccggggcagggagaacagcaggagcccgtctgatggctaccgtagccctgcagctgccaacgggcgcagcccaagcccaaggaacaatggaagccctagcccaatggacaacggtagccgaagtcctagggatggaaatggtgacggtggtagccgtggtggctcacgctcacctagaccgagcgagtctcctgaagcctgaaatttaatcgcagtctatggcgttcgtcatgctatggttgtaatggttacattcccggtttaagacgagatgagtgtatttgctcttttctcaaaaacgacagcgtattttgttactttgtgaatgtcatgctatggttgtaatagtcacagtcctgttttaagacgagataagtgtatttggttcttttctcaaaacgacagcgtattttgctag

SEQ ID NO: 2627 - DNA, 635 bp, Oryza sativa
  ref <308>: DATABASE ACCESSION NUMBER: AK060438
  ref <309>: DATABASE ENTRY DATE: 2001-12-06
acacgcgcgttacacaccactccccagcagcggcaaagcagccagcgagagatcgaggcaaggcaaccgccatggccaccgtcagcgccgccgcggcgacctccgtcgttgcccgcgccgtcctcgccgggccacttgggctgccgcagatgagggcgaggaggagcgagagggtgaggtgcaactactccaaggaggcggcgacaccggcggcggccgtcaagggagccggcgcgtcgctactggcgatggcggcgacggcggcgcccgcgatggcgctcgtcgacgagaggatgtcgacggagggcaccgggctcagcctcgggctgagcaacaacctgctggggtggatcctgctcggggtgttcggcctcatctggtcgctctacaccatctacacctccgacctcgaggaggacgaggagtccggcggcctctcgctctagagagcctctatacatgtaaacatggtggttgtgaacggtgtaatttgaggagaacgtacatggctgtgttgtatctaaactgttcctattctgagagatgttttagcatcagataaagtactttctccatgggggattgtgcacgcatctggcaacttaacaagataaatttgcagaacacagtcttgg

SEQ ID NO: 2628 - DNA, 767 bp, Oryza sativa
  ref <308>: DATABASE ACCESSION NUMBER: AK060439
  ref <309>: DATABASE ENTRY DATE: 2001-12-06
tttttggccgtccatctctcctctcctcgctctcgctcgctcgctctctcgctcgctgctcccaaatggcggccacctcgagcctcacggcgaccgccgcctcccctccgctcctcctcaaacccgccccttccccgctcgctgcctcctttctccggcccgtctctcgcttctccaggttccagtccgtcaagaccaaggccacagaaaatgatcagaccgaaaagagtcctccgaagggaagcagccttgtctgccaggactgcgaaggaaacggtgcaatagtgtgcaaccagtgcaagggagatggggtgaattctgtcgatcacttcaacggccgatttaaagctggagcattatgctggctttgcagaggaaagcgggaaatcttgtgcggtagctgcaatggtgctggcttcttaggtggattcatgagtacttccgattcaactgcagagtagtgtgaatggtttatattcttcttttggtttgtgtttgtattttgtatttgagcaattttgaggaatctgtaatatttccactttgtgtcatcttgaacaatttgtgctccaggattggggcaatttcaggcaccaaagcgtataactctgtattatgtcactactagaagtatcttattgctctcagcctctcataacgaaagaaacttagtttgggaacttattatgatgaatattaatttgtactgtgttttcatgtggcgtaaacatgggaagttgggaacccagccacaatttggattgtgc

SEQ ID NO: 2629 - DNA, 1629 bp, Oryza sativa
  ref <308>: DATABASE ACCESSION NUMBER: AK060440
  ref <309>: DATABASE ENTRY DATE: 2001-12-06
acgtcagccagagcacgaggtttatctcccaccctctccaatcccctcctcctcgccgccgccgccgccgccgcagcgtccccggcgaccggaggcgtgagatcccgccatggcagcggcagcggaggccgtgaccgaggtggatgccacgaacgaggagggggaggaggaggagcaggtggtgaacccgtgggaggtgtcggcggggaaaggcgggatcgactacgacaagctcgtcgaccagttcggctgccagcgcctcgacgacgcgctcgtcgcccgcgtcgtccgcctcaccgcccgcccccctcaccgcttcctccgccgcggcctcttcttcgcccaccgggatttgaacgagatactggatttgtacgagaagggggagaagttctacctctacacggggagggggccctcgtcggaggcgctgcacctcggccatctcatccccttcatgttcaccaaatatctgcaggatgctttcaaggtgcccctagtaatacagctaactgatgatgagaagttcttatggaagaatttgactgttgaggaaactaaaaggcttgcccgtgaaaatgcaaaagatatcattgcttgtggatttgatgtcgaaaggactttcattttctctgattttaattatgttggaggtgctttttatgaaaacatggttaaagttgccagatgtgtgacatataataaggttgttggaatatttggattcaccccagaggatcatataggaaaagtcagctttcctcctgtgcaagcggttccatcattcccttcttcatttccacatctcttctctgggaatgaccaactacggtgcttaatcccatgtgcaatagaccaggatccttatttcaggatgacccgggacgttgctccaagaattggttaccagaaaccatcattaattgaatcgagatttttccctgctcttcagggggagaacacaaaaatgtcggccagtgatccaaattctgcaatatatgtgacagatagtgctaaagaaataaagacaaaggtgaacaaatatgcgttctcaggtggccgggactcaattgagctccatagaaaacttggagctaaccttgatgtggatgttccaatcaagtacctgaacttcttccttgaagatgacaatgagctcgagcacataaagaaggagtacaaggaaggaaggatgctgacgggtgaagtgaagcagcgccttgttgcagttctatccgaactggttgcgagacatcaaagagctagagcactagtgaccgaggagatggtcgatgtatttatggcggcgagacctcttcccaatatgtttggctgagtctgatgtcaaaaactgcctggagatatttgctactagctggataagatgtccgaagtgatctctagaatttggaagcagcattcgtgtgtttcatgacttatatttgtaggctggccactcgtaatatttggtggcacgcttgattttgcaaatcagttgaggataaatttatttatcttaaagcctgctccatcaatatagaaccaacgtctttttgtattgaatcagaaatgttacaacagttttgagcttaatcagaacaatcaagaaacaaacagctttgtcgtctg

SEQ ID NO: 2630 - DNA, 1080 bp, Oryza sativa
  ref <308>: DATABASE ACCESSION NUMBER: AK060441
  ref <309>: DATABASE ENTRY DATE: 2001-12-06
atggcgcctcctcctatctcctcctccctctcgctcatggcctccaacccaatcccgtcgcctccggtcgccaaaccgggcaggccgctcaccgtcgcggcgtgcagcaacagcagcagcagctcctcctcctcctccccgtcgtcgacctcgtgctcggctgcctggagtctcccggtggcgacgtcggccggcaggagggggctgctcgcgctgggcgcggggttcctggcttcccctgggcttctgtgccccgccggcgacgccggagcgacgcgcatcgagtactacgcgacggtgggggacaagctgtgcgacatgaacgtcgtcaagtcggggctcggctactgcgacgtcgaagtcggcaccggcgcccagcccccgcgcggccagctcataaatgtacactacactgcaagatttactgacgggatagtgttcgacagcacctacaagcgaggacggccactgacaatgcgccttggcgcaggcaagatcctccgagggcttgaacagggaatcagtggtggcggtggtgtgccacccatgctcgttggtggaaagcgcaagcttatgatacctgcaactttggcatacggacctgaaccagcaggttgcttctcaggagactgtaatattcccggcaacaccacactcctatacgacatcttcctggttggattttacaagtgagcatatgatgaaaaggaatatgcatgacttgaacagactaggtgcaaacaagattttcgagtaaattttggcgtttcatacaagaggcgggactacggacagatgaagagaaagggtgcgacatgcctaagcccagacgccgaaagcaaatgcgtcaccggagctccttgggtctccaatacgcagagtactacatttgcaatctgtaccaagaagtgaaaggatatataacaaaccggtcctctgatatactatcaaattggtcttatgttttctagagaagaaaagtcttgtgtttgtgtaagtataacgttgtaaagacatgtctcattattcatactgtcattggtacagccaaacacaacaaaaattcccatcctttgtggc

SEQ ID NO: 2631 - DNA, 664 bp, Oryza sativa
  ref <308>: DATABASE ACCESSION NUMBER: AK060442
  ref <309>: DATABASE ENTRY DATE: 2001-12-06
aaaatcctcctcgattccggcggccgactcaaatccgaatcgccccaagagagagagaatggcggcggcggcgctccgaccggcgatcctccgccgcatccgcccctccccctcccctgcggcggctgcgggggccgcggcggcgtcccagccccacgccctggcgcggtggctcgcgcggcccatgtcctcccacgacgcccacctcacccgcgacgaggtcgtcgaccgcctcctcgacgtcctcaagtgccaccccaaggttgacccctccaaggtgagtcccgaggcgcacttcgagaaggatctggggctggacagcctggacacggtggaggtggtgatggcgatcgaggaggagttcaagctcgagatccccgaccaggaggccgacaagatcgactccctcccgctcgccatcgagtacgtcgccaaccaccccatggccgcctgacctcaccgatccgtcgtgccgtggtgaggcttttcttgatttactatttttgttctgcgggggatgaataattttgctggagtggttcaggaaaacttgtccctggtactctagattatgtgttatgttgccatcgatgtcgatctctaatgtaacatccacaatttcggttttgtgacaatatgatgctagattcttgctcttttgctc

SEQ ID NO: 2632 - DNA, 1568 bp, Oryza sativa
  ref <308>: DATABASE ACCESSION NUMBER: AK060443
  ref <309>: DATABASE ENTRY DATE: 2001-12-06
aagtgcggcaaccgcatcgcatcacactaaccgcaccaccggcagccggcagtcgagaggatggacagcagcaacggcgagcggccgccgcagggagaggatgcgccggcggcggcggcggggtcgatcggagggtacgagtccctgcacaggctcctccagtccaacctctccccggagctcttcaaggaagcaagccggctgctattgggactgaattgtgggcgtgctctagaggccatctcattgcccgaagccacatctgctcttgcaaaagctcataactttgatgtgcaggccttccgttttgatgcagataaagagtatctcaggcaaccacgggttattcgagttggcctgattcagaactcaattgctattcctaccaccagtcattttgcagatcagaagaaggctatcatggagaaagtcaagcctatgattgatgcagctggtgatgctggtgttaatattttgtgtttacaggaagcttggacaatgccttttgccttctgcacacgtgagaaaaggtggtgtgagtttgctgagcctgttgatggagaatctactcaatttcttcaacaacttgctaagaaatataacatggtaattgtgagcccaatcctcgaaagagatgtaaaccacggagagattgtatggaatacagctgttgtcataggtaatcatgggaacataattggtatacatcgaaagaatcacatcccaagagtcggtgatttcaatgagagcacatactatatggagggtaacactgggcatccagtgtttgaaacagcatatgggaaaatcggagtaaacatttgttatggaaggcatcatccccttaattggcttgcttttggcctcaatggagctgaaatagtattcaacccatccgcaactgttggtgaactcagtgaaccaatgtggcccattgaggccagaaatgctgcaattgcaaatagctactttgtcgggtcaattaaccgggttggcacagaggtcttcccaaacccattcacttctggtgacgggaaacctcagcatgccgactttggtcatttctatggatccagccatttctcagcacctgatgcttcttgcaccccatcactatctcgctaccgagatggcttgatgatatctgatatggacctcaacttatgtcgccagatcaaagacaagtggggcttccgcatgactgcccgttatgacacgtatgcttccttgctttcagagtacttgaagccagattttaaacctcaagtcattgttgaccccttgatcaataagagtgcgtaatggtgagaaacttggtgccaaaggagagcactcaattctggaacttacacatttagagcattcagtttgagggaactcttcaaaatctgccattggggaatcgatttcttttttcaattttcgtatgtaaagaaaaatttgtatacatgtttacctcaaattgccttttacttggagttggaaacattgatactcattttgctttctgctgtaaatttgcaaggtatgtatgatctgtaaagataatgcacaccaaacaatatgcc

SEQ ID NO: 2633 - DNA, 1428 bp, Oryza sativa
  ref <308>: DATABASE ACCESSION NUMBER: AK060444
  ref <309>: DATABASE ENTRY DATE: 2001-12-06
aaagaaagtgacccatcttatctgcaaatttgcaagtggtccaaagtatgaggcttactatagtaggggaattccaaccataacagcagagtggctctttgagtgtgtaagacaggatagaattgtcccttttgaccagtttcagccaaaaccacctacttctcaggacagagatgctggtctatgcactgttagtcaatatcccacacaggccgcaaagacaatttccagatttgactgctctgagtcgcatactgaatctcaattaccaagaagcagttcaaaatacaactccggtaatgcctctgttaatgaggaaccaaatgatcctggtgttagtaaaaggaggcgattatccgagtttggcaaagctaatgatacatctggaaacataggaagaactgaggaactccaggatagtacccctgttcctgatgttgcagatgcaatagaggacctactggttcaatcatccaagattcaggacgtacaacctcctaggagtatttttgcacccgatgattctgttcttaatcaagatcaggaaaatacacactcttttggcatttcaaggcactggttgaacatgccacagaagctacacagcacccctgacacgaaagttcaaagtgggaactcagccaccacctctgctgcccctcctgccgcagccactgcctattatcctttcagtgaaactcagactgagtctcaggtcgttggctatgaagaagatttgactggcaggcaaaagattatcgacagagttcgttctcagagcattaatgtcaccccggcagctgaaatgtcttccgatacttaggagacgatcagatctgtccataaattgcagtggaagaacaatagtatcatgaaatctacctgtccagccttgttggtatttttcagcaagacagcaagagtgcaagacagatggaatataatctgggggctattccaaggcagagaacatgtgcgaatggtcaccaagttcagaagattctcatggaatgtcactgagcaaagtgcctgtacctcaactttggcatccagtaaatctaacccagctgtatattaccaagaacgtttcttgattattagatccgagggtagcaaagctaatggagacgctcttttttttttggttgagtacagtggctctggagcgtgtagcatgtcaaaaaggctgtacactctagtatttagcagctcagttggtgacttggtgttatggttggcttatgaaagcaccagaggccaaattttgttcatctctcgtatgatgtacaggggcagatctgaaagacggagaagcaggttagagtccagaactgaagggccaaactttgtcctgtttcgaattacaatttggctgttttgcacaattcaacggaaaatttaacacaggcaagtaatctgtctgtaagt

SEQ ID NO: 2634 - DNA, 315 bp, Oryza sativa
  ref <308>: DATABASE ACCESSION NUMBER: AK060445
  ref <309>: DATABASE ENTRY DATE: 2001-12-06
gcaagtgctatgctcggctgcaccccagggctgtcaactgccgcaagaagaagtgcggccacagcaaccagctgaggcccaagaagaagatcaagaactagagtttgagatatcatttccgcggatcattgaaatcaacaggaagatcagagtttaagtttttttgtagtgtaatgcctcatgttgtatgccgaactttctgtttatcctgttgtatgttaaccttggttacgctggagagtactccagcttattttgatgacataattgactacaaagtcaaggttatatggcccggccttaatttttgtcccc

SEQ ID NO: 2635 - DNA, 1136 bp, Oryza sativa
  ref <308>: DATABASE ACCESSION NUMBER: AK060446
  ref <309>: DATABASE ENTRY DATE: 2001-12-06
tccagtggtgaagagaaggtcctttttgaccttaatgtgccagctgaaagcattgacatggaatcaacaataaccagtaatagttttagagataagctagtgaaaaatgatggaagtgaagaaacagtaaccgatcattctttctccaagagaaacggtgtgcatgctgaaacttctatagaagaacgaactgttggagaacatcatatatcagtcagcaaggatggaaacaccacatttttccaagaatcaataaataatgaaattgataaggcgcagtcctcagaccttataagtgttagcagcaaacatttgattgcagaaactcctcatgttgacaatattgtgtgtccagaactgcgagcatctcctgatggagcatcaagtcctcaagagaccttgataggcaattgtgacaaaatggtttgtattgcagctgagacactcgtttccattttctcaagttctgcatgtactacagattgcccaggaactgacagtcagacagcagctgaggatgtaaacgatgaaccgcagcactctttggattcctatgaggaaattgtattgaatgtagaagagatcagagatgacggggaatccatccctgtgattccacctgataaggatggaccgtcttgtgggatcaagctaagaagaggaagaggactgagaaattttctgagggagataatgcctagacttgtttctctttcacggcatgagatatgcgatgatttgcatgctataggttacgagccccggaaaactcgatctaggaaaacttttggggctcaaggttcatcttcaactagaggaaggccgcccaaacatcgtcccactgccaggaaatgatcaacagcatttcaagttcatactaggatgccacgagacgagcaattcagaagatgaaatataattttaaccttgtgaatattcatgtgtgttgtgcgcatcttcaaactcggtttgttactagtcactaaattgaggatattttctttattccttttacctcttgggagtgctgtgggccgttagcttcaaatttgagttcagcattggcaatgaaggcatagtcataccattataaaatctcagaattttgatcttttaagtattaaccctttcttaag

SEQ ID NO: 2636 - DNA, 1218 bp, Oryza sativa
  ref <308>: DATABASE ACCESSION NUMBER: AK104303
  ref <309>: DATABASE ENTRY DATE: 2002-08-28
acgccctctgaccccgatagaaagggaggaaaaaaaaagagaaggcgaaaccccaaatccgccgcgatggccgccgccgccctcctccgccgctcgccggcggcgcgcgccctcctctccccggcgctctcctcccgcctcgtcgcctccaagccccactcgtcgtcccccgcgccgccgccgccgccgtcgaaggcgggggcgaacaccaagacgttctcgatctacaggtgggatcccgactcgccgtcgacgaagccccacctcaaggactacaaggtggacctctccgactgcgggccgatggtgctcgacgtgctgctcaagatcaagaacgagcaggacccgtcgctcaccttccgccgcagctgccgcgaggggatctgcgggagctgcgcgatgaacatcgacggcgacaatggcctcgcctgcctcaccaagatctcgtcggcgtcctcggcctccacgatctcgccgctcccccacatgttcgtcatcaaggacctcgtcgtcgacatgaccaacttctacaaccagtacaagagcgtggagccgtggctcaagcgcaaggacgcgccgccgcagcccgggaaggagatcccgcagaccaaggccgaccgcgccaagctcgacggcatgtacgagtgcatcctctgcgcctgctgctccacctcctgcccctcctactggtggaaccccgaggagtacctcggccccgccgcgctcctccacgccaacaggtggatacaggacagccgtgaccagttcactaaggagcgcctggattccatcaacgacgagttcaagctgtaccgctgccacaccatcaagaactgcacacacgcctgccccaagggcctcaacccagcgaagcacatcgacacaatcaagaagctccagctcgaggcctgagtgagcagtatatctctcttcatgagatgaaactctgtcgaaaaattgtaatcagccagcctcttgtttctctgcctttttagtccatcgcctgacgaataattgctggaacgcaggattcccttctgggcctccgatctgatgacttccatttccatcagatggagggagcattgtagggagtgaataatttgctaccgtattttacgttttgttctgtatctaattcggtttgttgttcaccgtccattccattatgtcgtgcggtttatgcatgaagtaattcatggattttacctttgtttt

SEQ ID NO: 2637 - DNA, 1688 bp, Oryza sativa
  ref <308>: DATABASE ACCESSION NUMBER: AK060447
  ref <309>: DATABASE ENTRY DATE: 2001-12-06
aagcagcgttgcttgccaaatgcactgaacttccccatgctggaggagtacgattttagaaacgacacagtgaatccagatttggagatggaattaaagccccaggcacgcccaaggccatatcaagaaaagagcctcagcaagatgtttgggaatggcagagcaaggtcaggcattattgtgttaccttgtggtgctggcaagtccttggttggtgtatctgctgcatgtcgtatcaagaagagttgtctatgtttggccacaaatgctgtatcagttgatcaatgggcatttcagttcaagctttggtcaactataaaagatgaacatatcagccgttttacatcagataacaaggagaaattccgtggaatggccggtgtagttgtgactacatataacatggttgcatttggaggtaaacggtctgaagactctgaggagataattgaagaaattcgaaatagggagtggggcttgctcctaatggatgaggtccatgttgttcctgcacatatgttcagaaaggtcatcagcattacaaaatctcactgcaagcttggtcttactgctacacttgtgagagaggatgaacgcatcactgatttaaattttcttattggaccaaagctgtatgaagcaaactggttggatttagtgaaaggtggatttattgcaaatgtgcagtgtgccgaagtttggtgtcccatgaccaaagagttctttgctgagtatttgaaaaaagaaaattcaaagaagaagcaggtcctctatgcgatgaacccaaacaaattcagagcttgcgagtttctaattcgattccatgagcaacaacgtggggacaagataattgtgtttgccgataatctatttgcactaactagctacgcaatgaagctccgtaaaccaatgatttatggttccacaagccatgttgagaggacgagaattctgcatcaattcaagaacagctcagatgtgaatacaattttcctttcaaaggtgggtgataactcgattgatattccagaagcaaatgtgatcatacaaatttcatctcatgctggttcacggcgtcaagaagctcaacggttgggacgtattctcagggcaaagggtaagcatcaagacaggatggctggtggaaaagaagaatacaatgcgttcttctactctcttgtatcgactgacactcaggagatgtactactcaactaaaaggcaacaatttcttattgaccagggatatagcttcaaggtgatcaccagcttgccgccacctgaagaattacctaacctgaaatattacacacttaatgatcagcttgaacttttggcacaattgctgagtgcaagggatgacatgattggcattgagcacttggaagaggattctgatggcaaggcacttatgaaagcacggcgatctgctggatcaatgagtgccttttctggatcggggggaatggtctacatggagtacagcactggtaaggggaaggctggagcttccaagaaaccgaaggacccttcaaagaggcattacctgtttaagaagcgttatcaatgatcttgataaccggcgttgtttccttcctttgcctatctcatctgcaaaaatactgaatacgagttatggttaaggaattccaatgattaacgtggagtgggggaggttcccattagcgc

SEQ ID NO: 2638 - DNA, 1341 bp, Oryza sativa
  ref <308>: DATABASE ACCESSION NUMBER: AK060448
  ref <309>: DATABASE ENTRY DATE: 2001-12-06
cccacccacccttcttccttctccagctctcgcctctcgcctcgtccttgttcgtcatcgcgctcgctcgatttctcctcctcctctctctcgatcccctctactgcgagagattcccttgcttgaattctcctcctcctcctcctctccctccggtgagcggtggcggcggcggcgaatccgagctcctggtggtgtcgtggggggcggggtgattccgtgatggtcgcccgccgcgctctgcggcggacacggacatgcagcgcaacctctcctccatctcctcctccgccgcgtcgccttcgccgctctcaccggccgacggcttcctctgcgtgaaggacggggtggacgagatgatcaagtacgtggccaacgagccctccgtcgggctctacttcgtccagcagcacgcgcaggcgtccatgcccctcctcctcgacgtcaagggaaaggttgcagaaaagattcatgaggtaacattgcatactgaagatatagaggactctatctgtgcagtgaggtccatggcagagtttggacttccaattgctgatgatatgatcaaggacataaataaatctctcaagataatgtcaaagacccaaccaaagagggggttaatccagaaccccacttgggggttccaatcagggaaaagctcaggaacatgggaagaagatttgggcacaaccgacggaggaagcagccgtaattatttctcttccatgttcaacactgcgaagcagaaggcatccactctcagatggccacagcctgatttcggaacaaaagatgacaccactgaggagtcagagtcatctgcagctcctgaatcatcacaagctggtggacatggtgcatcgacaccctcagatacagagaaggatgatcttcctgtttcaagccagcttttagataacaatacagctactatgaaggagagctcttcgactgatatctccaaatcggtggagaattataacaagttcaaggaagaacaagaactcaaactacaagaatggcttagacagtctgaagaagctgatgataataaagagtgaggtggttctagctggtgcaacctagtacatttgctagagcacataccatgccatgttgtatcctatacatgcttacttgatgcacttccagaacttcagatggtaactgtttatgaagcagagcttgtaatcatgatgaggtacataatttatctgcctattagggaacgctgtaaattgccatactctgtttgccgttgatttatttattgccaaggcacagagatcatcaatgtactgtagaatagcctgaactattgatcatgcattttttttc

SEQ ID NO: 2639 - DNA, 943 bp, Oryza sativa
  ref <308>: DATABASE ACCESSION NUMBER: AK060449
  ref <309>: DATABASE ENTRY DATE: 2001-12-06
atctaaaaaaattcagaccaaatgagctcccaggggtgaaaataagcttagcatctgtgctagcgttcatggcaattggatggccactgattattctcaaatcaggaatagctggatggttcaagttctggttcatgccatggatggtttatcacttttggatgagcacctttacgatggtacatcacactgctcctcatataccattcaagacatcagaagagtggaatgctgcacaggcacaattaaacggcacagttcactgtgactatcctcggtggatagagatactttgtcatgacataaatgtacatgttccacaccatatttctccaagaattccaagttataaccttcgtgctgcctatgattccataaaacagaactggggcaagtacatcaatgaagccagctggaactggcgcttgatgaagacaatactgactaaatgccatgtttacgacaaggatagatactatgttccctttgatgaggttgcgcctgaggaatcccaaccaattaaattcctcaagaaggtcatgccagattatgcatgatgaaatcaatactgttggctggtgtttgcatagagaaacaatcacaattacttagtgagtcacatcctaaattctaactagaacggcacatgcccgaaattttgactgcaaattgctttgttggattgtgttacacggcttcagagcggttgccaaaagttcatttagaagaaaggctgtcagaagttatcctataaaaaaaatagtgcgcttccaaaccaagcgcctttttcagttgttcggtacatcaaatatgtattgtataccttggaggcttggaatataaatatgggcacgctagtgctacagccatttgctactgatgtaccagcaaccattggtttgtaccttgattaattcatgacgatggtctaattctgttgtcc

SEQ ID NO: 2640 - DNA, 582 bp, Oryza sativa
  ref <308>: DATABASE ACCESSION NUMBER: AK060450
  ref <309>: DATABASE ENTRY DATE: 2001-12-06
atttcaacaaccagaactaccacaacggtcagcaccacaatcaccacgccaacaaccaccaccaccaaggtggcaaccgtggtggcgctcatcatgttgggactccgcccaatcaacagcaaaccaagcctgagcagcacccgcagctgccaattggagccaccaagcagcctcccggccctcgcatgccagatggcacgcggggtttcaccttgggcagagggaagccgcaaccgtttctaccggttctgtgtgcagccgtcgagccttgaaccctattcatcgtcacgatagggtatgcggcggcgagtgctggtgttgatagagatggttggaggtcttctcttttcggaacatggtttacttgattttgatgggtgtgtgcctaggccaagtgttttggaaccgtctgttatggtattgtcatgtgttttgaagccaaacattgttgttctggttggtacagacttggtgagttgcatggttaagttggctaccactactaccattttggacccaagttatatatggggaagggtgtaagacattattcatgaaaaatgttacaaaaaaaaaacatag

SEQ ID NO: 2641 - DNA, 1145 bp, Oryza sativa
  ref <308>: DATABASE ACCESSION NUMBER: AK060451
  ref <309>: DATABASE ENTRY DATE: 2001-12-06
agcaaccgtcagtcaagggattgaatgagctcaaggactcaacagtccaaatggcttcaagcatgggcaacatcgatgcgccagttgatgagacagtctttgacatcgagaaagaaatcgatgacctgctgcctatcgaggtcaaggagcagaggttgagcaacttgctccaggccacaatggttgggggttgtgttgctgctatgccattgctcaagaagatcccgacttctgtcctctggggctacttcgccttcatggccattgagagcttgcctggtaaccagttctgggagaggatcttgctgctcttcactgctcccagcagaagatacaaggtgttagaagagtaccacaccacgtttgtcgagaccgtgccattcaagacgatagccatgttcacactcttccagacaatgtatctactcgtctgcttcgggatcacatggatcccgattgctggggttcttttccccctcatgatcatgctgctggttccagtcaggcagtacatcctcccaaagctcttcaaaggtgcacatctgactgatctggatgcagcagagtatgaggagtcaccagctataccgttcattgccgcgcaagatattgatgttgcattggcgcgcacccagagtgcagaaatccttgatgacattgtcactagaagccgtggtgaaatcaagcgcctgaacagtcctaagatcaccagctccggtggcacaccagtggcagaacttaaagggatccgcagcccttgtatctctgagagggcatacagcccttgtatcaccgagttgaggcatgaccgcagccctctaggaggaagaggcagcccaaggaccggtgagacccgatcgtccaagttgggcgaaggatcaacaccaaagtgaagcaagaatgatgcactgctcatatgagctatgcaactacctgaaatcagctatactaatgatttctgtataactatggcgtacggttatatgatgtcttatgatcaagtatcaagtatgagtctatgagaatgtttatgtatatctctagcctagtatatcaccccttcctctttttttggtgtatttcctgatttggagcaccatatgtgtaatctctgaactaccagaatattagagtgactacttggt

SEQ ID NO: 2642 - DNA, 1420 bp, Oryza sativa
  ref <308>: DATABASE ACCESSION NUMBER: AK060452
  ref <309>: DATABASE ENTRY DATE: 2001-12-06
aatttgcccccaactcctccccattcccagatccccggtcgctcactcgctctccagtctccacctcctctcgacgctcgacaggaagacgcgccgccgccgccgcccatccgacgccgcgacgccgacgtgccgtgcgtccgtgacgccgccgccgccaatccctcccgccttcgcgtcgtgccgccgcgccgtcggtggtcgcccgtcacccgtcgccggctcgccgcgtcttttgggtggcgccgtcgcgcctcgtatccaatccaccccgcgccgcgccgcgccgtgccgccgcccccaagaggccgagacgcccaagtcccaactcccaacggccaaagtaatcgttgaaggtgacaggtcaacatcccacgtcatgcctctcctccgccggccgccggctgctccccaccgcaccccgatccaccatgacaagcgccttcacctcttcagtacacacaacacccgtcatagagctaccgtctcatctctccctgtcacctgccttcgcatccgatacagcagcagcaacccggttcgacacctttgtggcattccgtcgagcaggtgccatgcggctgctgatccggcgccctccaagataccaggaggtggcagcggtgcattggaggctggagttgtaggttggcgggatctgcttttgcaggttggcgaggtgctgtcgcttgggttcccagtgtgggtggcgtccgcttgcgccgttgcgctttggcggccaccggccttcctctgggtcagtcccatggcccagattgtcggcatttcctttaccatgctgggaatgggaatgacattgacattagatgacctgaaaactgcactattgatgcccaaggagttagcatctgggtttttacttcaatactcggtgatgccactgtcaggatttctcatcagcaagctattaaacttaccatcctattatgctgctggattgatattggtgtcctgttgccctggaggcacagcaagcaacattgttacatatttagcaaggggaaatgttgctctttcggtactgatgacagcagcaagcacttttgctgcagcgttcttaactcctcttctgacatccaaactggcgggacaatatgttgcagtagatccaatgggattgtttgtgtcaacatctcaggtgctggaaatcaatctgatgttatactgctgaatttccttactcctagctaagttggatatacatgaacgcaggttgtcctagcacctgtgctacttggtgctctacttaatcagtactgcaacggtttagttcagttagtttctcccttgatgccattcattgctgtggcaactgtagctgttctttgtggcaatgctatcgcacagaatgcttcagccattctatcatccggtctacaagtggttatgtctgtttgtt

SEQ ID NO: 2643 - DNA, 1335 bp, Oryza sativa
  ref <308>: DATABASE ACCESSION NUMBER: AK060453
  ref <309>: DATABASE ENTRY DATE: 2001-12-06
gtatgcatccaagttgctataaaggttaggcaggcaggcccccgctcaccaggagaattagctagggagctaggtgagcacgagagcagcaatggcggcgacggcgagcaacaagagggtgatcctgaagcggtacgtgacggggctcctgtcggaggatgacatggaggtggtgacgacggaagtgccaccgttggccgtcgtcccagcagggtcgggggcggtggtggtgaagaacctgtatgtctcctgcgatccttacatgcgcaaccggatgacccgtcatgaggtgcctagctatgtctcagactttatcccgggagaggttttggcaaattttggcgtgatgagggtgatatcatccggccacccagatttcaaggcaggtgatcttgtttggggaataaccggatgggaagaatacaccgtgattaacaatccggaatcacttttcaggatcaatcaccctaaacttcctctgtcctactacactggtattttaggaatgccagggcttacagcctatgctggattctttgaagtgtctaagccgaagaaaggtgaatatgtctttatttcagcagcatctggtgccgtaggtcagattgttgggcagcttgctaagatcataggctgctatgtggttggcagtgctggttctgacgaaaaggtcagcttattgaagaccaagtttggctttaatgacgctttcaactataagaaggagccagacctcgaggcagccctaaggaggtattttccagagggtatcgacatctactttgagaatgtgggcggtgagacgctagatgcagtgctacctaacatgcgcctaggtggtcggatcgcggcatgtgggatgatctcgcagtacaacctagagcggccagagggggtgaaaaacttgttctatatcgtcaccaagcgtctgcgtatggaggggttccttgtgtttgacttctatgacaggtactaccagttcgaggatgaaatggctaggtacctaaaggaagggaaggtggcatacgtggaggacgtcgttgaggggctcgatgcggcaccggcagcactcattaagctcttcaccggccgcaatgtcggaaaacagctcgtcgccatcgcacgagagtgatacggtgccacactgctcggcacgcaaattagcattaccgaggagtactactgtagttgttcagatttcagaaatgggggcatcccgtttgtcttgtggggttcagaaaatagaaataaagaatagatatgttcaacgatttgggtgacttatccagtattgtgctgtgttagaaaattaagtacaacgatttttgtttgttg

SEQ ID NO: 2644 - DNA, 1109 bp, Oryza sativa
  ref <308>: DATABASE ACCESSION NUMBER: AK060454
  ref <309>: DATABASE ENTRY DATE: 2001-12-06
gagagcaaaagcgattcccgtagtagcggcgagcgaaatgggagcagcctaaaccgtgaaaacggggttgtgggagagcaatacaagcgttgtgctgctaggcgaagcggttgagtgccgcaccctagatggctaaagtccagtagccgaaagcatcactagcttacgctctgacccgagtagcatggggcacgtggaatcccgtgtgaatcagcaaggaccaccttgcaaggctaaatactcctgggtgaccgatagcgaagtagtaccgtgagggaaaggtgaaaagaacccccagtgggtagtgaaatagaacgtgaaaccgtgctgagctcccaagcagtgggaggggaaagtgatctctgaccgcgtgcctgttgaagaatgagccggcgactcataggcagtggcttggttaagggaacggaacccaccggagccgtagcgaaagcgagtcttcatagggcgattgtcactgcttatggacccgaacctgggtgatctatccatgaccaggatgaagcttggatgaaactaagcagaggtccgaaccgactgatgttgaagaatcagcggatgagttgtggttaggggtgaaatgccactcgaacccagagctagctggttctccccgaaatgcgttgaggcgcagcagttgactggacatctaggggtaaagcactgtttcggtgcgggctgcgcgagcggtaccaaatcgaggcaaactctgaatactagatatgacccaaaaataacaggggtcaaggtcggccagtgagacgatgggggataagcttcatcgtcgagagggaaacagcccggatcaccagctaaggcccctaaatgaccgctcagtgataaaggaggtgggggtgcaaagacagccaggaggtttgcctagaagcagccaccctttaaagagtgcgtaatagctcactgatcgagcgcccttgcgctgaagatgaacggggctaagcgatctgccgaagctgtgggatgtcaaaatgcatcggtaggggagcgttccgccttagagggaagcaaccgcgaaagcgggggtcgacgaagcggaagcgagaatgtcggcttgagtaacgaaaacattggtg

SEQ ID NO: 2645 - DNA, 901 bp, Oryza sativa
  ref <308>: DATABASE ACCESSION NUMBER: AK060455
  ref <309>: DATABASE ENTRY DATE: 2001-12-06
aaacagtgtgagatcgagctgaaaaaaaaagagaggccacgaagagagctcagctgctgcctctagcttacttggtgataaggaggaggaggaggaggagggcaccgacatggccgcagccacggcgtacaccgtggcgctcctcggcgccaccggcgcgcgcgtccccgccgctccacgctccgccgcgcttctgccgcgccgcggcggcgtgctccaaccgctgcgcctccaggacgcgccgcgactgtccctgctccgcgtcagggccgcctccgacgacacctccacctcggccagcggcgacgagctcgtcgccgacctcaaggcaaagtgggaggcgatcgaggacaagccgacgttcctcctctacagcggcggcgccgtcgtcgccctctggctcaccaccgtcgtcgtcggcgccatcaactccgtgccgctgctccccaagatcctggagctcgtcggcctcggctacaccggctggttcgtctaccgctacctcctcttcaaggagagcaggaaagagttggcgaccgacatcgagaccttgaagaagaagatcgctggaacggagtaattaagcagctgcatttgtccggggaagttttggggggtgactctctagagtgcttgctgctgcttcctctgtgtgatgtttgtatatctctacgagaatatgttctgctcccatgtgcagtaacagcgtagtgcaaaaactgtatcaaacctactatcagttgtttcttcgaaattcaaaacaatttcttcgctttcttgttgcgtggaagtgttcatataatctggcgtatgacaatgagaatatatatctcggagaatggttgatcgactcattagaaaagaattgcaaatgagttgatgataaacatctctgaaatgc

SEQ ID NO: 2646 - DNA, 1612 bp, Oryza sativa
  ref <308>: DATABASE ACCESSION NUMBER: AK060456
  ref <309>: DATABASE ENTRY DATE: 2001-12-06
ctctccctcttcccgcggtgggattcctgcaaatctatatgcatttgatcagcaatggtggttctagcagctagtggttggactggtaacagaccccttcatatgcgtgatattagggtgacagttgagagtaacggcacctttgtcataaacttcaaaggagtaaggggaagtcccatggtttgtgccatttgtattcgaaaacggtagcaatagcagaacaagtccttgatagacaagctgatcaactgagaagtgtttcccaaaagtatgataatgccaataaattatgggcagctgccatatctaacttggaaaataaaatcaaggtcatgaaacaagagcaaacaatgctatctcttgaagcacatggccatgcaaacgctgttcctgaactgagtaagatggtaggggctgttcaagcattagttgtgcagtgtgaagatcttaaactgaagtactatgaagagatggccaagagaaagaaacttcataatattgttgggagaccaaaggttcaggactgcagggagcttttgtaccgttcaactccacgaatatgggctgctcgcatggtcttcctgtgctggcgagggcatcggctggtactgcaggcttggccgctgcaaggggtgccggcgccgtcggcagggcccagctgtccctgctcccaagggacgaccatgactgttgcagccatagtggtgcccacgctttgcaaggcagtgaatgtgaattaacgacatggtcagccacaaagcaggtctgcttggggattgccagattagcaagatcagtttcattggtggaggtctgtcacctggtgcacttcgtcatcggatcttcctcctcaactccgtcatgtgcagatccagcgcacggtgcgtcaccgttgtgaatgtcaaaccggttcaccttgcgatcatccaccggcttcctcgacgtcgtccttgaaagcgaccctgtgcagacaaacatctttcgctgaaaacttcagcaaaggagcagttgaagaataagtgattgccatcttcgtcttgatgcaagcagattccgtatgcacaatgttcttcatgagcaaatttgtcattgttggtagtcgatttttgaagataagccaggcaaaaattgttgcactcagaggggggctgaattcttctacacaaattcccagattggacaaggggcagaagcagaggtattgatctgatcatatagaggcagagccttccatgtgagagcttgagtgcaaccagcaggcggactgtactgtcatctatcttcttcgtcatcgaggtgcactgcattggtgacatcaggtcatgggagtggcgagatgagactgtgtactagagatgcctactttgtagatatcttgagacagtgcaggtacctaatgacattgatcggcatggggcgggagtagcacccttggactacactttattattgcacactattgaaatttagttttagactatgtttatgcatagcacaagttttgcgttgaacttgtaaaggtcatttaaagttctggtccttattttcacgtggaatttgtggagctaggatggtttggattgtgtggattatatcggtattgacttttctt

SEQ ID NO: 2647 - DNA, 666 bp, Oryza sativa
  ref <308>: DATABASE ACCESSION NUMBER: AK060457
  ref <309>: DATABASE ENTRY DATE: 2001-12-06
tagcataggggtaatccaccgggccgaggatggtgaactttgggttgccttctgtttctgtgaaagacaatggttgtgcaaaaggtgggaagtggagaaggtgaggccattccgattaggggacagagtacggatacgacctggccttgtaaccccacgttggggatggggggaggagacatatgagagtaaaggtgaggttgtaggcgttgatgcaaatgggaaactgaggatcaagttcagatggagggatgggctttggattggagatcctgccgatatcgttcttgatgatatcccatcactgacagaggcttctaatggcttttgttcatagtctcgcggtattcttttgaccccattacctgatttcttgctcccttccattgtgcagtatttcaaatttagtaaggtcccaatcatgcaatggagttgcaagttgcacataggcaccatcgcataggcatggcgggttgtatttcgtgttgataaagcagggggaaaagaacgaaatgaaggctgaaaaagaactttgaaatagacatgataaccaccacctaggttttttacatgtataattatgggcctgactccttttgtatcatattacccgtgtacaggtttggacctgaacattaatttaattgatagtgtccttggatcttt

SEQ ID NO: 2648 - DNA, 618 bp, Oryza sativa
  ref <308>: DATABASE ACCESSION NUMBER: AK060458
  ref <309>: DATABASE ENTRY DATE: 2001-12-06
taacaggagtgatgagcggaagagaattgaaaatgcaggaggagttgtcatttgggctggtacttggagggtaggaggtgtactggcaatgtcgcgtgcatttggcaatcgtctactgaagccatttgtggtggcagagcctgaaattcaggaagaacttgtcaatgaagacttggaatgcctcgttcttgctagcgatggactttgggatgtcgtggaaaatgaggaagctgtttcccttgcgaaaacagaagacctgcctgagtcggtggctaggaaactcacggaaatagcctattctcgaggcagcgctgacaacattacatgcatcgtggtgcaatttcaccatgataaaactgaataataagatgggactagagctgatgaaaggttgaaggtttttctacttcaagctactttccagcagtccaaccacagagggggttccccaggagatgttgctcctgtagcatttgctaaggattgtttcgttgattcttttccttgtgtaggaatcattttttgttttcagaggtgttacgaacagaaaattttatttcgagtgtaacacacagttttaattggatggatactaataaatcaattgcttgtttacct

SEQ ID NO: 2649 - DNA, 563 bp, Oryza sativa
  ref <308>: DATABASE ACCESSION NUMBER: AK060459
  ref <309>: DATABASE ENTRY DATE: 2001-12-06
agttgggtaagctagggtttaggtctcggcgcgcggcggaggggaggaggaggcgatggcggcggcggcggcggcagcggcggctgaggaggagatcgcggtgaaggagccgctggatctgatcaggctcagcctcgacgagcgcatctacgtcaagctcaggtccgaccgcgagctccgcggcaagctccatgcatacgatcaacatttaaacatgattcttggagatgttgaggagatcgtgacaacagttgagattgacgatgagacatatgaagaaattgtgcgcaccacaaaacgcactatccccttcctttttgttcgaggtgatggtgtcattttggtttctccacccctccgaacggcatgaagtatgaaggaagctcctgccgattgtcaaccatgagtaatgtgtattttttaatcaatggcatgtgttatgtgctgaagtgctactatttctgatggattctagttttagcatatgatacaattgtgtaacaatttctgatcgaggtgctagtttctactgtcatgttgaatcaaccttttgttaccagatt

SEQ ID NO: 2650 - DNA, 498 bp, Oryza sativa
  ref <308>: DATABASE ACCESSION NUMBER: AK060460
  ref <309>: DATABASE ENTRY DATE: 2001-12-06
aaaaagatgcgggagtcatggaattgtgtacttgccttctatgctgctgacaagctgcttgagttcaagccaaaagggattgaaacttatatccatcctgctgttgaacgtgcacatttccacaaagaagacagaatgtggcaagagtacgaaaactgatgaaacatgaagatgctgggattcttagggattgctgctgtattacgatcaaagatttcttcagagctaacgatagagctcatccttcagcaactgagttggttctatcaacttttggagaatttgttggagaaagctaaagccattgggtactaaccgtaacagaatgcggagttatctgatagtgtggagattctggtgcactattgtgagcagactctaggaactataaacagttttcccgcacatgatattgactctaggaactcaaaatagttttgtagtggaagcagggttacaagtgacaagcttcacataattcttttgattgaactgatc

SEQ ID NO: 2651 - DNA, 1317 bp, Oryza sativa
  ref <308>: DATABASE ACCESSION NUMBER: AK060461
  ref <309>: DATABASE ENTRY DATE: 2001-12-06
gctggatgctttgagtactttgcagatcttgcagaatccttggacaaaaggcaaaatgcacctgtctctcttccaatggaaaactttaaatgctatcttcggaaagagcctatcggtgtagttgggttgatcacaccttggaactatcctctcctgatggcaacatggaaggtagctcctgccctggctgctggctgtacagctgtactaaaaccatctgaattggcttccgtgacttgtttggagcttgctgatgtgtgtaaagaggttggtcttccttcaggtgtgctaaacatagtgactggattaggttctgaagccggtgctcctttgtcatcacaccctggtgtagacaaggttgcatttactgggagttatgaaactggtaaaaagattatggcttcagctgctcctatggttaagcctgtttcactggaacttggtggaaaaagtcctatagtggtgtttgatgatgttgatgttgaaaaagctgttgagtggactctctttggttgcttttggaccaatggccagatttgcagcgcaacatcgcgtcttattcttcataaaaaaatcgctaaagaatttcaagaaaggatggttgcatgggccaaaaatattaaggtgtcagatccacttgaagagggttgcaggcttgggcccgttgttagtgaaggacagtatgagaagattaagcaatttgtatctaccgccaaaagccaaggtgctaccattctgactggtggggttagacccaagcatctggagaaaggtttctatattgaacccacaatcattactgatgtcgatacatcaatgcaaatttggagggaagaagtttttggtccagtgctctgtgtgaaagaatttagcactgaagaagaagccattgaattggccaacgatactcattatggtctggctggtgctgtgctttccggtgaccgcgagcgatgccagagattaactgaggagatcgatgccggaattatctgggtgaactgctcgcaaccctgcttctgccaagctccatggggcgggaacaagcgcagcggctttggacgcgagctcggagaagggggcattgacaactacctaagcgtcaagcaagtgacggagtacgcctccgatgagccgtggggatggtacaaatccccttccaagctgtaatgtaatatgcgcatacgcatgacacgcccatctgttctgatcgtttggaataagaggccatagtatgacgggatggactttgtgcatatcgatgtttgatttgccatgtgctgagcctggaaataaaaaaggttatagttggagact

SEQ ID NO: 2652 - DNA, 1204 bp, Oryza sativa
  ref <308>: DATABASE ACCESSION NUMBER: AK060462
  ref <309>: DATABASE ENTRY DATE: 2001-12-06
acgccaacacacataggagatagaaaaggtgacacaacccacagaaacccaaaccccccaaaaaagccatggccatgtctcctctcaccaccatcctcctcctcgccgccgccgtcggcgccacctgcgccacctccgccaccgcctcggccgcgccgctccacggcatagcgaacgacctcctcccggagtacggcctcccgcgggggctgatcccggagacgatcgcgtcctacaccttcgacaacgacacgggggacttcgagatccggctgacgagcacctgctacatctggttcggctcccacctcgcctacttcgaggacgccatccgcggccggatcgcgtacggcaccatcacggggctctccgggatccaggcgcagaagttcttcgtctgggtctccatcaccaccatcgtcgcccaccccgaccagggcaccgtcgagttccgggcggggttcatctccgaggcgctgccggagtcggacttcgccgaggtccccgtctgcggcgccggcgcgcggctccgcggcgccgccgggctcgcacgccagctcggcctgcagctccccaccgtcgccgaggcatgagcttctgagttgggaatcgacctgcagcaaacttgagcacctccggttcgatgttgttacaaaataaagaagacgcgcccttgagctcaggaggctgtgcaaggtttgctgtttagtgtgtacgttttgtgtggttatttatttatgaacatggatgctatccacaagtctaagatcaatatatttctaccgcgcccgggtagagctatagattaaagtcggaccgtgttgtcgtcggattcatgtgagttctgatggcatagggggtccgaatgcagtgaaaatttgcatggaacttcatatatgtagtgtatttatgtgtatgtaaatggcaagtacctggctacctgctcccatgttttaaggagaagagttggatcttgaagtttcaacctcgtggcagttggcgctccccctctctttcccagtactttcatacatgttgcatgaatcctatttaaacgaatgtcttgcattcatgattcatccaacaacaacaacagtcatatggcgatgcctgttctttctttggaagtacgtaacccgtgccaacagccacatttgataagtgaattaaaaagctaatgaagaattgaccagatggtttggcg

SEQ ID NO: 2653 - DNA, 682 bp, Oryza sativa
  ref <308>: DATABASE ACCESSION NUMBER: AK060463
  ref <309>: DATABASE ENTRY DATE: 2001-12-06
ctgcccatatgatggttgtgggaaagcctacattcacagttacaaattgaaccttcatctaaaaactcagcatcctgaacatggtcaagaagagaatggtaggattgctgcacatgcaagtgagcatgctgtaaatgatcgtgccaatcagtataactatgctgagattgtcgaccttgcaccgaatccaaaaaggagcaagacaaattcagggcataagaccccctcatctaataaagcctacaatgtcaagatttctagcgtgttgcctgctgatatcagtggagtgaagaatcagtggccaggtaagtatgaagatgacagtgaagagacagaagaagaccagggcaacaacattgaagatggctggagatatggtaaccagaatgccgatgatgaggaaacagaatatgaagattaaccaaacgattctcttttgtcctttactaacatcctgctgcaatatatgcactaactagacagtagacgtggtggctgatacctttactaatctgcgtgcattctgaaccctggaagtagattagagaagtgctgttcttgagagtagtagaatcagatggccgtgattgtgtggtttggtcataaatagtctttgtatgcgacttattctcgttcagttttttatgctcgatctatgtattcaatcataagttgtgttatc

SEQ ID NO: 2654 - DNA, 453 bp, Oryza sativa
  ref <308>: DATABASE ACCESSION NUMBER: AK060464
  ref <309>: DATABASE ENTRY DATE: 2001-12-06
aaggctatggtggaacttgacggggcaccgtttaagaagtttgcttcattgcgagatgagtggtccctcaagaaccattacatcagccctggtcccatccagttcagtggccctggaagcaacgatgcgaaccacaccttgatgttggaactcggcgccgaggcatagagagacacgacgataccgacgtgtaccttttaaattttttgttcttacagttttgaaaagttgagatggaacctcgcagagtgacctgcaggctccatatttgtggagtgctcaataagaggttccattgggagtttctgtggagtagagatatgtgtaccaataataactgatgttagctttgcatgatccattgctccatttttacacagaagttaacttggttttattgtagctctgggttttgttcaactggatgcgacgctataattatgggttttgttc

SEQ ID NO: 2655 - DNA, 1797 bp, Oryza sativa
  ref <308>: DATABASE ACCESSION NUMBER: AK060465
  ref <309>: DATABASE ENTRY DATE: 2001-12-06
tgtgagaagcttcaaacaagccaagcagttgtgccatctgattccaatgtgactgctacagaagtgaaagaacttgctgggagttcatcgtccccatcactaaagactggtggagtatgcaatattacttttgtaagggtggcagaaaaacatcggcgcctcctcaatgtgttcattcgacagaatccaagtttgctagaaaagtcactttctatgatgttgaaagtaccaaggctgatagactttgacaacaagcgtgcttactttagatcacgcattaggcagcaacatgatcagcatctttctgctcctttgcggattagcgttcgtcgggcatatgttttggaggattcatacaatcagttgaggttacgtcgtagccaggatcttaagggccgcttgactgtgcaattccaaggagaggaggggattgatgctggtggactaactagggagtggtatcaacttctatctagagttatttttgacaaaggagctctgctcttcaccactgttgggaacaacgcaactttccagcctaaccccaactcagtttatcaaacagagcacctttcctatttcaagtttgttggtcgagtggttgccaaagccttatttgatggccaattattggatgttcactttacccgttcattttacaaacacatacttggtgttaaagtgacttatcatgatatagaggctgttgatcctgattactacaaaaatttgaagtggatgctagagaatgatgtaagtgatattcctgacctgacattcagcatggaccctgatgaagaaaaacatattctttatgagaaaaatgaggttactgattatgagctcaaacctggtgggagaaacatcagggtcactgaagaaacaaaacatgagtatgtcgatcttgtggctgaacatatattgaccacagcaattcgccctcaaattaatgctttccttgaaggattcacagaattagttccaagggagctcatttccctatttcatgataaagaacttgaactcttgatcagtgggcttcctgaaatcgactttgatgacctgaaagcaaatgcggagtatattgggtattcgcctgcatctccggtcatcctgtggttctgggaagtagttaatggtttcagcaaggaggacatggcaagatttctacaatttgtgacaggaacatcaaaagtaccattagaaggtttcaaagcgctacaaggtatttctggtcctcagagattccagattcacaaggcttatggagctccagagaggcttccatctgcccatacttgctttaatcaactggatttaccagagtattcctcaaaggagcaactagaagagcgtttacttcttgccattcatgaggcaagcgaaggttttggttttggctgacgtattgaacaagtgcattgtgtatgcactgggtcattggttttctgtttgccatgtacagattttggcggcaaaattgagagcatggtcaccagatgctacacattgcataaaccaggcgaaaagaacgcttagagaatgtcctggatgtgcgtcagaatccaaaaaattttggagtagttgatcgggggatgccaggcgggtatagctggggggagctctgactacaacagtggtgatagatgttaacttgtttccatttgccctgtgtggtcaaagggcggagtgtaaattcattgaatgcttaatcccaaccattgctttcctactgcttcgatcctcagattatggggccaaaagcagtttgcaaataaataagattagtttctggtt

SEQ ID NO: 2656 - DNA, 1723 bp, Oryza sativa
  ref <308>: DATABASE ACCESSION NUMBER: AK060466
  ref <309>: DATABASE ENTRY DATE: 2001-12-06
aagaatgcctcactgctgggatggcagtcgcacggtttgatttctcatgggtggatgcttcatatcatcaggagacccttaacaatctgaggaaagctgcacaaaatgtcaataagctgtgccctgtaatgctggatacactgggtccagaaattcaggttcacaattcaactggtggaccaattgagttgaaagctggaaatcatgtcaccatagcaccagatctttctaaagctccctcttctgaaatcttgccaattaagtttggtggtcttgcaaaagctgtcaagaagggtgatactctttttattggtcaatatctcttcacaggaagtgaaacaacatcttcgtggcttgaggttgtggaaacttctggagaaaatgttgaatgtcttgtgaccaatacagctacacttgcaggccccatgttcactttgcatgtttcaaaagcccatgtcagtttaccaactttgagtgattatgataaagaggtcatttcaacttggggattacataacagtgttgatattatatcactttcccatacccgctctgccgaggatgtcagggagcttagatcttttcttcaatctcatggccttcaggacacacagatatatgccaaggttgaaaatactgagggtttggatcattttgatgaaattctccaagaagctgatggcgtcattatttcacggggagacctgggaattgaccttccaccagaagatgtgttcatatcccaaaaaacagctattaagaaatgcaatcttgctggcaaacctgtgatcatcactagagttgtggacagcatgattgacaatctacgcccaacacgtgcagaggccactgatgttgcaaatgctgtcctagatggaacggatggcattttgcttggtgcggagactcatcgaggcccttatccagttgatgcagtgagtactgttgggagaatatgtgcagaagctgagtctgtgtataaccagttggttcacttcaagaaattagtgaagcatgtaggtgatccaatgccccatgaagaatctgtggcatcttcagcggttcgcactgcaatgaaggtaaaagctgctgcaatcgttgtgttcactttctcaggaagagctgccaggttagttgccaagtacaagccaccaatgccagtgttggccgttgtcttcccacgtgagggctctgatccaacaaagtggcgttcttacggcacaactcaggcaaggcaatgttttgctgcaagaggtgtctaccctttgatggcgagtactgaggaggctgaaactggtgggctcaccagggaagagtacgggataaaacttgcacagaactatggtcgctcggttggtatgctaaagccctatgacaggttgatcattttccagaagatcggcgattcatctgttgtcaagatcatcgagtgtgacagttcgtaaaagattagacacctaccacattccgtccaagagtttcaaccacacagaggcggattacctttttgctttctttcttgtttgacatgatattgagactagaatagggaaggccaattgtgctgtttggcaatttacccattttaggtccatacttgctttttcaataatttcattcaagagcctatttacacattgcaacaatccaattttgtggacaaaatacaggatacagggacatttggttacttggtgtggatgtgcagtacttatttcgcatt

SEQ ID NO: 2657 - DNA, 1208 bp, Oryza sativa
  ref <308>: DATABASE ACCESSION NUMBER: AK104304
  ref <309>: DATABASE ENTRY DATE: 2002-08-28
acgccctctgaccccgatagaaagggaggaaaaaaaaaagagaaggcgaaaccccaaatccgccgcgatggccgccgccgccctcctccgccgctcgccggcggcgcgcgccctcctctccccggcgctctcctcccgcctcgtcgcctccaagccccactcgtcgtcccccgcgccgccgccgccgccgtcgaaggcgggggcgaacaccaagacgttctcgatctacaggtgggatcccgactcgccgtcgacgaagccccacctcaaggactacaaggtggacctctccgactgcgggccgatggtgctcgacgtgctgctcaagatcaagaacgagcaggacccgtcgctcaccttccgccgcagctgccgcgaggggatctgcgggagctgcgcgatgaacatcgacggcgacaatggcctcgcctgcctcaccaagatctcgtcggcgtcctcggcctccacgatctcgccgctcccccacatgttcgtcatcaaggacctcgtcgtcgacatgaccaacttctacaaccagtacaagagcgtggagccgtggctcaagcgcaaggacgcgccgccgcagcccgggaaggagatcccgcagaccaaggccgaccgcgccaagctcgacggcatgtacgagtgcatcctctgcgcctgctgctccacctcctgcccctcctactggtggaaccccgaggagtacctcggccccgccgcgctcctccacgccaacaggtggatacaggacagccgtgaccagttcactaaggagcgcctggattccatcaacgacgagttcaagctgtaccgctgccacaccatcaagaactgcacacacgcctgccccaagggcctcaacccagcgaagcacatcgacacaatcaagaagctccagctcgaggcctgagtgagcagtatatctctcttcatgagatgaaactctgtcgaaaaattgattcccttctgggcctccgatctgatgacttccatttccatcagatggagggagcattgtagggagtgaataatttgctaccgtattttacgttttgttctgtatctaattcggtttgttgttcaccgtccattccattatgtcgtgcggtttatgcatgaagtaattcatggattttacctttgtttttgtgatgttgaacatgcccttcatatttttaacccggaaatcaacaagcattctccgt

SEQ ID NO: 2658 - DNA, 1050 bp, Oryza sativa
  ref <308>: DATABASE ACCESSION NUMBER: AK060467
  ref <309>: DATABASE ENTRY DATE: 2001-12-06
taaagagggaagatgcagtagataaattgctaatcggggaagttttcacccaccatgagtatggctgtagggtgaaagaccatggtactctgaccaaacttctcgaaatttgttggaaccttctgacttgactgaggagcagaggaaacttctagcatcaaatgtcctctgtcaagaacagctgaaaaagattttacatgacactgatctagaaagcattgaacagtgctacacggagatgagcaccgtagatttcaacctggaggaagccctgaatacagtcctaatgcaagccatgccccagagcaaggagaaacaaatttccattgaccgtgattggcctgcagaagtatcatgtatgcacctctgcggggacaatttaaggcttcaacaagtcctagcagacttcctggcatgcatgcttcaatttacacagccagctgaagggcctattgtgctccaagtcatccccaggatggaaaatattggatctggaatgcagattgctcatctagagttcaggcttgtccatccagctccgggcgttccagaggctctgatacaagagatgttccgccacagcccaggtgcatctcgagagggccttggcctttacataagccagaagctcatgaagacgatgagcggcacggttcagtacctccgggaatcagagagctcgtcgttcatcgtcctggtagagttcccggtcgcccagctcagcaccaagaggtgcaaggcttccacgagtaaattctgaacttagggctatggccaaaattcttgtgggtgctgtattgttgttgttgctgctgctgctattagcagatcaggcagtctgaggagtacgttagctgaagatgtatcagatgtgtgtagcttgtgaaagtgaaggtagtggttggatagatgtatttgtcacgttgatgtctggagagctagtgagcgagctactaggtgttagtgtaatttaaccggcaaatgtatgaacgaattatgaataaaatcttcacttgtgttgtcatgaataaaatcttcacttgtgctgtc

SEQ ID NO: 2659 - DNA, 932 bp, Oryza sativa
  ref <308>: DATABASE ACCESSION NUMBER: AK060468
  ref <309>: DATABASE ENTRY DATE: 2001-12-06
caggtcaatctcggagtcctaatggcaacccagcatctccaaacggacctctagcatcaccaggtggcactgaagcttcacctcatggccttccttctccctcagacagtatagtagaatcacctgcaactgcatctccacaagtttctgaaattagccagaccagtcctgaaggaaatgatacaaccagtggggtcgatactgaaaatgggagtgaaaaacaggacactgatggcaagaaccatgtggaaagtaaagacggcgaaggggagcctgagcaaaccgaagcttccaaaggtgatggagatggtgcaattaccccggaagatggttcagccgtgactgaaaatccaaagtcctgggcagactacagtgatggagaagctgaggctgttgaggttgcaagctgagaaaagataaaccttctcagtacacacagaaaattttacctcttttacagatgagactttttcttctggacagcatacaaatgcaaaaccggcacactgctattttgtgtagagaattagttcctttcctgatccatctcatggtatgtagcatctacacgtgcttctgcagttccaatggccttgaaaggttatgcaatggcagagaactttgaagatctcttcctgagagtgatcgatgagccctttttttcagcttgctttgcatttgctccaaagaaacttgggaagagcaagcacacgagagattggttagcgcatatataccatagttcatagtcttccctttttgcctatcattttgttcaacttgttattatgtactggaccatctgtcgacataacacatgtgaacttatttttactctgaattttgatatattagaattgttgaaccatgtaaattgtaaagaaagtggtgcctatttggcctcttgcttgatgtgaattttacccaagatg

SEQ ID NO: 2660 - DNA, 1398 bp, Oryza sativa; identical to SEQ ID NO: 438
  ref <308>: DATABASE ACCESSION NUMBER: AK104305
  ref <309>: DATABASE ENTRY DATE: 2002-08-28

SEQ ID NO: 2661 - DNA, 1513 bp, Oryza sativa
  ref <308>: DATABASE ACCESSION NUMBER: AK060469
  ref <309>: DATABASE ENTRY DATE: 2001-12-06
tttacagcaagatgtttatcatccttgccaaccaacagtgcgtttgatgggcaagactgtctcagtttgtgagcgtagcaaggagcacagggtgccaactatggggaaagggtggagtgacagtaccattgttgaagaccacccatcatcaacttcatgtcattttccacaaaagagattgtttccttgtcaggattctgtgacaccaagtgttcatgtcaagggatctcttgatatattacaaaggattcccagtgttactctaccagaggcaagggctactataggcaatgttcaaaaccgaaggctgcaaccaataaatactgtttcttcaagtgtcagagattgcatttggaactctggcagtcaatctgttcgtcaagctgaaataaaaagggcaaccactatcaatgtcaactccagggccaggcatataaacctacatcaaccgccacaggtgataagcacatcccagaatcaacactgtcagttaagcactccatcgatcttacgtgggaaagattgcagttttttgggtccagcagtaactcaatcttcttcctttccacaatggactctaaatacgggcatccaggaaaagtaccagaaatccacattttcttatgatgatcctacctctgctcctatttaccagtcatgccaggtacctggagcaaagctatcttccacatcaatgatatcctttctagactatggtactgataatgctgagtttagtagatctctaccacaagcgtgcccttctcttgctactagtttgccaattaattttgtttcgaccgttagcccaacatgtaccgtcaaacctactaacacaggttgcagaaagggtgttgttttcaccaatcaaagaaagagaccagcttacatcaataatgttgcacatgaacctgcaaagaaacttatggcgaacaaacaggacttagtggcaccagtgtttgaagagacgaaaaatcgttcacttggctggtcactggatgatgcaattggtcctcggatacttgactttggtagtaaagtagcaggacatggcttggaaatgtcaacaaacgaaagcaattgtgtaagggctagttcaggtccagttcctgttcttgaaacaaggtcaatgactggaaggctggctacagcagctagaaccatgttgaagccagatcaaactcttaatgatcattccaagctgttatactccacattctcggttgataacagtattaattcagctgtattatagtggaaagcaagaaataaaacagccaagtgttctcgttccagtttcagttatggagtttttggtatatgaatagtcgcaaggatactgctagcgcaagagagttgtatcagctgttcgacatttctacatgttagtttagctattactggattacttctattttgtaacttctccggtcaaatttggagaatattcattacgatattaaatatacatatcatgccatatctgacacaagcaaggtaacacttgatttgt

SEQ ID NO: 2662 - DNA, 1383 bp, Oryza sativa
  ref <308>: DATABASE ACCESSION NUMBER: AK060470
  ref <309>: DATABASE ENTRY DATE: 2001-12-06
aactggccgaggatgcaaagactgcttgtcgtcagctggacacttacattgagtacaaacgctgtgagggtgttgcagagattattgtagcgccatcaatgtctgagggcttccgcagcattgttcagaccatgggtctaggtaacttgaagcccaacattattgtgatgcggtaccctgagatttggcgtcgcgagaatctgatacagataccgtcaacatttgttagcataataaatgattgcattattgctaacaaagccgttgtcattgtgaagggccttgatgagtggcctaatgagtaccagagacagtacggcactattgacctctactggattgtgagagatggaggattgatgcttcttctgtctcagctcctgctcacaaaagagacctttgaaagctgcaaaatccaagtgttctgcatagcagaggaggatactgatgctgaggagctgaaggctgacgtcaaaaagttcttgtatgatcttcgaatgcatgctgaggtcatcgtcgtgactatgaagtcatgggaacctcatatggagagcagtagcagtggtgctccacaggacgattctcaagaggcttacacaagtgcacagcgaaggatcagcacatacctctctgagatgaaggaaactgcacaaagagaaggacatccactaatggaggacggaaagcaagtagttgtgaatgaacagaagattgagaaattcctctatacaatgttcaagctgaactcgacaatacttaggtactccagaatggcagctgtggtcctcgtaagcctccctccaccaccattaaatcaccctgcgtatttctacatggagtacatggatctgcttgtagagaacgtcccacgcatgttgatagttaggggatacagaagagatgttgtcacattcttcacatgattagagatgtataccttctggcggctctactgccatatgattgttgtaacatcatcatagcaaagtgggcaagcagattttgtgcagattttacagctgaaagtcagaagccatcaccttgaaggctacctaccctgagataggagatctgctgggcctttcgctggcatattgggtacgtcaactacagtatgtccattctttttctcggattcacatagcaagcttcaatacagttaattgtcacaaattttgtagccctggtgttccccatacgtgtaacaatcttagaaacgcaacgcttccttttgcactgaaacagtagcaatggtatcacattttttaaaatatatttccagttgatgtaatgagcaaactgaggtggccattaatgttggcatgttgttgattggcatgacgtttatactgatacacgtgaaaatcagctgaaattattggt

SEQ ID NO: 2663 - DNA, 1310 bp, Oryza sativa
  ref <308>: DATABASE ACCESSION NUMBER: AK104306
  ref <309>: DATABASE ENTRY DATE: 2002-08-28
acacctgtgtcagatctcggaatcactccgccgccgccgccgcggagctcgccgtcgactcctcctcctcctcctcctctcaccatggcggcgctgctgcttcgtaggctcgccgggacccaccgcggccgcgtgcctctggccgccgccgccgccgtcaccggtggggcggcgctcttctgcgcctcgtctcccccaaccatcgcgctcatggaggagaagggcgaggatgccgctgctaaagttgcgcttaacccagacaagtggctagagttcaagctccaggagaaggcaacagttagccacaattcacaattatttagattttcgtttgacccatctactaagttgggtcttgatgttgcttcatgtctcataacaagggctccaataggggaggaagtggagggaggaagaaaatttgtcattcgcccgtacacacctatctctgatccagattctaaaggatattttgacctgctaatcaaggtttatcctgatgggaaaatgagtcagtatttcgcaagtctgaaaccaggagatgttgttgaggtcaaagggcccattgaaaagcccagatatagcccaaatatgaagaaacaaattggcatgatcgctggtgggactggcataacaccaatgctgcaggttgtcagggctatcctaaaaaaccctgatgacaacactcaggtttccttaatttatgccaatgtgtcaccagatgatatcttgctgaaaagggaactagatagacttgccagtagctaacctaatttcaaggtattctacacggtggacaaaccatcaaatgattggaggggtggtgttggctacatatccaaggacattgccttgaaaggtttgccacggccaggggaggattctctgatccttgtttgtggtcctccaggtatgatgaatcatatatccggtgacaaggcaaaggatagatcgcagggcgagctcaccggcattctgaaagagttaggatacactgcagagatggtatacaagttctgagtgcgtcttcaagacgttagaatgctgacatgcttgctgcaatggcgccatggcaatgatcaaataaaccacagctgaacacttcttttattatgccacagcagttgggttccagacttgagaaagttttgacatttctcaataatgttcattgagaatcacatctttttgcgtggtttgcttctgcgatatgttcttgcggcccatgcacctggatatgcattgcttcagccgtttatgagatggtctggaattgccgtggatgatcttatagagatagatccattcac

SEQ ID NO: 2664 - DNA, 1325 bp, Oryza sativa
  ref <308>: DATABASE ACCESSION NUMBER: AK060471
  ref <309>: DATABASE ENTRY DATE: 2001-12-06
tttgctccaatctcacaatttctccgccttctcgtcctcctcgccgaaccacccccatcgacccacacaaccagcgaaccggaaggatttcactcagctgagtttcctgcctccatccccacggcgatggcggaggaggcgaagaatctggagacggcccgggccgaccgctccgtgtggctcatgaagtgcccgaccgtcgtctcccgcgcctggcaggaggccgccaccgccgccgcctcctcctcctcctcctcggacgccgccgctggcgccaactccaactccaacgcgaaccctaaccccgtcgtcgccaaggtcatcgtctccctcgacccgctccgctccgaagatcagcagctccagttcaagatggagatggctcaaacaggcaatggcaatacaccaaagagttactccttgaacatgttcaaggattttgtgccaatgtgtgtcttttctgaatccaaccaagggaagctttcatgcgaagggaaagtcgggcacaaatttgacatggaaccgcacagcgatgaaaattgatggtaggagtttttatgatattatatatgccatattgatctgcttcatatggtagaagtatttattgtacagattcaccttttgcccttgtctgtttttaggtacttgcgaatgacaatggaatgagcatgaggccgttgcctggcttggtgggtctgatgtcttctggtccaaaacagaaggagaagaagccactaccagtaaaaccatcagacatgaaaagaacgagaagggatcgcagggaactggaaaatatcttattcaagctttttgagaggcagccgaattggtctcttaagaatctcatgcaagaaactgatcaaccagagcaattcttgaaggagatattgaatgatctgtgtttctacaacaaaaggggtccaaatcaagggacgcatgaacttaagcctgaatacaagaaatctacagaggacgctgatgctactgctacttagaagtcttatgcttcggtctactagataggagtcctcgtccagtgtggactccaatccgttacttgctgcgttcaaggaaatcttggatacttcgtttatagtttgtttcttgagaaacatattttgtacgcatcaagcgatacatcttttggtgttactggcggccatatcttagacccagatttcggggactcgatatattcgtgtccatcagagtttagaaacaaggatgttgaaatttgtgtgtataatgtattttagctcttctaggcaaactaacatgatgattttcatgatcattaaacaccttgacctactcttccctgc

SEQ ID NO: 2665 - DNA, 1589 bp, Oryza sativa
  ref <308>: DATABASE ACCESSION NUMBER: AK104307
  ref <309>: DATABASE ENTRY DATE: 2002-08-28
atcatagacgattttatcgatgaacctgaaatagacatggcttgccacttgagattatttccctttactcaactactagtattggttctgtacaaaatcgccgccgtaggggcagatcctgcaaacgcagaactatccacaaagattacccaacactctccattgtacaacccacagcctcaagactttccaaacgaggagctctaccgcaactatctagtcatccagcggttcaagaagacaatcacttccgaccccaagaacatcaccgccacctggaccggccatgacatctgcggcaacacgacctacctcggtttctactgtgcagcattgcctgggcgtactaagaagcccacggtcactgtggtgatctttaacggttatggcctgcgtgcaccgaagctggaaggatttattgaccatctccccgatcttgcacttttccatgctgcctccaacgacttcggtggtgacatcccctacctcacaggcctcgcctacaactacaagatcaatgtcgacagcaatctccaaatacaggatgactttagtcgtgacatggtcgggtcgcatgtaacaactaaagttcatggttattgcgttaatttagatctagatatcacatttcacctccggcccggaaaagacgacaagaaaggacgaagcatccccggtgccacagattctaaggcgctcctcctcaactacaatcacctgtccgggccattaccggtgaacatcggtttctccaagttaagctacctggccctcgccaacaacaggctcaccggcgcaatcccgccatcaatcttgcatttgcaagactccctcctcgaggtgctcctcctgaacaaccagctctccggctgcctcccccacgagctcggcatgctcaccaaggccgcagtgttcgacgccggcatgaaccagctcaccgggccgatcccctcctctttctcatgcctcaccagcgtcgagcagctcaacctgggcggcaaccgcctctacggagagatccccgacgcgctctgcaagctcgccgccgtcccagccggccgcctcgccaacctcacgctgtcgagcaactacttcacgtcggtcggaccggcgtgcttgtcgctgatcaaggacggcgtcctcaacgtcaggaacaactgcattccgggcttcgccaaccagcggcggccggcggagtgcgcgtcgttccacagccagccgaaggcgtgcccggcggcgagcgccacccacgtggcgtgccccgccggagctgccaacgctgcggcggcgccggcggacagggtggtcaaggactactccagctacgtgacgtacgccaccctgcacgagtgagcccggcgccacggcacgggcgcacgacgtgcgtgcatgcatgcagtaggggacagctagaagctagcgtctcggggtggtatttgctcttgtattcttgtgttcgtttgttgtgctcgtgagtcgtcattgtggtttgttttctctgcacgtgtggctagctatggctgtcacgtctagatctcacctcctgtactcttgtgtactgtactatgtgaaaatcattggtgattact

SEQ ID NO: 2666 - DNA, 820 bp, Oryza sativa
  ref <308>: DATABASE ACCESSION NUMBER: AK060472
  ref <309>: DATABASE ENTRY DATE: 2001-12-06
actgcgtctgcgtggtagctagctcgcgagccaagaaagcccctacctcagctaagctgccagcccagcctcccatggcgcactccctcgccgccgccgcctcgtcctttcgccgcccgccgcacgccggcgactgcccggacaggtgactaatgtaatttcgagacggagctcagtttccttcaacagccagagaataagttttatgtccattcgttcaaggccaagtcagcttcgttttaagatttgctgctcggctaagaaagagacagtcgacaaggtttgcaacatagttaagacacagctggcactccctgagggaactgctgtcactggtgaatcaaaattctctgaactcggtgctgattcactggatacggttgagattgtgatgggcctcgaggaggaattcaacatcactgtcgacgaaacaagtgcgcaggacatcgcaactgttcaagatgcagcaaacctgatcgagaagctcgtgctggagaaggctgcataaaaaccatgcacctcaattcatcagccctttcggaaacgccaaagggctgctgctatgttttgatctcgcaattgcgtttcgggagagaatacgttcttctaaaatttatggccaactttgcattctatctgtattgtatgttcagtcattcctgctaccccatttattctttccttgatcattgaaggtagggttttgtactccaaaggctacatgagggaaattaattgagaccacttgttctgtgccacttccatttcatgtactgtatactgctgaagaaaaatcaatactaataacttgtcaagagtc

SEQ ID NO: 2667 - DNA, 1182 bp, Oryza sativa
  ref <308>: DATABASE ACCESSION NUMBER: AK060473
  ref <309>: DATABASE ENTRY DATE: 2001-12-06
ctcgccgctgcctcctcgctccgtgcgcatcctccctcctcctcgcgacggggcaacgaggtcgtccccttccgctgccacccccgctgcccacgccggagattaggtcatccccagccaccgccggagccgtggtcttccccggagccgacgtcgtccccagttgccgctggagccgagttcttccccatccgtggtggccgccgaagtccaccgctgcccccgacgaagtcgaggtcttccccaaccgcggcctgcccccgccagcgcttgaatacactcaaccgatccaacatcctccacttgcgccggcgagagccttcctccactccagcgcctcaccgtacactccaccgcagctcggtcatccttagtcgcacaccgatacacgaaggcgaggtcggagcccctggtgccgccacgagcgagaggcaattcgccgttgcggccgcgctcgtcgtgcaaataccggaacgcaagtggtccctttcctgccgccgcaagcgagcagttgcgtcgctacatgcacccccaaggtcttcctccaccgatctgtcctatccatcagtgggatttcatcaacgacaaacattgatagtggttctgacaaatattcatgtatagtggttcgatctacatcagctcggcccggtaatgcaggaagctttacgtcaccattgcttgcagtgacaaggaataccactaatttaagtgctctcgagttaaagaagatagcaagcttggatgaggtatgctttgctcaattgtaagcagtagcaagctaaggttcaacagaaccatgagtacaagcagcggaaggatgcatcaatctacaattgccataggaagatgcctgatgctaatgtcttctcaagcttttggatttctaatagtggaaccctttccttgagggaattccatgaaagatattggtctccagattttaagattggtagatcctttcgtggctgccacttcaactgcagatcacatgaacttctgtggacccacggcaggagctgtatacacctcattggtgatcatgtaaatgctatttttagttgctggccatgaaggatatatttgaagtattgttggtgaagatctgagtcttttttcctgataagatattgtaggctgtggggtttaattcaataccataaatacaaatatcttgctttg

SEQ ID NO: 2668 - DNA, 1056 bp, Oryza sativa
  ref <308>: DATABASE ACCESSION NUMBER: AK060474
  ref <309>: DATABASE ENTRY DATE: 2001-12-06
aaggctgctgctgctgctgctgctctctccgcgctgcgcttccgctgctctagggtttatctcctgctgccgctcggatttcgcggcgagcaatccaccggagatggcgcccgtgcagttctccgccgctggagttggcgcggtggccttcgctacgaaggggatggcctcccgcgacgcgctccgcctcccgccgccggcggccgtccgggtgctccgccaggcgccgcggccgtcacgcggcctcgtcgtcagggccgccgccgccagcgtcgccccgaagtatacaacgctcaagcccttggctgatagagtgcttgtaaagattaagtctgctgagcagaagacaactggtgggattttgcttccttcggctgctcagtctaaaccccaagggggtgaggtagttgccattggggagggacgaactgttggggataacaaagtggaagttagcattcaggttggatcccaagtcgtatattcaaaatatgctggaacagaggtggagttgaatgattccaaccatctgattcttaaagaggatgacatcattggtattctggagactgatgatgcaaaggacatgaagcctcttagcgatcgtgttcttatcaaggtcgctgaagctgaagataaaactcctggtggcctattgcttactgaaacaacaaaggagaagccgtctattggaacggtcgtggctgttggccctggtcctctggatgaggaaggcaagaggattccattgtcggtctctgcaggcagcactgttctatattccaaatatgctggcagcgagttcaagggctctgatggcacgagctacatagtgttgcgggtgtcagatctaatggctgtcctctcctgaattaccaggtgcgctcagctgagccatccatcgtactatgccctttcagcaaccatcttttttggaaaatattgctcctggagataacattaaagccactcgaatccccttttgttacaccaaaattggggtggtggtatatcatactgataaattataatgaatgccaactttttttggttgtt

SEQ ID NO: 2669 - DNA, 678 bp, Oryza sativa
  ref <308>: DATABASE ACCESSION NUMBER: AK060475
  ref <309>: DATABASE ENTRY DATE: 2001-12-06
acaatccagtcctcgaactcgaacccagccatggcgaccaagcagagcctcctcctcctcctcgccctcctcgccgccgccgcggccgtcgcctccgccgtcaccgacgtcgagtactgcaataagggcaagaagtacccggtgaaggtgagcggcgtggagatcgtgcccgatccggtcgcccgcggcgagcccgcaaccttcaagatctccgcttccactgataaaactatcggtaaagggaagctggttattgatgtgaaatacttcttcttctatgtccactcggaaactcgtgagctctgtgatgtgacttcctgcccggcaagtggtgacttcttggtagctcatcagcaaaccctgccatcatacactccaccaggctcttacaccatcaccatgaagatgctgggtgataacgatgaggagctgagctgcatctcgttcgggttcagcatcggtttcgctgcatcagaagccaccatctgaatgcatccagaggcagaattcagaaatatcacaccatggatgtaattacaaaagcacctatgtatcttagatcatagaactcaaatacaatgcgcatctgccaacacattgtgttcaactaagacgttttatccagagttgaacatacaataaaaacatcactcactagtgtaaaaaaaaaaaaaaaac

SEQ ID NO: 2670 - DNA, 522 bp, Oryza sativa
  ref <308>: DATABASE ACCESSION NUMBER: AK060476
  ref <309>: DATABASE ENTRY DATE: 2001-12-06
acacgcgcgttacacaccactccccagcagcggcaaagcagccagcgagagatcgaggcaaggcaaccgccatggccaccgtcagcgccgccgcggcgacctccgtcgttgcccgcgccgtcctcgccgggccacttgggctgccgcagatgagggcgaggaggagcgagagggtgaggtgcaactactccaaggaggcggcgacaccggcggcggccgtcaagggagccggcgcgtcgctactggcgatggcggcgacggcggcgcccgcgatggcgctcgtcgacgagaggatgtcgacggagggcaccgggctcagcctcgggctgagcaacaacctgctggggtggatcctgctcggggtgttcggcctcatctggtcgctctacaccatctacacctccgacctcgaggaggacgaggagtccggcggcctcccgctctagagagcctctatacatgtaaacatggtggttgtgaacggtgtaatttgaggagaacgtacatggctgtgttgtatct

SEQ ID NO: 2671 - DNA, 1260 bp, Oryza sativa
  ref <308>: DATABASE ACCESSION NUMBER: AK060477
  ref <309>: DATABASE ENTRY DATE: 2001-12-06
aacagcacataccattgcaagaaacccttcacatcttactgaaacagctactactcctgctagctagctcaagctcaagctcaatctcaagctctttccactaagctccgtgtgtctagctcatcaatacctggctagctagctagttgcttgatcgatatatatcctagctaagtgatggacttcgacttgttcaattcctacccggaatcgcagcttgacctgatgagcacgatgcttcagctggagcagctcactgcgctcagtgaccagtcgctgttcatggcggcgccgacgtcgccgccggtatcacccatggggaccccttctccccagttctcaccaccgccgcagatgtcggtcaccaccaccaccgccggtggcggttaccaggatcagtataactccatgccggcaacgtacggcgccggtgcgggcgtgcaccagctggacttcgcgatgtcgtcaccgggctccgactccggcgcgccgcagggctcgtcgtcgtcgtcctcgtcggaggcgatgcgggagatgatcttccacatcgcggcgctgcagccggtggagatcgacccggaggccgtgcggccgccgaagcggcgcaacgtgcgcatctccaaggacccgcagagcgtggcggcgcggctgcggcgggagcgcatcagcgagcgcatccgcatcctgcagcggctcgtcccgggcggcaccaagatggacaccgcctccatgctcgacgaggccatccactacgtcaagttcctcaagtcccaggtgcagtccctcgagcgcgccgccgccgccaccggcgccgccgcccaccgcgccgccgcattcggcgccgcctacccagctgccttacccatgcagcaccacgctccgtggtagctgcacgctactagctcccacatggatagatggtgatgagacaatcgtttcccattactatcgcgtctcacatgcttgtcgccgtcgtcgtcgtcgatcgatcaatcaccactgctgctgctgcagcatgcatgatcacatgcatgtgtaaattagtagtacaagatgtaggagactacctgattactagtaccatttattattgctgttgtacgttaccgcatgctagctcgtacgtacgtggctgctccgagcttttgttggactcgcagcccgtacgtgcatgcgcgtttcattcgaccgtaggcttgtactgtactgtacacatttccttctattctacccccctgttcaatgcagtacgtttcccgt

SEQ ID NO: 2672 - DNA, 992 bp, Oryza sativa
  ref <308>: DATABASE ACCESSION NUMBER: AK060478
  ref <309>: DATABASE ENTRY DATE: 2001-12-06
aaaagggcatcaactgcacgtatacacatattaatgccatctcatacatcatgcatgaagttacaagagttttcttgggtgcctcctcaatactatcaaatggaacagtttattctagagtcgggacagcatctgtggcaatggttgcacatgcatttggaattcctgttcttgtgtgctgtgaggcatacaaatttcatgagagggtgcaacttgattctatatgtgctaatgagcttggtgatccagatgtcattttgaaagttcctgggaaggcagatttgggccatcttaagaacttggcagacaatgaaaatctccaactgttaaatcttacgtatgatgccaccccttctgactatgtgtcgatgatcataacagattatggaatgcttccacccacaagtgtacctgtcattgtgagagagtatcgcaaagaacagctgtggatatagatgtgctgcattatgacaacaattttggtaactgttgttggcttgctgcccaaagtgcgggatgcgtgaaacatgtacttctgtttgagagctctcagccgccaaaccttttttcttttgagcttatcaatttgtttgccacaagatggtccaattttgatatcaccatggctccgtctatgaagattgcactctggcacctctagaggggttatgttggtggtagtcatcaaacgttgtgatgcaactatgctcgtacctatgtcttcctgagcctcctctggtcatgcgcgtgatagtaactgggacctgagatgaattcgaagctatatttgtaacagtattcacctgtccaatacatcatgtagattggggggacttcgcgattacgcatgaggtatcgggatagggataggttgcggaaatctcatacgttgcctgagcacttcgcgatgcctataatttactagtaatattttgcaacttggggatagttagatacataccgattttcaagctgcatggaattatggtgac

SEQ ID NO: 2673 - DNA, 1156 bp, Oryza sativa
  ref <308>: DATABASE ACCESSION NUMBER: AK060479
  ref <309>: DATABASE ENTRY DATE: 2001-12-06
tcgttgaaacatcctaacattattaggtttaaggaggttattttaaccccaactcatcttgctattgtcatggaatatgcctctggtggtgagcttttcgagagaatttgtaagaatgtacggttcagtgaagatgaggctcgctacttcttccagcagcttatctcgggagtcagctactgccattcaatgcaagtatgccaccgtgatttgaagttggagaatacactgctggatggaagccctgctccacgcttgaaaatatgtgactttggctattctaagtcttcagttctccattcacaaccaaaatccactgtaggaacccctgcttatattgcacctgaagttctgttgaagaaagaatacgatggcaagactgctgatgtatggtcctgtggtgtgactctatatgtcatggtagttggtgcatatcctttcgaggatccagaagagcctaagaacttccgtaaaacaattcagcgtatcttgaatgttcagtactcaattccagaaaacgtggacatatctccagaatgtaggcatctaatttcgaggatttttgtcggggatccgtctttgaggataacaatcccagaaatacggagccatggctggttcttgaagaaccttcctgcagatttgatggacgatgatagtatgagcagccagtatgaggaacctgatcagccaatgcaaaccatggatcagatcatgcaaattttaactgaggccaccataccacctgcttgctctcgaataaaccacatcctaactgatggactcgacctagacgatgacatggatgacctcgattccgactcagatattgatgttgatagcagcggcgagatcgtctatgcgatgtaagtcatcgaccaacaagagaactgaaggggcagggtgccctgatgtgtaccttgtcaaagtactagcagccctttgtgaaaagaatcgttctgtattttgcttagtttcttgccgtggaaccccagcgatgttcccatgaactcatgatgctgttgtaattgaactggggttacttccctggaataacagctttcctcctccccccattgctgaggcctggttacctttaagcttcaacacatgcgttacaaatgtgcaagttatttaatgtcagaaatttagagtc

SEQ ID NO: 2674 - DNA, 1436 bp, Oryza sativa
  ref <308>: DATABASE ACCESSION NUMBER: AK060480
  ref <309>: DATABASE ENTRY DATE: 2001-12-06
ttcacagtccatcagacctgatggtgctatagttcggccaccgatgggggcaccaatgcctgggctgcatgattcaacagttcctccttttgctcctgaatatgttggtcagcctcatcctcttggaactaaaaagaacaatagtgttggcaatggaccacatggaggctcaagggctttatttgaaggtggattcaattcttcacagaaacattccaagtcatgtgcagcaaatcctggcagaaacaacgttagccacaaagattttgaagataatatgaagcagtttccagtgcctactcaccttgacggtgaaggtcatcaaaggggtcctagaccttttgaaggaggtttaggtagacctgatggttttgctgatatattacctggaaggcctccattgacaaatcatcctggtccatttcctataggcttcggagaagattacccaaggaaacccaattcgactgttagttatcctgactttatttcgcctggtgcagaatttggtcatcgtggtattgatggaatacctactcttagaaatgcaggtccatttcttcaagggatgacaggcgggcctggaggtttgcataaagatcagctaggctctagtaactttcctgggagtggacaccatgattttgacaactcagagctccctcgtactcgattccatcctggtgatgcttttgtgccaagaaatctgcacggtggtggttggggtggtggccaattgcatggcattgagccttctgactatggctacagaggtcacatgcatgcagatgatccaaatattccaattgattattctcggcatggttttccaaaagaatctgcccactttggttcgggtggacacttgagagatggagatgtcagttggtgccgtatatgcaatattagctgtggtacagtagagaacctgaatatacatgtagagaccagggaacaccatcaacatgcaatggacattgttctgaaaatgaagcaagatgttgcaaaggggagaaagaattccttcaggaattctggtggtcccaagtcattcaagaaaaaagtacctgggaagggtagctttcgtggaaataggcgttagaactcctgttatcttgttccttggagacaggtgtcggaaggttgctggtaatgcttctggaactatctgagaccattgaaattgggtcttgtccatacattttggttaaggtagtgctgcatgtttggaatagaattaccatgttctcctgtccatacatgtttggaactatctgtacttatgttgccgttttaccatgttgacgttttaccatgttgtcatgtggactttacctgcttttgtggagttcgttgctcctatattggatgctcaactcacaactctgaggatgcttaccttggacctgcaatactttaattttgtacacctggat

SEQ ID NO: 2675 - DNA, 1217 bp, Oryza sativa
  ref <308>: DATABASE ACCESSION NUMBER: AK060481
  ref <309>: DATABASE ENTRY DATE: 2001-12-06
acatgatgatgcaattattgataagatctgagaatgatggcattctctgccctattccgcaatacccgctctactccgcgtcaattgctctccatggtggttctcttgttccttatttccttgatgaagagacaggttggggactggaggttgatgagcttaagaaacaattggaggaggctcagtctaagggtatcactgttagagcacttgttgttataaatccagggaacccaactgggcaggttcttgctgaggaaaatcaaaagaaaattgtcgaattctgcaaaaatgaaggacttgttcttcttgcagatgaggtgtaccaagaaaacatatatgtagaagacaagaaattccattctttcaaaaagatcgcacgatcaatgggatacacagatgatgatcttcctttagtatcattccaatcagtttcgaaaggttactacggagaatgtggaaaacgaggaggctatatggaagtaactggatttagcgctgatgtaagggaacaaatttacaaggtggcatcagtaaacctgtgttccaacgtgtctggccaaatactcgctagcctcataatgaacccaccgaaggctggggatgaatcctatgaatccttcatggtagagatagacgggatcctctcctctctggctcgacgtgcaaaggctttggaagaagccttcaacagcttagaaggcataacatgcaacaaggccgagggtgcgatgtatctcttccctcgcatctatttgccccagaaggcaattggagctgcccaagcagctggtactgccccagatgcgtattatgcccgccgccttcttgaagctactggaattgttgttgttcctggttctggatttgggcaggttcctggaacgtggcattttagatgcacaattttgccacaggaggacaaaataccagcgatcatatccaagttcaaggagttccacgagaagttcatggatgaattccgggattaagaatctcgtaaactgaaaaattgctggcattggatgtacttctaaaacttggcttttctgccttctgtcaaaggcaatgccatcaacttcaaatcaaaataataagaccatccattcgcaccaccctggattggtcagtgtaactcctcctcagctcttgttaggtcgaatgaaaacctgcaaaatcctggagaattgcttacttgcaaaaagaagttaaaaacc

SEQ ID NO: 2676 - DNA, 1658 bp, Oryza sativa
  ref <308>: DATABASE ACCESSION NUMBER: AK060482
  ref <309>: DATABASE ENTRY DATE: 2001-12-06
ttgccaggtgcttgaattgttctgtagggtaatcgatcgcttgacgttccgtgatcggacaactgaaaatgtgttactgtccagcatgccacgtgatgagtttgacatcaatgggtatacaagcgacctccacaggctggaatcgagaaccacgtcagagagattgctatccgtgacagagactgggaaagttcctgatttcgaaggggtgcagccattggtgctgaaagggcttatgtctagtgttagccatggatctgcaattgaggtgttatctaggattaccatcccaacatgtgattctatatttgggagtcctgagacaaggctgttgatgcacatcacaggtcttcttccatggcttgggttgcagctcaccaaagatgcatcttccctcgggtcatcttcacctatacaagagcagaatcagaaagcttactatgtggcatccaacatttcggtgtggtgccgtgtcaaatctttagatgatttagcggaagtcttcagagcatactcctttggagaaatcatctccctagaagatctttttgcacgcgcttcgccgccaatatgttccgagtggttccctaagcactcatctctggcatttgggcacctgcttaggctccttgagagaggtcctctggattatcagagagtggtgcttctgatgcttaaatcactgttgcagcaaagcccagtggatccatctcagatacctcaagtgtacaatgttgtgtcacagctcgtggagagcgcactatgtgcagaggcattgaatgtgttggaggcgctcctacggagctgcagcggtgtaactggtggtcaaggtgatgatattggatttggcgagaatggtcacgggatgggggagaaggttcaccaaagcatgcttcttcctcaatcatcattcaaggctaggagtggacctcttcaatatgctgctgccggttcagggtttgggactctaatggggcaaggcggtggcagcgctgcagatactggagtggccacccgagatgtggcgctgcagaatacccggttgctgcttgggcgtgtccttgatacatgcgctcttgggcgtaagagggatcataagcgccttgtgccgtttgtggcgaacatcgggtagaaaatgcagttgagtgacctatgtaaaatgtttggtggctatatgtgctaactgaatgaatgaatgcagccaattttgtacagctaggagcgtgatccagaaatcgctgtgcacaggttgacaagatagaagaagcagcacttcccgccaccgaaagactaccctaaccaaactcaattttgactgttgtaatatcggaatgtgtttatttatcctgcaacctcacagaggtcgcaggtttgaagtatggttgtagctgtagactgcaattcattggatgcacatacacatacatacagcatgagcgagtggcacaagctcttttcttttctttttttcttggctagtgtgtatattggaattgcttggtgacatcccgaaggggaagggactccagtgtagtgtttgattcattattattgttacctgttgtgttcatttatgcacggagacgatgtaatctgtttgatgtcgctaccgtagagtcgaaacatctctcgaacaatctaattcaccattcatcgtg

SEQ ID NO: 2677 - DNA, 1253 bp, Oryza sativa
  ref <308>: DATABASE ACCESSION NUMBER: AK104308
  ref <309>: DATABASE ENTRY DATE: 2002-08-28
acgcaacgcctcgcttcacggcctcggctagagagacgcgtgcacgcgaacgcagatggagcccttgctgctcacgccggccgcgcggctcgcggccgcggcgccgtcaacgctctcgcggctgctccgcctacaaagcggtcgccaccatgcgcacgcctcctcctcctccaaccgcctattgccccctctcctccgtcctcctcgcgacggtttccgcggcggccgcctcatcgcctcctcctcctcctcctcctctcagatggcggcgcctgccgatgcaccgggcggatccgcggacgcgttcgaggtgatccgcgctcaccaggaaaaagctgctcgacttcctccggttgaagaaatacggaccattctggaccaaagtgttaggggtgtccttgccacccattctcagggtcatgttggctatccgtctggttcaatggttgattttgcatgtgatcaggatggttcccccatattagcagttagtagtttagcaattcactcaaagaatctctctgaaaatcctaaatgctcgcttctggttgccaaagaccctgaggacagaacagatactgtgattactgtatatggtgatgccacacctgtttcagaccaagaaaaagatgcagtacgaagtgcatacttacgaagacatcctgaggcattttgggttgattttggtgacttccgttttctgcacatcaagccaaaagccgtgcgatatgtgtctggggttgcaactgccatccttggttctggagaattcagtgctgctgagttcaaggaggcaaaagtggacccaatatctcaattctcaacccctattacgagccacatgaataaggatcattctgatgatacaaagctcattgtgcaatactcaaccactgtcaaggtggactttgcttacatgcttgatgtggatagtcttggtttcaatgtgaaggcgggctatgatggaagtgttctgaagctgcgtatccccttccctaggcgtgcacaggacaggaaggatgttaagacacttattgtggaaatgctccaagctgcaaaagcctcatcgtcttctgctgaatgaatgtcctgttctagaaagggacgtctttgtccttgtaaatgaaataaagatgtccttttcgatgagttttttctgatctaggaaatgtcatgtttttacacatgatatatcacaatgccacagcttaacaccgaacagatgccaatctacttgtatattatttacactg

SEQ ID NO: 2678 - DNA, 1354 bp, Oryza sativa
  ref <308>: DATABASE ACCESSION NUMBER: AK060483
  ref <309>: DATABASE ENTRY DATE: 2001-12-06
ctcatgagagcatacttcatggtttttcggacggacaggccaaattattccatgagatgcaacggcgtgtgaagttagggaaattacccattgagatgaatctgaatcacacaaagctgtcagatcctctagctgagaactctggtgattttgaaagttcaaaaccgaacaagctaccgcactggcttcaggaggctgtgcgtgcacctccatccaagccacctgaatgtgagctaccagcaactgtttcagctattgctcagtctgtgtgcctactacttggagagcaaaaaccagcaatacctccattcccgattccaggacctcgtctctctctccccaaggacccaaggagtgctccaaagaggaggagagttcacaaagttcagcaagcttcctccctggtagatcattccaaaactacagttgggcaaggtgaccacaactctactccgtcagcaccactatccatggaagccgcacctgcctctcctgcagttattaaaagcagtgataccccctcgctcaacttgaactcaccatcttcatcatcagctggcagtcgggggccggatgcgtcaaccccttccacttttgaagaaccagaaagaaccatggaagtttcagaacctgcttctgtcgctgctgccacttgcccgtccaggccagagcctcctgagactggtactcacagaatcgagttctccgcggtagataacatggatactggatcttgtagatcacctgtgagggatactcctgaccctgacaatcagaagagcgaattgtctggatcaggtaatacacctactgaactttctgtattaccgttggttgatgcacctgggacgagcagcgaacctgctgtagtgcccgtatccagcgacgaggagtcaacccaagagggtgtaccaggcaaagccgtaagcaccggcgaccaggagaaacggacgccccctgatgagagcgaaaattcaggtgcggcaaatccagtttcggcagctcagacagctgacgaagataaggtggacgagatgatcacagatgagcattagaacttttgagcaatgagctcaaatgcttatttttcttccatttagcgctgggattttccctttcccaatggtttccagtgtgtggaggtatcaggtacctgccttttgtgtttgtatgcttagcccagaatccagatagagtaaaaatccagggactagtagtttagccctctagtccagcgggagcaacctctcgaaagcctctatatacatgaagtgtatattttcagacatggtaccttggacatggacaagtattcatttatttatgcgtgtatgatttagatagtccgtttacc

SEQ ID NO: 2679 - DNA, 55 bp, Oryza sativa
  ref <308>: DATABASE ACCESSION NUMBER: AK060484
  ref <309>: DATABASE ENTRY DATE: 2001-12-06
tttatgtattgttacacgtattactattaatatctacttgctgctatgacaccgt

SEQ ID NO: 2680 - DNA, 1169 bp, Oryza sativa
  ref <308>: DATABASE ACCESSION NUMBER: AK104309
  ref <309>: DATABASE ENTRY DATE: 2002-08-28
aaaaaaaaccacccacacattctcgaagaaggagaagaaggagaggagcagccatggcgtcgtcggtggcagcggcggcgagcacgttcctggggacgaggctggcggacccggcgccgcagagcgggaggatcgtggcgaggttcgggttcggcggcgggaagaaggcggcggcgaagaaggcggcgaggccgtcggcgccgacgacggacaggccgctgtggttccccggcgcggtggcgccggactacctggacgggtcgctcgtcggcgactacggcttcgacccgttcggcctcgggaagccggcggagtacctgcagttcgagctggactcgctggaccagaacctggccaagaacaacgccggcgagatcatcggcacccggttcgagaccggcgaggtgaagtccaccccgttccagccctacaccgaggtgttcggcctccagcgcttccgcgagtgcgagctcatccacggccgctgggccatgctcgccaccctcggcgccctctccgtcgagtggctcaccggcgtcacctggcaagacgccggcaaggtggagctggtggatgggtcgtcgtacctggggcagccgctgccgttctcgatctcgacgctgatctggatcgaggtgctcgtcatcggctacaccgagttccagcgcaacgcggagctggacccggagaagaggctgtacccgggggggtcctacttcgacccgctcgggttggcgtcggacccggagaagaaggagcggctgcagctggcggagatcaagcacgcccgcctcgccatggtcgccttcctcggcttcgccgtgcaggccgccgccaccggcaaggggcccctcaacaactgggccacccacctcagcgacccgctccacaccaccatcttcgacaccttctcctcatcctcttaatttaagctctttcgcgcgcaattcaaacgggatcgatgcgttggtgtgcgttcgcgcgcgctgtttagttttgtgatgacgagcgtgctgggagggtatggagagaggagaggtcatccttttgttgattactacttaaattaggaaagctgggttggtggttaatggcgacttgcatggtggtgatttgtaatataagaacacccaagatgatgaattaatgcatccacttgtacatcgatc

SEQ ID NO: 2681 - DNA, 1811 bp, Oryza sativa
  ref <308>: DATABASE ACCESSION NUMBER: AK060485
  ref <309>: DATABASE ENTRY DATE: 2001-12-06
aaaaagcctgtccctgagttgtacccgctctattttttttttctctctctttcttctccatctctcctccttccttcctaacctctccccacctacctccctgccgcctgatcctgatttccccaattgaggccagcgtcgagcacctgcacacacgcacacgctcgctgctgcgcctcgattctcgtcccagatccgccactcccttccccaattcgccgtcacctgcagctgagtgttgcttgctcgagctagctggtggttcttgccttgcagggcgaggcagtggtagcttgcgagctttagctgcgggagcggttggctttggttttggtttggtaaattggttgcgtgtgcgtgtgcgtgccatgagaagatgatgcgcgccaaggcgaaaggtacattcccaccggcggcggcggcgatgaaggagagctctgctcctccgccgcctgctgctgcggcggcggcggcgagggaggatgagtgggaggtgcggccaggtgggatgctggtgcagaagaggagcccggacggcgacgccccggccgcgcccgtgcccaccatccgcgtcaaggtcaagttcaacggcgtctaccacgagatctacatcaactcgcaggcgtccttcggtgagctgaagaagcagctgtcggcgccgacggggctgcacccggaggaccagaagatcgtttacaaggacaaggagagggactccaaggcgttcctcgacatggccggcgtcaaggaccgctccaagatggtgctcctcgaggacccaacggcgcaggccaagcgcctcctcgagcaacgccgcaccgacaaggccgagcgcgccgccaagtccatctcccgcatcagcctcgacgtcgacaagctcgccaccaaggtgacggctctggaggccatcgtcggcaagggcgggagggtggtcgacgccgacgtggtcacgctcacggaggcgctgatgaacgagctggtcaagctggacgccatcgccgccgagggcgaggtcaaggtgcagaggcgaatgcaggagaagcgggtgcagaagtacgtggagtcgctggacgccatccgcgccaagaacgcggcgtcgcacaacaaggccagcggcaacggccacgccaagccccgggcgccgcacctcccgccgccggtgtcgcagcggcggcagttccaggcgccgccgcccgccgcgccaacgacaacgaagaccgccgccgcgccggcgccgccgcccacggcgagctgggagtcgttcgacctgctgtcctcgatgccgtccacgtcgtcgtccaccgtgacgaccaccatggccgccgcgacgaccaccaccaccacctcgccgatcccgcggttcgattgggagctcttctagctcgctctcgctctccctctcctcctcctccgatgggtacactactctacactacactacactacacacttcaccttttctttgtccattcatctcgtgagctcattcgatcggtcgcactagcacctgatcgatcagcagcgctcgccattgtttctttgatttcttctgttcattcttcctcttctttcttttttcttcatgttccttttttcatttcgagagtatatctacaaaaacaaaaaagaagaaacaccatgggtgatcgagtgtgttcagtacgtatgtcatcactcaagtcagttcatcaatccaatgcatggtcagtcacacagccaaaaaagaaaaaagtgggtggtatcatgacgaagaattttccggtgacactatatatatacaaaaaaaacagcatgtatatgtgattcgaaac

SEQ ID NO: 2682 - DNA, 1815 bp, Oryza sativa
  ref <308>: DATABASE ACCESSION NUMBER: AK060486
  ref <309>: DATABASE ENTRY DATE: 2001-12-06
aaaaactgaaagctagctagccgctcaagcaagcatggcgcacgacgcaaaaatggcggatgtactatctcagggttacgtctacctcgccatggctctcgtggcgctgctcggcgtgctgctcacgaagtgcagccgcacggcgacggctcagcggcggctgcctccggggccatggcagctgccggtcatcggcagtctgcaccacctcatcggcaagctcccgcaccacgcgatgcgcgatcttacgcgccgccacgggccggtcatgatgctccggctcggcgaggtgcccacgctggtggtgtcgtcgccggaggcggcgcaggaggtgatgaggacacacgacgcggtgttcgccacgcgggcgctgagcgccaccgtgcgagcgggcaccatgggaggcagggacatcgccttcgcgccgtacggggactactggcgccagctcaggaagatcgccgccacggagctcctctccgcgccccgcgtcgcctccttccgcgccatccgcgaggaggaggtcgccgccacgctgcgcacggtggccgcggccgccgcggacgggcgcgccgtggagttacgagcggcgctgtgcgctctcgtgaccgactccacgtcgcgcgccgtggtgggagaccggtgcaaggagagcgacgcgctcatccgtgcgttcgaccgttccatggagctcgcgagcgggttcaacccggcggcggacctgtggccgtcgtcgcgtctcgccggccttctcagcggcggcgtgcgcgagattgaggcgaacctccacacggtgtttggcatccttgaccgcctcatcgagaagcgcctgcagcagaagaagactgctccatcgtccgccgccggcgaggacattctggacgcgctgctgaggatacacaaggagggcggcgggctccagttcccgctcgacatggacagcatcaaattaatcatcgctgacctcttcagcggcggcggcgaaacggtggcgacgctgctggtctgggcaatggcagaactgatccggaacccaatggccatgcagaaggcgacaacggaggtgcgacgagccttcgcactggctggcgccgtgtcagagggcaagggcgcgctcggcgagctccggtacctgcaccttgtcatcaaggaggcgtctcggctgcacccgccagcgccgctgctgctgccgcgcgagtgctcggagccgtgccaggtgctcggctacgacgtgccgcgcggcacgcaggtgctggtcaacgcctgggcgatcggccgcgacgagcggtgctggaccggcggcagcggcgacggcagctcgccggaggagttccggccggagcggttcgaggatggcgccgaggcggtcgacttgaggggcaacaacttcgagctccttccgttcggcgccgggcggcggatgtgccccgggatggcgtttgcgctcgccaacattgagctcacgctcgccagtctgcttttccacttcgactgggaggtgcccgacatggccgaccctgccaagctggacatgaccgagacgttgggcatcacggcgcgccgcaagggcgacctcctgctacgccccgtcctccgcatgcccgtgcccggcgtctactagacgccgttgccagaatttcagccatctgctcagccttctttcttgtgttacatctcctaatcaccgttatacaagtcaccagtaacactaatatcgcaattatatatgtcaaacacaacaagccatgttgtagcctcgctgttaaataagtggagaaagaattgaaggagaaaagccgtggaattatgccgcac

SEQ ID NO: 2683 - DNA, 1589 bp, Oryza sativa; identical to SEQ ID NO: 129
  ref <308>: DATABASE ACCESSION NUMBER: AK104310
  ref <309>: DATABASE ENTRY DATE: 2002-08-28

SEQ ID NO: 2684 - DNA, 1802 bp, Oryza sativa
  ref <308>: DATABASE ACCESSION NUMBER: AK060487
  ref <309>: DATABASE ENTRY DATE: 2001-12-06
tccacactcccctccacccccccccccacacccgcagcagcagggagaagacgacgacgaagatgatggatctcgccgacccaaaccaccggctcatcgccggcgcggcgctgctggtggccaccctcgccttcatcaagctgctgctgagctccgccggcggcggcaagaagcgcctcccgccgaccatcccggcggcgccgctggtgggcgggctgctccgcttcatgcgggggccgatcccgatgatccgggaggagtacgcccgcctcggcagcgtcttcaccgtccccatcctcagccgcaagatcaccttcctcatcggccccgaggtgtcggcgcacttcttcaaggggaacgaggccgagatgagccagcaggaggtctacaagttcaacgtgcccaccttcggccccggcgtcgtcttcgacgtcgactactccgtcaggcaggagcagttcaggttcttcaccgaggcgctccgcgccaacaagctccgcagctatgtcgaccagatggttgtcgaggctgaggagtacttctctaagtggggagaaagtggaacggtggatctgaagtatgagctggagcatctcatcattctgactgctagtcggtgcttgctcgggagggaggtgcgagaaaagctctttgatgatgtttcttctctcttccatgatctggacaatgggatgcagccagtcagtgtcatcttcccctacctcccaattcctgcacaccgccgccgtgaccgggcacggcaacggttgaaggaaatcttcgccaccatcatcaagtcccgcaaggcctctggacgggctgaggaagacatgctgcagtgcttcattgattcgaagtacaagagtggacgctcaaccacagaaggtgaaataaccggcctacttattgcagcactatttgctggacagcacactagctctatcacctcaacctggactggggcctacatgcttcgcttcaagcagtacttcgcagcagccgaagaggagcagaaggaggtcatgaagcggcacggggacaagatcgatcatgacatcttggcagagatggatgtcctctacaggtgcatcaaggaggcgctccgtcttcacccaccgctaatcatgctgctccgccagtcacacaacgacttctcagtgacaacgaaggatggcaaagagttcgacatcccgaagggccacatcgtcgcgacatctccagccttcgccaacaggctccctcacatcttcaagaaccccgactcatacgaccccgaccgctacgcaccaggcagggaggaggacaaggcagcgggcgccttctcgtacatctcctttggtggcggcaggcacggttgcctcggtgagcccttcgcctacctacagatcaaggccatatggactcacctgctgaggaactttgagttcgagctggtctcccccttcccggagaccaactggaaagccatggtcgtcggcatcaaggacgaggtgatggtcaacttcaagcggcggaagctcgtcgtcgacaactaggatgccaccttcaaccttaggagtcgatgcttgtcgcgcttttcgccttttttctcttcttttccctttctgtcagtatttgatccgtgtaagtttctgccagctttgtattagggtgtttcagtcgttttaggatcctgtgatttgcttcctgccatgaaaaatcaagcttgatctctgcaacttctgtacctctgggttgcttggcaacgatttgtgtttgtgttattagacttgaagcatcctggattgtacctgaaaaaaaac

SEQ ID NO: 2685 - DNA, 1055 bp, Oryza sativa
  ref <308>: DATABASE ACCESSION NUMBER: AK060488
  ref <309>: DATABASE ENTRY DATE: 2001-12-06
aatgattaaaaatggcgcggcctcgctgatggtgcgcctcctccacctgccccgcgccgcatccgcccccacctacccccgccgccgccaccaccttgccctcctcccctcgctccggctacgagtgccggcgcccgccgccgccgccgccatgtcgagtgccgcggcggcgcaggaggtcgccgaccagaagcgcgcgctgcggtccgaggtgcggagggcgctcagggccctcacccccgagcagcgcgccagcgaagaccaggctattcaaaatgcaattttgaactcttcttggttcaaagaaagcaagcggttatgtgcttatataagctgtgcacaattgcgggaagttgatacatcaaaagtactgtcagaagttttatccccaaattctgaacatggacatgcaaaggatctttatgttcctcgagtggaagataagaatcgcaatatgcggatgctcaaaatcactaccatggatgatttagttaaaaattcaatgaacattctagaaccatcaccacttgatgctagtgggaatgctcgtgaagaaggtatgaagtttatctagtgttgtcaacctcttcccctgttgatctttttctattgcctggacaagcttttgataggactggacgaagattaggacgtggtggagggtactatgacacattcttgatgagatatcaagaacttgctaaagagaaagggtgggatcagcctcttctagtcgcgctttcatactcggtgcaaattttggaggaaggcatcatcccagtcaactcaacagatgttcctattgatgctctggtctcatcctctggcatcattccaatcagtcctgcagcattggcgaggatataattgagctgattggtttctgctttgcgttgacagtcaacctctcttccctgaacaacacttttttagataatgcttcaccaaagctgagaaatttttcgatcaagtgattttgttacgcaatgtatctgtattctgaatatgaattgattttgtctgcgtattgtaatgacaactttgatcaaacatac

SEQ ID NO: 2686 - DNA, 1350 bp, Oryza sativa
  ref <308>: DATABASE ACCESSION NUMBER: AK060489
  ref <309>: DATABASE ENTRY DATE: 2001-12-06
agccgctcaccgagctctcgcccgcgtcgtccgtttccgcgctttcccctgctagcctccgcgtgatagatggacgtggcggaggcggcgtcgccgggggtgggcgcgtgggcggcgatccgcgggtacttcacgccggcgacgctgttcctcgtcgtgaacatcgtcatcggcaccatcgcgctcacctcccgcacgcaccagcgccgccggcggcaggtgtaccagtatcaccacgacggggagatactccaccacgaccagttgcaaccgccgccgccgctgctgcatcagcaatactacggcggcggtgagcaccagcagatgatgatgcaggagacgctgtatgctccgccgccggcgccggcgccgctcgcgcggacgtcgtccgttcttgaccggctccgctcgttcggactctaccgcttccgctccggtgacttccctcccgagtacgctactgctgcggcggcggcgacgagccaactccaccaccagcgcacggaggaggtggtgtcttcgtctccggtggatgaggtgaagctgcaagggcactacgcgaggagccggtcggagccggcggcggcgccggcgcaggaggagaggaaggcggcgtcgaggctgaggaactcgagctccgaggtgaggagggcagaggtcgtgagggctccggcgagggtggtcgaggcgttcccggaggaggccgcggccgccgtggacgcgacggccgaagacgatttcacaccgaagcagcagcgagatctgccgctccagcaagaatacgttcctcccccggcgccggcgccggcgccgctcgcgcgcacgtcgtccgtcctggaccgcctccgctcgttcaccctctacagcttccgctccggcgacctcgccaccgacgacatccccgccgacgcagcggcggcggcaacgcccgcacaagcgcactacggtaggacccggtcggagccggcgcgggagcaggacaagaaggcgaagaagcaggcggcgtcggaggcgaagacgatgaccaagtcgagctcggaggcgaggaaggacacggcggcggaggacgccgacgacggcggcgtggacgccagagccgacgacttcatcaacaaattcaggcagcaactgcagcttcagaggctcaactcgctgctcaactacaaggagatgctcaaccgcggcagcagcaagcagtagctagccacactcgccaagaacaacaagagccttgcaatttcacagcaagctcactaagctccctgttaattatactacttagcaatgctaaatcaatcaagagatttcttatatatgtggtgttaatgaattaaactgtgaaatagttgc

SEQ ID NO: 2687 - DNA, 1738 bp, Oryza sativa
  ref <308>: DATABASE ACCESSION NUMBER: AK060490
  ref <309>: DATABASE ENTRY DATE: 2001-12-06
accaccaccacatcaacctcccccctcccctttccgtttcccacccccctcaccgccgtaatcccgacacccctcgccggcgcacgcgagaagagtagtgctatctccggggtcggaggcgcgggggacgtgtgaactgctttgcgatcgccggcggcggtgctggtggtgttccgggctaggctgcgtcggccgatcggcgggcgggcgcacgcacgcacgcgtcgccattggcggcgagcagcgcgtccccacctttgctgctccgcgcgtttgccgacgcgatggaggcggcgggctactacaactgcaagaagaacgacggcggcatctgcgggggcgtctgcggcggcagcgagcatggttcaaaggcaattctgagcatgtcaaggttgaagtgtgcgcttcgggggtttgatttgagggcacttctgatcctcttgattggtgtgccagctctaatattcattatatatgttcatggccagaaggtgacttactttcttcgaccgatctgggaaaaaccgccaaagcccttcaatgtgcttcctcactactatcatgaaaatgtctcgatggcaaacctatgcaagttgcatggatggaaagtcagggaaactccacgccgtgtttttgatgctgtgcttttcagcaatgagcttgacattcttgatatccgttggcatgagcttagcccatatgtgtcagaatttgtgctgctcgagtccaactcaaccttcactggcctgaaaaaggatctccacttcaaggaaaaccgtcaacgctttgaatttgctgaatcacggttgacctatggtatgataggtggaagatttgtgaaggggggaacccatttgtcgaggagtcatatcaaagggttgctcttgaccagcttatcaaaattgctggaatcacagatgatgaccttttgatcatgtctgatgttgatgagatccccagtggccatacaatcaacctcttgaggtggtgtgatgacactcctgaagtgcttcatctccagctcaggaactatctttactcatttcagtttctccttgacgacaagagttggagggcttcaatacacagataccgggctggaaagacgaggtatgcgcatttccggcaaacagacgaccttctggccgactcagggtggcactgcagcttttgcttccggcacataaatgattttgtcttcaaaatgcaagcttacagccatgttgaccggattagatttaagtacttcttgaaccccaaaaggattcagcatgtgatatgccaaggagctgatctttttgacatgcttcccgaagagtatacattccaagagatcattgccaagttggggccaatccctagcacattttcagctgttcaccttcctgcttatctgttggagaaaatggaccagtaccgctatcttcttccgggcaactgcatgcgagaaagtggctagggatgatgatttgcattatgatctgatgcacaatgcccctttggaggaacatcgcgccacagcgtgtagctgatacgattgactagcttagttgagcgaccaattggtggttggtttgagttcatgattttgtactgtgtagttggaaggcctaacagcatagcgcatgcttgggcgtgctgcgtgcttgttttgcagaggagctcggcagagtgtgcttataccacccgagtttattcattgctcccatgattgatatatgaactcaaaactatttgt

SEQ ID NO: 2688 - DNA, 1493 bp, Oryza sativa
  ref <308>: DATABASE ACCESSION NUMBER: AK060491
  ref <309>: DATABASE ENTRY DATE: 2001-12-06
cgccctcctcctcctcctcccgtctcctcctcctccgcctcctcctctcccgccgccggagccccgcctcgcgctcccctcctcctcccctccgccgccgcctccctctcctcgctgcctccatgtcctcctcctcctccaccgccgccaccagaaaccccggctccgtcgtcgccgacgccgacggcctcgcccgcaaggtcgccgccatccgcgccgccggccccgctaagctccaggtcatcgcggacttcgacggcacgctcacgcggtactggtacgacggctcccgcggccagagcagccatgggttgctgaggcaggggaacgaggagtacgacgccaagagggaggagctgttcgagcactaccaccccatcgagatctgccccgacatcccgctccccgagaaggccaagctcatggaagaatggtgggagaagacacatgctctccttatcgaaggtggacttacatatgaagctataaggcaatctgtggctgatgctaaaatcacttttagagatggagtggtgaagctctttgagttcttggaggagagagatattccagtattagtattttctgctggacttgcagacataattgaggaggtcttccggcagaaactccacagatcattcaagaacattaaggttgtgtccaacaggatggtcttcaatgaagaaggtcgtcttgtttcatttaaaggaaagactattcatgttctaaacaaaaatgagcatgccttggacatggcagctccagtgcatgacaatttgggtgatccaaatggatatactgatgactattcgttggtgaggaagaggaccaatgtgcttctccttggagatcacattggcgaccttggaatgtctgatggtctaaactatgaaaacaggattgctgttggatttctgaacaacaacatcgagaaatctctaaaagattactccgaggcatttgatattgtctacttgaatgacgcgccaatggtgggagttgttgagcttgtatctgaactatgtccttaaccaaatgatgttttgctgagcttagaagccgcatccgcctcccgctcttgctgaaatctgggaatcctattccccacttcactaaccggctgggtttgttcaataagaagcaattttgtacaggcttgacatcaagcaagccaagcagccttttgaaccaatatctccttaagccaatccaaacttgtatgaagtccagaacacatttgtgaaatggaatttcaaatttggttttggtcctcagaaatttctccctatcacttttgacttttcgacccaccatgatcttgtttctcgttaattaagtaaatcttgtgggtaaatcaaatgtaaggtacgtaaggtgatgaactgaacccatcaacttcctgaccttactggacggtaacgagaaatctttatgccaataaaggcatacagtatcaactaggtgtggctatatattatagcgattcagtt

SEQ ID NO: 2689 - DNA, 1723 bp, Oryza sativa
  ref <308>: DATABASE ACCESSION NUMBER: AK060492
  ref <309>: DATABASE ENTRY DATE: 2001-12-06
tggccgaaaaaaaaaattcagaagttaaatgctgctgatagtttgcatgagatgagacagtcgtttctgtccaacttggcaaaactgaaggataccttgacagtgcttagacttgatggtcttgaagtctcatcctctgttcttctggccattggtggttgtaataacttggtcgagattggccttagcaaatgcaatggcgttacagatgaaggaatctcttcacttgtaactcaatgcagccacttaagggttattgatctcacatgctgtaacctccttaccaacaatgcccttgattcaatagctgagaactgtaagatggttgaacatctccgtttggaatcctgttcttccataagcgaaaagggactggagcagattgcaacctcctgccccaatctaaaggagatagacctcactgactgtggagtgaatgatgcagcattgcagcacttggccaagtgctctgaactgcttgtactgaaattaggcctgtgctcaagtatttctgacaaaggtcttgcttttatcagttcaagctgtggaaagctgattgagcttgatctctatcgctgcaattctattaccgatgatgggctggcagctttagctaatggctgcaagaagattaagatgctaaacctatgctactgcaacaagattaccgacagtggtttgggccacctaggctctctagaggagctcacaaaccttgaactgaggtgcttggtccgtataacaggtattggaatctcatcagttgccatcggctgcaagaacctgatagagatagacttgaagcgttgctattctgtcgatgatgctggcttgtgggctcttgcccgatatgcactaaaccttagacagcttactatatcatactgccaagtcactggcctgggcctgtgtcacctgttaagctccctgaggtgcctccaggatgttaagatggtacacctctcatgggtctctatagaagggttcgagatggcactgagagcggcttgcgggaggctgaagaaactgaagatgctgagtgggctgaagtctgtgctgtctcctgagctgctccagatgctgcaggcctgcggctgccgcatccgttgggtcaacaagcctcttgtctacaaggactaaacctgctctcatatcatcatctgtgcagtgttaatatcctcggatcatacaccatggagcccttaccaagtctagcatgcttacaagccatgttagatacccgcaataatcgtcaattttcatacccaagatgtactgacgatggtgtctctgcattgctgcagtgccatccttatgtttggcaactcctagaccaatgttgtcatcttcagattaaaatccaacatttgcaaacatgaggcatcgaaacagttatgttctgagcaagtgatccttgtaccagactgcaatgaaatgctctacactttcaattggtatatgcaaagaacaatggcatgtttgcctttgtcattgctccaactccaggcttgctgaccgatgcatcttttagagtttaagaacagctttagatcgcagaaaaactcttccttgatgctccaggatctgggctgggacactggtttcatggttgtctgtattgtatgactggtggacccgtccttttttttttaccttgattacaataatctcgatgtactcattcaggcagagatttgaagtaatgtattgaatcagtttttat

SEQ ID NO: 2690 - DNA, 997 bp, Oryza sativa
  ref <308>: DATABASE ACCESSION NUMBER: AK060493
  ref <309>: DATABASE ENTRY DATE: 2001-12-06
acgatacaaacccgcaaacccactccgatcgcaaatactctctctcgccgatagcagcagcagcagcaatggccgccctcgccgccgcatccaccgccttcgccgccaagccgcgcctggcgcgcgcgccgtcgtccccggccgcgcggttctccgtgtcgtgctccgcgtcgggcaacaacggcggcgccggcgagatggcgcagtcgctggcggcgtcggccaagacgttctccgcggcgctggcgctgtcctcggtgctgctctcctcggcggcgacgtcgccgccccccgccgccgccgacatcgccgggctgacgccgtgcaaggagtccaaggcgttcgcgaagcgggagaagcagtccatcaagaagctccagtcgtcgctcaagaagtacgcgccggactccgcgccggcgctcgccatcaacgccaccatcgagaagacgaagcgccgcttcgagaactacggcaagttcggcctgctctgcggcgccgacggcctcccgcacctcatcgtcagcggcgaccagcggcactggggcgagttcatcaccccgggcttgctcttcctctacatcgccggctggatcggctgggtcggcaggagctacctcatcgccatcagcggcgagaagaagccggccatgagggagatcatcatcgacgtcgagctcgccgtcaagctcctcccgagggggttcatctggcccgtcgccgcctaccgtgagctcatcaccggcaacctcgtcgtcgacgacgctgacatcggctactgatcaccacatggatgcttggctactcaagccccagttgatttggcagtggaggaagagggctcgtgcatggtgatttgtgtggtttgggtgtagaagctgataggatcatggaggaatggaagatctgttgtacttaagaaaaactaagtcttgtataccgtacctctctcttgtgtgtatttaccatcttaagattcttgagaacaactccttcgtgc

SEQ ID NO: 2691 - DNA, 1668 bp, Oryza sativa
  ref <308>: DATABASE ACCESSION NUMBER: AK060494
  ref <309>: DATABASE ENTRY DATE: 2001-12-06
gcaggccataaaacccgagggttcaaagtgagtcagaagaactgtatccaggggattaaaagcagcggcctttgggttgttgcctggagtaccaaacttcggtaatatcgaattccaatttaataagcttatagcatacattagcattgatcaattcgattcgacatgagagcaggaagggttcgtcagatcactaatggaggtttgcgccgcccgcgccccaggcaagattatccttgccggcgagcacgccgtcgtccatggctcagccgccgtcgccgccgccatcgacctctacacgcgctgctccctctgcctcatgcccctcgctgacgacgaggcggccgccacgttggagctggacctcaaggatcctggcctcaccttctcgtggccgtgcgggcgcctccgcgaggtgctgctgacagatgaggcggcgggggcacgggaggcgaggccatgctccccggaccggctggcctccattgccaggctcttggaggagcacgagatccctgaggccaagatctggctctccgccggtctctctgccttcctcttcctctacacctccatattggggtgtagacccgggaaggtgacggtgagctcggacctgcccatggggtcggggcttgggtcatcggccgccttctgcgtgtcgatgtcgggggtgttgctgacagctgccggcgtggttactgcagtcggcggcatcagcggcgagggcatggggtgggagttggtcgggaaggatgatcttgagctagttaaccggtgggctttccagggggagaagattatccatgggaagccttctggcatcgacaatgctgtcagcactttcggaagcatgatcaaattcaagaaaggggaattgacaaaccttaaatctagcaacccagtgaaaatgcttattacggatacaagagttggtaggaacacaaaggctctggttgctggtgtctctgaaagagcctccaggcattcagatgctatggcttctgtattcaacgcagtgaactccattagtgaagaggtgtcaagcattgttgagttagcagctaatgatgagatagctatcacctcaaaggaggaaaagctggcggaactcatggagatgaaccaaggtttgcttcagtgcatgggtgttagccattcttcaatagaaactgtactgcggacaacattgaaattcaacttggtctccaagttaacaggagctggaggtggtggttgtgttttgaccctgataccaactatgctatccaacttagttctggagaaagtcattgcagagctggagtcgcatagttttcgctgctttaaagttgaggttggtggacagggtcttcaagtttgccaaggaggctgctcctattttaatggagatgttgtataatactttgtagttatggattagtcaacggtttgagatttgttcttcacactgtttcttctagattaatccattagttatgtccttattttagccccgggcagttcctgtatcaaataatcctaccgtcgcatgattgcccttggggtttgtatcaaatacaacttttttgctgatgcaactgttgtacgagggaaagtgctatggtagatgtgactactacctccaaatttatctattttattcacttatgaagcaagaggcaaccc

SEQ ID NO: 2692 - DNA, 1457 bp, Oryza sativa
  ref <308>: DATABASE ACCESSION NUMBER: AK060495
  ref <309>: DATABASE ENTRY DATE: 2001-12-06
agccagtgtgcgtgcgtgcgcgtgtgagcgagaaggagagagagagatggtggtggtggtggccatgccgccggcgctctccctcctcgttctcctcgttctcgcgctccacggaggcgccggcgacgccacgccgccgccgccgctgcggctcgtccgcggcgcgcggcgcgtggcgttcgacgaggggtacacgcggatgttcggcgacggcaacctcgccgtcctccgcgacggccgccgcgtccgcctcaccctcgacgagtccaccggcgccgggttcgcctcccaggacgtcttcctccacggcttcttcagcgccgccgtcaagctccccgcctactacgccgccggcgtcgtcgtcgccttctacctgtcgaacggcgacacgtacgagaagacccacgacgaggtggacttcgagttcctcggcaacgtgcgcgggcgcgagtggcgcgtgcagacgaacgtgtacggcaatggcagcaccgccgccggcagggaggagcgctacgacctcccgttcgaccccaccgacgagctccaccattactccatcctctggactcgccgccgaatcatgtcagccatttcaaaaacatttcaaagaagagtagatttgggttggaatattttgaaaattttgaggggggaatttttgttagattctacgtggacgagacgccgatcagggaggtggtgaggacggcggcgatgggggcggcgttcccggcgaagccgatgtcggtgtacgccacaatctgggacggctcggcgtgggccacgctcggcgggcgctacagggtgaactacaggtacgcgccgttcgtcgccgagttcgccgacctcgtcctccacggctgcgccgtcgacccgctcgccgtcgaacactccgcgtcgtgcggggacgaggaggaggaggcggccgaggccgtcgtgtcgtccgcggcgatggcggcgttccggcgcggccacatgtcctactcctactgccacgaccggcggaggtacccggtcgcgctgtccgagtgcgcgctcaccggcggcgcagcctccctcggccgcctgttcggccccgacgggatgaagcgccgccgcgctcgccgcgcccgcgacgcctcgtcgtagcgccggccgcgggggcgctgtacagtaagcatcagcagtgggaacgcgtcgaggcgccgctcgccgctcgccgccgtggcagacaggcgtactcgccggcgtgattgtgcgcgcgccgtggaatccggccgggatgtatgccattgtcacggctcgccttgtaactttagctatagcattaggattatttgccgctttggaccattcatccgtgtgctccattgatgaaaccaagaaaactccatttcttatctcagggaaaggaacggattattatccatcaattaatcaatttcagctaatcaatcgatcaatttgagccacggagt

SEQ ID NO: 2693 - DNA, 944 bp, Oryza sativa
  ref <308>: DATABASE ACCESSION NUMBER: AK060496
  ref <309>: DATABASE ENTRY DATE: 2001-12-06
aaaaccctataatcctcgcaccccccaacacctctcttctcctgcgccgccgccgcctcctcctcctcccgcatctccctcctcgcctctcgctgccggccgcgcttcgccaagatgaacaaggagaggcttatgaagatggccggcgccgtccgcaccggcgggaaaggcaccgtgcgcaggaagaagaaggccgtccacaagacggggaccactgacgacaagaggctgcagagcacgctcaagagagtaggtgtcaacaccatccccgcgatcgaggaggtcaacatcttcaaggatgatctcgtcatccagttcgtcaatcccaaagtgcaagcttccatcgccgcaaacacatgggtggtcagtggctccccacagaccaagaagcttcaagatgttcttcctgggatcattaaccaattgggtcctgacaacatggagcacctaaagaggattgctgaagagatgcagaagcaggtagctgctgcaggtgccactgcccaggcaaaggaagagaacgatgatgatgttccagagcttgttccgggagagaatttcgaagaggtagctcaggagacaaaagcctgatcatagataccacaagtagtgaaatgttacttgaccgctgttctgaggtcatggttttctatgacggccctgttttgcttctcctcgtaggccaatctttgtatttgcaattggaaacttttagtttctccgagtttttacctaagttatgaatgctgagatgccatggagtcctttttacctggttttgatgttcacatttctggttggttcagaatatactagcatcagggtttgcagatgtccttcacgtctcaactatctactagtatcatttatgtttggagatatcctgcaatggtacagtgttgatttttccccaaatgaaaaataatgatgtgttttacctgctc

SEQ ID NO: 2694 - DNA, 1719 bp, Oryza sativa
  ref <308>: DATABASE ACCESSION NUMBER: AK060497
  ref <309>: DATABASE ENTRY DATE: 2001-12-06
aattatcttaatttttttttccaatctgtatcgaatttgtagatgaggaacctactgctgctgccgctgctcgtggcggtggcggcgacggtgcccttggcggcggcactgtcggccgacggggtggcgctgctggcgttcaagacggcggtgaccgacgacccgtcgggggcgctgtcgtcgtggtcggacgccgacgacgacccgtgccggtgggccggcgtgacgtgcgccaacacgtcgtcgtcggggccacgcgtcgtcggcgtcgccgtcgccgggaagaacctgtccgggtacgtgccgtccgtgctcggctcgctcgcgctcctccgccgcctcaacctgcacggcaaccgcctctccggcaccgtcccaccggcgctggcgaacgccacctcgctccactcgctcttcctctacggcaacagcctcaccggcggcctcccgccggagctctgcgacctgccgcgcctgcagaaccttgacctgtcggataactcgctcaccggcagcctcccgccggagctccggcggtgcaagcagctgcagcggctgatgctctccgggaacggattctccggcgagataccggccggcgtctggccggagatggtgagtttgcagctgctcgacctgtcggataactcgctcaccggcgccatcccgccggagctcgggaagctggccgcgctcgccggcacgctgaatctctcgcggaaccacctctccggcggggtgccaccggagctcgggcatctcccggcgaccgtcaccctcgacctccgcttcaacaacctctccggcgagatcccgcagtccgggtcgctcgccagccagggccccaccgccttcctcaacaacccgggcctctgcggcttcccgctccaggtcccctgccgcgcggcgccgccgtcgtcgtccaccccgccgccgccgtccgccgccggctccatcagcggcgccggcgggccgcgccagccggtcaagaccagcctcatcgtgctcatctcggtcgccgacgccgccggagtagcgctcatcggcgtcatcgtggtctacatctactggaagctccgcgaccgccgcggcgacggctgcggcggcgacggcgacgacgacgaggaaaggaagcgaggcctcttccccttcccgtgcatgcgcgccgacgactcgtcggacgacgggtcggacgccggcgacgacgtcaagcgcaacaacaccaccaccaccaccaccgccagcggcggcggcggcggcggcgaggaggggcagctggtggcgatcgacaaggggttcaagatggagctggacgagctgctgcgttcgtcggcgtacgtgctggggaagggcgggaaggggatcgtgtacaaggtggtggtcggcaacggcacgacgccggtggccgtgcggcggctgggcggcggcgcggcggcggcggagaggtacaaggagttcgcggcggaggcgggggccatcggccgcgtccgccaccccaacgtggtgcgcctgcgcgcctactactggtccgccgacgagaagctcgtcgtcaccgacttcgtcaacaacggcaacctcgccacggcgctgcggggtgagcacacaccttccccttccccttccccttcacaattcgtgaatttgtttggaaagcgggaaacgtattttctcaaaaaatggagcaaactttggctggattataacaaactttggtaaaac

SEQ ID NO: 2695 - DNA, 1576 bp, Oryza sativa
  ref <308>: DATABASE ACCESSION NUMBER: AK104311
  ref <309>: DATABASE ENTRY DATE: 2002-08-28
gacgcagtcgtcacgggcgcggcagatagctggctagtggctagcaccgcgcgtcgagacgggatgggcgagaggaggcgccgtgccagcgctgtcgccggcggccgggctgaggatgagaaggctgcttcggcgcctgcggccgcggccccggcaccgacggtgtggttcgcgctgaagaggtcgctgcactgccggtccgagccgtcggaggtgcacgtgccgaggcccaaggccgtcgccgccgccgctgcgggcggtggcgggcacctctcggcgattgtgaccaagcgcgcggcgccgcggtcgggttgctcccggtcgatagccaacctgcgggacgtcatccacgggagcaagcgccacccggagcggccgccgagctgcagcccgaggtccatcggcagcagcgagttcttgaaccccatcgcccacgaggtggtgctcagcaccaactcccgctgcgagctcaagatcaccggcttcggtggctgcggcggcctcgcggcggcggcggcggcggggggcggcgtactcgcgtcgccgcacgaggcggacggcgacggcgccgtggtgtcgtcgttcgttggcacgctccggccgggcaccccggggcccggctggagccacggcctgcagtacagcggctcgtgccggggcagcatgcggtgcacgcctccgaggtcgccgaatgtgctgctggacagcagggacgccgccgcggccggggtgaccgctcaccgcgcgtcctgcgaggacgccgtcaagagctttggcaagggcggcggcctaagctgccaccgttgcggtgagcagttcagcaagtgggaggcactggaggcgcaccacctttccaagcatgcagtgacggagctggtggaaggggactcgtcgaggaagatcgtggagatcatctgccggacgagcctgctcaagtcggagagcagctgcgtgcggatcgagcgtgtgttcaaggtgcacaacacgcagcggacgctggcgcgcttcgaggagtaccgtgaggcggtgaagctgaaggcgagcaagctgcccaagaagcacccgcgctgcctcgccgacggcaacgagctgctccgattccacggcgccacgctctcctgcgcgctcggcggcgcggcgggctcctccagcctctgcgcctccgacaagtgcgccgtctgccgcatcatccgccacggattctccgccaagaaggaaggcaaggccggcgtcggcgtcttcaccacgtccaccagcggccgcgcctacgagtccatcgaggcctccgccggcgccgtcgtcggtggcgacgacccggcggcgacgcgcaaggcgctgctggtgtgcagggtcatcgccggcagggtgcacaagccgctcgagaacctcaaggagttcgccggacagaccggcttcgactcgctcgccggcaaggtcgggccctactccaacatcgaggagctctacctgctgaacccgagggcgctgctcccgtgcttcgtggtcatctgcaaggcttaactccagagtcatgcattgcaaacgactaattaatcaagtaattaaccattctttc

SEQ ID NO: 2696 - DNA, 1403 bp, Oryza sativa
  ref <308>: DATABASE ACCESSION NUMBER: AK060498
  ref <309>: DATABASE ENTRY DATE: 2001-12-06
aatctggagagctagcaaccaatgctggcctaaatgctgaaaatgagatactacacactcttgcattcttagcaggtgtcatgatttggtcacagatcacagacttaccattctctctttattcaacatttgttattgaagctaaacatggttttaacaagcaaactatttggctcttcattagggacatgatcaaagggattttgctatccatcttacttggacctcctattgtggctgctattatcatcatagtacagaatggagggccctacctggcaatatatctatggggttttatgtttgcattatctcttgtgatgatgacaatataccccatcgtgatagcacctctgttcaacaaattcactccgcttccagaaggagtactcagagagaaaatagagaaattagcagcttcactcagttttccattgaaaaagcttttcgtggtggatgggtctaccagatcaagccacagtaatgcttacatgtatgggtttttcaagaacaagcgcattgttctctatgacacgttgattcagcagtgtagtagtgaggatgaaatagtttctgttattgcacatgaacttgggcactggaaactcaaccacactgtgtattcctttgtagctgtccagctccttatgttcctacaatttggaggatatacgctagtaaggaactccaaagacctttttgaaagttttggtttcgaggatcagcctgtaataattgggctgatcatatttcagcacactataatacctgtccagcaccttctgagtttttgtctgaaccttgtcagtcgggcatttgaatttcaggctgatgcttttgccaagaaccttgggtatgctcctcagctccgtgcagcccttgttaaactacaggaagagaacttatctgcaatgaacacagatccgtggtattcagcctaccactactcccatccaccccttgttgaaaggctctctgctcttgaagacgcagacagcaaaaaggaaaactaacggaaagttgatccacctgaaacaccgaagtctttactcttccatgggttaccttacggtgtcatggaatcgtttcaatgttcgggatgttaatggaatgtgtgagtacatgagaagtactgtaagcgttcaaacatttatcatacaggggaacgttggcaactatgtagctctcgattaagatagtttgccttccattaattggcttacagatattgacatatactccttccatttcacaatgtaagttattctagcattttccacattcatattgatgtattaatatgaatgtgggaaatgctagaatgacttgcattgtaaaacggaggaagtacatgtcagtgtattctcctactactttcgacaagaaatagaagtgaatcagct

SEQ ID NO: 2697 - DNA, 1494 bp, Oryza sativa
  ref <308>: DATABASE ACCESSION NUMBER: AK060499
  ref <309>: DATABASE ENTRY DATE: 2001-12-06
agctcaacggtcaaaaatctcttccaatttgaatatctctcctcccaaacggtcggctccggagcggcgcccggacgaacacatggcggcggcgatggcgacgacggcggcggcggcggcggaagaggcggtggtggcgctcgacaaggagactctgatgctgatggggtgcggcgacgccccgccggctgcgccgtgcgcggagtgggagacgttcaaggagaacgtgcggccgctgaagcgcggccgcaacgtgggcctcctcaaccgcgccctcaaggcgcacgccgaccccgcccagcgcgccgccctcctcgccgcccggaggaaaatgatcgaggcaatcgacgaatacagcggcgaggatccgctccaaccatggatagactgcatcaaatgggttcaggagtcgtttccgacaggcggggattgctccgggttggtggtgatctacgagcagtgcgtgcgtgccttctggcacgacgaccgctacaagaacgatctccgctacctcaaagtgtggctggaatatgcggggaattgtgctgattccgaggtgatattcaggttcctggaggccaaccagattggtcagagccataccaattactacttgtcctatgcgtcggtaatggagtccaagaacaagctaaagaaagctaatgagatttttaaccttggtattgccaggaaagcaaagcctgtggagaagttggaaactacatacagggcatttcttcagagatcatccaaaaagaaggcacatcctgaggatgacacaactactgatgatcatccagtacgcaactttgggactgtcttgaaccgtggtgaaatcagaggccagcatgcagaaaactctcacctggtgaaaactctgcaaagagttgatgtcaataggccacttgcagtttacacagatgagaattcgttacctagtcatggccttgctagaaccaggagcaacaacacggcctggcagacccttggatcacaagcagatcggaacaaagaaaataacatgaggcctgctaaatggacatcacacaagattcctcagaaggttggatcgagggcagcagttcagccgactcgtgtaagctccattgaagtcttcgtagatgacgaatgcgccgaggaaccagttccccaagtgccaaagagtacaaaaccatctattctgaagcttaggcaagcaacaagcagaaacctcaagcaggaaactgaactgcttatggagaatcctctgcggaatttccctctaaccagccttagataatcaatatttatgtggtgtaatgctgtatttcgatcttcttttaccaatttattgtttgagtgtttgtgacattatgctgaaataagctttagcctctaaagcttaggcaggcaaagagcctttttaggctatccatgagtgttgtaatattgcacaataatttgattgataaatcctcgacgagggttgggggtgcttaatttggttggatgctg

SEQ ID NO: 2698 - DNA, 1380 bp, Oryza sativa
  ref <308>: DATABASE ACCESSION NUMBER: AK060500
  ref <309>: DATABASE ENTRY DATE: 2001-12-06
agcaaaagccatccgatctcatctcatctcatctcaccctcgccgcgcgccgaggaagacgcgcatctcctctctccctctatataagcgcgcgcctcgccacctcacccgaagaaattccccaccattccatctctctctctctcgaatcttgatctctctctttcatcgcctcttgtgttcgcgcgcgcgagcagggtggttgttgttggtgggggtgcaatggcggggaggagcgagctggtggtgagcttcggggagatgctgatagacttcgtgccgacggtggcgggggtgtcgctggcggaggcgccggcgttcgtcaaggcgccagggggggcgccggcgaacgtggccatcgcggtggcgcggctcggcggcggggccgcgttcgtcggcaagctgggggacgacgagttcgggcggatgctcgcggccatcctccgcgacaacggcgtcgacgacggcggggtcgtgttcgacgccggggcgcgcaccgcgctcgccttcgtcaccctccgcgccgacggggagcgcgagttcatgttctaccgcaaccccagcgccgacatgctcctcacccacgccgagctcaacgtcgagctcatcaagagggctgccgtcttccattatggatcaataagcttgatagctgagccctgccggtcagcacatttgcgtgccatggagattgcgaaagaagctggtgcgctgctatcttatgacccgaatctcagggaggcattgtggccctcccgtgaggaggctcgcaccaagatcttgagcatctgggaccaggcagacattgtcaaggtcagcgaggtcgagcttgagttcttgaccggcattgactcagtagaggatgatgttgtcatgaagctatggcgccctaccatgaagctcctccttgtgactcttggagatcaaggatgcaagtactatgccagggatttccgcggagctgtcccatcctacaaagtacagcaagttgatacaacaggtgcaggtgatgcgtttgttggtgctctgctgcgaagaattgtccaggatccatcatcgttgcaagatcagaagaagcttgaggaagcgattaaatttgccaatgcgtgcggagcaatcaccgccacaaagaaaggggcaatcccatcactgcccaccgaagttgaggtcttgaagttgatggagagtgcttagatcgatcagtagcattatggtcactagcttcagcttccgcaaattgtattgtatgctgatctggatcaggagcaggggggtactccaagatgcctgcctttttgttgccaacttcccttcctggcaggatttttgatttggaactctaatttgaataagcagagccgttcaatgtcagtttctact

SEQ ID NO: 2699 - DNA, 1210 bp, Oryza sativa
  ref <308>: DATABASE ACCESSION NUMBER: AK060501
  ref <309>: DATABASE ENTRY DATE: 2001-12-06
atagttttggcgactcggcgagtaaccgttccaaatcgctctcaaccgcgccatggccggctagactgcatgctaatgctacacatttatattgtacaaccccgccggtggggaggaagagagagcgagagagcgaatcatcatggctagtcatgtcttcatgatccggcaagagacggcgccggcgcagtggtggttcctctcgctggctttcgtcggcgccgcctacgccgccaccgtcacgctccgtttcgtcgcctacctcgcgctctgccggtgtcaccggccgaaggacgacctccgccgccggtacggcgaatgggccgtcgtcaccgggccaacgtccggcatcggccgtgccatggcgctggagctcgcgcgccacggcctcaacctcgtgctcgtcggccgtgacccagccatcctccgggagatctccggcacggtcaggtctctccacaaagtgaagaccaagaccgtggtgtttgacctgtccctcgtctggacccccgatggtgatgagccgctgcggcggctgcgggaggcggtggaggggctggacgtcggggtggtggtgaacaacgccggcgtggcgaagcccggcgccgtctacctgcacgaggcggacgtggaggcgtgggtgaggatggtgcgggtgaacatgtcggcagtgacggaggtgacggcggtggtgctacctgggatggtgtcgcggggtaggggcgccatcgtcaacatcggctcggctgggtcggagtacatcccgaccttacctctctacaccatgtacgccgccaccaaacggtacgtggctcagttctcccggagccttcacgtcgagtatgcaagtaaagggatccatgtgcagtgccaggcgccgttcttcgtggatacgaggctgatgttcaggttcgaggaggcggcgggcggcgtatcgctgttcacggtgacccctgacgcgtacgcgcgcgcggcggtggcgtggatcggccgcggcggcgcgctgtgcacgccggccgtccggcaccagctgctacggcgcatggccgccgccgcgccggactccgtccacgactggatcctcctgcgcttagccacctggaacagaaaacgttgtttcagcggatctgagtgacagatgacagattatgtgatgctaaagaattgccaacaaataaataatgtgtcttcgaaaagtgcaattgccgag

SEQ ID NO: 2700 - DNA, 1629 bp, Oryza sativa
  ref <308>: DATABASE ACCESSION NUMBER: AK060502
  ref <309>: DATABASE ENTRY DATE: 2001-12-06
gaagccacactccaacctcacgatgcctcatctccggcggcgccaccgccgccgcctcctcgctgccgtcgtcttcctcctcctctctgccgtcgtcgcgcgaccagcagcaggcgccttcaccgagctcgagtccgcccagatcggccgcttccaggactacctccgcatccgcaccgcccacccgtccccggactacgccggcgccgccgccttcctcctcccctacgccgcctcgctcggcctccgcgccgccacgctccacttcaccccgtgcaagtccaagccgctcctcctcctcacgtggccgggcaccgacccctccctcccctccctcctcctcaactcccacctcgactccgtcccggcggagcccgagcagtggctccacccgcccttcgccgcccaccgcgacgccgccacgggccgcgtctacgcccgcggcgcgcaggacgacaagtgcctccccatccagtacctcgaggccatccgcggcctccgcgacgccgggttcgcccccacccgcaccctccacatctcgctcgtccccgacgaggagatcggcggcgccgacgggttcgagaagttcgcccagtcggaggagttccgggacctcaatgtcgggttcatgctcgacgaagggcaggcgtcgctgacggatgaatttagggttttctatggggacaggttggtgtggaggctgatcgtgaaggctaccggcgcacccggccatggctcgaagttgttcgacggcgccgcggtggagaatttgatggattgcgtggagaccattgccgggttcagggaggcgcaattcgggatggtgaaatccgggaagagaggtcccggggaggtggtgtctgtgaatcctgtgtacatgaaggctggcacgccgagccccacgggttttgtaatgaatatgcaaccctcagaagcagaagttggttttgattttcgacttcctccaactgaagacgtggaacatatcataagaagaatcaaagaggaatgggcaccagctcataaaaacttaacctacaagctgatgcagaaaggaccaacacgggatttggcaggacgccccatggtcacaccaaccaatgcatcaaatccttggtggtctgtatttgaacaggctatcatatctgcaggtggaaagctagctaagcctgagattttatcttcaaccacggattcacgcttcatcaggcagttgggcattccggcccttgggttttctccgatgacaaacactcctatattacttcatgacaataatgagtttctggaggataaagtattcctaaggggcatcaaagtgtatgaacatattattagagcactgagctccttcaaaggttgattcataataggaaactgctattgcataaagtgtaccattgatgtactttcacctcatgttggaagactggagttgcaggaaagaagccaccctcaaagatacagttttctcagaaatggttcaggcccaaccataccataataaacatgttgggaattgggaataatgcatatctgctgaacattgtatttttaatgattgtgtaagcagatcaatctgtacacatatacgaatttatgaactgcgacagtgtggtgttcaagtcc

SEQ ID NO: 2701 - DNA, 192 bp, Oryza sativa
  ref <308>: DATABASE ACCESSION NUMBER: AK060503
  ref <309>: DATABASE ENTRY DATE: 2001-12-06
aaaagcgttagagtatgcacaaccttgttgttagactcatttaaaagttttacattccacagtttgtattggcccttctctgttattttctgtgcaaattatgtgctcctcaccacagacttgtaatcttcgttctctgtaagcaattttattgaggtcacaaaaggcaattatcttgaaatcattcctgat

SEQ ID NO: 2702 - DNA, 1670 bp, Oryza sativa
  ref <308>: DATABASE ACCESSION NUMBER: AK060504
  ref <309>: DATABASE ENTRY DATE: 2001-12-06
agacaatccccccctcctctcgcagacatccgggccccaccacgtcagcctctcatggccttcgcggcggagccgatggatctggaggtgtcgccggattcctcgccggcggcggcggcggcggcggcggtgtgctcgatctgcctggacgcggtggcgtgcggcgacggggtggcggcgaggtccaccgcgcggctgcagtgcggccacgagttccacctagactgcattggatctgcatttaatgcaaaaggggtgatgcagtgcccaaattgtcggaatattgagaaaggtcactggctctatgggaatgagagccaaccatgtagccattctgatacaggtgactggctgaatggtgaaacctttgactacccgttctcatttgaatttgggtggtgtcccttcaatacaccattgacctctgtttttggggaaagcgaatctgagccaaatccttttttggagtatatagggtctctgcatggttttcaccatccaatgtatgcgccttctagttctactgccagtactgaaagcataccattccatcagcgtcctactggtacggaaggtcatgcaactacagatttgagaaatactcaagttttcaatgaatctgagccaagaaaccatgagagagaacagctgtatttaggtagtgttcaaatgcctggaacactcaatcattccaccgccccatttggcataggaatgccaagatatgatggaggcaaccagcaaagattgcgaccacatatgcatgataattccttattccacaggccgacagctcgcagagcaagcaatcttgcacatttgaggtcattaactgctgcgtctgaaactagaggccatggccatggtatgacaagtcacgctgttcaacaaacaattccatcatccatggcaagcaatccacaacctcctgcgaccagaagggttcgaccaagggctttgtcaatcacatctttcattgcagcctcatcgtcagctgagatcggagccccccatgactttcctctcactgaaaccgcaagcaccacaaacggtaacatccgtaatggtgttggtgcccctagacatgccaatcaatcatacagctggagttcagagaccttctggccacaaactggggaacctcactggtggagtccgatggctcccgtacataatcgatcttatgataattttagtggaagatcagccacagagctgctttccatttatggcgcacagaatggtctgcctactccgcgattcctgtgaatacttgtcttccctccatcgtgtatattccggggttggccgatatttgggtttgtttcagcaaagaatgggaaataactgaggcttcagtgtcaggaactcaggttgctgtcattaatcgtcatcttatgttgatgatgccggtatttcgtaccgttatggttttttatttctggaaggcaacctcatgttagtttcttcaagtgaagatgctttatgaattgtctcagttaaagcgacaatattgtttggaattctctatatgtgctagtcctgaatcatactgaggaaaatgctgctaaacaatgttgccattgaactgtagtaattatcgaatcaaatgcttctgctgtatatcttgaatcatccatctctactactttatactctttccgttccat

SEQ ID NO: 2703 - DNA, 1686 bp, Oryza sativa
  ref <308>: DATABASE ACCESSION NUMBER: AK104312
  ref <309>: DATABASE ENTRY DATE: 2002-08-28
agaagatacagcatgcgagcaagcaagagcggttttagccatcaaagccgaaagccatccgggcattcgctctcccctcgctgctagctagctttgcttgctaatctagagctaagcaccaaatggtcctgattgttcttctcgcttctgaattgttgtgacctgtaactacaaaggcatagttaggtagatatagaaagagggggggagaggggccggaggccggagcggcgggggcggcggcgagatgaagctccacttcgtgctcaggttcctgttcggccccgtgccggtgtacttctcggcgctggccatcctcatcctgctgacgaacgcgcagtacttcgggctggtgggcgtcaccgttccccgcgcgacgaagctggcgtcgtcggcgccggtggtgagcgtgatgaagtactgcgacatcttccgcggcgagtgggtgccggactccgacgcgccctactacaaccacaagacgtgttacatgatccaggagcaccagaactgcctcaagtacggccgccccgacctcgaattcctcaagtggcggtggcgcccctccggctgcgagctgccccgcttcgaccccgtgcagttcctacagttcaaccgtcacaagtcgctcgccttcgtcggtgactcgctggctcgcaaccacatgcaatccctgctctgcctcctctcccaggtggcgtatcccaaagacatgtcggcgaacccgacgactcagaacaaggtgtaccactacagggggtacaacttcaccgtcagcatgttctggtcgccgttcctggtgaaggcgcgtgagcccgaccacgacgggccggcgcacacgggccactggagcctgtacctcgacgagcccgaccagtcgtgggtgtccgagatctcgcggttcgactacgtgctggtgtccgccgccaactggttctccaggccgtcgctcttctacgagaagcggcggctggtcgggtgcagcttctgcagcaggcagtacggcgtgccggacctgacgctctactactcgcagcgccgggcgtggcgcgtggcgctgaaggcgatcaacgacctggagagcctccgcgggcgggtgatcgtgcggatgctgtcgccgatgtcgcacttcgagaacgggacgtgggaccagggcggcaactgcaagcggacgcagccgctccggagcaacgagacggtgatggaggggcgggacctgcacttctacacggcgcagatggaggagtaccgcgccgcggagaaggtcgcggaggccaagggccggcggatgatgctcatggacgccacggcggcgatgctgatgcggcccgacggccaccccagccggtacggccacctgccgaaccagaaggtgcagctctacaacgactgcatccactggtgcctgccaggccccatcgacatctggaacgacatgctcttccagatgctcctcgtctaacgcgatcgatcgccaattcgccatcggtaaatgcgacttctactgcacagacaggattgctcttgctgttgtttcaaagcagttttgacaaggatttattcgaacttccccaatagattcttttttctctctcttttcccttcatttcctttcatttttcgtttatgctgacgcgaatttttaatggatcgtcaccggaaagagtgaacgaaagtgtgcctccg

SEQ ID NO: 2704 - DNA, 2134 bp, Oryza sativa
  ref <308>: DATABASE ACCESSION NUMBER: AK060505
  ref <309>: DATABASE ENTRY DATE: 2001-12-06
aagcccggtcccccttgctctgcctctgcctcttcttcctcctccttgctctgcttctgctctctagctagccttcttcctattggaagcttcttctcaagtgaaaattaagaagctagtattggctgagctgagctgagcacccagccaaagtcttgggcctacttaattagtgaggtgaaggggagatcgtcgtgtcgtcatccatggttgctgccatctgatgagcgatgaaccagttcgtccctgattggagcaacatgggtgacgcatccaggacactcggcgaagatgacaacctcattgagctgctctggtgcaacggccatgtcgtcatgcagagccagaatcaccaccggaagctgccgccgaggccgccggagaaggcggcggcggcggcggtgcaagaagacgaggccggcctgtggttcccgttcgcgctcgccgactcgctggagaaggacatcttctcggacctcttctacgaggcgcccgtcgcggcgacggcggaggcggcgcctgctggcccgggcgcgggcgccgacggcgaaggaaagacttgcaagggcgacgcggcaatggcggaggaggagcgtggcgggccgggcgcggcgtccgaggcgccgcgcgagctgatgccgccgcccaagtcgacgaacgcgtcctgctcgaggcagcagacgatgagcctggcggacggcggcgacaacgccggggacctgtcggagctcgtccgggcgaggaggtcgtccggcggcgcggctcggcggaaggcggaggccggcggcggcggcggcggcgcgtcgtcgtcgatgctgagcgcgatcgggtcgagcatctgcgggagcaaccaggtgcaggtgcagcagcgcacggcgagcgagcccgggcgccgcggcgcgccgccctcggcggtggggagcgcgaacgccatcccctgcggcgggcgcgaccacggccacggccacgaggcgaccaccgtggcgtcgtcgtcggggcggtccaactgctgcttcggcaccaccaccaccacggagccgacgagcaccagcaaccggagcagcaagcgcaagcggctcgacaccaccgaggactccgagagccccagcgaggtaggcgtcctcccgtcgaacaccaacagagacgcacactgacactgacaccggcggcgcgtgggatgcaatgcaggacgcggagtcggagtcggcggcgctggcgcgcaagccgccggcgaagatgacgacggcgcggaggagccgcgccgccgaggtgcacaacctctccgagaggaggagacgggacaggatcaacgagaagatgagagccctgcaggagctcataccacactgcaacaagactgacaaggcgtcgatgctggacgaggcgatcgagtacctcaagtctctgcagctgcagctgcagatgatgtggatggggagcgggatggcgccgccggtgatgttcccgggggtgcaccagtatctgccgaggatgggcgtcgggatgggggcggcggcggcggcgatgccgaggatgccgttcatggcggcgccgcagccggtggtgcccacaccgccggtgaaccaccttgacctgggcgtcaaccacctgcagccgccgccgacccagctttatttgcagggagtggggtattatccgttgggggccaaggccgtgcagcagcagcaaaatccaccacttcacgtgccaaatggaagcattatgcctcctcctgaaaatgcacccaacacaggatcaggataattaacaaaaaagagtgagagcaaagaggaagaaaacattcatggttgcattgatcctgaatgagtatatatggcaataaaggtaactgagctgcacagcaggacggagcagaggaatttgacagggggacgatttctttagctttttcccctctttgggaagccaggaactagctgtgatgtgcagaagatgttagcaaaatctcttgaagatctctaactgattgtaattaggggtatgatggcatgttcaaagcataaggctggtctggtcttttgtaccattggaattaacattagagacagaaattgtgccatacatttggaacaagagtagttagtataaattgacacacttcttttcaaaaagt

SEQ ID NO: 2705 - DNA, 1373 bp, Oryza sativa
  ref <308>: DATABASE ACCESSION NUMBER: AK060506
  ref <309>: DATABASE ENTRY DATE: 2001-12-06
ctcaaaccaatctgccaatctctcaaccattccatctctctcacgcacgcgctcgggcaaggcagcgggtgaccggcggcggaggtggagctccccgggcggccgggtgtctgaggcagagcgggcgaccggcgacggagacggagctccccgagcagcgggcggtggaggcggagctcccctggcggtgggcggtgggcagctgaggtggaagcagagcgggcggccgacggtggaggcggaggcccctgtgcggcgggcgtcgtgccgctgaggctgaggcggaggcggagcgggtggctggcggcggaagcggagcttctcgggctgcgccgctgcgggtggcgggcggctgaggcggaggcggagtgggcgaccgacaacgccgtggtgaagggcggcggcgatgcgggagtaggtgtgtgtggtgtgcgggggatggcggcgcgcggggccgggcggttggcggcggcagagggggagctggagccgacgacggctcggcgggcagcgggctatggcgtcgccgagaggtagcgcttctctgcctctctctccctctctctctcggtgagcagaggaggcagctgtggcgcgggggcggaggcagctgcggccggagggggcggaggcagctgcgggcggcgggcgaggagtcgaggacggcggccgaaggcggcgagggagatggcgtgggagcagctgcacgacgaccgacgagccgccctccgtgcgctcggcatgggcctcatcatgggtggcgacctcctctgcaccgagctggagtaagccatcgcgcgggtggtgtacgaccgtagccgcggtggcggtggcggtggcagtggcgatggcgcgggagagaccgtcgcctccgtgccgcccgcctgctgccgcccaccgcccgcctgctgccacgcgcaagagagagaggaagagttagagagagaggaagatgagagagaggaggtgagagagattcggtggccggtgcgacgagatccacgccggcggccgctctccatggcctctagccttgagctccgccgcccacaccccttctgccctctctcactctctcgtataatcagaataggtgcctgacaggtagggcccaccatttttattattgttatttccatgttggactgccacatcaatcaaactagtgccacgtgtgcgccacgtcaaaccaaaaccaccccggattgacttaggggggtaatttggccggtttgaaaattttggggtgtaaaataactggttttagagtctaagggggtaattcgaacgacccaaatagtttagggggtaaaacgtactttttccttgttattattattgcaaatgcaaacagctatagctagctagaaaat

SEQ ID NO: 2706 - DNA, 1529 bp, Oryza sativa
  ref <308>: DATABASE ACCESSION NUMBER: AK060507
  ref <309>: DATABASE ENTRY DATE: 2001-12-06
ggccacaagcccacaacatgacgctagggccactaattcaccccgtgaccgtcctagagcaatgccatgtctcgccatctccggcgccggcggccggccagccacggtcgctgccgctcacgttcttcgacctcgtcttcttggacttcccgcccgtgcagcgcctcttcttctacgacaacgccgacctccgcgacgcccatgacttcctcctccgcgagcttcccctcttcagggagtccctggccgctgccctgcaccatttctaccccttggtcgggaagctgccgtgcgggatacgggagcgcatgtcgccgccggaggtcgcgtactcggatggctactccgtctgcctgaccgtcgccgtcagcagcgacgacttccaggacctcgccggcgaccacccgcgcgacaccgcgaggctacgcccgctgctgcctccgctgcccaagcatggtagctcgcaggacgtgctcgccgtccaggtcaccgtgttccctcgcgccggcatctgcgtcggcacgacgctgcaccacgccgtggccgacggttccagctacgtgcacttcctcaagacgtgggccgccattcaccgcctcggcgacgagcgcaggaaagcggtggtggtggaccacacgccgccgctgttcgaccgtggcgtcgtgcaggacggcgacggactccgggaggcgtttatccgcgaccaccgggatctcgtggagtccggtgacaagcggctcgacgactgggacctcagccggaggccggacaccgtgctcgcgacgttcaggttcacggacgagctgctccgcaagctggggaggcatgtcgaggcggagacctcggcgcggtgctcgccctacgcgctggcgtgcggcgccgcgtgggccggcatcgtgcgcgcgcgaggcgtgggcggcggcgacgtcgcgcggttcgggttcgtgaccgggtgcaagccccgcgtgagcccgccgataccgtcgagctacttcggcaactgcctggggctgtgcttcgtggaggccaagcggagacacctcaccgcggccagcgcatcggcggccatctggcgcgtgatcgcggggctcgccgagcaggggcgggcgctccgtgacgcccacggctgggtgcgcggcgcgcgggagtacgcggcggcgcgcgcggtgacggtggcgggttcaccgaagctgggcgtgtacgcggcggcggatctcggcgcgacgtgggggggtcggccccggaaggtggagatagcgtcggtggagcggacgggcgcgctggcgctggcggagagcggccgccgtggcgaccgggacggcggcggcatcgaggtcggggtggcgctgccgcgcgcggagatggaggcgttccgcgcgttccacgtcgagctggtccggctgctagacgccactacccactagtgctgagtggtgacgcggcctcccccttgccgccagtgtaaaaaaatcgtgccattattccctctgcttcggtgtttctggaactgggaccagtcctttgccttc

SEQ ID NO: 2707 - DNA, 1751 bp, Oryza sativa
  ref <308>: DATABASE ACCESSION NUMBER: AK060508
  ref <309>: DATABASE ENTRY DATE: 2001-12-06
aaaaaaaaaaaaaaaaacacggcgttcaaaacgcaccacaaaacgccccactactccccgagccggtcaagccatagacgttgcccactctggtcaaggctcgagaaagcgagagagtgaaaagcgccgccgtttcgagagagaggtggttggttgctcgccgtcgctgtcgccgtcgccgtgacgagatggggtgcatctcctcgaagctgctcccgcccgggccgggcgacgcgagagggggaagcggcgcgcgcgccaccgtgcgtggccgcgtcgaccatgtggtgtccctcacctccaccacctacggggtgctcgacctccaccccaagcacggggctgcggctgccgcggcagcggcggcagcagcggcggcggcggtggcgtgccaggaaaaggtgcaggagactcaggctcagccgccgcaggaggataagccgataagcagggagtggaagcgcgcgaggccgccgccgctcgtggtcccgagcgccaagaagccggcgccggcgggtaagctggactccggattggaggttatcaacgcctgggagattatggccgggctggaggacgccgacgccgcggatgcgtcgccggcgaagaagccggccaagcagccgagtcgttggtcgccggcaagggtcatcgcaatggccctgccgtcgcccaagaagtcggcgacgaagcggaggaacacgcccgggaaggagaacagcccgctgcagcgctgctccgggaacaacaacagcagcaacatcaacaagaccggcgacgtcaacgtcgacagggtcctccggccgtacaattcaatcgacaactcgaaattgtccaggatgtccaagagattctctccggtgagcgctcggatcgtccggaagcccgggccgccggagaccggcggcggaatgtcgtcgtcgcggcggagcctgagcccgctgttcgacccggagctcctggcgtccatcgagcgcgagctgtcggaggaaggcgcccacatcaagcggatggtcgggtcggagaagcccaagcacccgaaggcggcgccaccggcgatggtggccgaggggaaatgcccgcccggcggcgccgacgcggtcgtcctgtacaccaccaccctccgcggcatccgcaggacgttcgaggagtgcaacgcggtgcgcgcggcgatcgaggcccacgacgtgaagttgatcgagcgggacgtgtccatggactcgggctaccgcgaggagctgcggctgctgctgggcgggcgggaggtgcgcgtgccggcggtgttcgtccggggccggcacgtcggcggcgcggcggaggtgaccaagctggaggaggagggcaagctgaaggcgctgctgcagggcctcccgcgcgcgcgcgtctggtgcgccggctgcgccggcgtgcggttcgtcatgtgccgggactgcaacggcagccgcaaggtgcgcgtggacggcgagcggaaggagacggtccagtgcggcgagtgcaacgagaacggcctcgtccgctgccccatctgctcatgatggatccggcgatggatagctgtgaatcgtgtgtgatgtccaaagttgtggagcaattcgtgtcgtgttgggtcgattcgcgtgtctacccccggctgatgttggattctggtttgtgctgcttgttgtgctcggcaacggctaacaattgtaatctgtaccgattactattctttctttaccactttgtgataatttaatcgcttttcattcttt

SEQ ID NO: 2708 - DNA, 1237 bp, Oryza sativa
  ref <308>: DATABASE ACCESSION NUMBER: AK060509
  ref <309>: DATABASE ENTRY DATE: 2001-12-06
actcatcatcaaactctctctctctctctctctctctctgaatctctggatctctgaaaactctgaacattccaagaactcataagttacctgtgatctgtgaagcttgagctgaagctgtgacagtgtctcactgatcgttgatcactcagcttggctgctactgtgcattcactgcgtggttagctagctaactgagcagaagagctttagcaatggcgacgccggggcagcagctgccgccggggttcaggttccacccgacggacgaggagctggtggtgcagtacctccggcggagggcgctgtgccggccgctccctgccgccgtcatcccggacgtccacgacgccaccgtgctcgacccctgggacctccccggcgccggcgatggtgaggcctacttcttcagcttccggcagctcgcggcggcgagcggcggcggcgggtggcggaggaggagggcggggagtgggtactggaaggcgacgggggcggagaagccggtgttcctgcgtggcttcgggtgcggcggcggcggcggcggcggcggccagcacctcgtcggcgtcaagacgacgctgctcttcctccgcgcgaagccgccgtcgcgcacccactgggtcatgcacgagtaccgcctcgccgccgccggcgctgtcgccgtcgccgccgccggacagacaaagcgcgggaaccatagttgcatggctcagccaggagaatgggtggtgtgccggatttttctgaagaacaacaggtcatcaagaaggcgagccggcgacgccgacggcgaaacgccggtcaccggtgtccacggtcaccgtcggcggcagccgtcgccgtcgccgtcgtcgtcgagctgtgtcacggctgaggtttcagacggagaaggagaagaagaagtcagcagtggcagcatcaatggtgctccatctgcctctcaaagagaggcctagacatgctgaaaatctccttaattaattactagtactagtgattttttttcttcttcttcttgttctcttttgtccctccattgcttttcctgtacttctccttgtaccataatgattagtaggagtttaagtttaagcagcaggttgaagagagaagccccagcttaagaaagctcctaagtaaagattactgagcagcagctgtgacatctgtatcaattgtaacttgtaagtttctcttgatcatttattaagataaggaacctcaattaagcagg

SEQ ID NO: 2709 - DNA, 257 bp, Oryza sativa
  ref <308>: DATABASE ACCESSION NUMBER: AK060510
  ref <309>: DATABASE ENTRY DATE: 2001-12-06
aagaagagagatgatacttgtacgatccagtttggaattggactacattaattacattagggatgaatgaatgtaattgtaaatctgtattatgaatgtatgggccggcccatatcatttcttcttagggctgaaacgagcccaccgaaagcccaaaatcgccccgtaacgaagggactcatgtcggcaacactgacaggagcaaaacaacacgtttgggagagctgtaactctaagataatgagaatttccgttcc

SEQ ID NO: 2710 - DNA, 1656 bp, Oryza sativa
  ref <308>: DATABASE ACCESSION NUMBER: AK060511
  ref <309>: DATABASE ENTRY DATE: 2001-12-06
aagaagcagcggcaaattgtcatggcgaccaaggttgtcgacaagctgacggtggcggcctcccctccggcggacggcggcgtgctcccgctgaccttcttcgacgtgccgtggatcttcaccggcccggtggagcgcgtcttcctctacacctacccgcacgccgtcgaacacctcgccgcccacctcctcccctccctcgcctcctcgctctccgccgcgctgcaccgcttctacccgcttcttggccgcgtccggccgtgttctagcggcggcggaggcggagggtacgagttctgctccacgggtggggatgccgaccgcgtcgagctcaccgtcgccgagagcggcgacgacttcgaggagctcgccggcggcggcccgatggatgttgggaggctgtactctctggtgccgcggctcccgcgcccggaggaggggagctccgagctcgcggcggtgcaggtgacggttttccccgggaaggggctcgccgtcggcgtgtccatccaccatgtggcctgcgacgattccagcttcatgcacttcgtcaagacctgggcggccaattgccgggtggcttccggtggggacgtcgatgctgtgccgccgccgccgccgccgttcttggaccgtggcgtggtcgccgatcccgacggccttgcagccaagacgctcgatcaaatgcggcagctggcgaacagcgggccacccccgccaccgccgtccgggccgccgccgaagctgttcatggcgtcgttcacgctcacccgcgacagcatcgacaagctcaagcagcgcgtcacggcgagcggcggcggcggcgtccactgctcggccttcaccgtggcgtgcgcgtacgcgtggacctgcctagcgcgagtcgacgccacctccgccgccagggagcgcgcgcacctgctgttctcggtggaatgccgccgccgcctgaccccgccggtgccgcaggagtacctcggcaactgcctccgcccttgcttcgtggaggtcgacacggccggcctgctcggcagcggcgccgacggcgtggtgacggcggcggtggccatcggcgcggccatcagggggctcgacgacggcgtgctggacggcgccgacgggtggttccagaagatcgtgtcgctgatgccgcaccggccgatgtccatcggcggctcgccgcggtacggcgtgtacgacaccgacttcgggctgggccggccggcgaaggtggagctcctgtccatcgacaagacgcccggcacggtgtccatggcggaggcgcgcgacggccacggcggcatcgagattggcgtggcgctgccggaggccgacatggcgcggttcagctcatgcttcgccgacggactgaagcagctgtgagtgacgaacagcttgttgcatttcttgctttcttgctgctacgaattgttgcagagttcagaatttgttcagtttggatgtgattctgtaatgctagctgttggattgcaatcgttgatcgatcacataagcgattgtgaatttgcaattgtcaatctatgaaataatcagataagctgtaatctattctacatttttttcagagatggagcaggataaggcctgcttcgatcaacttctgttataaaaaagacactgaatattcggctgtat

SEQ ID NO: 2711 - DNA, 1299 bp, Oryza sativa
  ref <308>: DATABASE ACCESSION NUMBER: AK060512
  ref <309>: DATABASE ENTRY DATE: 2001-12-06
atcgcaactcgcacacgctcgccactctcctcgccgccgccgccgccgccgccttcgccgcggtctccgccgctgcccgccccgtctccagaaatggacgcgctgtccgcgcagccggcgtgggcgctggcgctggccggggtgggcctcatggtggccgcgaccgcctcggcgcgcctcgcgcggtggctctacgcggcgttcctccgcccggggaagcccctgcgccgccggtacggcgagtgggcggtcgtcacgggcgccacggacggcatcggccgcgcgctcgcgttccgcttcgcgggcgccgggatgagcctcgtgctcgtgggccgcagccccgacaagctggccgcggtctccggggagatcagggggaagcaccccagggccgaggtccgcaccttcgtgctcgacttcgccgccgagggcctcgccgccaaggtggccgcgctcggggactccatccgcgggctcgacgtcggcgtgctcgtcaacagcgccggcatgtcgtacccgtacgcgcgctacttccacgaggtggacgaggagctgatgcgcaacctcatccgcctcaacgtcgaggcgctcacccgggtcacccacgccgtgctcccaggcatggtggagcgcaagcgcggcgccatcgtcaacatcggctccggcgcctcctccatcctgccgtcctacccgctctacagcgtctacgccgccaccaaggcgtatgttgatcaattctcgagatgcctctatgttgagtacaagaacaaaggcatcgatgtgcaatgccaggtacccctgtacgcggcgacgaagatggcgtccatcaagaaggcgtccttcttcgcgccgtcgccggagacgtacgcccgcgccgccgtgcgctacatcgggtacgagccgaggtgcacgccctactggccgcacgcggtgctgtggttcctcatctccgcgttcccggagcctatcgtggacaggctcctcctcaacatgtccgtcggcatccgcaagaggggcatggccaaggacgccaggaagaagacgcagtgacgaaccagcaccaaagaatctgagcgatagtactctctacttcttctcctctgcagcttccgaaacattgggcgtttgatttaccccgtatctctggattagttcttctcatgagtaaggtgatgatgagctgatggttaaacagtgtgtctggtttgatgtactaagattgaagagtttaagaccatgtgacacgaactcgatctggcctggttaataaagcgcgggaaaaaggctttgccttctgct

SEQ ID NO: 2712 - DNA, 1734 bp, Oryza sativa
  ref <308>: DATABASE ACCESSION NUMBER: AK060513
  ref <309>: DATABASE ENTRY DATE: 2001-12-06
gcttttgcaaagctgctctgatcagaaatcccaatggcaatggagaagagccctcctccggcgccgcacttcctcttcgtggtgagcgggatacagggccacatcaacccggcgcgccgcctcgccgcgcgcctgatggcgtcggcgccggccgcgcgcgtcaccttctccaccgccgtctccgcgcaccgcctcatgttcccgtccctgccgtccccggccggcgaggacgtcgacgacaccggcgtcgcgtacgtcccgcactccgacggctacgacgacgggtacaagcccggggtgcacgcgagggacgactacatggcgcgcacccgcgccgcgggcaccgagtcgctctccgccatcgtcgcggctctcgcggcgagggggcgcccggtgacgtgcatcgtgtacacgttcctcgtggtttgggcccccgccgtggcgcgcgcgctggggatcccctcggcgatctactggatccagccggcggcggcgttcgccgtgtactaccactacttccatggccatggcgaggccctcgcctcctgcgcgaacgaccctgcccgcggcgccgtcgtgcgcctccccgggatgccgttcctcaggtccgacgagctcccctccgccgtgtccatcgtctcgccggagcacaagcactacctgctgctcgccatgctgcgcgacctgttcgaggatctcgacgagctcaagcccagggtgctggtgaacacgttcgacgcgctggagcccgacgcgctccgcgccgtgcccgatctggaggtcgtcgccgtcgggccggtggtgcccgacggcgaagcgtctctgtcgagctcgagcacggacatgttccggcgagacgacgcgagcgcgtgcgtggattggctggacacgaagccggcgcgctccgtggtgtacgtctcgttcgggaccctcctgtcgatgagcaagcggcaggaggaggagatgaggcgcggccttgaggccaccggccggccgtacctgtgggtggcgcgccagggcgccgtcgatggcggcgcgaccttggacagcgcacccacccccgccgccgatgccggcggcggcggcggcgaaggggacgcgcaagggatggtggtggggtggtgcgaccagatgaaggtgctctcgcacccggctgtgggctgcttcgtgacgcactgcgggtggaactcggcgctggagagcatcacccgcggcgtgccgatggtggccgtgccgcagtggacggaccagccgacggtggcgtggctggtcgaggcgcgcatgggcgccggcgtgcgcgcgcggctggacggcgagggcgtggtcgagcgcggcgagctgcagcggtgcgtggagctcgccatggcgggcggcggagacggcggtgtccgggcacgggcggagcgatggagggagcgcgccgcggaggcggtcgcggccggcgggtcgtcggagaggaatctccgggcgttcgcgtccggggccgtgacgcaggcggtgtgctcgagcaggtgattccgccggcggccgccggcgatggcgaactcaacggctggattgttgttgtttttttatattcccagataatagctttgtcatttggtgtggcgttgacgcaatcagtatgttgattagtcgacgtaacagcaaatttaattggagatctcattaaattttagatgttgccatatcatctacaaacagttcaataaagggagcaaaatttccctcttc

SEQ ID NO: 2713 - DNA, 1500 bp, Oryza sativa
  ref <308>: DATABASE ACCESSION NUMBER: AK060514
  ref <309>: DATABASE ENTRY DATE: 2001-12-06
atgcctacccactgctagggtttgcccctaagccccccaccctctccgccatggctctccctctccacgacgccaccacctccccctccgaccccgacgacctcggcggcggcggcgaggaggaggaggagaggctcgcctcgaagccgctgctctcgtccccgtccacctatccttccgcggggacggaggagggcgtcgaggagctggagctcgaccggaggtacgcgccgtacgcgaggcgggacgcgtacggggcgatgggccggggccccctgggcgcggcgggggcggggcggctggcggtgggcgccgccgtgctcttcccgctccggctcgccgcgggcgtgctcgtgctcgtcgcctactacctcgtgtgccgcgtgtgcacgctgcgtgtggaggaggaggagcgcgagggtggcggtggcggcgcggctggagaagtggagggggacgggtacgcgcggctcgaggggtggaggcgtgagggcgtcgtgcggtgcggccgcgcgctcgcgcgcgccatgctgttcgtcttcggcttctactggatccgcgagtacgactgccgcttccctgatgctgaggatgagcatcaggaacagtccaaagaattgggaagaccaggggcagtagtatctaatcatgtatcttatgtggatattctttaccacatgtcatcttccttcccaagctttgttgccaagagatcagtggccagattgcccatggttggtctcataagcaaatgtcttggatgcatttttgttcagcgggaatctaaaacctcagatttcaaaggcgtttcaggtgctgtgactgagagaatccaacggactcatcaacagaagaattctccaatgatgctacttttccctgaaggcacaactacaaatggtgattatctcctccctttcaagacaggagcatttcttgcaaaagcaccagtgaagccagtcattttaagatatccttacaagagatttagtccagcatgggattcgatgtctggggctcggcatgtatttctgctcctttgtcaatttgtaaataaccttgaggtgatccatttgcctgtgtattacccatctgagcaagagaaggaagatcctaagctgtacgcaaataatgtacggaaattgatggcagtggaggggaacttgattctttctgatcttgggctagcagagaagcgtgtgtaccatgcggcattgaatggtaataatagtctacctcgtgctttacatcagaaagatgattgaaatgccttgccatcgcgcttctgtatactgatgctgagtgacttgcttgtaatatgagtacaagttcctggtgttgcatgattcctcatgttgagaggagctatgttaatatcctcccagtaaactgtaaaattatttgtccatagtgtggttcagtaatcatgtcagttatacatgattacattcacatgtctgggacacacttcaccatgcaatccatcgatgtgagctttat

SEQ ID NO: 2714 - DNA, 1852 bp, Oryza sativa
  ref <308>: DATABASE ACCESSION NUMBER: AK060515
  ref <309>: DATABASE ENTRY DATE: 2001-12-06
gagcccagacctccaccatcgccaccacctccgcctcgtttccatcgccaccacctcctcccgccgccgccgccgccaccgccgcgatgcagagcctcctcctccccaccttcgccgcggcctccgccgcccccccgcggagggggcgcgtgcctcccgccggtcgcgcctcggtctccgtgcgcgcgtccgcgtccgcggcggcggtggcgccgaggagggagacggatccgaggaagagggtggtgatcacggggatggggctggtgtccgtgttcgggaacgacgtcgacgcctactacgaccgcctcctcgccggggagagcgggattggccccatcgaccgcttcgacgcctccaacttccccacccgcttcgccggccagatccggggcttctcctccgagggctacatcgacggcaagaacgaccgccgcctcgacgactgcctccgctactgcatcgtcagcggcaagaaggccctcgagtccgccggcctcgccctcggctccaaatccatggacaagattgaaaagactcgggctggtgtacttgtgggcaccggtatgggtggtcttacagtgttctctgatggtgttcagaatcttattgagaaggggcacagaaagataactccattcttcattccgtatgccataacaaacatgggatctgcccttcttggaatggacattggtttcatgggtccaaactactccatctcaactgcatgtgctacctcgaactactgtttctatgctgcagcaaaccatattcgcagaggcgaagccgatgtgatgattgctggtggcactgaagccgcaattattccgattggtgtcggtgggtttgtcgcgtgtagagcactttcacagaggaacgatgaccccaaaacagcatcaagaccttgggaccaagaccgtgatggttttgtcatgggtgaaggagctggagtactggtcatggagagcctagaacatgcaatgaagcgtgacgcaccaataattgcggagtatttaggaggtgccgtgaactgtgatgcttaccatatgactgacccgagatctgatggccttggtgtttcgtcttgcattaagcaaagtcttgcagatgctggcgttgcaccggaggaggtcaactacataaatgctcatgcaacgtccaccctagctggtgatctggcagaggtgaacgccattaggcaagtcttcaaggatccatcagagattaaaataaatgcaaccaagtccatgattggacattgccttggtgcggctggtggcttggaagccattgcaactgttaaagctataaccactggatgggtccatccaagcataaaccagtttaacccggagccagctgttgaatttgacacggtacctaatgtaaaaaagcaacatgaagtgaatgttggtatctcgaattcctttggatttggtggacacaattcagttgtagtatttgcaccatttaagccttaacttgctgcatgttacacaaatcttggccagaatagtaaatgtcttttcaggaagttctgagttattctgcatgtcttttctttgggtgaagcaactgttgatttgacagccggcaacgttacaatgaactggatctgagattaattccattttaggcactcccatcttccattgaaattgagagctctgtataacgttgttttgcataatttgcaattgattctacctacttctgtataatggaaaatgtgggaatttctagaattgtcatgtagaagcaaaagttagatctcctgttccatagaaatgcttgagccaaggaattgcttgtctgtaatttgtatctggtctagaaaaatgttctcttc

SEQ ID NO: 2715 - DNA, 1482 bp, Oryza sativa
  ref <308>: DATABASE ACCESSION NUMBER: AK060516
  ref <309>: DATABASE ENTRY DATE: 2001-12-06
acgcacttcacttcgctcaccacatcaccacctcactccactaaccagagagagaacgcagctagtagcattattagcatcatgaccgcgatggcggcggcggcggcggtgttggtgtcgttgctgctggtggcggcggctgcggggcagcaggcggcgctggtgccgggggtgatgatattcggggactcggtggtggacgccgggaacaacaaccggctggcgacgctggtgcgcgccgacttcccgccctacggccgcgacttcccggagacgcacggggcacccacggggcggttctgcaacgggaagctggccaccgactacaccgtcgacaacctggggctcacctcctacccgccgccctacctcggccagctcgcccagtccgacaaccgctccctcctccacggcgccaacttcgcctccggcgcctccggctacctcgacaccaccgcctccctctacggggcgatatcgctgagccggcagctggggtacttcaaggagtacaagacgaaggtggaggcggtggccggcgggaagaaggcggcggcgctgacgtcggagcccatctacgtggtcagcgccggcaccagcgacttcgtgcagaactactacgtcaacccgatgctgggcgccacctacacccccgaccagttctccgacgtcctcatgcagcccttcaccaccttcatcgaggagctgtacggacagggggcgaggcggatcggcgtgacgtcgctgccgccgatggggtgcctcccggcgtcggtgacgctgttcggcggcggaagcggcggcgggtgcgtggagcggctgaacaacgactcgcggacgttcaacgcgaagctggaggcggcctccgacagcatcaggaagcagcactcggacctcaagctcgtcgtcttcgacatctacaacccgctcctcgacctcgtcaccaaccccactgccgccggtttcttcgagtctcggagagcgtgctgcgggacggggacgatcgagacgtcggtgcagtgcaaccagggtgcggtggggacgtgcgccaacgcgacggggtacgtgttctgggacggattccaccccacggacgccgccaacaaggtgctcgccgacgccctcctcctccagggcctccagctcatctcctgatccatccatccgtttcctgagaatgacggacgcatgcacagccaacagcgctactagcttcttgctctcgcttctgcttctcaactactctactctactcctgtgaacttaattagttaagttgctatttgtttctcctgctagcgatcgatcgagtagccgccgtacgtgctgcatgctgctgtttcggttgccctgcttgtttagttttgtttttctctctatcgtgcagtcatgtgcacgggcttgggcttagttgttttgctgtagtatgaatgaactgcttgcttggtgtaatatgtcatgtacatgcgcttggattgtact

SEQ ID NO: 2716 - DNA, 1612 bp, Oryza sativa
  ref <308>: DATABASE ACCESSION NUMBER: AK060517
  ref <309>: DATABASE ENTRY DATE: 2001-12-06
acaagccttccccctacctcgtcgccaagctccgcagccacgaagcgctccagaagcgctgcggccccggcacggcgccgtacgacaaggcgctccggcagctcaagtccggcgatggcgccgccgccgctgatggcgacgacgactgccgctacctcgtctccgtcagctacaaccgcgggctaggcaaccgcatcatcgccatcgtctccgccttcctctacgccgtcctcaccgagcgcgcgctcctcgtcgcgccgtacaacggcgacgtcgccgctctcttctgcgagcccttcccggggacgacgtggctgctccccgacggcggtcggcggttcccgctcctgcacctccgggacctcgacggtaagtccaaggagagcctgggagccttgctgaagagcaacggcatcgtctccgtcgccgccggcgtgaacggcagcacgtcgtcgtcgtggtcgggccggccgccgccgccgtacgtgtacctccacctcgacggcggcgccgactaccacgacaagctgttctactgcgacgagcagcagcgcctcctccgcggcgtgccgtggctgctgatgaagacggacagctacctcgtcccggggctcttcctcgtgccgtcgctccgtggcgagctcgagcggatgttcccggagaaggacgccgtgttccaccacctcagccgctacctcctccacccggccaacgccgtctggcacgccatcacggcctaccaccgcgaccacctcgccggcgccggccacctcgtcggcatacagatccgcgtgtaccacgaggagacgccgccggtgtcgcaggtggtgctcgaccaggtcctctcctgcgcacgcagggagaacctcctcccggccgcagggaacacgtcgtcgtcggaccaggccgtgctcgtgacgtcgctgagctcgtggtactacgagaagatccgcgacgagctcggtggcggcggcggtggcgtgcaccagccgagccacgaggggttgcagcggatgggcgacacggcgcacgacatgagggcgctgagcgagatgtacctgctcagcacctgcgacgcgctgctcaccaccggcttctccaccttcggctacgtcgcgcaggggctcgcggggttgcggccgtggatcatgccgcggcggccgtggtgggagaaggaggcggccacggcggtgccggacccgccgtgcgcgcgggtggcgacgccggagccgtgcttccactcgccgtcgtactacgagtgcgcggcgaggcggaactacgacgacattggcaaggtggtgccgtacgtgcggcgctgcgaggacgtcagctggggcatccagctcgtcaatggaagcagccagagccagtggtagtgtaaaactgtagatcactgaattgtatagagtagaacatgtgttcagatgttccacaaaaatacaaaaaggcgcatgcattgtacaccacaaataatcaaataatctaggcagatgtaatgatataatggcaagaaataatcttagaagttagaacactgtgccattatacttatagcaatctatgacaggatgtgacattacgatattaaatgtttcatcttaacctggttgct

SEQ ID NO: 2717 - DNA, 1143 bp, Oryza sativa
  ref <308>: DATABASE ACCESSION NUMBER: AK060518
  ref <309>: DATABASE ENTRY DATE: 2001-12-06
gcgcaaccaaagcccccaccctcgcccaaaacccccacgagccgcggccatggcgaccaccaccaccaccccctcctcctctctcaccgcccctctcctccgcccgagctcgaacgcgaaccccgccccgagatctctgccgctcctcaggagccggaggtgcgctcgggccgtggcgaccgccgccgccgccgctggccacggggccgctcatcagaggagcgggatttggtcgatcagggatgatttggtggtgccgaggtcgccctacttccctgtggagtatgcgtcggggcaggaacgcgggccatcgcccatggtgatggagcggttccagagcgtcgtcagccagctcttccagcacaggattatccggtgtggtggacccgtggaggatgatatggcgaacatcatcgttgcccagctgctatatctcgatgccatcgatcctaacaaggatatcattatgtatgtgaattctcctggaggatcagtgacagctgggatggccatattcgacacgatgaagcatatcagacctgatgtttccacagtttgtattggacttgctgcaagtatgggagcttttctgcttagtgctgggacaaaagggaagcgatacagcttacctaactcaagaataatgatccatcaacctctcggaggagcccaaggacaagagactgatcttgagatccaggctaatgagatgctgcatcacaaggctaacctgaatggatacctagcataccacactgggcagcccctagataagatcaacgtagatactgaccgtgattacttcatgagcgcgaaggaggcaaaggagtatggtctaattgatggagttatcatgaatccccttaaagcccttcaaccgcttcctgcttctagttagccatggagtgctcaatctccacggagcattttttggttatcttttagaactgttattgcatccactgtttttattagcttggcaagatagttttgcgattccacaagcaaccacatcctgaggcttcaaagtttgtacaatacagatgtactactaggaggatatcttctgcgatgaatattgcaacttatttgatgtactattaggaggatatcttctgcgatgaatattgcaacttatttgat

SEQ ID NO: 2718 - DNA, 1473 bp, Oryza sativa
  ref <308>: DATABASE ACCESSION NUMBER: AK060519
  ref <309>: DATABASE ENTRY DATE: 2001-12-06
aaccacccaaaccccccaccactaccgagtaccaaatggcggcggcggcggcggcggcggcggcgccctctccggctccctgcttcccttccacccgccacacgctgcctgggctcgtatctgtccgcgtctctcggagagtcaaagtcgccgtcgccatcgccgaccccgctccggccttcaactccgtcacggccttcgcgcccgccaccgtcgccaacctcggcccgggattcgacttcctcggctgcgccgtcgccgacgcctccctctccctcggcgacaccgtcaccgctaccctcgacccctccctgccccccggcaccgtcgccatcgcatccgtcacctccccctcccgccccaccctcgccgaccgcctctcccgcgaccccctccgcaactgcgccggagtcgccgccatcgctgcccttcgcgccctcgatgtcaagtcccacgccgtctccatccacctcaccaagggcctccccctcggctccggcctcggctcctccgccgcctccgccgccgccgctgccaaggccgttgacgccctcttcggctccctcctacaccaagatgacctcgtcctcgcgggcctcgagtccgagaaagccgtcagtggcttccacgccgacaacatcgccccggccatcctcggcggcttcgtcctcgtccgcagctacgaccccttccacctcatcccgctctcctccccacctgccctccgcctccacttcgtcctcgtcacgcccgacttcgaggcgcccaccagcaagatgcgtgccgcgctgcccaaacaggtggccgtccaccagcacgtccgcaactccagccaagcggccgcgcttgtcgccgctgtgctgcaaggggacgccaccctcatcggctccgcaatgtcctccgacggcatcgtggagccaaccagggcgccgctgattcctggcatggctgcggtcaaggccgcggcgttggaagctggggcattgggctgcaccatcagtggagcagggccaactgctgtggctgtcattgacggggaggagaagggcgaggaggttggccggaggatggtggaggcattcgccaatgccggcaatctcaaagcaacagctactgttgctcagctcgatagagttggtgccagggttatctctacctccactttggagtaggaagatctgggaggactgctccggtaggtcaaatttggaatggctcacatggacactagtgggaggagaagaaggggggattggtgtgttttgtaattcctgggctgaccagaacgattgtcagtcagttgggttgtgaattgtgtgatgtagtagcaaactgattcgtgccggcaattgaattgcaataagctagtggttgcagcatcacctggcgaggcgtagctaggagatgcagaaacagcattttgacatgtgtgggtgttgacatgcaacgaataaaatgaatgaagctgaattg

SEQ ID NO: 2719 - DNA, 2089 bp, Oryza sativa
  ref <308>: DATABASE ACCESSION NUMBER: AK060520
  ref <309>: DATABASE ENTRY DATE: 2001-12-06
atgctgatacaaaatttaaaagaaaaaataaactagaagtgagataagcgggctaaaataacccgcttgccaccgatcggagcttatattggcctctaccatcttagttcttgggagctcacgtacgtagtatcaactatcaagcggcaggatggcagccaagccgtcctcgtcgtcgtcgtcgacgggcggccaccacacggtggacatccgcgcggcgcaggcgcagcccgaggacgcgaggcagtcggcgatgagcgggccgatcaacatccgcggcgagcggaggccgccgccgatgtagcgggcgttcagccggcaggtctccctcggcagcggcgtgacggtgctgggcatggacaaggtgggcaagaacggcggccgggggcagcagcgtgcgctcccgcgcagcggcaagagcctcggggtgctcaaccacaccggcgccctcggccaggccgccgccggcgacggcgcggcacgcaggggagacttcagcatgttccggacgaagtcgacgctgagcaagcagaactcgctgctgccgtcgaggatcagggagcccgacctcgagctgccgccgcacgtcgagggcccctccgtcggcaggcagggcggcgaggaccctctcaacaagagcgtccccgccggccggtacttcgccgcgctccgcggcccagagctcgacgaagtccgcgactacgaggacatcctgctgccgaaggacgaggtgtggccgttcttgctgcggtttccggtcggctgcttcggtgtctgcttggggctcggcagccaggccatcctgtggggcgcgctggcggcgagcccggcgatgaggttcctgcacgtcacgccgatgatcaacgtcgcgctgtggctgctcgcgctcgccgtgctcgtcgccgtgtccgtcacctacgcgctcaagtgcgtcttctacttcgaggccatccgccgcgagtacttccacccggtgcgcgtcaacttcttcttcgcgccgtcgatcgccgccatgttcctcaccatcggcctgccgcgcgccgtggcgccggagaggttgcacccggccgtctggtgcgcgttcgtcgcgccgctgttcgggctcgagctcaagatctacgggcagtggctctccggcggcaagcggaggctgtgcaaggtggccaacccgtcgtcccacctctcggtggtgggcaacttcgtcggggccatcctggcggcgagggtcggttgggcggaggccggcaagttcctctgggccatcggcgtcgcgcactacatcgtggtgttcgtcacgctgtaccagcggctgccgaccaacgaggcgctgcccaaggagctccacccggtgtactccatgttcatcgccacgccgtcggcggcgagcctcgcgtgggcggcgatctacggcagcttcgacgccgtggcgcgcaccttcttcttcatggcgctcttcctgtacatgtccctcgtcgttcgcatcaacttcttccgcggcttccggttctcgatcgcgtggtggtcgtacacgttcccgatgacgacggcgtcgctggccaccgtcaagtacgcggaggcggagccgtgcttcaccagcagggcgctcgcgctgagcctctccctcatgtcgacgacgatggtgtcgctgctgctcgtgtcgacgctcctgcacgcgttcgtctggaggtcgctgttccccaacgacctggccatcgccatcaccaaggacaggcagaacggcgcgttcaaaccgcacggcaaagggaggaaggccggcaagagggtgtacgacatcaagcgatgggcgaagcaggcgccgctctcgctcgtgtcgtccatcaccaagagcaactcggcggacaaggaagaagaggagaaaacagaatgaagcgcaactcagaaatcagaaccaggaattgatgatgcatgtataaatggtcaggatatagccacagggaataacattcacgaacaaggaagatgatgtacacgacatataagttagatcgattaccatcacatataaaaccaatcacgcatcatgtaatgaaatgtctaaaagccatacggcagattatcataccgcgac

SEQ ID NO: 2720 - DNA, 1618 bp, Oryza sativa
  ref <308>: DATABASE ACCESSION NUMBER: AK060521
  ref <309>: DATABASE ENTRY DATE: 2001-12-06
aaatttcacgccaacatctgccgaggaagaacaaccgcaatgctctacccctattgcattatctccttgggatgaaacaagtgactatcaaggtgaagctgttgattctgctctatggggtgtccaagatgaccaaaacaatgaaatgtggtcattgtcttcaccaacacctactctccaaccttcaggtattggagctgataccaaaggtgcttcctgtgctatagaagaggtgatagtagcccaaggaaatagtggtgttgttgaaccgtcaccagcactggagaagaaaaggattgaaaaagtaccaagtgcttccatagatcgtggagtaccagagcaggtaaaaccaaaatcagatgctgcattatctccagaagagagcagaaaaccttcaggtttgcaactatcaagcacatatctacaagggagcacaaaatcttcaggtttgccaccgtcaggcacatctctagatgggggcatagaaccttcaggtttgctaccttcaggaacttctttggagtggggtacaaaaatttcaggtgtgcaatcctcggcctcatctctagaggggagcaaaaaggcttttgttaggcaaccatcaggctcttcactagagggaaacacaaaagcgtcaggtaggcagccgtcaggttcatctatagaggggagtaagaaaccttctgataggcagccatcaggtgcatctcaagaggggaatacaaagccttcaggctggcaacaatctgtgtcgtctcttgaaggtggcacgaaaccttcaggctggaaaccttcaatttctatagacacgaatacaaaagcttcaggttggctgcgatcgagctcatctcctgatgtgggcagaaaagcttcagcatggcaatcatcaggttcttcgcctgttgcagggagctcaaaagcatcaggttggcagccatcacctcgcgagagctcgaaatctaagcctaattccacatggggtgccggccaaagccgcaactcgtcttcgcaccaatcaacaacaccaacagctaaatactcatcagaaaccccaaggagacaaggaaacaacaacacaaattctgctggctggggagactctctcggaaacaagagctggcattcaccctcaggcaatgcgagcagccgaggcagccattctagccaccaccatgaccggcacaatcagagcagcgaaccatggcgtggtggctcaaatcattccaggagatcagatcatcgtcaagaacatggcaacggtggctcgtcgagatcatcgtcgtcgagggggcaatctcaaagggggatctgtagatactacgagaatggctactgcaggaagggcacttcctgccagttcctccaccgttgaaaacgccctcacatttttgtacagccctaaatgatttctcactcactccgtagtcagcacagaagtgacctttatttaaccttctcggcaccactcagctgttagtaagtatatacatatccatcagcacaggagtatgattaagttagcattttatgcttggaaaaacagccactgatgtgcggccacgactgtagatccttctctttaggtgaatgatgcattttgattgatcctgttaggttt

SEQ ID NO: 2721 - DNA, 1793 bp, Oryza sativa
  ref <308>: DATABASE ACCESSION NUMBER: AK060522
  ref <309>: DATABASE ENTRY DATE: 2001-12-06
ggaaacgggatccatccatcctgagaaagtgcagcgcggagagaaggacgccgccgaccagatgccgcctcaggctccgtctccggctccggctccctccggcagtgtcggcggcgcggcgtggcgccacttgcttctcctcctgacgggccttccactcgcgctcgccgccctggccttcgctctgcagtggcgcggtggcggcgtcgacgatcccaccgcgcgatggcccccccacgccttccccggcatgggcatgactgatcctacgccaccttccctcccctcctccgcatgcggcgaggtcctcatcgcctcctctggcccctccttcccctacctccgcggctggtctttccctttcgattccgattccgacgcggccctccaccccaaggtgtgcgtccagacgagcacctccgccgggttggaccagatcctcccgtggctcttctaccacaaggttgtcggcgtcgcgcaattcctactcttcgtcgagggcagggcggccaagccccaagtcgcgggggtccttgagtccattcctgtggggagtgaaggtggtgtacaggactcaggaacttgaggagcaacaggcccggagtcgaatctggaacgaaacatggcttgcaggttttttctacaaaccttgcaactatgaactatttgtgaaacaatcgctcaacatggagatggctattgtgatggctcgggatgcggcaatggattggatcatacatctagacactgatgaattactatatcctggtggaggtgctgagtattctgtcagacatttgttagctgacgtccctggtgatgttgacatggttatctttccaaactatgaaagcagtgttgaacgagatgatataaaagatccattcagcgaggtatctatgtttaagaagaattatgatcatctcccaaaagatacttactttggcatgtataaggaagcaacacgtggaaatcctaactattttctcacttatggtaatggaaaatctgctgcccgagttcaagatcatctgcgcccaaatggtgcacacagatggcacaattatgcgaagagcccaaatgaaatcaagctggaggaggctgctgttttgcactatacatacacaaaattttcagacttaacatctagacgtgatcgctgtggatgcaaacccacaaaagacgatgtgaaaagatgcttcatgttggattttgacagagcggcatttataatcgcatcaactgctagtgaagaggaaatgcttcgctggtacaatgaacgagttgtgtggaatgataagcagctcaatctaaagcttctcaggaaaggagtgctgactcgcatatacaccccaatggcaattgttcaaggtctacgtgagtctggtgtcttcacttcttccattgcagctgcccaatcacttgtgaatgacaaggtctcgttgaaggaaaacaatgttcaaaacaaaaatcatacgaaattagaaaaggtatctagaaaattcatcagagctaattctcaggcatctgccaggaaaatactgcacgctgttgagcctgccagccatgatagtaatgtatctgctgttccacctttgtcaccacctagtttggataatcacctcctggagcttagctagtgaatcaccacttgcaagaattcctcttgattgcaagttacctctggtactgacatgagcatggatgaccaaactgtctctacggtttgtggcagctaactttttagtgagcatccttttggtgatgaaagtatatatatagtacttcagtcc

SEQ ID NO: 2722 - DNA, 1240 bp, Oryza sativa
  ref <308>: DATABASE ACCESSION NUMBER: AK060523
  ref <309>: DATABASE ENTRY DATE: 2001-12-06
aaagaggatcgtctcggctcgtcgtcttctagctagggttcgtaagttctagggtttgcgatgatccccaactcctcctccctctagtatttcgagcgaattctccaacactttcacccagccgcgcgcgagaggagaaggaagatagatagatagatcgctccgcacatactatggtgctcaccccatcgccgtctccaccgccgatgctccccaagaagctccgcgcgctcggtccaggcttgaatccctttgctcccttcggcatgggtaactactattcctcctctcgctaatatatttctcctcgctcgatccatcttcccccacctccccccttctcaaacaattaatccccttcccgattcgattcgattcggttcggttcgctttcggactcggtttcaatttcgattctccctccgtcgtcgcggccctattctagccgccccctcccctccgctcgattgcctgcctccggatggtgcaattccgcagctctctcagcatgagccgggcacggacccgccacggcgatggcgacgaccgcggctggaaccagctccacgtcgcctcccgcaagggcgacctcaaccaggtgaggcgtctcctggatgatggcatggatgtcaatgcacctgcatgggggccaaaatcacctggcgctacccccctgcatttggctgctcagggtggacatgttaaaatcatggacgagctactggagcggggtgcaaatattgatgctcgcacaaaaggagcttgtggatggacccctctacatattgctgctaaggaaaggaacaaaagagctgtcaggtttctgattgagaatggtgcattcttgccacctgacatgaatgaccacaggttcaatcctcctctccattactgctctggattggaatgggcatatgagatgaagcgcatgcaagacgaaagtgattcgaccggtgaaacttctctgggctcggagagctagaggaaagcaatctcctcagtctggcaaagaggtcaatcttggatcaacagagtttgtaaacatcaagggtcacgtttactttgtgaaattggaacgaattaccatgtgaatcttacatgcgacatggtactagcatgcattgcgatgttgttgtggggttacttgtgttttcgataattgcattgtgttcttactacactggtagcatgtattctactacacattcttaatatcagaatcaatatccggtttgcgtcc

SEQ ID NO: 2723 - DNA, 135 bp, Oryza sativa
  ref <308>: DATABASE ACCESSION NUMBER: AK060524
  ref <309>: DATABASE ENTRY DATE: 2001-12-06
ttcatgcaggctgcggtgagacgcgcgacgttctcctctttccgcgtacccgaatatttgcttcgttcgttcagattgtgtaaaacaatgttatctggttggttgatgaaagaagtacaatggacctgattgtgt

SEQ ID NO: 2724 - DNA, 1722 bp, Oryza sativa
  ref <308>: DATABASE ACCESSION NUMBER: AK060525
  ref <309>: DATABASE ENTRY DATE: 2001-12-06
atcaggaaaggaaacaagtagaggaatcaattgagaagcataggcaggctgtgaaagaggtgattgagcattatactggaatatcctctcaaatcccatctggatctgcaatcgatgagcagctgcgttcatatttccttgccatcaaagctgttgaggagtctccgagtcccttccaagatggtgcagcaagccagacaccatctgttgaaagtgccgatgtggatgcatctgcagctactgcagggagacaggtagctactccaccaaggcctgctcaagttaaagtggtggaggagagagcagtttctactttgcccaaaccaagcactgaagtacgtagaccaggaggaaggagaccacttgttcgaccttcacttgaacgagttgaagaaccccaagctgatattgatacaacagtagttgaaggttccacagagaaaggcggcttgttgatggagcgtgaaactcctggtggtgtatctgcgttacagccatcaagtcgtaaacgtctaattccatcaccacaaacgagagatgatgcttcacaaggagagacaacggatgccaatccaccactgaagaaacccaaagaaggatcttcacaatgtactagtgagctaaaaactgaacagtcacctcatgaagatgtcatggcacctgttcctgtgctaccatctacagagttagatgagcaacagcctggagaagagatggacaccgatcagtcttccttgccagttgaagaggttgaggaaacaagggaggatgacttgggtgataaggatgacatggaaacacatatagacgcttcaatggacatccaaggacaagatgcagaaactggtattgataatgatgcaactactgtggaagatgtgccagtcaagtcagaagcggttatggaatcactggaggaagacctgaaaactgaggatgggaaggaagagggtcagtttactgcaaccactgatgttgaagatgagagggaggagggagagttgccagatgaaccagaacaaccagacagcactccccctgtgctggatgttggtgagcaagccggtgattctttcagggcggcatctccagcaggaccaactgaaaagagtgatgttgacatgccagaagaaactggagaaggtgatggtaccatggaatcagaccaaagccctgtaccacaatctggtggagcagatgcgtcaccgagccaaatggctgatgcgtcaccaagccctgcacgtgaaccttctcctaacccagtccaagctggtgcacctcctgaacagcagaatcccacccctcctaacccagtccaagctggtgcatcttctgaacagcagaatcccgccactgcagcagaaggtgttgaaactcgtagtaccagaacaatcaacctaactgagagagcgaggcaaaaccggcaagccaggattcttcgctcagccactcaacagaatgcaaggggccgtggcaaccagtctcttacatacaggaaagatggcggccgaggaacacggggtcgtggtgggcgtggtcagtcgtagagaatttaggtttgtctttgctcaagcgcggaggctagttttttgcaaaggacatactgaatcagggcggcatcatattcattttgtagcactatcagaattgcgagcgtacatgttactctgcttagacaaattcatgtggctaagcagcgcttattaaaatgttctcattgcc

SEQ ID NO: 2725 - DNA, 196 bp, Oryza sativa
  ref <308>: DATABASE ACCESSION NUMBER: AK060526
  ref <309>: DATABASE ENTRY DATE: 2001-12-06
aaaaaagcatgcgccaaagcttgttgttgggatagtgcttcttggagcagggtgagttgcatagtgaataatatcttttctctttggtttctgtttgctagaaagtaagaaaattctgatttcccatatgtttgtatatttatgctggatactgttatagtttgtcatattttctatctgtataatcaaataactg

SEQ ID NO: 2726 - DNA, 1249 bp, Oryza sativa
  ref <308>: DATABASE ACCESSION NUMBER: AK060527
  ref <309>: DATABASE ENTRY DATE: 2001-12-06
acaaaggcattcgcaacacacacttgaagaaaaaaaacacgacgaacacgttaaaaaaaggtcgaagagaagtgggagacccaaaccgcgaacaatgtgtggaggcgccatcctcgccgagttcatcccggcgccgtcgcgcgccgcggcggcgaccaagcgggtgaccgccagccacctgtggccggccggctccaagaacgccgcccgcggcaagagcaagagcaagaggcagcagaggagcttcgccgacgtcgacgacttcgaggccgccttcgagcagttcgacgatgactccgacttcgacgacgcggaggaagaagacgaaggacacttcgtgttcgcgtccaaatctcgtgtcgtcgccgggcacgacgggcgcgcggcggcgagggcggcgagcaagaagaagcgggggcggcacttccgaggcatccggcagcggccatgggggaagtgggcggcggagatccgcgacccgcacaagggcacgcgcgtctggctcggcacgttcaacaccccggaggaggccgcacgcgcctacgacgtcgaggcgcgccgcctccgcggcagcaaggccaaggtcaacttccccgccacgcccgccgccgcgcgcccacgccgcggcaacacgagagccaccgccgtaccaccgccggcgacagcacccgccgccgccccgccgcgcggactgaagcgagaattctcgccgcctgctgagaccgcgctacctttcttcaccaacggcttcgtcgacctgacgaccgccgcggcgccgccaccggccatgatgatgacgagctccttcaccgacagcgtcgccacgtcggagtccggcgggagccccgccaagaaggcgaggtccgacgacgtcgactcgtccgagggcagcgtcggcggcggcagcgacacgctgggtttcaccgacgagctggagttcgacccgttcatgctgttccagctcccctactccgacggctacgagtccatcgacagcctcttcgccgccggcgacgccaacagcgcgaacaccgacatgaacgccggcgtcaacctgtggagcttcgacgacttcccaatcgacggcgcccttttctgatgtactcctccattgatgcagtttgtgcactcaattgtaagcatctgaattcacttccattttaatggattcagttaaaaacttaaaatccatctgttcatcaggattatatatcttgatcagataccatgccatttcttggttcaggtt

SEQ ID NO: 2727 - DNA, 1591 bp, Oryza sativa
  ref <308>: DATABASE ACCESSION NUMBER: AK060528
  ref <309>: DATABASE ENTRY DATE: 2001-12-06
aatgcaagtcgaacgttgttttcggggagctgggcagaaggaaaagaggctcctagctaaagtagtctcgccctgcttcaaaactacagggcgcgcgctacggctttgacctaacggcctccgtttgctggaatcggaatagttgagaacaaagtggcgaacgggtgcgtaacgcgtgggaatctgccgaacagttcgggccaaatcctgaagaaagctcaaaagcgctgtttgatgagcctgcgtagtattaggtagttggtcgggtaaaggctgaccaagccaatgatgcttagctggtcttttcggatgatcagccacactgggactgagacacggcccggactcccacggggggcagcagtggggaatcttggacaatgggcgaaagcccgatccagcaatatcgcgtgagtgaagaagggcaatgccgcttgtaaagctctttcgtcgagtgcgcgatcatgacaggactcgaggaagaagccccggctaactccgtgccagcagccgcggtaagacggggggggcaagtgttcttcggaatgactaggcgtaaagggcacgtaggcggtgaatcgggttgaaagtgaaagtcgccaaaaagtggcggaatgctctcgaaaccaattcacttgagtgagacagaggagagtggaatttcgtgtgtaggggtgaaatccgtagatctacgaaggaacgccaaaagcgaaggcagctctctgggtccctaccgacgctggggtgcgaaagcatggggagcgaacaggattagataccctggtagtccatgccgtaaacgatgagtgttcgcccttggtctacgcggatcaggggcccagctaacgcgtgaaacactccgcctggggagtacggtcgcaagaccgaaactcaaaggaattgacgggggcctgcacaagcggtggagcatgtggtttaattcgatacaacgcgcaaaaccttaccagcccttgacatatgaacaacaaaacctgtccttaacgggatggtactgactttcatacaggtgctgcatggctgtcgtcagctcgtacacacacacacacacacacacacacaccccacgcattcaagcagccctggtgttgtacagatcatccgaggcgacgtttctcgattcgatcatggccaccaagatgttccgcgccgccgtcgtcgtcgtcgctgccgcggtgtcttgcctcgccggggttgctctggctgccgatgggcccgcgccgagcccgacgtccggcgccgccgccgtctcgtcctcggtcgtcgccgccgttctctgcccggccgtggcgctcctcttcgccaacctgcgctactgagttggttgaggtcgtcgcagcgcgcgcgtgtccatgaggctggctccatgaacgactctgttcttctctgcttgatcactcgcctagtgtgccttctttacccccctggttcttacctgtacttagcttcttccttccggtgcgctagattaaccgttcttgccttcttgtgatacgcatctatgtgtattgattcagatcatttcataccatcatttggaactatttattaattgctccgttatatgccggcc

SEQ ID NO: 2728 - DNA, 1288 bp, Oryza sativa
  ref <308>: DATABASE ACCESSION NUMBER: AK060529
  ref <309>: DATABASE ENTRY DATE: 2001-12-06
agaggagtcggaaaggagatacagttctcagatagtttctgctacctttgctgccgcgcgctgcagaagatcggcgagatggatgctgtgttggttaccgccgccatcttcgggttgctgctctgcggctgctcggtttcaggagtggaaggtatcggtgtgaactatggcatgatcggcaacaacctcccgtcgccggacaaggtcatcgccctgtacagagccagcaacatcaccgacatccgcctcttccacccggacaccaccgtgctcgccgcgctccgcggctcgggcctcggcgtcgtgctcggcacgctcaacgaggacctggcacgcctcgccaccgacgcctcgttcgcggcgtcgtgggtccagtcgtacgtgcagcccttcgccggcgccgtccgcttccgctacatcaacgccggcaacgaggtcatccctggggacgaggcggcgagcgtcctcccggccatgaggaacctccagtcggcgctgcgcgccgcggggctcggcgtgccggtcacgacggtcgtcgcgacgtcggtgctgggctcctcgtacccgccgtcgcagggcgcgttctccgaggccgcgctgccgacggtggcgccgatcgtctccttcctggcgtcgagcgggacgcccctgctggtgaacgtgtacccgtacttcgcctactccgccgacccgtcgtcggtgcggctcgactacgcgctgctgtcgccgtcgacgtcggcggccgtgacggacggcggtgtcacgtacaccaacatgttcgacgccatcctggacgcggtgtacgcggcgctggagaaggcgggcgggcagggcctggaggtggtggtgtcggagaccgggtggccgtcgggcggcggcggggccggcgccagcgtggagaacgcggcggcgtacagcaacaacctggtgcgccacgtcgggcgcggcacgccgcggcggcccgggaaggccgtggagacgtacatcttcgccatgttcaacgagaaccagaagcccgagggcgtggagcagaacttcggcctgttccacccggacatgagcgcggtctaccacgtcgacttctcggcgtgatcatcttaatcaggcagcgacggcgggggcgacgctccatggatttggactcatcgtgtgcatgagttacttaagtaccaattttaggaagttagtagtatgattacaatattggacaaagatatttgacatcgatatgtatatgattccgctgcatttctgattaattaccagcattcacctgtttctctgattc

SEQ ID NO: 2729 - DNA, 934 bp, Oryza sativa
  ref <308>: DATABASE ACCESSION NUMBER: AK060530
  ref <309>: DATABASE ENTRY DATE: 2001-12-06
tcgctatgaaatgaaatgaaaccaccaccaccaacgacttcctcctccacccgcttcgtcttcgtcttcttcctcctccacctccacttgatcccagcatccgcatccgcagctgcagcagcagcggcgaggtggaggtagctagatccgtgggaggtggtggttgtggtggtgagggggagatgaggggggaggcgaacggggaggaggagcagcagccgccgcggcggaatcatctgcgggacgacgcggaggaggaggaggaggtggagcggagggcggcgaggccggtttccggtcagcagcagcagcagcagcggcggcgaccgacggatgtggggggaggggcggcgatgaggagcgtggggtacgtcgggaagcaccgcctctccgccgccatcgcccgcctcgaccaggagctccagtcgctgcaggatgaactgaacgagcttgaaaccatggaaccggcatctgctgcatgccaaggagtgatcacaagtacagagggaaaatccgacccgcttcttcctgtcaccattggtccagagaacgcttcttgggagagatggtttcagcgcgtgcgtagctcttgcagtaacaaatggtgggcatccaaaggctcagattttccctagccccctcctgcaaagatgagactaccagctttgtgcagattaaaatcacctgaactgtatcatccacggatggcttggcagccaacaagaacacaacgtcgcttgccgccttgcgggctgtctagttcttctcaggacacgcaatagtttttggagagaattgctattgttgttaatgtatgtaatccctaacacgaacatggacgaatgtaccgacattatcttccagagctcttgattagctctgcttgattgattctaatgctttcctgcaatgccatgcaaaacattcagattgc

SEQ ID NO: 2730 - DNA, 265 bp, Oryza sativa
  ref <308>: DATABASE ACCESSION NUMBER: AK060531
  ref <309>: DATABASE ENTRY DATE: 2001-12-06
gtcgttgctcctcaaaacttcataatcaagattgttgataaagagggtgctagggagtatgccaggcgtgcatacaccgacagtccaccggaagctgcaacatcagaagctgcaactgtagcagcctgagttgtatctgccatatgggtgtgaaccttaggtttccgagtacaattgctatgtaatcacaagtactgggatctgagaactttgttgcaaatttacttcctcttttatttgtgttatttatctgtttaactgtttc

SEQ ID NO: 2731 - DNA, 1307 bp, Oryza sativa
  ref <308>: DATABASE ACCESSION NUMBER: AK060532
  ref <309>: DATABASE ENTRY DATE: 2001-12-06
acaacaacgcctatagtctagtagagcctagagagagaaagcgcgaggagaggagaggagatggagcggccggcgccggtgaggaagtcccacacctcgacggccgacctcctcgcctggccgcagcagcagcaccagcccgacggccacgccgcctccaccccctcccccgctcgccgcccccaccagccatcggaggcgctgaggaaggtggtgttcggtggccaggtcacggaggaggaggccgagagcctcaacaagaggaagccatgctccgcgcccaagtggaaggagatgaccgggagcggcatcttcgcggccggcgccgacggggaggcggaggagcccggcagcgccgccgcgcccggccgcgccgccccgcgcaattaccagccagttactgtgagccacatttcatttgctgaggatggaagtgttcctcccaaaaagccaacttcagtggctgaggtagcaaagcagcgtgagcttagcggtactctgcaaagtgaagcagacagtaagatgaagaagcagatttcaaatgcaaaatcaaaggaactcagtggccatggcctttttgaccctcaagatgtaaggcctaatggggcaaggaacacagcaaatggcaccggtgcctcacacacacctgtgagaaatgcaaatgtgagcagcttctcgtttggggaggccaacactgacagcgtgacgaaaactgcaaagaagataactggcaagaaattcaccgatctcacaggcaacaacatattcaaaggagacgaggcccctgcttctgcggagaagcatctgagcaccgcgaagctgaaagaaatgactgggagcaacatattcgcggaaggacaggcgccaacccgagagtatcatagcgggaaccgcaagcctcctggcggcgagagcagcattgcgctggtttagcattctggtggacaccgtcgctgtccgtgttttcctctttaggatgaaccctaggagtcgttctatcagcagattgagctgccagtttgctttcctgtttcgacggttaggcataaagtttgtttcctgctgatgtgggtaaagacaggctatgctctcctagcataacatttgttgtggtgttgtagtttggtatggtcagtcactttgctgtgacatactcaaatggaacagcctacatggtgtgcgctctcatttctgtgactgaagatgccgttgctttggtgtctctcctttcattgtgtacgccagatctgtactgttgacaaataataaattggttggtatgttgcctaaaatgcagctgtgaatac

SEQ ID NO: 2732 - DNA, 1072 bp, Oryza sativa
  ref <308>: DATABASE ACCESSION NUMBER: AK060533
  ref <309>: DATABASE ENTRY DATE: 2001-12-06
aactccacctctccacatcttctcgccaccgccgacgccgccgcggctcgcctcctctcctcccctcgccgccgccaccgccgccgcagaagcttggctcatcgcggcgcgagtgcctgatggccgcggcctccatccccgcgagctcccagcccttcaagctgatcctggggtcatcgtcggtggccaggaagcacatcctcaccgagatggggctcgagttcgaagtcatgactgcagatatcgacgagaagagcatcaggagggagaaccctgacgagctagtgacggttcttgcggaggccaaggctgatgctatcatgtccagattgaatatttctgattaccagaaagaaggcgacaggccaacactcctgatcacttctgacatagtggtcgtccatgaagggattatcagagaaaagccaaccactaaggaagaagcacgccaattcctgaaaggttattctggcagccatgtctcaaccgtggggtctgtagtcgtaactaatctgacaactgggaagaggcttgaaagcctagacaaagctgaggtgtacttccatgatataccagatgagatcatcgaaaacctgatcgatgagagggtagtatttagggtcgctggtggcttgttgcttgaacatccattgacattaccatttgttgaagcagtggttggttctagtgacagtgtaatggggatctcgaaggatcttgcaaacaaattaattcaggatgcattgtccgcttagcctagtaatatttggcgctctgattatttatcacattattacgatatttatcagtgaaaatttgtcagggatatggtggtatactggtatctcatagccatttttttagttcaaaagcttttgaaggatttcagaacccgacacacgaagacgcatggtgtgcaagaacactcgagtccctctatctactgttttgatgagattctatcattgtactacttacacgttgactgaatatactgtcattgtgaagcgttcaatcaatatctccatggggaatgagaatgttgcaaaagaactcgcaatttttacatatt

SEQ ID NO: 2733 - DNA, 1238 bp, Oryza sativa
  ref <308>: DATABASE ACCESSION NUMBER: AK104313
  ref <309>: DATABASE ENTRY DATE: 2002-08-28
ctaacggtaaaacagcgatgaccatgcatcttctctccggccaacggctgctcctcccgatcccatgcggcgcctgctatcgctcgccgccatccccggcgatcaagccgtccccgcttggactacgcccattcaccaagtcatcgtcgtcgttgcccctgcatctgcatgcagtctcgcccgccaccgttgcaaccgacggctcctccacctccgcgcagccagatagttgggcagagttcgcgtcgcgggtgtccggcgagtgggacggatttggcgcggagttcacggcggccggcgacgccgtcgagctaccggagaacgtggtccccgaggcctaccgcgactggggcgtgcaggtgttcgactggcaaacgcagtgccccactctcgccgacccggccgcgccgtgcgacctccactacaggctcgtccgcctgctccccactgtcggctgcgaggccgacgccgccaccgtccacacctcgcaccagcgccacgcctcctccgcctccgcgttcgcctactccgccgccgggtcgtacgtcgccgcctggcccaggggccccgcgccggtgctcgaggtggagcactgcgtcgtgcacccggacaaccgggaggtgagggtccgcctcgtgcagacagtggcgctcgccaaggaggcgcggctccgcggcgtcaaggtgttctccgagcagtggtacggcccctaccggaacggcgaccagctcggcggctgcgccctccgcgaggccgcgttcgccgccggggagaagctcgccgcctccgacgtgaccgggcagtggcagagcgacgccgcctccgccgcgaggttctccggcgagctggaccccgagacgggcaagttcgccgggttgacgcctgatgagcccggtgagagattgagccgagacgacggcgatggaatcgtgacgctgccgaagcagctgtggagctcgttcaaggagaatggcaaggacgagttcgtgtgcgaggtagggtgggtgctgggccatggcagcgccatcacgtcgaggtgtgttctctccagagatggagatgtcaaggagatagtcgtttcgcgcgagtcgcgtgtgtcggagggaacctgatcaggatatcaaaattgtcaggttcgatgatttttatgtagaatagaattatagccatacacaaatgtcttacacgcccgggtgtatactaatcaaattggcctcccgaaaggagtatacatgagt

SEQ ID NO: 2734 - DNA, 1251 bp, Oryza sativa; identical to SEQ ID NO: 2540
  ref <308>: DATABASE ACCESSION NUMBER: AK060534
  ref <309>: DATABASE ENTRY DATE: 2001-12-06

SEQ ID NO: 2735 - DNA, 1567 bp, Oryza sativa
  ref <308>: DATABASE ACCESSION NUMBER: AK060535
  ref <309>: DATABASE ENTRY DATE: 2001-12-06
caagtcctatgttcgttccgagatcgatagcatacttagaaatgttggtcgtactttggcacatttccatttacctgagcctactattcaaagcacatccatccttggcaataggttgctaatagatgaacaagcatatgatctagagaagatatcgattgaagcggctgatcagttaggcaagttaaatctgaaccagagacatatatatgatgctattctcaattctttaaatagtgacattgggcataccttctttatctatggctatggagggacagggaaaacattcctttggaataccctactaaatagtgtaagggctgaagggaaaattgctttggcagttgcttcttccggtatagcatcacttctacttcctggtggccgcacgcctcattctcgctttagaataccattggacatacaagagcatccagtttgttctattaagaagaacactcacttggctcaattaattcaacaaacctccttagtcatatgggatgaggcacctgttaatcacaaacattgctttgaagctcttgaccgaacattgagagatattcttgcatccaatgatccatcacttgctaacaaacagtttggaggcattacagatgttcttggaggagattttaggcaaactctcccggttctaccctatgaaaaaaacaggaaatcttatcttcatccatcacacgttctcatttgtggcagcactgcattctcatgcatcttacggaaaatatgaggcttcaatccccaacattgtctaatactcatcgtcaacgccttcaagaatttgcagaatggttgttagcaataggggagggagcagtagcagattcttcacctactgatcgagaggatgtttcttgggtaaaaataccagagtatttgcttttgccagatgacacaagaaacctttcaggccttatctcttttgtatatgatgcctcaatcaattctcacacagccaattatctctgtgagcgagcaattctagccccaacaaatgaaatcgctgcaagtataaattcccaaatgattgctcagctgactactgaagaaatgtcatactatagttcagacacaattgaagatactacaagtaatcgtgccactcttgatgctctttacccaactgagttcctgaacactataaaaatcagcggtttgccagaccatcaccttcaactaaaaataggagtgctgattatgctgctgcgcaatctgaacccaaccagacttataatgactcaattgacttgtcgtgtgatagaaggggagataattacagggaaggctaaaggatccaaggcatatataccaaggatagtaaccacttcaattgataagaagtggccttttaaattaaagcgccgacaatttcctgtatgtgtgtcatatgcattgactataaataaaagtcaagggcaaacacttagtagagttggtgtctacttacctagccctgtcttctcacatggacaactttatgtcgcactctcacgtgtaacatcgcctgatggtcttcgtattctaattgagaatagtccaactg

SEQ ID NO: 2736 - DNA, 1454 bp, Oryza sativa
  ref <308>: DATABASE ACCESSION NUMBER: AK060536
  ref <309>: DATABASE ENTRY DATE: 2001-12-06
atgaagcgaagcgagtgaacacacacccctccccccaccctttcccgcaacacgcgaaaagagaggcgaggcggaaacaagcccgggcttttccgtctcgtctcgtctccctcccaaaccgaaccaatccaatctcttctcatccatccccatggaggcgcaggcgcaggacaaggcggaggagggggaggaggagggcacgcggcagcaacacgcgcaggctgggccggtcggtgcggctggtggtggtggtggggggggcgcggcggctgtggcgatgagcgccatccccatgaacagctggctcgtgcccaagcccgaaccggtggagttcttcggcgggatggccatggtgcgcaagccgccgccgaggaaccgggaccggcacaccaaggtggaggggcgcgggaggcggatccgcatgccggcggcgtgcgcggccaggatcttccagctcacgcgggagctagggcacaagtccgacggcgagaccatccggtggttgctgcagcagtcggagccggcaatcatcgcggccaccggaaccggcaccgtcccggcgatcgcgaccaccgtcgatggcgtgctccgcatccccacccagtcgtcgtcgtcctctggcccggcgtcctccgcggtggtcgacggtgaggagtcctcggccaagcgacgccgcaagctgcagcccacgcgcgcggtggctggcgcgtctccgctggccacggcggcgcccgcggcgtactacccggtcatcgctgaccctctcctgcaaggtagcggcggcgcggcgatttcagtcccgagcggcctcgctcccatcaccgccaccggcgctccccaaggcctcgtgcccgtcttcgccgtcccggccactggcagccccgcggtcgccggcggcaaccgcatgatcccgcaagccaccgccgtatggatggtcccgcagcccgcaggcgccgcgggcgcgggcaaccaacccacgcaattctgggccatccaatccgcgccccagctcgtgaacttcgccggcgcgcagttcccgacggcgattaacgtcgccgacttccagcagcagcaacaacagcagccggtgtcaacaaccatcgtccagaacagcaactcgggcgagcacatgcacttctccggcgccgactcccacgagcagcagcggcgcgggcggaaggaaggcaacagcggcggcgtggtggaccacccggaggaggacgaagacgacgacgacgacgagccggtctccgactccagcccggaagagtagcaaacacacacagcacaacacaaaaaaagcaagcgaggcgagcactccactgcacgccaaaaagtccacaagtcccccccacacacaaagcttaggttcctttttgctccgattcaatttctcgatcgtttctttcccgcaatattcctcatccttgtcatgatgaactagtaattactcc

SEQ ID NO: 2737 - DNA, 1621 bp, Oryza sativa
  ref <308>: DATABASE ACCESSION NUMBER: AK060537
  ref <309>: DATABASE ENTRY DATE: 2001-12-06
aaatttggataaaccgctcgaagagcggcatccgatcgagctaacaatggagggtgtcggtggcggcaagcgccgcggggacgacggggcggaggccacgccgcggtggcgcttctcccggccgtcgtcgcagggcgggcccctggcggccgccggcctcacgagcatccgcgcggtgctcaaccgcgtcaactcctccgtcgacgccgccgccgccggcgggccgcgccccgtcctgcggctcggcaacggcgaccccaccgcgtccgcctgctaccgcaccgcgcccgccgccgaggacgccgtcgtcgacgcgctccgctccggggcgcacaacggctactccctaaccgtcggcgtcctctcggcgcgccgtgctattgcagaatacctatctcgagatcttccttatgagctttcggcaaatgatatttacctgacctccggatgtgtccaagcgatcgaagtcatgatctctgttttggctcagcccggatccaacatcttacttcccaaacccggctttccattgtatgaatcacggactacattcagcaatctagaggttcgacatttcgatctcattccagagagaggctgggaggtagacctagagggtgtgcaagctattgctgatgagaacactgttgcaattgtcgtgatcaatcccagtaacccttgtggaagcgtgtattcgtatgatcatttggcaaaaattgccgagaccgccaggaaacttggtttgctgataattgctgatgaggtatatgaccatttggcatttgggaataatccttttatacctattggtgtttttgggaagaccgtcccagtgatcaccttgggatctatttcaaaaagatggcttgtacctggttggcgacttggttggatagcaacatgtgatccaaatggcattttaaaggaagccaaggttaaccaatcaattgagaactatattaacatctcaactgatcctgcaacgtttgttcagggagcaatccctcaaattatagccaacacaaaagaagattacttcaacaaaattctcgatcaattaaggaatgcagcggatttatgttatgataaaataaaggacatcaagggcattacatgtccacacaagccagagggatcaatgtttgtgatggtaaaattggatctctcttacttggatggcttccatgatgatatggacttctgctgcaggttggcaaaagaggagtctgtgatagttttgccagggagtgcattaggattgaagaattgggttcgcatcactttcgccatcgatataccatctcttgtggatgcctttgaaaggataaaatctttctgccagaggcatggcaaactggaaacctaagcacaaaggtgttgagatatttcattattgtggtgcatcggcaactacgcgttggggcacccaaatgttgttcttaataatctgttgctgtgaccaagatgatcatttaccttgtcaaacatgtatatcgtattcttccggcaggtgaactcaaacctatcttgtatttgtaatgtattaattgtcgggaaatgctgtaatctataactgtaagtcattcttggttacagttgatttgaatacgtcagcctgtat

SEQ ID NO: 2738 - DNA, 1798 bp, Oryza sativa
  ref <308>: DATABASE ACCESSION NUMBER: AK060538
  ref <309>: DATABASE ENTRY DATE: 2001-12-06
gcaagactgaaacactccgcagactgacacgcttgcatgggggcggcggtggggaaggcggctccggcgaaggcccggctcgacattgccgagaacaccatattccagcggaaccgcggcatatgggacgcggcggccgcctgcaccaacgaacgcctcctcgacgcggtcgacgagatcctcgacctggcggaggcccagcctttccccgcggcgtccgcggccgccgcccgcctcgacagcgccctccgcgccgccatgtcgctcatgatggacgagttcatgtgcctcagggtctggaacgcctcctcccatgacctgcgcctcgccgtcgacaggctcgcggtcggtgcttccgccaacgccctgtggcagcacaccttccccagcaccggcgacaggagcagctcggcgagcaccgtggggcgcgcgtcggccggaagcccgtcgagtgcccctggcgacttggtcggcttcttggacggcgagttcttggatgagctccagctgctctgccccgcgagcctgctcgtcctccatgagatcgcgcaccgggtaatccgtgccggctacacgaaggagctcgtccagaaattcacaaattccccatgcgatgttctggacaggttcttgtcgatttttcagggggaatgctcgcggcggacgacagtggatctgatcaagcgatggagcctggcgactcatctcgtcgggaaggccctcgtcgtcatgcagcggcagctgtacacgcacaactcccccggcgcctttgatgctctcaaggacgagtacttcttggccatcacaaagaatcgaatcttgaacctgctcaagttcgcagacgatttcaccagcatcacgtcgcacgagaagctcatttacatccttggcatgtaccaggctctgagcgaggccgcttcaggcctcctgctcatgttcaccgggccgcacaaggagctcgttgccgagaggtccgaggaaatcctcgccaaattggctatgtcgataaggtccatggtcgccagcctcatagcgaaggtacgagacggtgtctcgaacacgaagaacatcgtcggcgtcggcgtccatccgctgacgaaatacgccgtgctctgcatcgtgcggccggcgccgcaccgcgacacgctcgacctgatcctcgcgagcggcggggacgacgtagcgtcgctgtccgatctcgcgtcgcgcgtggtagggtccctggaagagaagcccgtgcttccctgcgatgacgacgcgacggcggcggcgaccggttcgcggcaccacctcttccacgccaacaacgccaacttcgtgctgcaaagctgcaagcctctgctcggggacgagtgggcggcggcgcgcgagagcatcgtggagcggcacgtcgcgggctacgccgaggcttgctgggcaccggtcgtggcttgcttggaacccgcgggcaggaagccggcggcaaaagtcgtggccaagttcagcgccgcgtttgacagagcgtatgagagtcaggcgcgctgcgaggtccgcgatcccgcgctccgcgacgcgttgcgaagggccgtgtccgacaaggtcgtgactgcttacggcgtgtacctgaagacgcaccccaagctcgagaaaaaactcaggtacaccgccggggagctgggcgagcggctttcggaattgttcgaaggagaagctgcagagcacaacaaatgaaggccgatttcaacttttttttttcaaacttttaaatttttcgtcgcatcgaactttcctacacacacgaacttccaatttttcagtt

SEQ ID NO: 2739 - DNA, 1530 bp, Oryza sativa
  ref <308>: DATABASE ACCESSION NUMBER: AK060539
  ref <309>: DATABASE ENTRY DATE: 2001-12-06
gaaagccccctcacacgaaaaccccaccaaactcttcttcttcttcttcccccattttcctcgcgttcccctcgtgccgcccgcctccgccgtcgcgtccccgccgccgccgcccgccttccccgaggggcgcagccgcggagcgccccacccccccccccatggccgcctcgctcgtccacgccgcggcagcctccgcctcccccgcgccggccgcccgcgtgggggccttccacccgctcgcctcctcctccccattcctgcgcctggcgtgcgccaccgcttcctccccctccacccgccgccgccgttgcctcgacgccccgctcagggcgctctcggcggggtcacgcctcgccgccggatggggcgccccgcggactcgccgcgtcatcgccaccttcgccggagaggaatctgtgggctcagaatcgggtgatgacaaggaaaaagggaagggtgagatgaagcctgaggaagctcaagaagtgtggaaggagatgcttaagcagttcaaggatgaggcgcagcgaatgcacggcctgacattgcaggcgtatggtgtctactcccagagggcaagggaggtgctattagaggcctcagagaagctgaagatccacgcagacaaagcacagaaggatctcagcgtgattgccacagaggttggtgaggagggacaggagtatctaaaactcgcggctcaaaactcgctagactcaattaaggatattatcgagacattcaattctcttggcaagttgaagatatcagagtatgaggattatcacgtgggcattccctttggtacctttcttaccgtaggaggtttcctgaacttcatgcttactgggaggacatctgcaattcgttttggtattattcttggctttgcgctgttagctatgggcatctcaagtttgagatctcaaagagcaggtggccgtcgtcctcgtcttctgctgaaaggacaagctgcaattgcaagtgtcatcttcttcagggaattattaattttcttccactatgggtggtttccaaatattttcgtggtccttctcagtggggcggtgacagccttttacactcatcgtattatgactggtggtcacaaaggtccaagctccgagagtactgcagagaactaatggttacacatcaccctggatgaatcagatgatcacaggaacttgggtttgaagattgactggcccatttgctttccgtttccatccccatcaaactcaagcaaccctagtttgtctttagtccccaagtggctgtggactttgacggttgggttcagaagacgacttgcatgcatactcgtcctcgcagttgcgctcctttgttctccccatgtaatatacacattcgcctcgaacaacaataagaaattgacctccaaaggtcatagatgtacctagctgttttctgtttcttctgtttatttgatgcaacgttgttgtgctctaagcttgtgatattcaacaacatccagtgaaatccagcaaaaccagtattcgtttc

SEQ ID NO: 2740 - DNA, 1829 bp, Oryza sativa
  ref <308>: DATABASE ACCESSION NUMBER: AK060540
  ref <309>: DATABASE ENTRY DATE: 2001-12-06
aatacacatagtagtaggagtaggtgggctgtagtcatctctgctgccaccgtcgtctcgtgccttgcatgtttccgaatctctctgttactctcctacgcgtttgcttcaagctttgaccgagaagcaccaatccagctacatgttcttgacctgttcttcttcttcctgcctctgtatggtgttttgaatggtcagatttggtcttcgtcatgaacagaagctgagatctttggtgcaggatcctcacctccggttctgaaagaacccctgtttcccagttttgaagatacctgaacaatgaagccacctttggagaggaaccctaccaagaagcgccactcgtggtggtgggacagtcacattagccctaagaactctaaatggcttgcagaaaatcttgaagaaatggacaagcaagtgaaggaaatgctgcagcttattgaggaggatggcgattccttcgcgaagaaagcgcagatgtactaccagaggcgtccaatgctcatcacccatgttgaaaatttctaccggatgtaccgtgctctagctgagcgatacgacaatgtcactggtgaattgcgcaagaacatccctacaaggctgcagtatcagggatccttggcaggttcagactctgagctgcagaggtcaccctcaccatctcctgaaccacagaagtcctggacaagggagcagagcccaagggccgccggtttcgacgtcttcctgtccaacaagagcaatggctcaccctcaccggcctcaaggaaggagcctgaggatttggcttcacagtcagaatctgatgcaaagtctgaagatggtgaggatgatggcattgcctacacattgcaccagagagttcttgagcttgaggatgagctcaacaccgtgaaccagaaactgcacgacgcaaatgaaaaacttgaggttctggaagagaagagcttgaggtgccattgtgattctaaagaaaatggaaacggtgctgatcaaagtgcaataaatgagaagctacagtcttcacaagaggagattaacaatatcaaaaacagccttgaagttttgtcggaagagcactctaggctgttgggacagaacaagaaactggaggctgaaattgtcaatctgaaggaagaaattgcttcagatagacagcaatatgaagagaagctctctcgtagtgatgctgaaattgacaagtgcaggcaagaacttgctgatgcttctgagaagttgctgcaagagaagttgagcaacagttcggtgacagctgagctgcaagaaacgattgaaagcatcaggatcaaacttgaagaagtttctgaggagaaattacttgttgagaacaagtttaagcagctggaggaagcaaactctgaagctgaaaagtacaaccaagaactgtcacatgctaccgagaagctttcagaggagaagttcagacacgaggctgagattcttgcattgaatcaggccattgaaaatctgaaatccaaactggagagcattgctaaggagaaatcgttgcttaaatcatggtttgctgacctagagcaagtcgtggagcgaggaaggagaattttccccgaatagccggaattccgtcagaaaaaatcatagcttgcatttagcgaattagaacttttttttcttcttctaatacaccatgatacacacttgagaagtcctaccatgcatcagcattgtacttttcctgtctgattcttttccttgctgaggcgatgcatggtggtgatgtgctgattgcctgcgagtcttttgcgcggaacgtatttccctcggcaataaaatggttctaaatc

SEQ ID NO: 2741 - DNA, 206 bp, Oryza sativa
  ref <308>: DATABASE ACCESSION NUMBER: AK060541
  ref <309>: DATABASE ENTRY DATE: 2001-12-06
gatgcttttgcttctcccgttgtaaaaagggcgaggtgtctctcccctcatctcgatgtttcgttgtgtacattacctttgtattaacttatcagtgtcgcaactgaactactgaaaaagcccattgccctgtacatatctgcagaaccagaatcaaatagagaagttttgaagtgagataaatcaagggatagtgttcctcatgc

SEQ ID NO: 2742 - DNA, 275 bp, Oryza sativa
  ref <308>: DATABASE ACCESSION NUMBER: AK060542
  ref <309>: DATABASE ENTRY DATE: 2001-12-06
gaagacgagccagattttctagaagatgatatattccatctggtccaggtgttttgatcgcgcgcaggggacatcttgtcgaattcttttccagacataatacttacaccccaaatgtaactgcgatttgtttgaggaaaggtgcaacttacccaatgtcttgggggaaaaattgtggcaactatattgcaaaattttggtgtgccatggccgcaatgatgtattgtaactaaagtaaatcgatatgtgtgttgcatcaaaatagtttggcattt

SEQ ID NO: 2743 - DNA, 258 bp, Oryza sativa
  ref <308>: DATABASE ACCESSION NUMBER: AK060543
  ref <309>: DATABASE ENTRY DATE: 2001-12-06
gcgtaagaagcgatcgggctgtggaacccgtgtccgtgccttccatgctgtgtccgcctgtgtggaagaagttggcggggcctgagggtccaattatccgtaattactatcgttagcagctttattgttatgcatagcatcattggaaacttggtattgtgtaattttggttagtattgaacttatgatgtgaagatgactctgcatgtgacctgatttggtaaggttatgatgtgtatatacggtatggttgctgat

SEQ ID NO: 2744 - DNA, 1335 bp, Oryza sativa
  ref <308>: DATABASE ACCESSION NUMBER: AK060544
  ref <309>: DATABASE ENTRY DATE: 2001-12-06
ctgtggttgaggttgatgcagtctataccaagccatttaagaccgataccctgctcatcactccaggccagaccaccaacgtccttgttagagctaaccaaggcgctggccgttaccttctctcagtctcccccttcatggatgcgcccgtgcaggttgacaacaaaacaggtaccgctactttgcactacgccaacacagtctcgtcaagcatggcatccctcactctcgtcaagccaccaccacaaaatgccacccatatcgtatcaaaatttactgattcactccatagtctcaattccaaggagtacccagccaatgtgccacagacagtagaccactcccttctccttaccgttggcgtaggtgtcaatccatgtccaagctgcatcaatgggacaagggtggtgggcacaatcaacaacgtgacgttcatcatgccatcaaccccaattcttcaagcccactattacaacattccaggagtgttcacagaagacttcccagcaaccccactgcacaagttcaactatacaggaagtggtcccaaaaaccttcaaaccatgaatggaaccagggtttacaggctgccatacaatgcttcagtgcaggttgtactccaggatacgggaatcatatcaccagaaagccacccaatccatttacatggctttaatttttttgtggttgggaaaggggtcgggaactacaaccccaggacctccccttctacattcaacctcatcgaccccatcgagaggaacaccattggagttcctactggtggttggacggcaatcagatttaggtcagacaacccaggtattgattttaaaacctatgtttttttaagataaataaccccttctgtttccagacacattgattgagctgttatattgcaggtgtttggtttatgcattgtcatttcgaggtgcacacatcatggggactcaagatggcctttgtggtggataatggaaagagacctagtgagactctgattccaccacccaaagatcttccgcagtgttaacaacatgggattcaaaactgcccccacggagaggagcctattacaagaagggtaattggctttggtccgatgtacggaaagaatcaacggtgatttctaccatgtgctactacttgactcttgccacacatttttttctcctttttgatttttttgggcttgtttaccaaagatagtgcatacagggcattcaggttgtaattagctcttgccatgaccaacttgttccccctttttcaattaatgaaaatgtatatgttggcatgcctcatgaattgaatgtttgttgagaattagag

SEQ ID NO: 2745 - DNA, 2094 bp, Oryza sativa
  ref <308>: DATABASE ACCESSION NUMBER: AK060545
  ref <309>: DATABASE ENTRY DATE: 2001-12-06
ccagcgacgacgaggaggaggacttccttgtcgggcccgcccgtggctcctccgcggcggcggccgtcgcgccgccgccgccgccttcttctccggcgcagtgctcgctgctgggtagcccccacgacgatgccgcgcgggagagaatgccggaggaggacgaggagatcgtgtcgtcggtcgttgccgggaaggtcccctcctacgtgctggagaccaagctcggggattgccgccgcgcagccggaatccggcgcgaggcggtccggcggatcaccgggaggcagatcgaggggctcccgctcgacggattcgactacgcctcgatcctcgggcagtgctgcgagctcccagtggggtacgtgcagctccccgtcggcatcgccgggccgctcctgctcgacggccagcggttctacgtccccatggccaccaccgaggggtgcctcgtcgccagcacgaaccgcggctgcaaggccatcgccgagtccggcggcgccgtcagcgtcgtcctccgcgacgggatgacgcgcgcccccgtcgcccgcctccccaccgctcgccgcgccgccgagctcaaggccttcttggaggattctgtcaacttcaataccctctccatggtcttcaataggtccagtagattcgcgaggctgcaaggggtacaatgtgccatggctgggaggaacctgtacatgagattcagctgctgcacgggggatgccatggggatgaatatggtctccaagggcgtgcagaatgtgctggattacctccaagatgacttccctgacatggatgttattagcatctcaggtaacttttgctctgacaagaagccagctgctgtgaattggatcgaagggcgcggtaaatctgtggtttgtgaggcagtaatcaaggaggatgtagtcaaaaaggtgctgaagaccaatgtgcaatcgttggtagagctcaacgtgatcaagaatcttgctggttcagctgttgctggggctcttgggggtttcaatgcccatgctagcaatattgtaactgcaatcttcatagccactgggcaggatcctgcccagaatgtggaaagctctcactgcatcacaatgttggaagctgtaaatgatggcagagaccttcacatctccgttactatgccatcaattgaggtgggcacagttgggggagggactcagctggcgtcacaggctgcttgcttggacctgctcggcgtgaaaggcgcgaacagggaatccccgggatcaaacgcgaggctcctggccaccgtggtggcaggtggtgtccttgccggggagctgtccctcctatctgcactcgccgcaggccagcttgtcaagagccacatgaaatacaacaggtccagcaaagacatgtccaaggtgatttcctagtcctagtagttcgaggtttggatcgttgcattggaaagaaagaaagaaaaaatggatagattcagaatgaagtgaatttcatgtcctgtgaaatgggtggctttcttaagaggtcaagggctcatcaaacaaaagtgaaggacagtgaagtttacggtgacatcgtcatggctgctgatgctgatacaaacagttcttgttccgaggtttgtgctacttatttcttgatgtttggtggtattggccggtctgctgctgagtcatgaaaccggtcgttctccggcgtgctgtcatcgaccccattttacaactgggaggctaactttggtcttggtgttcataaacaataatgttgataaaataggccatggttggtaggtactggactactggtggacgacgggcctccctcgttgcttcacgaagctgtccactttccagctttgctttagtaattactttcgctttgttttaatccttttttgagtagtttttctccattatttcctcgtcggtcagaactcagaaccctgtcgaagcttagtgatgtggtaattttgtaaaaaaagatgtgttgctaagtggctcctctccattgtgtatgaaactctctctgtttctttcctttttgtaccgattctctggccaattccgggatctgaatgaatggtcgagacgttgaagtgtc

SEQ ID NO: 2746 - DNA, 1137 bp, Oryza sativa
  ref <308>: DATABASE ACCESSION NUMBER: AK060546
  ref <309>: DATABASE ENTRY DATE: 2001-12-06
agctaatctttcctcctcctcatcaccgcaacatcaccgaaagggtcgaggatatcttctgcttcgccatcaggggaggatccacctcttcgtcctcttcttcttcttcttcctcctcctgcgacgacatctttgcgaccctgccgcttggagttcttgggctgtgcagttcttgatttgcttcttggttgggggtgttgtgggttttgagggaggagaggagttcttggcttgttgggtggagcgagaaagggcgttcttgggagagacgcgaagtccggacatgggagcaatgccaagttcaggatcgaaggtatcggtttcttgatgttttttttgttttgcaacctaatttagtctttgttagggttagtcagtttctttgaattgttggggggaaaggcatgaactttttacttgcctttcttgataatttcagatgggtgtatttggtattaggatgatgattgttaactctaaaaagggtttttcttttctttttttcttcagatgttgtcactttgcctgcagttcagatgatgggcaagtctgcaacagagacttcagatctgatcagaaatcacaagaactctcatacacatctcagttcttggattgccaactgatctagacaaaatcacagatcaaaacatctagccgaatttggggtttgttgcaatggaaggtgtaggtgctaggcagaggaggaaccctctgatacccagaccaaacggttcaaagaggcatctgcagcatcagcatcagccaaatgctgccgagaagaagaccgccgcgacatcgaattacttcagtatcgaggcgttcctcgtgctcgtcttcctcaccatgtcattgctcatacttccattggtgcttcccccattgcctccgccgccatcgctgctgctgctgctgccagtctgcctgctcatcctgctggttgtgctggccttcatgccaacggatgtgcggagcatggcttcctcttacttgtaaatacatctcctaggggaatttatttttgtttttgttattttggttttggttttgtattcgacataagatgagcgcgacgaagcaagctgtaaaacatcactttccagacagattttgaatgctgaagtttagaggttacat

SEQ ID NO: 2747 - DNA, 1734 bp, Oryza sativa
  ref <308>: DATABASE ACCESSION NUMBER: AK060547
  ref <309>: DATABASE ENTRY DATE: 2001-12-06
gtgctttgctctcttgcctctcctgtctctttctcggatttttctcatcgaatctctccacttcactagccaaaagtacagtaccaccagtgtacttcaccgtttgatgcgcctcgccgccggcaatggcatccgccgtcgctagcaccatgccctcgccgccgccgcccgccgtctcgttcggctggctcgcccccacgcgcgtgtcgccgccaccggcattgccggcggtggcggtggcggcggagcaggctgtgtcaaaggagttcattgattttgagttcagccttggtggatctgcgaccatgttgccggcggatgagctgttcgccgacgggaagttgctcccgctccggccgcatccggtggcggcggagaaggcggtggcgatggaggcggagaaggcggtgccggagctcgtgaaggcggtgcggcctgcggcggcggtggcagcggaggtgttcgacccgtacgtgttctcacccaaggcgccgacgtgctcgagcaggtggagggagctgctccggctgaagaaggtccagacgccgacgaagccgtcggcgtcgacgtccgcatcgccgtcgacggcgacggcggcgacgccgtcgagatcctcgaactcctcggcggccaggtcgctcaagctgctgctgctccagcggaacggcgggcgcgcgtctggcgccgccgcgtcggacctctccgtggcgccgctcctccgcgacagctccgactccgaggcgtccctctccctcgcgtcctcccgcttctcgctctcgtcgtcgtcgtcgtcgtcctgccacgagcacgacgacttcccccgccactccctcgactccgtcgaccccacaccacggccccgcctccgcctcgtccggtctcaaccacagccgcaccctcctgccgccgccgccgccgccgccgccgccgttgccaagcctcgggcggcgatccagagccccgcccggcgccgcccctcgccaccgccgccgcctccgccgcaggtggcctccgtggactcgccgcgcatgaactcgtccggcaagatcgtgttccagggcctggaacgcagctcgagctcgccggcagggagcgtccactcaagcctccggtcgcggtcgcgcgtcatggacaggtcctactccgctggcgtccgcgccgccacccccgtcgtgctcaacgtgccggtctgctcgcgcccggtgttcgggttcttcaaggacaggaaggacgcggcggcgaaggactcgtcggcgtcgcggcctcggtcggcgcttggccggaagacggcgccccacgccggcaatgccggcggcgcatccagagatcttggtactagcaactgacctccgttttgactaagctagaagcattagcaatgtaacctcaattagccagccaagtagtcgtagcatttcctttccaaagaaaaggaaacaacaaaaaagaacagggtgagaggagaaatttagtttgggatttggagtgaagagaaatttcaaatttggaggagaggatagattgttttgtgaagtcattttgcttgatgttttgggagaggatcctagatatatcagaccaagctaattggcccatccattttgctcattctcatctcatgtaaatccaatctaatcttctttgcaactacattttgcattctgtttctgctttgtactacatttgatctgagctcgaacgaagagaaaaacataaaactattgcacacgctct

SEQ ID NO: 2748 - DNA, 1601 bp, Oryza sativa
  ref <308>: DATABASE ACCESSION NUMBER: AK060548
  ref <309>: DATABASE ENTRY DATE: 2001-12-06
acgcagctgcgtggtgagcacaaagcgaactattctttcgccttttactaaagaataccgtgtgcgcgccacaattagcagcatacgctaaatttaaatttaaagctttgttttactaaatcttgaaatgttttggcggaaattcaaagctttcagccgtgagatgtgccaaatgtttttaagtaattgtataactctgaaatgctcaacgaaagactacgggattaacttgatgatttcgagtttgaattgattttaccaatgcctgggattaacttgatgatttggggtttgaaactttgaattaattttaccaatgctgatttggggtttgaattgattttacgcctgaattatcagatatctacaatcgctctctgtaaatttggtttctatagaacatactacaatttatactccactactgttttaaacctggatttcctctgaattaaatttaccaatatctgcaagttttcagaatttacagtgataatcagggaagactcatcgtgtcagagctactcctggtcacaccggacgaggcggccgcgtttgctgcacagcgcctgctcgccgccggccgccgccaccaccttcccgtagctgtaccggagcggcatccttcccagcagccggtggaactccgtgatgcaatcccctctcttctcccagtgcgccgcgccccccgtcgagctcaggccgacggccttcatctcctcgccaccggcgccggcgccggcgtcggcatcgtcgttcctcgggtcgccccagtctctgatgctgccggcctccaccagcaccggcccctcgccggactcctcggcggcgacgaagttcatcaggatgtcctcgcagttgcgctcccggtccaccacggcgcgcgccgcggcgagctccggcgagcaggagtactcgcggaggaggcccgcgccgaggacgaggagcttggtgagcaccatggggtagcgcgcctgctgccgcgccgccgcgccgtacgcccacctcccgcgggccaggtcgaggtggtgggacctcgggaagaacccgacgagggtgcccgggcgggcgcgctgctggcaggcggcgaacgcgaaggagagcgcggcggcgtccgggagcacgtcgtcgtcggcgacggccacggcggcggtgcggatggacgggtgcgggaggaagcgggagttgagggaggcggaggcggtgcggtggagggtgacggccggcgggaagcttgacaggaggctgtccggtgtggaggggttggaccagagcacgacgacggcgaggacgagcgggtgggcggcgtacgctccggcgatggcgcggagcagcgggagccgccgctccgagtagccgctcaggagcaccgtgagccggtccggcctcagcgtggccgcgtccggcatggactccactccgcagaacgcctcttcttcttccacaccggctacggcagcggcggcggcggcgagcgtcgccgcgagcaaaaggaggcggaggcggcgatgcgacgccatggacgcggtggcgagatctggttcaagtgttcaacgctggagccgttgacttgtgagttaaaaatgtctcgagttggattc

SEQ ID NO: 2749 - DNA, 1391 bp, Oryza sativa
  ref <308>: DATABASE ACCESSION NUMBER: AK060549
  ref <309>: DATABASE ENTRY DATE: 2001-12-06
aaaaaaaaagacaagattgcgagcggcggcgcctcctccacccgctcttcgactcctcccgattctccgggttttctctcgatttccgccgaatttcgctccgctccagcaatgggcgaattgggtgctctccagtccatcgtctaccaccgcggatcgctccgcctgcttgatcagaggaagctcccactcgaggtggactacatcgacgtcaagtgctccggcgatggatggaacgcaatcagagacatggttgtccgtggcgctcctgcgattgccatagcagcggctttggctctggctgtagaggtttctgggttggaggatttcaccggtacgcctgcagaggcagcagtttttgtttccgagaaattggagtaccttgtatcgagccgcccaactgcagtgaacctatctgatgctgcaaccaagcttcggagtttagtttcaaggacagcagaaactgagaaagatgccaaagcaatctttcaggcctacattgatgcagcagagaccatgctagttgacgatgtgtcagataacaaggcaattggctctcatggagctgagtttctcaaacagaaacttgaggtctctaaagatatttctgttctaacacactgtaatactggcagtcttgcgactgctggttatggaactgccttgggggttattcgtgctcttcactctggaggaattctagagaaggccttttgcactgaaactcgtccatttaaccagggttccaggcttacagctttcgagttagttcacgacaaagtacccgcaacgctgatagcagattctgctgcagctgcactgatgaagagcgggtgtattcaagctgtaatcgttggagctgatcgtatcgctgccaatggtgatactgctaacaagattggcacatacaacctcgccatttctgcgaagcatcacggtgtgcaattctacgtggctgcgccgataacttcgattgatctctccctcccatctggtgagcaaattgtgatcgaagagaggtctcccaatgagttgctgaactctgaaggtggcctaggtaagcaagtcgccgcgtcaggtatatcggtgtggaaccctgccttcgatgttactccggcaaatctgattaccgcaatcataacggaaaagggtgtgatcacaaagtctgatgctgatgagactttcaacatcaaagatttcatccagtctgcaaaattgtactctaccatgcagtgaggggtcacctctttagggtagtaaataatctgatgaagcatcctttttcttactgtattgaaaaggcccatgttgtactgtcaaaaaaaaattgcccctagtgaagcagaaaattaggtctttttgcgccacaaaatttgatgtactgtgaagat

SEQ ID NO: 2750 - DNA, 1159 bp, Oryza sativa
  ref <308>: DATABASE ACCESSION NUMBER: AK060550
  ref <309>: DATABASE ENTRY DATE: 2001-12-06
agaattcaaaccggatcaacctcgctcgcttactcgtgtttaggcatggacgtttctgctgcgctcagcagcgactactcgtcggggacgccgtcgccggtggcggccgacgccgacgacggctcctccgcctacatgacggtgtcgtcggcgccgcccaagcggcgagcggggcggaccaagttcaaggagacgcggcaccccgtgttcaagggcgtgcgccggaggaaccccgggaggtgggtgtgcgaggtgcgcgagccgcacggcaagcagcggatatggctcgggacgttcgagacagcagagatggcggcgcgcgcgcacgacgtcgccgcgctcgcgctccgcggccgcgccgcctgcctcaacttcgccgactcgccgaggcgcctccgcgtcccgcccatcggcgcaagccacgacgacatacggagggcggcggctgaggcggccgaggcattccggccgccaccagatgagagcaatgcggccaccgaggtggcagccgccgcatcgggcgccactaattcgaacgccgaacagttcgcctcccacccgtactacgaggtcatggacgatgggctggacttggggatgcagggctatctcgacatggcgcaagggatgctcattgacccgcctccaatggccggtgatcctgccgtaggtagcggcgaagacgacaacgatggcgaggtccagctatggagctactgatcctgcgcgtttgaactcaacttggtttggcgcgaagagatcgcatgtacagcttaagggagtcgagtacaagtacctcaggtgtactccactcgttgcccctttcccttccctttcgtttttcttgagcttatctgcagggtaatgttatgtattgctgctcttctgatgaaatgtgatcggaagaagcggaaggccagatcgagcttatgggttctgaagacggtgaaggcttgtcgagtgttgtgagcatatattcagaaagtcaggcactgtgaaagtatgaatcagatcagccttgttacgaatgagagtgatcgaccttgttcagtgtttataattgaaccacttgtgtgtaataagcagcaaagccatgttgcttgcttgatctgactcttgggaatggtatatttctcaaagaatgcaggattgactactc

SEQ ID NO: 2751 - DNA, 243 bp, Oryza sativa
  ref <308>: DATABASE ACCESSION NUMBER: AK060551
  ref <309>: DATABASE ENTRY DATE: 2001-12-06
atggaactgatcctccgggttgtgcttctgtcttgatgcacacaaccttcccctttcctgatcgtgtttgctcactgaatcctttaaatctcagaaacgccttcatttgttttttcttcttttctttcttttttgtctttaggcgtacaataatatgtgctttttaggcgtacaaataatgttgtgctgtgcaagcccctgtatcgttctgtcaatattaaagctggaatagtttctactacc

SEQ ID NO: 2752 - DNA, 1220 bp, Oryza sativa
  ref <308>: DATABASE ACCESSION NUMBER: AK060552
  ref <309>: DATABASE ENTRY DATE: 2001-12-06
aagagctgaattgtggcagggcgtggccggataatctgcttccggttcgacaccgaggccgacacggcgatgaccgtggcggcggagatggtcgccgagctggacatcaccgaccacgaggtgactcgcatcgcccagctgatcgacggcaaggtcgccgcgctggtgccgggctggaggccgggtccagcgacggacgacgacgacgacgacgatctcgtcggcggcggcgatgatccggacgcgccgggcggcgccgccgccgcctgctgcaagaactgccggccggcggcgtcgtcgtcgtcgtcctgcggctcgctcgtcgacttcatgtcatcggcggcggcggcggagcgccatggctgcaggcggtgcgccgagctgcacggccggtttgaggagatcacgttccaagccgacgacgacgaagaggagcagcatttgcaggggagctcctctgacaccggaggcagcaaccatgagcagcacgccatgggcaaggacaaggaggtcatgaacatcaatggcattgcacaagatggcacagtacaaggttcagaacagccatgatcagtaattcagtatgatgatgatgaacatccgaagatcgagcaattcgacgctgataggcgatacggatcggcgatgtttacaaccattgatgggttcttggatttgagcaatggcgcgagtcggtgccgccaccatgatcatgaccatggtagctcaaaggattcatgatcattgtgagggggaattgctcattgtgagggggaattgctgacagcaatctcgatcagccgctgctcactttcagaggttaccttgccgacacattgcaagagcaacaaagtctgtactgttgaacaatgctactgacgttcgacatgcccttctgacaaagtaaatctacagtttcaagattggatttgctcgtctttttttcagagatttagcatatattgtagggaagaaactgaaagatgtagtataacgttttgtgactgtgctatgaatctgaagaagatagggtacagtttaggtaggccaagtgcaattacttccaatcttcattggcttcagttagttacatgcatggctgtatctagcattctctgaccataaatcagtagtgcaagaaagtgcaatcaggaaagatgcatatgtttttcattcatatttggtacgtctcttattcaaagaagaaatattagggtggc

SEQ ID NO: 2753 - DNA, 1052 bp, Oryza sativa
  ref <308>: DATABASE ACCESSION NUMBER: AK060553
  ref <309>: DATABASE ENTRY DATE: 2001-12-06
agaggatgtgagccccatggtccggacaccccgctggcaccgctcgtgcacctataaatttgctttgccatcgcgtcgtcgggatcgtgtactcgtcgtagccaccacaccgcccacacacccacaccgccggtagcgaggcagctcacatggcggcgacggcgacggcgacggcggcgccggaggaggaggaggggaagagggtgatgacgagggcgctggagtgggaagggtgcgtggtgtcgccggtgccgacggcgacggccgacgaggcgtgggctctgctgtcggacttcctcgccttccaccgctggcacccgcgcgtcgccaagtgccgccccgcctcgccgtcggccgcggcgagcacggccgccgccccgccgggctccgtcgtgcggtactgcgagggcacgccgcgcggcgacggggcgccgccggactgggcgcacgagacgctgctcgagcacgacgccgcgcgccgcttcttccgctacgagatgaacgacaacaacatgggcttcggcgtcttcgtcgccacgttccgcgtcgtccccgacgctggcggcggcgacgcggacgcgccggggtgcgagctccggtgggagttcgagggcgaccccgtgcgcggcacgcccaaggaggccctcgtcgcgcgcctgcaggccggcctcgacggcatggcggcgcgcgtgcaggagcacctcatgtccgcccgcgccgccgacgccgccgtcatcgccgccggcggcgtcgaggccgccgacgagctcaaccgggacaaatactctatcgcggtctgagtgttcgtccggtccgtcgatcgatcggtacagtacaccagtatatgcgcggttgctggtcaactttatacgtgaactaatttggctgcaaaaacgtatattgttcgatgaaaatacacgaactctgtcgccgtcttccgtatatatgtacgtacctacgtatacctacctacgtatacggtatactgtgtttgtacgtgcttggggtatgggaataaacgttactaagtactgaaaaaaaaaccagtctct

SEQ ID NO: 2754 - DNA, 1313 bp, Oryza sativa
  ref <308>: DATABASE ACCESSION NUMBER: AK060554
  ref <309>: DATABASE ENTRY DATE: 2001-12-06
agaaattctcgaataaacccctcaccacggcggcgccgcttccgcaactctcctcctctcgccgccgccgccgccgccgcccgccgcccgccggagcccgaagccgggcatgacgacgcgcatcgcgcccggcgtgggcgccaacctgctcgggcagcactcggcggagcggaaccaggacgccaccacctacgtcggcaacctcgacccccaggtttcggaggagttactatgggaattatttgtgcaagcaggccctgttgttaatgtctatgtccccaaagacagagtaacaaatctacaccagggctatggatttgtagaattcagaagtgaagaagatgcagattatgctattaagattttgaatatgatcaagctatatggaaaaccaataagagtaaacaaggcttcacaaggcaagaagagccttgatgtaggggcaaatctttttattggcaatctcgatccggatgttgacgaaaagctcctgtacgataccttcagtgcgtttggagtgattgtgactaatcccaagataatgcgagatcctgaaactggaaattcacgaggctttggctttgtgagctatgactcctttgaatcatctgatcaagctatagaggcaatgaacaaccaacatctatgtaaccggccaattactgtctcttatgcctacaagaaagacacaaaaggagaacgccatggcacacctgcagagaggttgctagcagcaaataaccctggttctcagaagaataggccacacactatgtttgcaagtggcccgcctacgcaagggcttgcaaatggtgcacctgtgcctcgacctttttccaatggggcagtgccacctcagattcaacatgttcgaccgccgccacctcctatgcaacaattccctccaatgcagatgaatggtcagcctgtttggcctccgcagaatacacagctaccaccccacatgccacctcaaatgcattacaggcctgcagtgagaccacctccaccaaacatgatgccaccccctcctcttggcatggtaaggcctccgccgcctccttccagtatgccagctccacctatgtggaggccacccccacccccgcaacaagctggtggtatgccaccacctcctatgtccatgccaccgccgccaccaccaccttctggttaaacatatgctggtgaaggttccataccatatggcacattgtagctgtagactgagaatgttggtacctttcttatatttccatgtaacttgcaaacactaggagaggatcagaattcagtgagtttagctgacactg

SEQ ID NO: 2755 - DNA, 197 bp, Oryza sativa
  ref <308>: DATABASE ACCESSION NUMBER: AK060555
  ref <309>: DATABASE ENTRY DATE: 2001-12-06
ttggctcgagtgtttcgcgttactctgtaattgatctggatctgatctcgttggatctatatcacatttgttctctaattcatcattctgcaatccgtagctacagatctactacttgtttacctatattttggatcgatgtatcactttgcgaagttgtgctgaatatattgagtctcttgacgagatttagtgtt

SEQ ID NO: 2756 - DNA, 1628 bp, Oryza sativa
  ref <308>: DATABASE ACCESSION NUMBER: AK060556
  ref <309>: DATABASE ENTRY DATE: 2001-12-06
accgaccaatccccatggagctgctgctgtaatccacacgacagagtcagagatctggggactaagtcccaagaacatccctccctcccctcccagccaggagaaatccaaggctgttcttagcgctttgctgaattgcatttcttcgaattcatttcatcgcgctgcaccgattgctgttcttctatggatttgacactgaaaaagggggacagcgtgattcactcgagttgagatttctcaggtgtcaaaaggcaaaacgacattgatgcatgagtgttcttggatgcttctttacatatgtagcaggaaactataggatgaggaaaaggaactccttgaagttcagtatttctgtttggttgatgcatatttgcaggactgaaaacattggaaagtgtaactaagcagtaagaagatctgaatatgagtggaagacgtgatgattcagctaagatggcaaaactgaaggagctattgcacagaagtgaaaaccgtatctgtgctgactgcagcgcgcctgaccccaaatgggcatcagctaatataggagtattcatatgcctcaagtgttccggtgttcacagaagtcttggcacacacatttcaaaggttctgtcagtcacactagatcagtggagtgacaatgaaattgataacgtgatcgaagtcggtggaaattctcacgccaatgctatatatgaaaccttcctgccgcagaaccacagcaagccacatccagattctacccaggaagagcgagaaaaattcatcaggtcaaaatatgagttacaagagtttcttgagccaagcctacggattgtttctcatcagtctagcgactccgggaaacatgcaggcagtgcctcccattctgtcagttccaagagcgaagtaggcatgattgagttcatcggaatattgaatgtcaaggtgaaaggaggcaccaacctagccatcagagacatgtcaagcagtgatccttatgtagtcctgacccttgggcaacagaaagcgcaaacctcggtgatcaaagccaacctgaaccctgtctggaacgaagaactcaagctctctgttcctcagcaatacggccctctcaaactgcaagtgttcgaccacgacatgctgtccaaggacgacctgatgggggaggccgagatcgacctgcagccgatgatcaacgcggcggcggcgttcggcgacccggggctgctcggcgaccggcagatcggccggtggctcaagtccggcgacaacgcgctcgtcagggacagcgccgtcgtggtcgccggcggcgaggtgaggcaggagctggccctcaagctgcagttcaccgagtccggcgaggtggagctggagatgcagtggtttccactcaacatgtagaacaaatcacgctgtcacttcggatttcaagctggagaattttagaaaaagaaaagatgggttttgataatgaagttcattgcatgaactgtttcagcaagtttttgcgttgtttacatggcaaattttgctgcgttcagaaattttaaatttttggtttggcacgagccattgccctgttaacttggttcatttgtgattccaataaaaaggattcttttgtgctctgggttaaattc

SEQ ID NO: 2757 - DNA, 2744 bp, Oryza sativa
  ref <308>: DATABASE ACCESSION NUMBER: AK060557
  ref <309>: DATABASE ENTRY DATE: 2001-12-06
ctttacctgctgatgtccagtatgttgatacacggtgggaaatacctgttgttctcccactccgtgattgcctagcccaagagcttactctcctctgtgaactagatagtttaaaaacacagcaacatctcgataggccttcgaacggcatcaacagtttagttgcatcctttattaaacgactacgggaagagaacccttctcgagagcataccattgtaagaactgcgcaaaagctcaagcccttctcttttaacaaattctcggcagatggctatcatgatttcctaccatcgcgactacgtccaaaattccagaagtttgatagcgatgagtccactttttctgagattctctgtctgatgtgtggaagtccgttcagtgaatcagaactccaggatttggaaagcacaaaacacaaggctcagaagaaaattgatctttatactgctcattgttgtcaaagctgttatttccagattctaccagccggtgaaaacttgaatgaacatttcttttcactactaccaaaattatggactggaaaaatggataccatatctgacagccatagcttgctaagagatcaaatagaagagtacctgcttgaagaaaatgatgatggaaactgaacttgatatttcagtgaagcccgaatatatttgccagaaagacagcagagattcctgcctagttgggctcctcacattggcataatcacataatccaaacttgcttcagataatagtgtttctatctagcatggcattggtttattcagaattctgccagatacttacaatttcaacacattatatccttgactcaattcctgatgtttctgtatgtccttcctactcttaagagttgaaacctgtatgaaatccgtatagtgatagcctgatggggcagaccgtcacttgccagcaagtttccaccgatctcaagaccacagacattggacagaaacttccatgtgattacagtattctgattggtcacatctcctgtaccaactattctgtctgcaaaagattgtaacctgaagaatttattcgattattttggaacaatcttctctatacaagatttgcacatactatggtttcaatcaaaaaaaaaaaaaaaaggccagcatcgagtcggccttgttggcctactggatggctccaactgcagaggttgcggcggcgccggtgcaggagcaggagaaatgcaacggcggcggcggaggcgggtttaggggtgcggcggtgaggtgccacccggcgctgtcgacggagaagaaggcgtcgatcaggggcgtcgtcggggagctgctcggtgctgcggcggcggcggccggcgccggcgaggagaggaggaggagcctcatctcgctcggcgtcggcgacgcgtcctcgcacgcctgcttcaggcgcggcggcgagttcgcggccgacgccgtcgccgacgcggccaggtccggggtgttcgactgctacgcgccgtcgtgcggcttcccggccgctcgccgcgccgtcgccgaccacctgtccgccggcgcgcgccaccgcacccgcgacgccgacgtgttcatgacggccggcggcacgggcgcgatcaccgcgatcgcgacggtgctcggcggcgcgccgggggcgaacgtcctgctgccgcggccgggcttcgcgccgtacgaggcggcctgtgagctcgccggcgccgagccgcggttctacgacctcctgccgcggcggggctgggaggccgacctcgccggcgttcgcgccatggccgacggcgcgacggcggccatcgtcgtcatcaaccccaacaatccctgcggcgcggtgtactctgcacagcacctttttcagattgctgaaacagcgagagaattggggatcccaatcatagcagatgaggtgtatgcacatatggtgtttggtgggagcaagtttgtgccaatggctacctttgcacatatcacaccagtaatcaccattggagcactatcaaagaaattcatgctgccaggatggcgacttggttggttggccttctgtgaccccaatggtgcactcaagcatgtcagaaatgcaacagaaatgctactgaatgtgacttcaggccctgcctccatagttcaggctgcagttcctaagattctctcaaacgaacacaatgaattccatcgaaacgttgtgaacttgcttgagtctgcagctgatgctctctacagaagagtgaaccagattgaagctctgcagtgctactcaaaacctcatggctccatgttcatgatggttgaagtcaacacttcacttctgttcggtgttgaagatgacatggacttcgctcgtgaattgattaaagaagaatctgtcctagttttacctggttctgtaattgggttaaagaactggattaggatattctttggggcacctactagtgtgatacttgaagcctgtgataggattgaagcattctgccaaaaaagagcagttcaagtaaagctactgaaaaagaagttctgaagccaacaaataagatttttcttttctggccggctcataataatatgtatagagccttttatgtcaattttataggatcttcttttatctttttgacacacgcgatctgagaattgtatgtagaataattagcgcagatgcttgcctgtactgtatatagctgatatatattttcataataaaatgattgcctatgattgaataaagctatggcattagtct

SEQ ID NO: 2758 - DNA, 2283 bp, Oryza sativa
  ref <308>: DATABASE ACCESSION NUMBER: AK060558
  ref <309>: DATABASE ENTRY DATE: 2001-12-06
catagatttccttgcatccagatatgccaaaagttcaagcctcctagcaatagaattactcaacgaaccactggcaccagatgtacctgtggatacattaacaaaatactatcaagacgcatacaatgctgtaagaaaatacactttgcaagcctatgtaatcctgtcaactcgaatgtcaggggatccaacggagtttctctcagtagccagcagtctctttggtgcggttatcgatgtgcattactataacctgtataacagcatgtttgataactacactgtggagcagaacatcaattttgtaaggaataaccgttcatcagatatcaacacggtcacaaagcagaacgttcctctaacatttgtcggagaatgggtggccgagtggtacgtggataatgcatccaaggaagactaccaaaattttgcgcaagcgcagctagacctgtatgggaaagctacttttggatggtcctattggacattcaagaacgtcaagaaccactggagcatggagtggatgatcaagaatgggtacatctccctcaataatctgcctccatcatcaccacccatccggtcggtgaaccttggcggctggcttgtgacagagggctggattctaccgtcactatttgacggtatacccaacaatgacctcctggacggtaccactctccatatcaagtctgtgatccaggacaagtaccttgcagccgaacagggcggcggccaaaccattgttgccaaccgagtagtggcctctgattgggagagcttcacactgtggagggtagacgagacaacattcaatctcagggtgttcaaaaagcaattcatgggcattgacagcaatggaacagtcatcgcaacagcgactacgcctggtctgtcagaaacattccagatcgtgcgcagtgacaccgataagaatagggtgcgcatcagggcaccaaatgggagcttccttcaggcaaagactgccaattctgttacagcagattatggtgaaagcacaaactggggcaatgatgatccctcagtgtttatcgtagatatggtaggtggtccacaaggggagtatcagatttgtaatggctatggtgcagagaaggcctcgcaggtgcttagggaacattggagcacatacatagttgagagtgacttcgaattcatctcatcaagcgggctaaatgcagtgagaatcccagttggatggtggatcgccagtgaccccaatcctcctgctccatttgttggaggatccctccaagccttggataacgcatttaaatgggcagagaattacaatattggtgtcattgtggacttgcatgccgctcctgggtcacaaaaccattgggagcatagcgccacaagggatggatcactagaatggggcaccactgatacaagcatcacccaaacagtgcaaatcattgatttcctcgcttccagatatgccaatagcccgagtctgctggcaattgagctactcaacgagccatggggaccggatgtacccctagaaaagcttaagaaatattatgaggatgcatacaacgtcgtgaggaaatacaccgcgaaggcctacgtgatcatgtcaaaccggctggcaggggagtccaacactgagcttcttgatttcgccagtaggttcccgggcgtagtcatcgacgtgcactactacaacctgttcaatgacgacacattcaaaaatttaaacgtagagcaaaacattgaatttgtgaagaacagccgcaaggctgagttcagcaacatcacgaagcaaaagagccctctcacgtttgttggagaatgggcggcagagtggaaggtaaacggggcatccaaagaggagtaccaaaggtttgcgcaagcacagcttgatgtatatggaagagctaccttcggatgggcttactggaacttcaagaacgtcaataaccattggagcttggaatggatgatcaagaacgggtatatctcactgaaaatatagaaatagtgccataattctgtctggtgggtgaatacacattacacctaatgcaaaggccagaagcccagaactgtaataatgattttccattatctaaaacgaagtatcaatcgggttaacacgaactagaataagtctgtaaatcttgtttaattacggccaataaatcagttctgttagccaggtggaggcatgcatccagatgcatgcttgtattataagacttatattgtgtattgtaacattcacatatttgaatatgtatgatctttgctttt

SEQ ID NO: 2759 - DNA, 1457 bp, Oryza sativa
  ref <308>: DATABASE ACCESSION NUMBER: AK060559
  ref <309>: DATABASE ENTRY DATE: 2001-12-06
gtctctcgattacactcccccgtcacactctcccgctccatccctgtccacgaaagcgcgcgcgggtaagatacgaggccgggagggaagaacgaccacggcatggccaccggtctctccggcggcgctatgaccagcttcgccgtcaagaagccgctcctcgcggccgccgtgcgccgccggtcgtggcccccgccgtcgggccgcgcgctgccgttctcgccgctcacgcggaccccgcgcagccgcgggctcgggaccgtcacgtgcttcgtgccgcagggcacggagagccagcaggccccggctccgtccccgccgccgacggtgcccgtgcccgtgccctcgctggaggaagaggcggctgccgcggcggcgcggcgcatcgcggagaggaaggcgcggaagctgtcggagaggcggacgtacctggttgcggccgtcatgtccagcctcggcttcacgtccatggccgtcgccgccgtgtactaccgcttccattggcaactggagggcggggatgtgccgatgaccgagatgtttggcacgtttgcgctctccgtcggcgcagcggttgggatggagttctgggcgcagtgggcgcaccgctcgctgtggcacgcctccctgtggcacatgcacgagtcgcaccaccgtgcgcgcgagggcccgttcgagctcaacgacgtgttcgccatcaccaacgccgtgccggccatctccctcctcgcctacggcttcttccaccggggcatcgtccccggcctctgcttcggcgcgggcctcgggattacgctgttcggcatggcctacatgttcgtccacgacggcctggtccaccgccgcttccccgtcggccccatcgcgaatgtgccctacttccggcgagtggccgcggcccacaagatacaccacacggacaagttcgagggcgtaccgtatgggctgtttcttggacccaaggagctggaggaggttggtggtctggaagagctggagaaggagcttgcgagaatcaaccggagcttgtgattttgacggcggcaattgcagctagcaagactgcgcctgtcgagctagcagaattgcctttgccttgcaagattttttgtatttctggccgcttcgtcgactccattaattgtcggtaccggagagaaggggactccagaagcggaagcgcttcgagtatacgacgatgtggcagcggtgaagagcacagtatatttgtttgattgtggcctgtggcatgcatgcgtctctgcggctgaacattgtaaggaggatgttctgtgggatggttattctttgaatttcactgcgccaacgtttttggtggagacgttgtgcgtccagtcccctgtcttgtaagaagcaccacattactgtgtataacacatgttagagattgttaaccacttcaatgaaactaaaataggtggttggcaacaatgctg

SEQ ID NO: 2760 - DNA, 1928 bp, Oryza sativa
  ref <308>: DATABASE ACCESSION NUMBER: AK060560
  ref <309>: DATABASE ENTRY DATE: 2001-12-06
atagctaagctatagtagctaacagtagcagcagctgtattcttctggttcttgctcttgttcttcttcttcttctccacctgcgattgattcggcctctgaaaatcgatcatggaattcgggttcggcggcggcgaggtcatcacgcagggcgggtcgtcgtcgccggcgggatggattccggtgagctcgtcgtcgtcgtctagaatcggagcatctgtcgcctgtctcttggctgagctctagtggtgtcctgcctgttgctgctgcttcttcttcttccttctcctaggtgttcttcacttcttctccgttgctgagttctgccaagaaaccaaccaattttgacagcatgtgccatggaagtagctaatcttcagtgacacgaagaatggatccccagatttttgtcagactttcagttggacagcttggtctgaaactccccggtgcgaatgcgaggaaggcggcccggagcttccactgcgagatccggctccgaggattccctgtccagatagctcctgtccctctgatcaattattcagagttcaaccttgatccacacaccaatgccgccgtcttctccctcgacgaatctgaactgaaggcgctgtcggcaccggggtgtttcggagctcatgggtcttacctcgaggtcgcggtgtacgttggccggcgtggcgggcattgtggcattgtcaccgggatgaagaggctggttggggtggtcaggatggacattgggcctgagtggcgcgacggcaagccggtgatgcttcaccatggctgggttggcattggcaacggtgaggccaagccggagctgcacttgagggtgaagatggaggctgatccccggtacatctttgagttcgacgacgaggtcgcgctgaatccgcaggttgtccagctccatggccgcaaccggcagcccatcttcagctgcaagttcatccgcgacagacgtggatcacattcggatcagctgtactggtcgagctccggcggcgaggagaaggaggcggagatgatgaggaggagggagaggaaggggtggaaggtggtgatccatgacctgtccggctccgccgtcgccgcggcgttcatggcgacgccgttcgtggcggcgagcggctgcgacacggtggcgcggtccaaccctggcgcgtggctgatcgcgcgcgccggcgcgacggcgccggggtcgacgtcgtcgtcggcggcggtggagagctggcagccgtgggggcggctggaggcgtggcgggatcagggcggcgcggcgaggcaggacacggtgtgcctccggctgcggctcctccccgacggccaggacgcgtgcatgctggtggccgagacgccgctccgcagcgacaggggcggggagttcgccatcgacatggacaggcaggcgccggcgctggccgccggggcggagcactgcgcggcgagcctgggcgaggcgtgcgccggcggcgggttcgtgatgagctgccgcgtggagggggagtcccggagcagcaggccgctcgtgcagctcgccatgcgccacgtcacgtgcatggaggacgccgccatgttcgtggcgctcgccgccgccgtcgacctcagcgtcaaggcgtgccggccgttccggaggaagacgacggcgaccaagaagacggcctctgcctcatcgtcccctgatcccctcgagctcgacacgtagccgatgcatccatgtcctactagtcttcgtcgtcgtcttcttcctcgcacagctggcgaagcaccgatggatcgagcacccatggcggccatcaaaatccttctgtaaattcactttgaaagaattggacactcccttttccgttcgttcaaactttgttgtatgaattttgtagagttcactaaaatccaaccctgaatctgcgcctcattcgagc

SEQ ID NO: 2761 - DNA, 1730 bp, Oryza sativa
  ref <308>: DATABASE ACCESSION NUMBER: AK060561
  ref <309>: DATABASE ENTRY DATE: 2001-12-06
cgactcgagcggggtgaggatctaaagaaaaccctagcggcggcgattggtgcggcgggaggcggccatgtcccccaaaccgaggaaatcggtggcggccttgagcggtcccaaatcgtcgccggcgaggtcgactcggtccaaatcgaagccggattctgatatcgccgagcacgacgacagtcccaaatcgtcgtccgggaggttgactcgctccagagcaaaggcgattgaacaggtggggaatcggactgtggaggagtcggcgggagtgtcttcgaacaagaagaagagaaggattgaggaggagacggcgggggagtcgccggcgacgggggctccggaggggcatggcaccttggcgtcccggccactcccgccgacccacccgccgcctacaccccgcgtcagaaaaagctcctgcatcgtccggctcgaagttgctcgacttcagaagctaactctccggcgcgataagaaagatgatccctccaccgcggccgctttgcctaccccctccgacaagaacatggtgttgggcatgtctcgctcaattgtccgcgtttcatccccaccttctgagggaaaattgatctctccgcgcaccggattcgtcatcagttgggatggagccaccaagcgtgctatgatcgtcacgctcttcacttacttcaagaagaagccgcatgagccccaacccgagctgcaggttcatcttccagataagtctattgtgcagggacggttgatattcatgaatcgccactacaatctctccatcttggagatcacgtctgacctaccattgcaggtccctgcttttgggtccgccccaaagtatggccagaaaattcttgccttgtctcgggatgaaaatatgtccctggtggcgaggcgtggagcaatcacgtggtcggatggttctttcatgtggagaaaccattacatgtttgtggattgtgatgttcctgagggtggtgtaggagggcccgtggttgacagctgtggtagttccattgctatggtatacagagccggccctggtgcagttatcatttcaatctcaattatttgcaccttctttgagatgtggaagcaattcagctgtgttgcccgccctgtgtttgatgtggatttaagaagtgtggaactagctggtgtgtcactccgggaggagctctctgttaaacataacatcaatggtggctttatggttaaacgcatagctgatgattctgctcttgagcatcttggtgttagacagggtgacgtgatcttttttgaggacgagtgcgggactaatttgcctgagatcgaagattatctcctatctcttggttggagatacctgcaggggatgaagtcgatggttctcaagttgctagtacatgacattgaaggtccatgtaaggagacaattaccttgcccttagagttttctgtcgattcaggaaaggtagcccgatggaggatggcttgaagatgtacagcaagactgaagttacctagagatgataattttgtgaatgttagttacttgaatgttctttgacatgatcttctgtcgggcgtttaacctaggacttacctaattttggctggctgagctatgctaattaatttaaacgactgtcagattcagcccgattggtcccttttgaacgaagtttgatattcatgtccccacattgttgcctgtatctcgtgctatctatacaatgttgcctagc

SEQ ID NO: 2762 - DNA, 1926 bp, Oryza sativa
  ref <308>: DATABASE ACCESSION NUMBER: AK060562
  ref <309>: DATABASE ENTRY DATE: 2001-12-06
aactcaagcgccaacttagtacaaaattaagcctcgacgcggccgctcccgatcggccatgcgcgaacgtgcagtggtggtggtgcatcgacgatggagatgagcggcgccggagcgggaggcgtgccgacaaagctggagcacgacgacgctgcggctgtggcggcggagcgggagccgtgcggcggcggcgcgccgaggagggaggagaaggagcggtggcgacgggtgctggtcgtcggctgcctggtggcgctgctcctcttcgcgttcttcgtcctcgggcgggagagcgcgtcggaggttctgcagatcgcgagctccaagctgtccgcgatgaacggagggtttacgacgaaaaacccttctcatggcggtggcgccgccaagcatgccgacgagctcctcggcgggctgctggcgccgggcatggaccggcggtcgtgccggagccggtaccaggcggcgcattactacaagcacttcccctacgcgccgtcgccgcacctcctggacaagctgcgcgcctacgaggctcggcaccggaggtgcgcgccggggacgccgctgtacaaccgctccgtcgagcagctccggtccggccgcagcgccggcggcgtggagtgcaactacgtcgtctggctccccttcgacggcctcggcaaccgcatgctgtccatggtgagcggcttcctctacgcgctcctcaccgaccgcgtcctcctcgtcgacctgccccatgactcctccgacctcttctgcgagcccttccccggcgcgacatggctgctcccgccggacttccccgtcgccaacctcttcggcctcgggccgaggcccgagcagtcgtacacgaccctcctgaacaagaagaagatcaccgccgtcgtcaacaacgacgacgacccggcatcaaagaacgccacggccgcgctgccgccgccgccggcgtacgtgtacctgagcctagggtaccagatggcggacaagctcttcttctgcggcgacgaccagcgcgcgctcgccaaggtgaactggctgctgctgtacagcgacctctacttcgtcccgtcgctctactccgtcgccgagttcaacggcgagctccggcggctgttcccggcgaaggagagcgcgtgccacctcctcgcccgctacctcctccacccgaccaacgccgtgtggggcatggtgacacgctactacaactcctacctagcccaggcaagccgccgcatcggcgtccagatcaggatgttcaacttcgcctccatccccgtcgacgacctctacaatcagatcctcacctgctcccgccaagaacacgttctaccggaaaccaccaccgacaacgacaacgacgacgatcttgccacggcgtacgacagcaacagcagcaatggcagcggtggcggcaactactcggccatcctgatcgcgtcgctgtacccggactactacgagaggatccgggcgacgtactacgagcacgcgacgaggggaagggtgagggtgggggtgttccagccgacgcacgaggagaggcaggcgacgcagaggctgttccacaaccagaaggcgctggcggagatcctcctgctggggttctccgacgagctcgtcacgtccgggatgtcgacgttcgggtacgtgggcagcagcctcgcgggcgtgcggccgacgatcctgatgcccgcgcacggccacagggtccccgcgccgccgtgccggcgagccgtgtccatggagccgtgcaacctcacgccgccgcgggtgggcgaggcggagtgccgggagatggccgccgtcgtcgacaaggaggacgtggcccggcacgtcaaggtctgcgaggactttgatagaggggtgaagtttttcgattgatcacgttctctcattgaattttgagtcgatagctggttcttg

SEQ ID NO: 2763 - DNA, 1215 bp, Oryza sativa
  ref <308>: DATABASE ACCESSION NUMBER: AK060563
  ref <309>: DATABASE ENTRY DATE: 2001-12-06
acctgctgcctcggcgcgccgtcgtcccctcctcatccccccgccgactccgacgccaagaaagacgacgcgatggccgccgccgccgataacgaggtggccgtcatcacccaccgcaccgtcgacgccaacggcctgcggatgcacgtcgcggaggccggcccgcccggcgcgcccccggtgctgctcctccacgggttcccgcaggtgtggtacgcctggcgccaccagatgcgcgcgctcgccgacgcagggtaccgcgccgtggcgcccgacctgcgcgggtacggcgactccgacgcgcccgccgccgagctgcagtacacggcgatgcacgtcgtgggcgacctggtggcgctcctcgacgccgtggtcggcgcggggaagccggtgttcgtggtggcgcacgactggggcgcgctcacggcgtggaacctgtgcctgttccgccccgacagggtgagggcgctcgtctccctcagtgtcgcgttcaccccacggagccccgcgaggaggcccgtcgacggcctgagggcgctctacggcgacgactactacatctgccggatccaggagcctggagcgatcgaagctgagttcgcacggctcggcacggagctggtgctgaggaagttcttggcttaccggactcctggcccgctgatgatgccaaagagcgggtgggggtcgccggacgacgaggtgccattgccgagctggataacagaggaggacatcaagtactacgcgagcaagttcgacaagactaatttcaccggaggattgaactactaccgcgccctcaacaagacatgggaactaacagcaccctggactggagctgagataaaggtgccagtgaagttcattgttggagacttggatttgacatatcatactccaggcattcaggattttattcacaaaggtggcttcaaaaagtatgtaccgctgctggatgatgtcgtggtcatgaagggtgtcggccacttcatcagtgaagaaaagccaaaggaagttagtgagcatgtaatcagcttcataagaaagttatcggctgaaatgtgattattcatcatgaaattcagagtgagataaaaataattgcaatgtattcttgcgtgcgaaccgtaaagtatgttagcttgcatttggaggatgtggggcgcgtaatgctcatgaattggtgcaattagtaaagtgttcgatttgtac

SEQ ID NO: 2764 - DNA, 1427 bp, Oryza sativa
  ref <308>: DATABASE ACCESSION NUMBER: AK060564
  ref <309>: DATABASE ENTRY DATE: 2001-12-06
aaaaatatccagatcatcaatcaactcttcaactctctcttcaactcttcagtcttcacgacaacctttcgatacccttccaaccaaacaaccaaccaaccactccaacaatcaaaatggccgctccccagattcccgagaagcagtgggctcaggttttcgagaagaccgccggccccatcgagtacaagcagattcccgtccagaagcccggtcccgatgaggtcctcgtcaacgtcaagttctccggtgtctgccacactgatctccacgcctggcagggtgactggcccctcgacaccaagctgcctcttgtcggtggccacgagggtgctggtgttgtcgttgcccgcggcgaccttgtcaaggatgtcaagattggcgagaaggtcggtatcaagtggctcaacggctcttgcctgagctgctcttactgccagaacgccgatgagtctctctgcgccgaggctctcctttccggttacaccgtcgacggatctttccagcagtatgccattgccaaggctatccacgttgctcgcattcctgaggagtgtgacctcgagtccatctcccccattctctgcgccggtatcaccgtctacaagggtctcaaggagtccggtgtcaaggccggtcaatccattgccatcgtcggtgctggtggtggtctcggttccatcgctgtccagtactgcaaggccatgggtatccacgccattgccatcgatggtggtgaggagaagggaaagctcaccaaggagctcggagctactgcatacgtcgacttcaccacaaccaagaaccttgtcgccgatgtcaaggctaccacctccgatggtctcggacctcacgctgctctcctcgtcgctaccaacgagaagcccttccaacaggctacccagtacatccgctctcgcggtactgtcgtctgcattggtctccccgccaacgctcaattctctgctcccgttttcgacacagttgttcgcatgatctccatcaagggatcttacgtcggcaaccgtgctgataccgctgaggccattgacttcttccgccgtggtctcatcaaggtccccttcaagactgtcggtctctctgagctcaacgaggtctacaagctcatgaaggctggccaaattgtcggtcgctacgtcgtcgacaccagccgataagcgcgcggctgtcgcttgggcagtgcgccaaaaagcaagagcacgcccctaaaaagataagcagggctacccatcgcgcaaaggggtttaccctctaaagaggagttcaggcgggagttgatttgggttttctggcgggtgttgtcgaagtagccagatggatgatcttggttacactttgtgtatagccctagtttatgagttttatgatttcccttagcatcaaataagagaacgaacatttcgatc

SEQ ID NO: 2765 - DNA, 2283 bp, Oryza sativa
  ref <308>: DATABASE ACCESSION NUMBER: AK060565
  ref <309>: DATABASE ENTRY DATE: 2001-12-06
aattccattccatgtacagcaagcaaacaacgttagcccggtcccaactcccaagtgttttcggttagcaacctaccatgcttgtcctcttgctcctcctcgccgccgccgccgccgtctcttcgccggcgccggtggccggcgacggcgggggcgccttgccggtgctcaacccgatctcctccttctgtaacacgacggcggccaggcggacgtacctgccgaacagcacgttcgaggccaatctcaacggcctcttcgccgtgctgtccaggaacgcctcggcgtcgggctacgcggcgggggcgttcggcgcggcgccggacacggcgtacggcctcttgctctgccgcggcgacttcaccgggaacgactgctccgccgcgcggctggcgtcgtcgttccagcaggcggcgagcagctgcttgtacagcaaggacgtcgccgtctactacgaccagtaccagctccggtactcggaccaggacttcctcgccggcgccggcgccggcgccgccaacgagccggagacggccgcgttcaacatgaacaacgtctccgacgcgggcgacgtcgcggcgttcgacgcgctggtggcggagctggtgaacgcggtggccgacagggcgagcaacgcgaccaggaggtacgccgcggggaaggccgggttcgcgccggaggcgatgaccgtgtacgccatcgcgcagtgcacgccggacctgtcgccgccgcagtgccggggctgcctcgccggtatcatcgaccagatgcccaagtggttcagcggccgcgtcggcggcaggatcctcggcgtgcgctgcgacttcaggtacgagaaggatccattcttcaagatccccaacgacatggtggtgcttagcccgctcccggatccgtcgtcacaagggagcagcagcagcggtggcctgtggatcgtggcgatcgtcgtccccgtcgccgtgctcctcctcggcttcttgggatgtttcctctggatcaggaggcgaagaaggagagggacggtgagcgtgccgaccatgtccatggagatggagcaggtgctcaagctgtggcggatcgaggagagcggctccgagttctcgctctacgacttcgaccagatcgccgacgccaccgacaacttctccgacgcctgcaagctcggccagggcggcttcggccctgtctacaagggtcaattgcctgatgggcttgagatagcgatcaagaggctctcatcctgttcagtgcaggggctgatggaattcaagacagagatccagctgatagccaagctgcagcacaccaacctggtcaggctgctgggctgctgcgtccaggctgacgagaagatgctcatctacgagtacatgcacaacaagagcctcgattgcttcatctttgacactgaaaagggggcgatgctgaactgggacaaacgcttccgtataatcgatggcattgcccaggggcttctttacctgcacaagcactctcggttgcgagttattcacagggatctgaaagcaagcaatatactcctcgaccgggagatgaaccccaaaatctcggattttggaatggcaaggatattctgctcgaatgtgacagaagccaacacgaccagggttgtgggcacacatggttacatcgctcctgagtatgcttctgagggtctcttctcgatcaaatccgacgtgttcagcttcggtgtcctgcttctcgagatcataagcggcaagaggaccgccggattctaccagtacggcaaattcttcaatctcacaggatatgcgtaccagctatggcaagaagggcaatggcacgagctggtggaccaggcgctgggggaggacttcccggcgatggaggtgatgaagtgcgtgcaggtggcgctgctgtgcgtccaggacagcgccgacgaccggccgaacatgtccgacgtgatcgccatgctcggcagcgagggggtgacgatgccggagccgaggcagccggcgtacttcaacgtcaggatctccagcctggccgtgtcgtccagctccttcggcgagtcgtactgcatgagcaacgtcacgttgatggaggaggacggcagatagcattttgcagtgcaggcacgtttataatcatgtagattcagattgtagtaagcgattaatcacgattggtgaagttctagcttggcaattgtgtatatgatttgttatgatcagacggaaaccaaaaggaacagaacatgatgacatagtcgatggcaattcaaccaacatgttattcttc

SEQ ID NO: 2766 - DNA, 1208 bp, Oryza sativa
  ref <308>: DATABASE ACCESSION NUMBER: AK060566
  ref <309>: DATABASE ENTRY DATE: 2001-12-06
acgcagctgcgcggtgagcacaaagcgaactattctttcgccttttactaaagaataccgtgtgcgcgccgcaattagcagcatacgctaatttttggagggaaccgactcttctgaggagggaagtttctcgttttgtttttgtctgctctcctcctgaccgaagggaaggatatggaatcatctgatgctgggcattttttttctttttataacgcttcctctgttttttcattggatgggacggttaggatttgttgtacttctcaatccaatgatgatgaattaatgtatgacgtggctcatcttaggtgacatctcaagattaacttttcactaatgtagatgaggccgagaaggcgaaaagaagttgttgggttccgaggattaggcccacataagacgtaagcccacttccaatcttccattccttccacctcttccgtcaccacgccgccgcagccgcacgcgcagcgcaggggaagaagaagaagaagaagaagaagcggaaggcctcgtgcaggatgcaggcggtgagaaccctggtgctgcggcacctgcgtcttgcctgccgccgcgcgccgccctcggctgctgcctgtggtggcgcgaggccggcggtgtaccgcgtcgtcggcgtcgcccccggccaccgggggatggccgcgtcggcgggccaggagggtgggccgccgcgggatttctccgagggcgctgtcagggcgcgcgtcgtcgagctcgtcaagaagttcgacaggatcgacgccgacaagtgtgttctcattgatctaaaatggtgtaaaatgaaatgggaagaggaaggcagaggagttcatccagatgaaggcaattaggtaactgagacagcagatttccaaagggacctgagtttggacagcttagatcgggtggaactcgtcatggcctttgagcaagaattctccgttgaaattcctgatgacaaagccgacaagctttcctgctgcgctgatgttgcaaaatacatcatatctgaatcccaatccaacaaaagtaacgctgggagcatttaaattgcaagccatcacaaagcagattttttgcgccccttgaatctcagccacaaacggcatttctattttagataatgccacaaagggaacttttgttgccatttttgattatgttgtagctccaactatcaagtcaaatgcatcagagctttatgg

SEQ ID NO: 2767 - DNA, 1574 bp, Oryza sativa
  ref <308>: DATABASE ACCESSION NUMBER: AK104314
  ref <309>: DATABASE ENTRY DATE: 2002-08-28
aaaagcaacacgcgtctcgcggagggaaacccgcttttgccgggaacaaacgaaaccaagcgaagcgaggagaagatgttgctgcaccggcaccggcacaggctgctctgctgcggcggcggcgtcgccaccgcccccggccggttcgccggcgatgccatcgcggaccatcagcaggcagccgccggcgccaagaacgcggcggccacgtcgtccgcgaggcagctgtcgtgggcgcaggtggaggccatgacgcgtgggttcacgtcggccgtcgtcggcgagggcggcttcagcaccgtctacctcggccgcgtcgccggctccctcgcggccgtcaaggtccaccgcagcagcgagcgcctccagcgcgccttccgccaggagctcgacgccctcctccgcgtccgccacccccacatcgtccgcctcctcgcgttctgcgaccagcgagacgagggcgtgctggtgctggagttcgcgccgaacgggaacctgcacgaacagctccacggcggcggcggcggcggcgcgatgccgtgggcgcggcgggtggcggtggcgctgcaggtggcgcgggcgctcgagtacctgcacgaccggtgcgagccgcaggtggtgcacggcgacgtcaagtcgtccaacgtcctgctcgacgccgccatgggcgcgaggctctgcgacttcggctcggcgcgcgcggggttctcggcggccgtccactgcccgcgcccgcgtccgtcggcgctcgccgtgctcggctcgccgggctacgtcgacccgcactacctccgctccggcgtggtcaccaagaagagcgatgtctacagcttcggcgtgctgctgctcgagctgctcaccggcacgcaggcgttccgcgacggcatgctgctgacggcggccgtcgcgcccaagctcaagggcgccgccgccggcgacgtggagaagctcgtcgacgagaggctagggtgccagtacaacgccgccgaggcggcgaccgtggcggcgctggcggcggcgtgcatcggcgacaacccgagcctccgcccgtcgatggccgacgttgtacggaccctggagaagcccgcgcaaaaggccggacggtgacgtgcaatgttgtgcgccgtaggatggttagatatgacgtggcaagtatcaggaccgtaggattggatgctgctcccgcgcgtggaaccccttgccgcgattgggttggtgaggagcaagaaagcaatagagacgaagcgtatcaaaattcaaaagcaaccaagcaagcaacgatcgagggtttggttcggacaaggactttttggaggatgtttgtgcagttttttcatagtattttggtggccgatcccgatcattgttgttcatcttctactaggtcgttggcacacaagtgcatgcagcaactgtaagagaggattcaatccacatccactgcatgcatattaaatttttagatgttttttgcacgccttcttcctgcttcagcaagcaccagcacgtaaaataaacgtgcacaaaatctgtaaatacatttgttcagagaatcatatgtttccaattctctc

SEQ ID NO: 2768 - DNA, 249 bp, Oryza sativa
  ref <308>: DATABASE ACCESSION NUMBER: AK060567
  ref <309>: DATABASE ENTRY DATE: 2001-12-06
tttttcttgcaaatcagacatgaaaattttgtagtgtcctgatcattccgtttgtgctccatttgaaattcagctcttgatttgcttatcatctgaatacaggtggaggattgggtttgtttaaactttgattaagtgacagtgacttgattgtattgagattgcagctcagggattgtgggtttgtttatcttctgaattcaattctggagatagctgcatgaaacgtgatccacccgttttccagct

SEQ ID NO: 2769 - DNA, 238 bp, Oryza sativa
  ref <308>: DATABASE ACCESSION NUMBER: AK060568
  ref <309>: DATABASE ENTRY DATE: 2001-12-06
agagccaccattggtttgcattcttctagaattgcatttcttgatattcatttcagcttgatcccaattcatttctaacttgatggcaacaagttattgtattctctaattgtttctggattagccagtttattgtgaccaatgtaacaagttgatgtttcctgtcgacataaagctcacatgtacaaaccttggcagctaccaattggaaatgaaaggaagaaaatgttttcggact

SEQ ID NO: 2770 - DNA, 1733 bp, Oryza sativa
  ref <308>: DATABASE ACCESSION NUMBER: AK060569
  ref <309>: DATABASE ENTRY DATE: 2001-12-06
acgccccgagaaaaccctaaaccccccaaccctcgccgccggcaaccgccgccgccatgttcggcaccccggcttcgtcgcccctatttgggaccccctccaccaccccggcattcggcgccccttcctccacccctgcattcggcacgccctccaccaaccccgccttcggcaccccttcctccacgccggcgttcggcgcgccgtcgtccaccccgtccttcggcaccccctccaccgcgcccgcgttcgggaccccgtcctcgaccccggcgttcggcgcgccctcctcgacccctgccttcggggcgcccttctcgaccccggcgttcggcgtggcgccgtcgccgtcgccatcgccgtttgggttccagcagcagatgacgccgtccccgtcgccgttcgggttcgccggtgggggcggcgggcagatcaccacccagatggcccccgtcgcgccgctcccgctctcgccctccgaccgtgacatccaggctatcgtggatgcgtacaaggaggatcctggaaaccctcgttatgctttcaggcatctgttgtttagtgttacagagccttcacaacgggtgaagccagttgcggcatctgatatcatgtgggcagaagctatggggaagcttgagggcatggatagttcggatagggagaggctgtggcctcaactcgtgcagggatttaaggatctttcctaccggcttaagcttcaagatggagttcttgtctcagattctgatagattgagcatgacacgcgacaatgttaaaaagttgcaaagacatttccaagctgacacatacccatggatccaacggctgaagcagcaagagttggttattgagagacgcctcttaaggataatgagaatagtggaggcattagagaatcggggttatcgtattccactaacgaaggaggaagctgatctgtatgaacgactggctgttatagcaaagcagctaaaaggacccactggtgatctgcacaggagagtttataatcttctttcaacttctcgccttcttgctagtgctggtggcactgctggtcctatctatattcctagctcagcgaaagttgacgaacagagtgttgctgagcttcttgaggccttacaacaacagacggaagctgttgccaagttgggcaatgtgatgaaaagagatacaagagacttggaaataatactttcggaagacacggacatggcagaagacagtgttgggagaagggcattgaagatgtataactaaaccaaattcttcattcaatgcattgacataagcaggagatccttctttggtcaagggtttagagtgtcggaaagatggcagccaaacgaacgtttgaccttaaacgtctaccgttgcaaacgactaaacgagaatttgttctgtttggaagggccatagtggaattggcggtttgtgttttggtgacggcaaaaacaagtcaccagtgtgacaaaatctgatgttggctgtggcagttgtgtaaaccacagccacctgctaagccctcttaaattcgtgagttagtcagagatcgattgcctgcatgtaacacttgtataatgacattttagattatttagatgagcgtctttgcggactagatccgatatattgtcgcagattgttgtaggtttaaacggagcttagtttggtgatgtgcccgggaggctgcatgcaaggtttcaaaatgcgaagagctaatcg

SEQ ID NO: 2771 - DNA, 1239 bp, Oryza sativa
  ref <308>: DATABASE ACCESSION NUMBER: AK060570
  ref <309>: DATABASE ENTRY DATE: 2001-12-06
atgacattactgagtactatattgctccacgcctgaaagcattctctgattggattctaaaagctatggccataggtaatcttgaagacattttccctgcagctagtcgtgaatatgcaccaatggttgaggaactatggaaagatcctgctattcaagctacatataaccggagaagtgaactgccattccttccatctgctgctagttatttccttgacaaggctgttgatatttcccgaacggaatatgagctctctgatatggatatcctttacgctgatgggataacatcctcagatgggttagcatctacagatttctccttcccacaactggctttggacgggcggggttttgatgagccagatccacaagacactttgctaaggtaccaactaataagaataaacaacaaaggattgcatgagaactgtaaatggctgcaaatgttcgatgatgtgaggcttgttatcttctgtgttgcggtcagcgactatgatgagtactacgaggatgcaaacggcaatgttgtgaacaagatgatggagaccaggcagctatttgagagcattgcccttcatccgatatttgagcagatggatttccttctacttctcaccaagtttgatatcctagagcagaagatcggcaaatctcctttaacatcatgcgactggttcagcgacttcactcccctggtaagccgcaatctgatcaacggcaccagcaaaagctcgcggggcagctccactggctcgacattggcgcagatggcgggtcactacattgcggtgaagttcaagagcgtattccagtcgttcacggagcggaaactctacgtgtcctacgtgaacgccctggaccaggagtcggtccgctccgcgatccgctatggaagggagatcatcaagtgggaagacgagaagcccgtgtttgggtccagcgagacgacatacagcgaggagccgagctcctactctcactgacccctcctccctcaacaacatttgcttttgaggtgtaaatagctgtgaatgcatttgctctcccagcaaccttttttccttttagagttttctcattttttccccttttgttgcctagcaagatcatcggcttgtatggttgtttagttgtttacaagtagggtgagatgcaagaggtctgcctgattctgattcttgtatgtatggaattataatctttaaattaacatggtgctgattcttgtacttc

SEQ ID NO: 2772 - DNA, 1303 bp, Oryza sativa
  ref <308>: DATABASE ACCESSION NUMBER: AK060571
  ref <309>: DATABASE ENTRY DATE: 2001-12-06
acggtgcaaagtgtgcagcgaactcgataaacattaaacaagctgtgtgaacttcttttttcgtgacaagtttaattctttctcgatcgatcgtcgtgatggctgacgagtacggccgcggcggctacggcaggtccggcgccggcgccggcgacgactacgagagcggcggctacaacaggtccagctccggcggcgccgacgagtacggccgccggccgggaggcggtgccggtggctacaacaagcccggtggcaccgacgactacgacagcggctacaacaagtccgccggcggcgacgacgacgactacggccgcaccggcggcggcgggtacaacaagtccggcaccgacgacgactacgacagcggctacaacaacaggtcaggggctaacgagaagtacggccgcaacaagtccggcgacgacgagtacagcggcggcggcggcgccgaagccgacgaggagtacgtcgacgggttgtcgtcccgggacgacccggagaagtacaggaagggggagaaggagcacaagaacaaggagcgcctcggcgaggtgggcgccctcgccgccggcgccttcgccatgactacttcacccttgccttcctacgctttctttcctcatcgccgggcggcggcggcggcggccatgtccatccccgggaacggccacctcccggcctccaccgacctccctgaccactcctcctccgcctcggaccccgaggccgactaccgccccatctccgccgccgccaccgactccgacaccgacacagatcccgacccggcgccccaccaccgcctcggctccatcgggaacggcgtctccgagctggatctcgactccggcggcgatgacgaccactgcgagggcgcggacggggaggatacggtggcggaggaggaggaaggcctggggcttggggaggaggcggcccgtgcgttctcggaggacgagcggcgccgccgcgccccgctccccgcgggcgccgcggcgcggatcgtggacgcgatgcgcggcgtggagttccccggcgcgccgcctccgtgggccggcagcgtccccgaggaccagtggctcgaccgcctccgctccctccgcgccggcgccggccatccccactaggaggaggaattcattagctgcttgctgcaaatttcttgtgtcttgcttagatgcaggctgagatgctgctgcttcttgggaaatttgtggacaaatcattcggggtgacatttgtgtgttcttgttgttgtatggagtaagtacttactgcaatcttgattttcttactg

SEQ ID NO: 2773 - DNA, 1571 bp, Oryza sativa
  ref <308>: DATABASE ACCESSION NUMBER: AK060572
  ref <309>: DATABASE ENTRY DATE: 2001-12-06
cattccccgaattccccaatccatcgcgaatccgatgaagaaccctaaccctcctcaccccaagcactcctcctcctccgccgccgccgccgcgatggcgccccgcaagtcgcgctggggcccgccgccgcccgccggggagaagggggcgggggcggcgtccacctccgcgcgcaccccgaccccgaccccgtctacggccggcgaccccaggcggcatccgcctcctcctggccctggcgcgcgcaaccccgccgcgtcgtcggccgccgccttccgtcctccgccgcagccgcagcagcagccgcgggtggagacccctcccccgccgtcgtacggcttccacaacctggaccgccgcaccatgctcctcgccgacggcagcgtgcgcacctacttcgccctgccgcctgattaccccttcgagctcacccctctgccccagctcccgcacctcccgcgcggggccggccatgaagtctggccgccgcatcacccgccgccgccgccgcagcagcagcagctgcagctggcgcagcacgacgccaagcggaagcacctcgccgagcacgacgagggcttccacagcaggcaccccaagcaaccccggttcgaggcggcaccgccgcagcagcagcagctgccaccgcatgccgcggtggaccggcacgcgctcaggagggcgtttctcaagtacgccaagatgctcaacgagagcgcggcgcagaggcggagctaccttgaaggtggacgcgtcccctgccttgcctgcggcaggtcttctaaggactttgctgatgtgcatggacttgtcatgcatgcttacaacccaccaaatgtggattcattcattgaccatcttggtttgcacaaggcactatgcgtccttatgggatgggattatacaaaagtccctgaaaattctaaggcataccagtcattgctccctgaccttgttcaagcaagtagggaggaccttatcatatggccaccaactgttatcattcacaacactgctacagggaggaagaaagatggccgcgctgagggtttggggaataaagaaatggataagaaaatttcagaactaggttttgctggtggcaagtcgaagtccttgtatggaaaggaagggcacttgggtttgacacttatcaagtttgcaaacagcccagctggcttgaaggaggctgagcgccttgctgatttccttgagaggcaagatcatggacgtattggttggttgcatgcacgagccaaccagtctgtaggttctgataatagccctttactggttgaaacagataacaggacaggcgagaaaaggaggatactttatgggtacctagcaatttcatctgatatggatgaattagactctgattcaaggaaaagggcttccctcaagagcaagagagaatttgacccatctgattagcctcttctcacaaaagcacatctccttgtcagtttatttaattcaagcgacgcttctgtaccttctcttaaatgctggtttacaaaatatgctgctgtgcactagaaatattacctttgaaaatagtacctgc

SEQ ID NO: 2774 - DNA, 1392 bp, Oryza sativa
  ref <308>: DATABASE ACCESSION NUMBER: AK060573
  ref <309>: DATABASE ENTRY DATE: 2001-12-06
aggcgaggcgtcgtcgtgagggcggcgtcgtggtcgccgtcggggccggagtcgctgccgccgccgccgtcgtcgtcgatcgcgccgctccagatggagtcgccggtggggcagttcctctcgcagatcctggccacgcacccgcacctgcttcccgccgccgccgagcagcagctcgagcagctccagaccgaccgcgacgccgccaaggacaacggcggcgacaagcccgcgccgtcggacggcgacatcgtgctgtacaggcggattgctgaggtcaaggaaaaggagcgcaagagggctttggaggagatactctatgcacttgttgtccagaagtttgttgaagctggtgtttctttggttccagctctttcccactctatcagttcttctggaagagttgatcagtgggcagaatctgtggaagggaaacttgagaagatgcattcacaggaggcatatgaaatgatcgagaaccacctcgctctcatcctggggcagcggcaagctgatgccactgttgcggccataagtaaactccgagttggtcaggtgtatgctgcttctgtgatgtatggttacttccttaagagagtcgatcagagatttcagctcgagaagtcaatgaagaccctcccttggggatcagaagaggaagacaagctcaaccaagttatgacaacggactcaaggccctcaccccagacttctacttcacatccagagatggcatcatggacttcccctaacttcagtgcaggcggacctagccaatctgttaagccatgccgtcttagatcgtatgtcatgtcatttgattcagagaccctacaaagttacgcaacaatcaggtccaaggaggcatttggcatcatcgagaagcacactgaggcactatttggtaaaccagagattgtaatcacacctgaaggcacagtcgattcttccaaggatgaacatgtcaggataagtttcgcagggttgagaaggctgatcttagaggctgttacttttggatccttcctttgggatgttgagagctttgtggacaccaggtaccattttgtggccaactagttgatcctacaaagtttcatcccagatagtggagattagtgtgtatatttggtccgaagtgtatgggtttcaatgaagactctttgcaaaacgaatttctcctggctctatgcagatcgcagagatctatgatttttacacagttttcgggcatatagcttcaatgtaaaatggatatttttttagcctaatgtgcagctgttagttcctggtaacacttgggctgcttgggccttgggtgatgtataatgttttatgacttgatgtctggaaattgaatgaggaatcctagctagctctagttcaaacttt

SEQ ID NO: 2775 - DNA, 1623 bp, Oryza sativa
  ref <308>: DATABASE ACCESSION NUMBER: AK060574
  ref <309>: DATABASE ENTRY DATE: 2001-12-06
aaatgctccaccaaacgctcatcccttcttccaccctttccttcccctcctccgccccccctctcgcctcctctcctcttcgcctcaaaagccgccgccaccgccgcccagggttccaacacctcccgctcctcctcagccatgccgtcctacgcgcaccaccacagttctctggatgggaagatggacgcgctgaaaagtagttgccggtcggaggaggcggccgacgagggggcggccgcggcgccgtcggcgtgggggatggttgagagggacgggttctccgtcgaggacctgctcgacctcgaggagttctgcgaggcggaaaaggacgccgccgaggagaacgagcaggcgctggccctcgtcgccgcgccagaggaggaaaagtcgaaggacgactcccagccgtcgtccgtcgtaacgtacgagcttgtggcgcccccgccgccgcctccggagattgttgacctgccggcgcatgacgtcgaggagctagagtgggtgtcgcgtatcatggacgactccctttccgagttgcccccgccgccgcagcctcctgcgtccgtcgtggcgtcgctggccgcgcggccgccgcagcctcggcagctgcagcggcggcctcaggacggagcttaccgcgcgctgccacccgcgtcctatccggtgcggactccgaccatctgcgcgctgtcaacggaggcgctggtgccggtgaaggcgaaacgcagcaagcgctctcgggccacggcgtggtctctctcgggggcaccgcctttctcggactccacgtcatcctcgtccacaaccaccacctcctcgtgctcctcgtcggcttcgttctcgtcgttctcgccgctcctcaagtttgagtggcacccgctcggcggcacgtcggacctcccggacgatcaccttctgccgccggggaagaagtccaagcacggtaagaacggcaagaacaagcctaagaagcgtggccgcaagccgaagcagctcccaccacatccctcgggcgcggcggcgtcggcccccgcgccgggcgaccggcgctgtagccactgcggcgtgcagaagaccccgcagtggcgcgcggggccggagggcgccaagacgctctgcaacgcgtgcggcgtccgctacaagtccggccggctcctccccgagtaccgcccggcgtgcagccccaccttcgtgagcgccatccactccaactcccaccgcaaggtgctcgagatgaggcgcaagaaggaggtcggctccggactcctcaccgccgccgccgccgcagcgcccgccgtggcgtcgttctagctaaagcaagctagccaccccgcgcgcccccgcggtggctgtacatttttccagccgtattagtcctgtaccgtacctggatttttttcccctttcttttccagtattatcttagttccggttggattaattagagttaggtgcctttaggtcatgttaggtctaggaattcagctttccggtgctccagctcaaaagcttttactatagtttgttagggcactgctgctgtagcagcagtgcagccgcggcagcgctagcgcagaacttcatttccattctagcttacccgaaggagttttttttttc

SEQ ID NO: 2776 - DNA, 1432 bp, Oryza sativa
  ref <308>: DATABASE ACCESSION NUMBER: AK060575
  ref <309>: DATABASE ENTRY DATE: 2001-12-06
tatccatctgcgacgaggaggaagaagaaggagctagcgaggatgcggcacatctcgtcgctgctgcaggggctggcgcgctcgctgtcggtggggaaggagaggaagggcggcgacggcgacgacgggaaggcggcggcggcgacggcgacggcggtgctgaggacatcggggacgctgtggggcgagggctctgagacgttcgccgccgtctgctcccgccgcggcgagaagggcatcaaccaggactgctccatcgtctgcgagggattcgggtgcgaggaggggagcgtgttgtgcggcatcttcgacgggcacgggcagtggggccactacgtggcgaaggtggtgagggagtcgctgccgccggcgctgctccggcggtggcgggaggccgtgacgctggcggcgctcatcgacggcggcgagaagcggctctgcgagtgccggcccgacctgtggcgccagtcctacctggccgcctgcgccgccgtcgacgccgagctccgcgccagccgccgcctcgacgccgtccacagcggctgcaccgcgctgtccctcgtcaagcacggcgacctcctcgtcgtcgccaacgtcggcgactcgcgcgccgtcctggccaccgcctcccccgacgacggtggcggcgcccgcctcgccgccgtgcagctcaccgtcgacttcaagcccaacctgccccaggagagggagaggatcatggagtgcaacgggagggtgcagtgcctcgccgacgagcccggggtgcaccgggtgtggcggccggacagggagggcccaggcctcgccatgtcgcgcgccttcggcgactactgcgtcaaggattacggcgtcatctcggcgccggaggtgacgcaccgccggatcaccgcccaggaccacttcgtcatcctcgccaccgacggggtgtgggacgtggtgtcgaacgaggaggcggtgcagatcgtggcgtcggcgccggagagggagaaggcggcgaagcggctcgtcgagttcgccgtccgggcatggaggcgcaagcgccggggcatcgccgtcgacgactgctcggcgatctgcctcttcttccactcgccgccgtcctaaacaacacacacgctgacacgcacgcagccaacaaaaaccgcacacgccgacgacaatgtcgccgtcgtcgttgagaggcgccacaaaaaggaaaaaaaaacgcagattgttacatgccagaagaacaatgcaatttgccgccatgattgggacggtgcacgattgacctgacctgccggtgatgaactctgctgctgctagtggatgaccgggaaaaatccaatcctccggctttcacaccaccgtcattgtcaaaaagttgtccgagattcaattcaacagcagccacaagaaaaaggcagggaaaaaaaagatgcattttgtcctc

SEQ ID NO: 2777 - DNA, 271 bp, Oryza sativa
  ref <308>: DATABASE ACCESSION NUMBER: AK060576
  ref <309>: DATABASE ENTRY DATE: 2001-12-06
gtacgataagagggtcaaagaggtccatgcgagcggggagctccgtatgagctcactgcgcatatgaaaaagtttgtgtgcagctattgtgtagataatccggcttactatggaactgcggtgtatgcaattttcgctgtaaatttgcttctgtttggcgtttcttcgtgtaacataacttacttgggggcgcttggacttcaattgtctgattatgttttgtaagtacctacatattaagcgtatgctatgtacttggtgagaaacttct

SEQ ID NO: 2778 - DNA, 1532 bp, Oryza sativa
  ref <308>: DATABASE ACCESSION NUMBER: AK104315
  ref <309>: DATABASE ENTRY DATE: 2002-08-28
aaaaccgcttccaacccgagaccacgctccccgccggatcgagcagctagggtttcgacctttttttttcccaccaggagggcgacgagatgttcgggcgcgcgccgaagaagagcgacaacacgcggtactacgaggtgcttggggtgcccaaggatgcgtcccaggatgacctcaagaaggcgtaccgcaaggccgccatcaagaaccaccccgacaagggcggagaccccgagaagttcaaggaattggctcaggcttatgaagtcctgagtgaccctgagaagcgtgaaatctatgatcagtacggtgaagatgctctcaaggaggggatgggtcctggtggtgggatgcatgacccatttgacattttttcctcattctttggaggtggctttggaggtggtagcagtaggggcaggagacagcgtaggggagaggatgtggttcaccctctgaaggtttctctggaggaattgtacaatggcacatcaaagaagctctccctttctcgcaatgtgctctgctccaagtgcaatggcaagggctcgaaatctggtgcttccatgaagtgctctggttgtcaaggttctggtatgaaggtccaaattcgccagttggggccaggaatgattcagcaaatgcaacatccctgcaatgagtgcaagggaactggtgagaccatcagcgacaaggatagatgcccaggctgcaagggtgagaaggtggcgcaggagaagaaggttcttgaggtggtggtcgagaagggcatgcagaatggacagaagatcaccttccctggtgaggctgatgaagcgcccgatactgtcactggagacattatcttcgtcctccagcagaaggagcatcccaagttcaagagaaagggagatgacctcttctacgagcacaccctgaacctcactgaggccctttgtggcttccagtttgttctcactcacttggacaacaggcagctgcttatcaagtccaagcccggtgaagttgtcaagcctgattcattcaaggctgtcaacgacgagggcatgccgatgtaccagcggccattcatgaaggggaagctctacatccacttctccgtggaattccccgactctttgaaccctgaccagtgcaaggccctggagaccgtcctcccgccaaggccggtgtcgcagtacaccgacatggagctcgacgagtgcgaggagaccatgccgtacgacgtgaacatcgaggaggagatgaggaggcggcagcaacagcagcagcaggaggcatacgacgaggacgaggacatgcacggcggcggcgcccagcgcgtgcagtgcgcgcagcagtaagcagcaagcagcgccgtgcatacatatctgcacggctttgacggcggcgacaaattgtttctttccgctctaggggcgataatactatcaagttttccatgttaggcatatgatgatgtgatactacttttggtcttttatactgcgtattaatgacgtacatcaaccggacctactggtccatgaaac

SEQ ID NO: 2779 - DNA, 1666 bp, Oryza sativa
  ref <308>: DATABASE ACCESSION NUMBER: AK060577
  ref <309>: DATABASE ENTRY DATE: 2001-12-06
gtgatctccgaattcccatattagattccgagggcttggggctctcctacgatcccccgcctcctcctcctcctccatacggtatatctctcggcggcatctcgaaatcctcatccgtttctgttgttgtttccgcggcgagtttgaggggtgtgtgttcttggagaggaagaaccgttcgccggtttgattcagggtacaggaacttgctacagagtgattggtgggtggataagaagccatgctacctgctgtgaagctctctcctggccctgtggccttcgctggcaccaatctacggtccagatcagcttcggtttcatctgtctcaagtctcaaaccatccaaatttgtggtctcttcactcagaccactctaccttgcaccactagatggcccaagagctgctgggcaaaaggctcagaggcagccacttgagttcaggtgtgctgcttccgcagccgatgacaaggagtctaagaccgaggtggtgcccgtccgctcggaagctgcccagaagctgaagatctccatctatttcgcgacatggtgggcgcttaatgtgatctttaacatctacaacaagaaggttctcaatgctttcccatacccctggctcacttctacgctctcccttgcctgcggctctgcgatgatgcttgtctcatgggccactcgccttgttgaggcccccaagactgacctagatttctggaaagttcttttcccggttgctgtggctcatacaattgggcatgttgctgcgacagtgagtatgtcaaaagtagcagtgtcattcacacacattatcaaaagtgcagagcctgcattcagtgttttggtatcaaggttccttcttggggagacgtttccggttcctgtatatctttctcttcttccaatcattggtggatgtgctcttgctgctgtcacagagctgaactttaacatggttggattcatgggtgccatgatatcaaaccttgcatttgttttccgcaacatcttctcaaagaggggcatgaaggggaaatctgtcagtggcatgaattactatgcctgcctgtcgataatgtcccttgtcatactcacaccattcgctatcgctatggagggccctcaaatgtgggctgctggttggcaaaaggctcttgcggaagttggtcccaatgttgtctggtgggttgctgcacagagcgttttctaccacttatacaaccaggtgtcttacatgtctctggatgagatttctccattgacatttagcattggcaatacgatgaagcgtatatctgtgattgtttcgtcaatcattatcttccacacacctgtccgccctgtcaatgcactaggagctgccattgccatccttggcacattcctgtattctcaggcaaagcagtgagttcaaaaagatggtaatgttcagggccatggatgaagaagggatccagatgaagaatgtctctgccaaaccagtagcaagcactgaggccaattttgcttgtgcaacttatcttgtagatataggggggttaggttttgatatgaggtcataataataatggtctatgttgctcgtttcttgttccttgttagtgcaaactgaactccagaggctatgaactgtggtcgagtgtaatcttgaaataaaaacttgaatggg

SEQ ID NO: 2780 - DNA, 1278 bp, Oryza sativa
  ref <308>: DATABASE ACCESSION NUMBER: AK060578
  ref <309>: DATABASE ENTRY DATE: 2001-12-06
cttaaaaccagcattcttaagtttaagatcaaagagtcgggcggaaaaaggggagagctccccgttcctggttctcctgtagctggattccccggaaccacaagaatccttagaatgggattccaactcagcaccttttgttttgagattttgagaagagttgctctttggagagcacagtacgatgaaagttgtaagctgtgttcgggggggagttattgtctatcgttggcctctatggtagaacccgtcggggaggcctgagaggcggtggtttaccctgtggcggatgtcagcggtactcccccccgtccggcgcgcggctcctccgtcgacccgccgtaagtaaaccttccgatggccgccgccgccgccgccgccgcctccgccaccgccgccatctccggtgcgttactcccccacgccgtcgcatgccaccgcttgccgccgcggccgcagctcctcgcggtgtcctcctcattccgccgcctctccctgaccgcctcccctcgccgggccagccgcctggtccctcgcgcggacgccagcgcagaagcgggagaaccggagcccgccgctgaggctgaggctgaggctgttgctgcctcgactgacgctgaggtggaggagggtgaggcggaggcggctgtcgcggtggcggaggaagagcaggaggaagaagatgagcctccgccgccgagcaagcccccggttaagttcggggagatcattgggattctgaacaaacagttcattgaggaggctgaaaaggtgaagactttaccagatcttaggcctggtgacatcattgagcttagaatgcaacggcccaacaagaggagattgtcgctctttaagggcataattatagcaaaacacaaatctggtgttcacaccacaatccgtgtcagaaggattattgctggtgtcggagttgagattaccttccctatatattcacccaggatcaaggaaattaaagtaatcaggcacaagaaagtgagaagagcaaagttatattatttgaagcacaagcttccccgcttttcaactttcaagtaaaaattagatatgctggcagaagagcttctctcactagcattgttactttctctagcaaatgcttttttatttttttgttcaaacctatgcttttcactgtaatcactaaatttcaaatgtgtaatatctacaccttttctgtttggcatatatttttgtctttctgtggaaatgtactttcttcgctttgtataaagttcctactagcattttgtt

SEQ ID NO: 2781 - DNA, 2006 bp, Oryza sativa
  ref <308>: DATABASE ACCESSION NUMBER: AK060579
  ref <309>: DATABASE ENTRY DATE: 2001-12-06
aagcgagaaaaatgggagcacgctgcctcgcattgcttctcctctatggcacgttgctgctgctgttgctgctgccacagctgccgctcgccggcgcggcgacgagatactacaccttcaatgtgaagcttcagaatgtgacacggctgtgcaacacccgggcaatcccgacggtgaacggcaagttccccgggccgaaaatagtcaccagggagggagaccgcgtcgtcgtcaaggtggtcaacaatatcaaggacaacattaccatccactggcacggggtgaggcagatgcggacggggtggtcggacgggccggcgtacgtgacgcagtgcccgatccagacggggcagagctacgtgtacaacttcaccatcaacgggcagaggggcaccctgttctggcacgcgcacgtctcctggctgcgatccacgctgtacggccccatcatcatcctccccaaggccggcctcccgttgcccttcaccgagccgcacaaggacgtgcccatcatcttcggagagtggtttaacgcggaccctgaggcgatcgtcgcgcaggcgcttcagaccggcggtgggcccaacgtctccgacgcctacaccatcaacgggcttcccggcccattgtacaactgctcaagcaaagacacgtttaggctcaaggtgcagcccggaaagatgtacctgctccggctgatcaacgctgcgctcaacgacgagctcttcttctcggtggccaaccacacgctcaccgtcgtcgacgtggacgcctcctacgtcaagccgttcgacacggacgtggtcctcatcacgccggggcagaccaccaacgtgctgctccgcgccaagccgacggccgaggccgccggcgccacgcacctcatgatggcgcgcccctacgccacgggccgccccggcacctacgacaacaccaccgttgccgccgtcctggagtacgcgccaccggggcacatcaagagcctcccgctcctccgcccgtcgctgccggcgctcaacgacacggccttcgccgccggcttcgccgccaagctccgcagcctggcctgcccggactacccgtccaacgtgccgcgccgcgtcgacaagcccttcttcttcgccgtggggctcggcaccaccccgtgcccgggcagcaacaaccagacgtgccagggccccaccaacaccaccaagttcacggcgtccatcaacaacgtctccttcgacatgcccaccaccgcgctcctgcaggcgcactacaccggccagtccgccggcgtgtacaccgccgacttccccgcctcgccgctggagccgttcaactacacgggcacgccgcccaacaacaccaacgtgtcgaacgggaccagggtggtggtgctgccgtacaacgcgagcgtggaggtggtgctgcaggacaccagcatcctgggcgccgagagccacccgctgcacctccacggcttcgacttcttcgtcgtcgggcagggcaccggcaactacgacccgtccaagcacccggcggagttcaacctggtcgacccggtgcagaggaacaccgtcggcgtgccggccggcggctgggtcgccatcaggttcttcgcggataaccctggtgtctggttcatgcattgccacctggaggttcacacaacctgggggttgaagatggcatgggtggtcaacgacggcccgttgcctgagcagaagctgatgcctccgccgtccgatcttcccatgtgctagagatcgatcaatcgttgacattatttgaccaaggctgtgattcgtttattccgtttggtttgctacacataatttgtcaatggataatgccgtacgtacatacctgcaggattgaggtcttgttttccattcttccaaaggtgttgtttattcttgtaaggggtttgccattgttttttttttaaattctacaagtacttttagctcgaaagttcggccgtatatggtcaataagaatagtttgactcttacattttg

SEQ ID NO: 2782 - DNA, 1052 bp, Oryza sativa
  ref <308>: DATABASE ACCESSION NUMBER: AK060580
  ref <309>: DATABASE ENTRY DATE: 2001-12-06
gcggccgctcactccaccattccaccaactagctagctagctagccacgccatccctttctcctcctccttcttcttcttcttcttcttcttcttggtccggagagagtagagaggagggcgcgcagcgagatggcttgcccggcgcagtcgatgctgtcggcgagcaccaccagctgctgcgcgttcctgaggagcagcgccgccgccaagccacaggccgcggcgtcggcggcggcgagcctcgcgcgaggggggaggctgttcctgctgtcctgcaacgcctcgtcgtcgtcgtcgtcgccgtcgccttcttcacctccgccgccggcgccggcggcggaggactgcaacgaggaggagtgcgcgccggagaaggaggtggggagcctgagcgcggagtggctggcggaggagcggaccaaggtggtcggcaccttccctcccaagaagaagggatggaccggctacgtcgagaaggacaccgccggccaaaccaacatctactccgtcgagccgacggtgtacgtggcggagagcgccatcagctcgggggcggcgggcgcggcggcggacgggtcggagaacacggcggcgatcgccggcggcctcgccctcgtcttcgtcgccggcgtgtcgtccatcctcatccaggtcggcaagaaccagccgccgccgcaggccaccgtctactccggcccgccgctcagctactacgtcgccaagttccagccgtccctcgccgcggtcgcgctccagcagcagcccgccgtcgacgcgcccgccacagaggacgcctcgtcgccggcgccggcgtcccccgccgccgccgccgcagaggaccagctctcctcctgaactgctgctgctgcagatagagaagaagaagagaagatcagaaatgtctgtgacttcagacatgatgcttgtatacgtatcatcacagttcacaaagattcaaatgtactgatgaaggatatgcacgtatacactacatggtagattgatgaaaccatttttaagtttcgtatatatacaagcatagatttgatc

SEQ ID NO: 2783 - DNA, 1784 bp, Oryza sativa
  ref <308>: DATABASE ACCESSION NUMBER: AK060581
  ref <309>: DATABASE ENTRY DATE: 2001-12-06
ctggaaaaatctaaccgtgagaatgctgcactctattcaaagattgctcgaggagataaactaaatgctgcaaataggtcagtggtgaactcattccaagctgaccttgcttcaaagttggatattctctccactacccttgccacatctatagatcagcaaaataaacaccttaaatctgtggagaacttatgcaagtcttgtgttgattcccatgacacggctacttcggagataaaaaagaagattttggcttcaaaggcactttatatgtcacatatggaagccttccaaaatgttgtgctcctgcataaagcaaattcaaattctacactagaggatatatcatccctatctgctgcaagctgttgcagccttgatcagcttctagcttgtgtcgagggagaggcacagaagatatttggtgatatccagaatttgctagctgatcatcgaagcgaagtggcacatttcactcaagagttgcgggagagtttccgcattagcttggataggacgaaggacatgtctagtttcatccttgggttgttcgataagtatgtggaggaaacttcgaagttgcagagccactccaatcacacacatgaagcacaagtcaaaagccttgaagatttccagaaggcttatgaggagcaatcaaaatcagaagaacaaaagcttctggcggacatcaccagtttggtttctaaacacgttactcgacaacgagaactggtgggtggtagactaaactctcttggtgacgccgctcgtggaaacaaagcatttttggatgagcacacgtccgccatggaggtggtcacgaaggacgccaaaagaaagtgggaaatgtttgcagggcaggcagagaatgactgcaaagttgggtccaacttctctgcagctaagcattgtcgcatggaaaccattctgcaggaatgtgcatgcaccgtcgacactgctgctcaacaatggaaagcatcacatgcaactgttaacgatctatgcagaaaacaaatagctgaagttgaagcactcgtcaggagtgcaatcgaaaccaacgagcagcacgaagcagagattgcatcttcccgtgccacggccgaggagcatgcgtccaacagcagcaaggacctactccaagatgttgacaatatgctgcaggaggcgcgcaattcgtcgtcgagagtggtgtcgacggtggaagctcatttgggagagagccagcatctacaggagagccactccagccataccgccggcatcaacacccacgccgacaacgctttccagagcagctacaaggactacgagccgaccggcgaaactccggtgaggtcggagccggaggtgccgagcaaagacgcgatcgagtcgctgcgagcgatgccgatggagtccctgatggacgagttccgcgagaaccacccctacgagccgagcaaggaccgcaggccatcgctcatccctcgctcgccgctcgccaccatcaacaactgatgaaaatccattggaaacgcaacgcaatgcaatctgtctctgtgtgtgtactagtgtaatcttattagccgtaagtaggtcatcaaatgctggcttttggtgtcctttggttgttgtggctcagtgccagtgccagtccagcttcttgttgtgggttgcgagctatctcagcttcccccggcgcccttacctaactttctttcacattttattattttgatgtaccaatctgttgcttttctgtgtgattattggagctgcataagagatttgttgagcattgc

SEQ ID NO: 2784 - DNA, 2221 bp, Oryza sativa
  ref <308>: DATABASE ACCESSION NUMBER: AK060582
  ref <309>: DATABASE ENTRY DATE: 2001-12-06
attctcctcaactccaaaccatttcctccccatcgccgccgccgccgcagctgaatcttcccgcgtgaagccttcaactcggctcggggatggattccgacgcggcaccgtcagtgacgccgggggcggtggcgttcgtcctggagaacgcgtcgccggacgcggccaccggcgtgccggtgccggagatcgtcctccaggtcgtcgacctcaagcccatcggcacccgcttcactttcttggcgagcgatggcaaggacaagataaagacgatgcttctcacccagctcgctccggaggtgcgctccggcaacatccagaatctcggcgtcatccgcgtcctcgactacacctgcaacaccatcggcgaaaagcaggaaaaggtcttgattatcacgaagctcgaggtcgtgttcaaggcgctggattccgagatcaagtgcgaggccgaaaagcaagaggagaagccggcgattctgttgagtcccaaggaggaatccgtggttctctccaagcccacgaacgcgccgccacttcctccggttgtgctgaagcccaagcaggaggtgaagtccgcgtcccagatcgtgaacgagcagcgcggcaatgctgctcctgcggcgcggttggccatgacgagaagagttcatcctttgatctccctgaacccctaccagggcaactggatcatcaaggtgcgtgtcacaagcaagggcaacctgaggacgtacaagaatgctcgtggtgaaggctgcgtcttcaatgtggagctcactgatgtggatggcacccagatccaggcaaccatgttcaacgaggctgccaagaagttctatccgatgtttgagctggggaaggtgtactacatctccaaaggatccctcagagtcgccaacaagcagttcaagactgtccataatgactacgagatgaccctgaatgagaatgctgttgttgaggaagctgagggcgaaacttttatcccacagattcagtacaactttgtcaagattgatcagctagggccatatgttggtggcagggagctagtagatgttattggggttgttcagagcgtatctcctactcttagtgttaggaggaagattgacaacgagacgattccaaagcgtgacatcgttgtagcggatgactcgagcaaaactgtaaccatatctctttggaatgatcttgccacaactactggtcaggagctcttggacatggtagactctgcgcctatcattgcgataaagagcctaaaagtatctgacttccaaggtttgtctctgtcaactgtggggagaagtacaattgtagtgaatcctgacttgcctgaggcagaacagctcagagcttggtatgactctgaaggcaagggtacttcaatggcatcaattggttcagatatgggcgcatcaagggttggtggcgcgagatccatgtacagtgatggagtttttctgtctcacatcacaagtgaccccaacttgggtcaggataagcctgtgttcttcagtctgaatgcctatattagccttatcaagcctgaccaaaccatgtggtaccgagcttgcaagacctgcaacaagaaggtgactgaggcaattggatcaggatactggtgtgaagggtgccagaagaatgatgctgagtgctcactgaggtacatcatggtcatcaaggtctccgaccctactggtgaggcctggctttctctgttcaatgatcaggcagagaggattgttggctgcagtgcagatgagcttgatcggattaggaaggaggagggtgatgacagttaccttctcaagctgaaggaagctacttgggttcctcacctgttccgcgtcagcgtaactcagaatgagtacatgaatgagaagaggcagaggatcactgtgaggagtgaagctccggtagaccacgcagctgaagccaagtacatgctcgaggagatagccaagctgacaggttgctagatgcaaaattatcggtgaagcttgaagagtccatgaaagcttagatgcagtgtttcggtgaagcttttgaagtgcctgtccatgaaagcttttgaggtgtaatagctttataaattatggtttctccactgcaattaggtgctagctagtattagccttttgtattataggtagatgcatgcttaacttgtttttgaggcaaccagaatgtgatgctgttatacagccgttttatcttc

SEQ ID NO: 2785 - DNA, 1094 bp, Oryza sativa
  ref <308>: DATABASE ACCESSION NUMBER: AK060583
  ref <309>: DATABASE ENTRY DATE: 2001-12-06
tgagctgggttcagaacgtcgtgagacagttcggtccatatccggtgtgggcgttagagcattgagaagacctttccctagtacgagaggaccgggaaggacgcacctctggtgtaccagttatcgtgcctacggtaaacgctgggtagccaagtgcggagaggataactgctgaaagcatataagtagtaagcccaccccaagatgagtgctctctcctccgacttccctagagcctccggtagcacagccgagacagcgacgggttctccacccatacggggatggagcgacagaagcatggaaataggataaggtagcggcgagacgagccgtttaaataggtgtcaagtggaagtgcagtgatgtatgcagctgaggcatcctaacgaacgaacgatttgaaccttgttcctacacgacctgatcaaatcgatcaggcacttgccatctatcttcattgttcaactctttgatgaaaagatgaaaaaaccaaaaaaaagctctgcccttccatctcttggatagatagagagggagggcagaggcctttggtgtacccgtctccgcgctcgccgccgccgccgctcctcctccgcgccctcgaagccgccgccgccgccgcagcctcgccgccgtcgacatgggtaaggtgcacggatcgctcgctcgcgccgggaaggtgcgcggccagacgcccaaggtggcgaagcaggacaagaagaagaagccccgcggccgcgcccacaagaggatgcagtacaaccgccgcttcgtcaccgccgccgtcggattcggcaagaagcgcgggcccaactcctccgagaagtagacgcgccgggccgctccgccggtgatgtcccgtttgttcttggtagtagtttccttttaagtgctatatgcaagaaaacaagaagggggaaccaatcttttgtagcgtgtgagctcgatgctcgtgtgatttggatcgaactcaaaagtgcttagtcttattatgccgcatgttaagtttgagatatgatacgagctcgtgacttaattttgcttaatgtttaccctcttttatcttctatcaattgtgactaattcaaatc

SEQ ID NO: 2786 - DNA, 1616 bp, Oryza sativa
  ref <308>: DATABASE ACCESSION NUMBER: AK104316
  ref <309>: DATABASE ENTRY DATE: 2002-08-28
atcgaggcagcgggcgcaacgtggcgcgcgctttgcttgcaacggaagcgtggggattataaaagagggggcgcgagatccagatctggcgccgatgcgccccccctccctgctctccctcaccctcgactccgcgctcctccgcatcgcccacctccacgacctctcccgcctccccgaccacctcctcatcgacctcttccgtagaactatagctgccggtaagctgacagaaaaagtcctgaagttgtttctggcaacggattgcgaggaaatcgccttgcttgttcagttgctcaacattaagcagccgcttgtaccggtccttcccacgaggtgctctgagaagttctagaagtgacgctgattaggtcagtcttggttacctgagaaaagatgtctttggaaattcaggacagtgaggtcgacattgtgattgcagcactccagcccaacctgactactttctttgaggcatggaggccatttttctctcggttccacatcattgttgtcaaagatccagatatggctgaggagcttcaaatccctacaggttttgatctcaaggtttatacgaagtcagatatgggagtgcttggagccacatccatcgacttctctggtcactcatgccgttactttgggtaccttgtctcacgcaagaagtatgtcatctcaattgatgacaattgcctcccagcgaaggacaatggtgggttgactgttgatgcagttgcacagcatatgtccaatctgaagacacctgctacacctttctttttcaacacattgtatgatccattccgcaaaggggctgactttgtccgtgggtacccatttagtctgcgcgagggggttgagtgcatgctctcttgtgggctgtggcttcacaatgcagactatgacccaatgactcatgttgtgaagagaaatcaacgcaacacaacgtatgtggatgctgtgatgacagttccacttggtgcgatgatgcctgtgagcgggataaatgttgcattcaaccgtgaggtgctgggacctgtaatgttccctgctctgcggctgcgcaaggaaggaaagcacagatgggatacacttgaagacgtttggaatggcttgtgtgctaaagtggtgtgtgatcgcttacggtatggcgtgaagacaggtcttccttatgtgatgagaagtgatgcagaagcaggtaaggctctcgagagcttgaaagaatgggaaggggtgaaagtcatggacgtcgttcttcccttcttcgaatctctgaagctatcgagtacttcagttactgttgaagactgtgttaaggaactaaccagcattgtcaaggagaaactgggaccgcagaatgcaatcttcgctaaagctgctgatgcaatggaggaatggaccaaactctggaaatctcacggagctcaaagcgcttaggctgaaatttggttatctgttatgagcatatctgatttcgatacccactgttatgaaactgaataaaccgcattcctgtatgctgggaattttctcgttagtgtacgctccaatactcgtgccgttttcaaagacaagcagtgatatgcaaagcaatgctgtgtatcttgtgtgtt

SEQ ID NO: 2787 - DNA, 1875 bp, Oryza sativa
  ref <308>: DATABASE ACCESSION NUMBER: AK060584
  ref <309>: DATABASE ENTRY DATE: 2001-12-06
ctggatactccgttacactagtggtcttgaggatggaagtcttgtgatctgtgagagatcattgactcaatccactggtggcccatcaggacctaacactccaaactttgtcagagccgaggtgcttcctagcggctatttgatccgcccatgtgaggggggtggttccatgattcacattgtggatcatgttgatttggatgcttggagtgtgcctgaggtccttagaccactttatgaatctcctaagatccttgcgcagaagatgacaattgctgcactgcgtcacattaggcaaattgcacatgaatcaagtggggaaatgccctatggagggggccgtcagccagcagttctgagaacatttagtcagaggctaagcagaggcttcaatgatgctgtcaatggattcccggatgatggctggtcactgatgagcagcgatggtgctgaggatgtgacaattgcttttaactcatctccaaacaagcttgttggatctcatgtcaactcctcccagctgttttctgcaattggaggcggcatcttgtgtgcaaaggcatctatgctgttacagaatgtaccacctgctctcctagtgcgatttttgagggagcaccgctctgaatgggctgatcctggtgttgatgcttattctgctgctgcgttgagggctagtccatatgcagttcctggtctgcgagctggtggttttatgggcagtcaggttatattgccacttgcgcacaccttagagcatgaagagttcctggaggtcattaggcttgagggacacagcctctgccatgatgaggtcgttctatcaagagatatgtaccttctgcagctgtgcagcggtgtagatgaaaatgctgcgggtgcatgtgcccagcttgtctttgcacccattgacgaatcttttgctgatgatgcaccactgctaccctcaggcttccgtgtgataccactggatggcaagacggatgcaccatctgcgacacgcacacttgacctggcatctactcttgaggttggatcgggtgggactacacgggcttctagtgacacctcgagtacctgcaacacaagatcggtcctgaccatagctttccaattctcatatgaaaaccaccttcgtgaaagcgtagcggcaatggccaggcagtatgtccggaccgtggtggcatcagtgcagagagtggccatggcaatagctccttcacgtcttggtggacagattgaaacaaagaaccctccaggatctcctgaggcccatacgcttgcaaggtggattgggaggagctaccgattccacactggagcggatctccttcgcacagactcacaaagcacggattcttccttgaaagcaatgtggcaacactctgattcaatcatgtgctgctccctgaaggctgctcctgtgttcaccttcgccaaccaagccggcctcgacatgctggagacgacgctgattgctctccaggacatctcgctcgagaagatccttgatgatgatggccggaaggcactatgtacagagttccccaagatcatgcagcagggtttcgcctacctcccgggcggcgtgtgcgtgtcgagcatggggcggccggtgtcgtacgagcaggcggtggcgtggaaggtcctgagcgacgacgacacgccgcactgcctcgccttcatgttcgtcaactggtcattcgtctgagaaccaccctagtagaatcgatcccccctcttgtttgtctgtcctaaagaccttatgtagtattgcttttgtgtatcatcaccatgaacatgtcaagaacctccccagtttctatcatcatgaacttccgtttgaatctagtactgctaaatgatctatatggt

SEQ ID NO: 2788 - DNA, 1718 bp, Oryza sativa
  ref <308>: DATABASE ACCESSION NUMBER: AK060585
  ref <309>: DATABASE ENTRY DATE: 2001-12-06
agaaacccgagcattccaccgtgcgcgaaagcgccccgtcaccatgcgcctccaactctgcttcctctgcttcggcttgcttctcgtctcctcctcgctgcaatgccacgggctgcttctgccgctcaccaacaccctctcctcgctccgcccagccaatgacaccgccaccatccaccgcctcctccgctcctcctccctccgttccgccgcgcgccaccgcggccgccgccacggcacgcgccgcgcgcctcctcctccacggcaccgccagctctcgctgccgctcgcgccggggagcgactacacgctgtcgctctcggtcggcccgccttccacggccagctccgtgtcgctcttcctcgacaccggcagcgacctcgtctggttcccctgcgcgccgttcacctgcatgctctgcgaaggcaaggcgacgcctggtggcaaccactccagcccgctccccccaccgatcgactcccgccgcatctcctgcgcgtcgccgctctgctccgcggcgcactcctccgcgcccacctccgacctgtgcgccgcggcgcggtgcccgctcgacgcgatcgagaccgactcgtgcgcgtcccacgcgtgcccgccgctgtactacgcgtacggggacggcagcctcgtcgcgaacctgaggcgcggacgcgtcgggctggccgcgtccatggccgtggagaacttcaccttcgcctgcgcgcacacggcgctcgccgagcccgtcggggtggccgggttcgggcgcggcccgctctcgctcccggcccagctcgccccgtcgctctccggcaggttttcctactgcctcgtcgcccactcattccgcgccgaccggctcatccggtcaagcccgctgatcctcggccgcagcacggacgccgccgcgatcggcgcctccgagacggacttcgtgtacacgccgctgctgcacaacccgaagcacccctacttctactcggtggcgctcgaagccgtctcggtgggcgggaagaggatacaggcccagcccgagctcggggacgtggaccgcgacggcaacggcgggatggtggtggactcgggcacgacgttcaccatgctgccgagcgacacgttcgcgcgggtggccgacgagttcgcgcgcgcgatggccgcggcgcggttcacgcgcgccgagggcgcggaggcccagacagggctcgccccctgctaccactactccccgtcggaccgcgccgtgccgccggtggcgctccacttccgtggcaacgcgacggtggcgctgccgcggaggaactacttcatggggttcaagagcgaggaggggcggagcgtcgggtgcctgatgctgatgaacgtcggcgggaacaacgacgacggcgaagacggtggtggtccggcagggacgcttggcaacttccagcagcaggggttcgaggtggtgtacgacgtggacgccggtcgcgtcggcttcgcccgccgccggtgtacggacctgtgggacacgctctcgcgccggtgagctgctggtgcggacttacgatgatcgagtatgatttgtcctaagctctcaggtgtacagagtacagactagtggtagctgccatgcatgtatctgtaggattgttcttcttgcgacgttactgttttgtttctcgtgtttctgcttgtaaatctgtcttgctctgcccgtatggaacctgattaacgattaaccg

SEQ ID NO: 2789 - DNA, 267 bp, Oryza sativa
  ref <308>: DATABASE ACCESSION NUMBER: AK060586
  ref <309>: DATABASE ENTRY DATE: 2001-12-06
tagatgttgatgtcagctgtgctgcgcacctgacagcatagattgataatgtgctctggagaacgcgtagttgattggatctcctcgaggaagtacaggatggctatataccccgctaatctgtaattcaattctattttttgcccccttattttcttcttccagctggatgtatgtttgatggtcatgatgatacggccctgttgttgttaaagatgtgttttgtggggggctttttagctgtagcacttcccctcctgttgtacg

SEQ ID NO: 2790 - DNA, 1948 bp, Oryza sativa
  ref <308>: DATABASE ACCESSION NUMBER: AK060587
  ref <309>: DATABASE ENTRY DATE: 2001-12-06
gacgacgaaaaggccacagctttcaatataaacaaacaccaaacgaatcccttcttagcggtagtgcatccccatccatccattctcgcacaagattccatcttttcatccaccaatctcgcgaaatctccgtctaattcaagaacagatgagctgaggaatgagaggaaatattggtgttgcgaattgtggattgggaatttggagtttggattaggaggaggaggaggaggagaagattaggcgatgtctttcaggagcgtgatccaggaggtgaagggcgagatcggcgccatctcgcggcgggggttcaggtcgcggccggggcgagtccggcgagtggcggcggcggcggaggagccgccggacgagtcgtcggcggcggcgctggtgatgcgggagagctgctggacgcagctgccgccggagctcctgcgggaggtgctggcgagggtggaggagtcggaggggtggtggccgcgccgccgcgacgtggtggcgtgcgccggcgtctgccggagctggagggggatcgtcagggagatcgtgcgcaccccggaggcgtccgggaacctcaccttcccaatctctctcaagcagcctggcccgagggatgctcctatgaaatgtttcattgtaaggaaccggaccactcagacatattacctgtacattggactgactgatgcattaactgatgatgggaagttcctacttgctgcacgcaaatgtcgtaggaccacatgcactgagtacctgatttcgcttgatatgaacgatatatcaaagaggactgatagttatgttggcaaactaagatctaacttcttgggaaccaaatttactatctatgatgcccatccaccttatgctggagatgtgatttcaaagggtcagtctgcacgtgtgattggttcaaaccatttatcccccaggatacctgctgggaattatccagtctcacatatttcatatgaattgaacgttttgggttctaggggcccgagaaggatgcactgcgctatggattctatccctgtatcagcaattgaacaaggaggaacagctccgacgcagactgaatttcctttgagttaccatgaatctttcacatcaattccctttttcaaatcaaaatcagttcgagcgaataattcaactgcttcattactcactcaaaatggaagcaaactggtgttgaagaacaagtccccgaggtggcacgaacatctgcagtgctggtgccttaacttccatggacgggtaacggttgcatcggtaaagaacttccagctggtggcttcagatgagagtaacccaaccaaccaggaacacgatgatgtgatcctccagtttggtaaagttgggaaggacatgttcaccatggattaccgctatcctatctcggcatttcaggcgtttgcgatatgtctgagcagctttgacaccaaaatagcgtgcgaatgagtgaaggtgtgattctttcttccatgatcgaatgaaccgtttcctgatgacccacattgcaagctggccatgcactctgcttagttgcttccaccttttggaagcatgcagaatagagacataaataaaagttgctttaaatctaacattttagttgggtagggatatgtaacctgcaatttagctttcttgaagtatgttcaacctgcaacatttgagtgacttgtaagtcttgagtttaactacaggtgttggataaccacaattgacagctcaggattatgtgtatacttgtccctttggaaatccatagatgtatctgtttgcatagatatgcttatgttacattcttctattaccagaatgaagcagagctattggatcttgtttcaaaaaaaacatgaaatgtacatgagacccttttttttcacatcgaataatgttctggctcaattgttcatggaaaaaaatgttaccatgt

SEQ ID NO: 2791 - DNA, 1545 bp, Oryza sativa
  ref <308>: DATABASE ACCESSION NUMBER: AK060588
  ref <309>: DATABASE ENTRY DATE: 2001-12-06
atcaacaatcacttagcaaggcgatggagtcggtcttcagactcgattccgcgcattgtgtcagaaggtgcattttcatcttcagatactcaagacattgactatcaagatcaaacaatggatgaactgtcagtacctcactcgtttccaccaagcagccaaatttctgacatcacagaggaacacgaagcacagagagtagctcatcgagctgaatctgagccccctgaggagcactgcaaggaagtgcagtgcatcgagacaaacaagctcaggagcaggagaagccaagaattcttccaaacacctgaaaagaagacacacactgatgatcaaaagcatagcgaaagcatgtcaaattcagcagaaaatgccatcaagctatgcgtgtgattttgagccgtcatttgatctcgagaagcctgaaactgaagaatctcttgccctgaagaggtgtgtggttagctccagggacagtgcgcttactaggagtagaagctgcagagctagcttcatggtcattccgaacagctggttcgatgactcggcgagcacgacgccgtcgtccgaaaccttcagatattctaccagaaggccagagaaggtgaggaaaagcctgagtcctgatgagatcgcagacaagagcacgggcaacgctgaagaagacaagagcacctgcaatgctgaagaagagactgctgtgaatgacatcggctgcgtcacagaagtgaagcagaagacagaaatgaaccatgcaccccaatcttcagagcaacaccagccgaaaattgctaaagaagttgccacggtctccctttcgaaatggcacatcgatttcgagagaaagcagcaggagatcatcgagctgtggcatgactgcaacgtctcgatcgtacaccggacctacttcttcctcctcttcaagggcgatcagacggacagcatctacatggaggtagagcacaggcgactctccttcatcaagaactccctcatcgcagacggcgagctccacgctaccaccgcatcaagcttgaggaatcttcggcatgagagggacatgctgtacaggcagatggtgaggaagctgcacctggccgagaaggagaggctgtacggcaagtgggggatcgacatgagcaccaagcagaggaggctgcagctgtcgcggcggatctggacgcagaccgggatggatcacgtcagggagagcgccgccctcgtcgcgaagctggtcgagcacctggagaaggggcaggccatcagggagatgttcgggctgagcttcagtttcaagccacgcagatctttcagctgggtcggcgtctactcccgagactgaattcttgcccggccatggcgatgagctgatgatgatgtctcagtggtagatggatgcgtagtggaggagacgatgctgcatgtcaggaaggagaggagagagattttgccgccggaattgaactgatggattgccccgttctatctatgcatgtgaattgtgattcagattttttgcttctggcgtgagttcctgagttgtgg

SEQ ID NO: 2792 - DNA, 1389 bp, Oryza sativa
  ref <308>: DATABASE ACCESSION NUMBER: AK104317
  ref <309>: DATABASE ENTRY DATE: 2002-08-28
gctcgtcgcctcctcccttctcggtctgacggtctgaccagtgccgggtaggaagcgtaattttgaggagagactccgacccgcgccgccgccgccgcagccaagccatggagggatccgccggggcgccgctccgcacgcgcgtgtgcatcatcgggagcgggccgtcggcgcacacggcggcgatctacgccgcccgcgcggagctcaagcccgtgctcttcgagggctggctcgccaacgacatcgcggcggggggccagctcaccaccaccaccgacgtcgagaacttcccggggttccccgaggggatcctcggcggcgagctcatggatcggtgccgcgcccagtccctccggttcggcaccagcatcatctccgagaccgtcaccgcggtcgacttctccgcctgccccttccgcgtcgcctccgactccaccaccgtgctcgccgacgccgtcgtcgtcgccaccggcgccgtcgcccggcgactccacttcgccggctccgacgcctactggaaccgcggcatctccgcctgcgccgtctgcgacggggccgccccaatcttcaggaacaaacccatcgccgtcatcggcggcggcgactccgccatggaggagtccaacttcctcaccaagtacggctcccatgtgtacatcatccaccgccgcaacaccttccgcgcctccaagatcatgcaggccagggcgttgccaaaccccaagatccaggttttctgggactctgaggtcgtcgaggcctacggcggcgagggtggaggtccattggctggtgtcaaggtgaagaacttggttactgggaagatctccgaccttcaggtgtccggtctcttcttcgccatcggacatgaaccggcgacgaagtttctcggcgggcagcttgagctcgatgctgatgggtatgtggccaccaagccaggctccacgcacaccagtgtgaagggggtctttgctgctggggatgtgcaggacaagaagtatcgccaggctattactgccgctggatcagggtgcatggctgctttggacgcggagcactatctgcaggaggtcggtgcacaggagggcaaggccgattgactatctcaggaggaagcgaccaccagcgtttcaagaagtccaacgttgtcgctgctgaaagctacactctgaacgtttatgccatgggctgttctgacttctgaatgcttctaccggattttcctgccccttattagcgtcgtattatttgatgtgctggagatttatctgtatttacgctgaagacgacgtattgcttgcgggtatccgcattttctgcatttgcttatgattgagttattgtgacatttggcgtttttagtaccaaactagcgaggaattgtgt

SEQ ID NO: 2793 - DNA, 1782 bp, Oryza sativa
  ref <308>: DATABASE ACCESSION NUMBER: AK060589
  ref <309>: DATABASE ENTRY DATE: 2001-12-06
agaatgggaccgaatgatattgagatccttggcgcaatacccagcttgtgttttctcaaacttaaaactatgtgtggcatcaatggaaggatcatcatatgtagcaacaaaggattcagaagtctgacatatttctcattacgaatcaagagatgtgggaccttgctagagtttgaaccagaatcaatgccaaagcttgataacttccaagtggaattccgtttacatggaatggattgcctgaatggtgcttctgatttcggcatccagcacctctccgcccttaccaaagtcaagatcggtatttggggcaacatttgctctgatggtatttatgatccagaacaagatatgaacaatagcatcaccaggtctgttgttagcctaatcaaagctgccatcgagaagcttcccaatcatccaactagcagattccatttagagtatgatcatggaagttgtttattgggtgagacaagtcaagagtttgagggtcagggtccagatgaggcctatcctcgccagcataaaattttttcactacgggaactagaagatgcaacaaattgctttagcgatagcaatgttcttcaacgtggtcgattcgacggcagcatgtacaaaggaagactaggagatggctcattagtagctgttaaaaaggattatataagccgggctttaagcatgggttatccaaacattgattggagaacatggcactttcaaacacaagttgagatgcctgtgcatagaaacctgatgcgtcttcatggattctgcataacgccaacaaaaaggttccttgtctatccatacatgtctaatggaaccgttgcatcacgtcttagagttacgttgccttttttttttctagtctgacatccctgtatctttcagataattagagggtcgatttgggttttatattatagaacggccgccatatgaacctccacttgattggcgaacaaggaggaggattgcattgggttccgccaggggactgtcctattcacatgatcattgtgacccaaagattatccatcgtgatgtcaaagctgcaaatatttcattagatgaagactttgaagccttagtggggggttttggtttggccaaactaatggatcacatggataccgatgaaccaaatgcagtacgtggaacaattgggcatatcgcaccagaatatctttcaactggaattatctctgagaaaactgatgtatttggttatgggattatgcttttggagcttattacaggacaacgtgcctttgaccttgctcgtctagccaatgatgatgacgtcatgctactggactgggtaaaaggattactcaaggagaaacggctggagatgttggttgatccagatctacagagcaactacattgatgttgaggtagaatcactaatccaggttgctcttctttgcacacaaggctcccccacagaacgccctaagatggcggaggtggtgaggatgcttgaaggtgatggccttgccgagagatgggaggagtggcagaagatagaagtagtacggcaggaggtagagcttgttgggaatagtcacacattgtttatttagagagagttgaactaacttaaaagtggggggagtcactcacctcttgatgtagcttttggggtgtagcaaggctttctcccttttgggatgtagcaagactttcttccggttgagccaacgtctcctgattttgggccctcagagcttggccctcattgaaactcagagtggattgttgacttgac

SEQ ID NO: 2794 - DNA, 1392 bp, Oryza sativa
  ref <308>: DATABASE ACCESSION NUMBER: AK104318
  ref <309>: DATABASE ENTRY DATE: 2002-08-28
tgacgacgacgacgatgcaatccctcctctcctcctcggtgctcgccaacccatgcaccaccggctccccgctcttcccgccgaccgctgctaagctcgccgccgctgcctcggtcccggtggccgcggcggcgaggagtggcgccattgctgccgtgtcgaggagatcggccagtggcggccggtgcgtggtggcggctgcgtcgtcgtcgtccccggcggtgaccacggcggaggccggcgaggtgcccgcgacgatgaaggcgtgggcgtacgacgattacggggacggcagcgtgctcaagctcaacgacgccgcggcggtgccggacatcgccgacgaccaggtgctggtgcgcgtcgccgccgccgcgctcaaccccgtcgacgccaagcgccgcgccggcaagttcaaggccaccgactcccctctcccgacggtgccggggtacgacgtggccggcgtggtggtgaaggccgggaggaaggtgaaggggctgaaggaaggggacgaggtgtacggcaacatcagcgagaaggcgctggaggggcccaagcagtcggggtcgctggcggagtacaccgccgtggaggagaagctgctggcgctcaagcccaagagcctcggcttcgcgcaggccgccgggctgccgctcgccatcgagaccgcccacgagggcctcgagcgcgccggcttctccgccggcaagtccatcctcatcctcggcggcgccggcggcgtcggctccctcgccatccagctggccaagcacgtgtacggcgcgtccaaggtggcggcgacggcgagcacgcccaagctggagctcctcaagagcctcggcgccgacgtcgccatcgactacaccaaggagaacttcgaggacctgccggacaagtacgacgtcgtcctcgacgccgtcggccagggcgagaaggccgtcaaggtggtgaaggaagggggcagcgtggtggtgctcaccggcgccgtcgtgccgccggggttccggttcgtggtcacctccgacgggtcggtgttggagaagctcaacccatacctggagtccgggaaggtgaagccgctggtggaccccaaggggccattcgccttctcacaggttgtggaggccttctcctacctcgagacagggagagccaccgggaaagttgtcatctcacccattccatgagagcttgacatcaatggcagagcttatgatggtctctcgcacctgagattctgattctgaagtgtgtcagcatagaccaaaatgaagtttatctcatattacagttcatagagttacactgttacacaagttgtatgcactgtgatgaactgctgagcaatgtccacaacccctctctagcaatgtccagttgatttgaacaggc

SEQ ID NO: 2795 - DNA, 1077 bp, Oryza sativa
  ref <308>: DATABASE ACCESSION NUMBER: AK060590
  ref <309>: DATABASE ENTRY DATE: 2001-12-06
caggaaatcaggaaaggatacagcttgagactgctcggttatacaagcaagctggagtcaaccctctggcaggatgttttccaactttggcaacaatacctgtctggattggcctctaccaagccctttcaaatgtagcgaacgagggattactgacagaaggatttttctggattccatctttgggaggccctacaacaattgctgctcggcaaagtggtgctggcatttcttggctcttgccttttgtggatggccatcctccattaggctggcatgacacgatatgttatcttgtgttgcctgtgctacttgttgcttctcagtttgtctctatggaaatcatgaagccaccccagactgatgatccatcgcagaagaacacactgcttgttttgaaatttcttccatttatgatagaaaaaaaaagctcaaccagcccaacctggtgaaagatttaaacagctgaaagaagaggagagcaagagaaaaggcaacaaagcgcttgctgcaggagattcagatctttcagcctcaacatcagaggatgaagagtcggatgatgagactactgaagagggaggacctgaggaaagatacaattccagtagcaacaagaaacttccaaattactccggaaagaagggcaaaagatcaaagaggaagcgcatggttcagtaggtgtgacagaacctgattggatttcatttttgtcattactggttaattcagttggccagtacggttgtgtagttgatctcggacacaattttgatgatcagttgggaaggctaatcttcaggtgcaggacagacacgaaacattccagtggtacaggtgttttgctggcacacagcaagatgaaaatagttcagtacactacaataggtttgagaggataggcatggcttgagtatgtgctacaacataagagtagtacacaaattattcttgtgctactctgcaatgtgggtaccaaactcacgcaggaattgcataattcatgctctacatgcatttatttccctcttgtaacctaataacattctttgcggagtatattgcagaagttagaac

SEQ ID NO: 2796 - DNA, 145 bp, Oryza sativa
  ref <308>: DATABASE ACCESSION NUMBER: AK060591
  ref <309>: DATABASE ENTRY DATE: 2001-12-06
actgtttgtgtagtgctttagctgaaaccatctgaaggtggtcatgaagtcctttcaaatgatcggtgctcattttgtgaatttcatgattgcttcacaagcatgaacatacactttcccttcagtaataattcttttgagtgac

SEQ ID NO: 2797 - DNA, 223 bp, Oryza sativa
  ref <308>: DATABASE ACCESSION NUMBER: AK060592
  ref <309>: DATABASE ENTRY DATE: 2001-12-06
gaactacttgtgaatttgtgatgatcgtcttgcattttgttcatgtgccactgcttgaatctgtccagtattctgcacggattgtatgataatctcctggccaggggtggtggtacctcaacatgtaaagtaaataagaaatttgctgcagcagtgttataattgcaaatccccccagcggtacagccagactgacaaaagtataattggtttcctctccatc

SEQ ID NO: 2798 - DNA, 219 bp, Oryza sativa
  ref <308>: DATABASE ACCESSION NUMBER: AK060593
  ref <309>: DATABASE ENTRY DATE: 2001-12-06
tgattcgatccgatctatatctccagtgtactcgatgaagctagcttcaggcagctgcctttttttttcttttttcttttaaaataagagagagaggcaaggctaggcaggcagctgatagaattaccaaacctgatgtgtgcagtgtgctgcccaaataattgccatgtgcatggaaaatgattgtgttttctcatggatattgatttgattactggt

SEQ ID NO: 2799 - DNA, 1112 bp, Oryza sativa
  ref <308>: DATABASE ACCESSION NUMBER: AK060594
  ref <309>: DATABASE ENTRY DATE: 2001-12-06
gcgtgtatgatgaacactgtgacccaatggatcatagctccatgaacggtcaagaggaaactgatgagtacacttttgagtctgctgaaggtcttgatgtaaatgaaagaattgacaaaattgcagatttcttgtcatttggcatgggattctctgcaaaaacaaatgcctgggcaggacctgagcattggaaatatcgaaaagctaaagatttggaccctgtcccaactaaacctgatgattcagacgccccaaaaaagacaaagaagaaaagaggcaaggatgaacctgacattgatttcagcaaagcattggaacatgatatgccaaatatctttgcacctcctaagaattcaaaatcattgctgctgccggcaaatagggctaccagcaataacaaacttccagaggattgccattatagacctgaaagccttgttaaattattccttcttccggatgttttgtgtctggctcggagaaggaaaaaaccacttggtggttcaagggagaatactgatgacttcatcccatctgaaccttgggatggtgatgatttttgtaatgatcatgtcgatgaaggaaatggtgataccgatgtagaggatgcagtagatcttattaccaaaccaagacaggtcaacaagattgatatacaatatgacaaggtatcaaaacaagtcgatgttcatgccttgaaagaagtgctctggaatcacatcaatacatctgctgacactgatgacctgcaggaagacaaggacacagaatcacccctgtgcctatcgaaagtattgcaagatcttccaagctgcaaccctgatgctgcagcaacagaaatttcaccgcacctatatttcatttgcctcttgcatttggcaaatgagcacagcttgaccttacgtgatcgtccaacattggatgaaattgacatatacattcctgcttcatctctcgtgaagtaatcctgtagttcaatatgttgtgcatgtttgttttattttttgttggttagggacttctcgttctcggtgtattattagattgccttgtatgttgaagattatgtattatgtaatgagcagcagattattggattgcgctaagctaat

SEQ ID NO: 2800 - DNA, 1694 bp, Oryza sativa
  ref <308>: DATABASE ACCESSION NUMBER: AK060595
  ref <309>: DATABASE ENTRY DATE: 2001-12-06
gtggcacatcctcgtggacggggacgacgtgccgccgcccgctcgggacttccgcgacctccgcctgcccgagcccatgctgcgcaagctccgcgagaagggcatcgtccagcccactcccatccaggtgcagggattgcccgtggtgctctccgggcgcgacatgattggcattgccttcacagggtccgggaagacgttggtgtttgtgctgccgctcatcatggtggcattacaggaggagatgatgatgccaatcgtgccgggtgaagggccatttgggatgatcatctgtccatcgcgagagctggccaagcaaacgtacgatgtcattgagcagttccttgttccacttaaggaggctgggtacccggagatacgcccgttgctttgcattgggggtgtcgatatgagggcgcagctggatgtggtcaagaagggagtacatattgtggtggctacacctggccgactcaaggatttacttgccaagaaaaagatgaacctcgacaattgcaggtacttgaccttggatgaagctgataggcttgtcgatcttgggtttgaggatgatatccgtgaggtttttgaccatttcaaggcacaaaggcagacacttctattttctgccactatgccgaagaagattcaaaactttgcgaagagtgcccttgtgaaacctgttattgtgaatgttggtagagctggtgcggcaaatctggatgtcatccaagaagttgagtatgtcaaggaggatgccagaattatatatctcctggaatgcctccagaagactccacctccagttcttgtcttttgtgaaaacaaagctgatgtcgactatatccatgagtatcttcttctgaagggtgtagaggctgttgcaatccatggaggaaaggatcaagaggaaagagagaatgcaatcgagttcttcaagaatggaaagaaggatgttttggtggctactgatgttgcctcgaaaggtcttgatttccctgatatccagcatgtgattaactatgatatgcctgctgaaatagaaaactatgttcaccggattggtcgaactggtcgatgtgggaaaactggaatagcaacaaccttcataaacaagaatcaaacggagactacccttcttgaccttaagcacttgcttaaggaagctaagcaaagaataccgccagtgttggctgagctcaatgacccattggaagatgaggaaaccatggccaaggagagcggtgttaagggatgtgcatactgtggtggtcttggccatcgtgttaccgactgtccaaagctggagcaccagaagtccatggcgatcgcgggctctagaagagattactatggcggtggaggctacagaggagaaatatgattgttctaggagaaattcgtatgttgctattgttttatggcacctaagatacaacattataagcacaagctgaagctcctccgtagccatcttgaagaaagatctcctgatactacctcattgcatggttgttagtgctgctgcttcgtatgcaatatattgttgttagatagcattaaccaccacacggagaggggcttgacatctctcaagggtgttgacatgttatgttgtaaaatgtaacctggaggcaatattgaacgagtagcatctctatcaaaattttgagagggggagtattttaagcagt

SEQ ID NO: 2801 - DNA, 1127 bp, Oryza sativa
  ref <308>: DATABASE ACCESSION NUMBER: AK060596
  ref <309>: DATABASE ENTRY DATE: 2001-12-06
gcgtctcgccgagggaggggaagagggaacggagtctatcgtgcggtgcggttctccgctcgccacgacgacgacgagccccatgcctcctccgccccatcgcggcggcggcggcggccgcgacacgagcgcgttcttcgcggcgacgctggtgctgtgggcggtgtcggtggggttcgagatcggcgcgcgcgggcggcgggagctggcgcccgtggccgcagggtttgccttcttccaggccgccagcgccgccgtgcgcgccgccgtctcccgcgacccgctcttcgtcaacaccgccgtttcgctcctgcactcctcgctcacgtcggcctccgttatctttgttcttgtcaaccgatggcataataaggacctcaagaacatgtttgagcatgaagaattgtttggtggcagttgggttggagcatattctgctctgtgcttttcttgtggctattttgcttatgatcaattagatatgcttcgttaccgactgtacagtggacggattcctggaattctcatgcaccacctgattctgctcatttgctttacactagctctgtatcggaatgtgacgatcaactacctaattctaactcttgtatgcgagctgcactccgtatttttgcacataaggaaattgaggcgaatggctggatttcgggattacaacagaaaaattgtgaaactggaatgggtcctcaactggactacatttgtatcagcaagggtggcatgccacatactgattacatacaaactgatcattgatgcccacaagtttgatagtggaattgagcttccactagctctttttggcatggcaggaatgaatctgctcaacatatttttaggacttgatctattaaaagcttacacgctcgagagaaatcagcagacacatcaggactgagtgtgcctctactgatgtggtactccaaaagttttggcaagttgtagtcaaacaacaattaatatagatcagcagacagaggtatgtcaatgtgttattggcctctacgttcggtagaaactagtaatgatgtactatattatgtgttctgaactcattataagatctctaccagcaaatgattctttgctattgtgctactatttgt

SEQ ID NO: 2802 - DNA, 1356 bp, Oryza sativa
  ref <308>: DATABASE ACCESSION NUMBER: AK060597
  ref <309>: DATABASE ENTRY DATE: 2001-12-06
aaaaaaaaaaaagccgccgcccgtggccgtggcgatgggctccccggcgccgcacgcgcagggcggcggcggcgggcaggaggagaacaagaccatctgggtcggcgacctccactactggatggacgagaactacctccacagctgcttcggctacaccggcgaggttgtagcaataaaggttattcgtaataagcaaactggacaatcggagggttatggatttgtagagttctacagtcatgctgctgctgagaaagtacttgaaggatttgctggtcatataatgccaaacactgaccaaccttttaggataaattgggcatcatttagcatgggggacagacgttcagatattgcttcagatcattccatatttgtaggcgaccttgcttctgatgtcaatgataccacattactagagactttctccaaaaggtactcctctgtcaaaggtgcgaaagttgttattgatgctaatactggtagatcaaagggctatggttttgtgagatttggagatgataacgagaagacacatgccatgactgagatgaatggtgtgtattgctctaccaggccaatgagaattggccctgcaactcccagaaaaacctcaggtacttctggacctactggttcagctgctcgatcagatggagatttgacaaacacaactgtatttgtcggtgggcttgatccaaatgttagtgaagatgaccttaggcaaacattttcgcaatacggtgaaatttcatcggtaaagatcccagttgggaaacagtgcggctttgtgcagtttgttcagaggaagaatgcggaagatgcattgcaaggactgaacggaagcaccattgggaaacagaccgtgcgtctttcgtggggacgcaatccagcaaacaagcagttgaggagtgacaatggcagtcagtggaacaacgggatgtactacgcagcctcgccgttttacagtggatacggctaccctgcaccgttccctgctgatccgggcatgtacgctgctgcttatggcgcctacccgttctacggaaaccaacaacaagtgagctaagaggtcacttgtgcttcacctcaaactggagctaggcacgcaagcattagcagtagctcttgctagaagaaaaaaagaacaaggtagacgacggtttcctaggtcagctagatgcagtcactggttatgtaaagtacattactacacgaactagctagcgccactaagccgccctattgactggccatggtctgctgaactcttcttccagaaaagaagttttgacctggagctgcaccttattgaagtagaacaataaactattcaaatacctactgtgcgct

SEQ ID NO: 2803 - DNA, 1765 bp, Oryza sativa
  ref <308>: DATABASE ACCESSION NUMBER: AK060598
  ref <309>: DATABASE ENTRY DATE: 2001-12-06
aagcattccgcccagcaaacgcaccaaaccgcccgtggtgttttacgtcgtagcgccgcgggcagcagcagcggcgtgcctgtgccatgtcgagcgaggtgacgtcggttccgccgacgccgacgccgccgccggtgtcgaccccgccgtcgcagatacagtcaccggcggcgccggcgagcagccgggcgtcgccgctgcgggggatggggacgccgaacatcgccagccccgtgaggaaggcggtggcgagcgtgagtggctacctgggtgaggtcggccaaatgacgcggctcgccgacccgcgcgacgcctggctgcccatcaccgagtcccgcagcggcaacgcctactacgccgcgttccacagcctcagctccggcatcggcttccaggcgctcgtgctccccgtcgccttctcccttctcggatggacatgggcgatcatctgcctgaccgtggcgttcgcgtggcagctctacacgctgtggctgctcgtcaagctccacgagcccgtcgctggtggcacccggtacagccgatacatgtacctcgccaccaccgtcttcggcgagaaatgggggaagatactggcgttgctcccggtcatgtacctgtcggcgggcacctgcacggcgctcgtcatcgtcggcggcggcagcatgaagctgctgttcaacatcgcgtgcggggaggtgtgcctggcccggccgctgacgaccgtggagtggtacctcgtgttcgtctgcgtcgccgcgctgctgtcccagctcccgaacctcaactccatcgccggcgtgtcgctcgtcggcgccaccgcggccgtcgcgtactgcaccatgatctgggtcgtgtccgtggccaaggggagggtggccggcgtgtcctacgacccggtcaggaccaccgacgaggaggacggcgcgattggtatcctgaatggcctcggcatcattgcgttcgcgtttagggggcacaatcttgtgctcgagattcaggccacaatgccatcaactctgaaacatccttctcacgtgccgatgtggaagggcgtcaaagctgcctacgtcatcatcgcactctgcttgtaccctgtggccgttggtggcttctgggcttacggcgatcagataccaccaaatgggatcctgagcgcgctgtacaagttccacagccaggacgtgtccagggtggtgctggggactgcgacgctgctggtgatcgtcaactgcctgaccacgtatcagatctacgcgatgccggtgttcgacaacatggagaccgggtacgtccacaagaagaaccggccgtgcccgtggtggatgcgcgccggcttccgcgccctcttcggcgccatcaacctcctcatcgccgtcgcgctgccgttcctgtcggaactcgccggcctcctcggggggatctcgctgccggtcacgctggcgtacccgtgcttcatgtgggtggcgatcatgaggccggccaagggcaccgccatgtggtacaccaactgggggctgggaagccttggcatgggtctgagcttcgtgctcatagttgggaatctctggggccttgtggagaaaggcctgcatgtgaagttcttcaagcctgcggatttccagtgagaaaactgcaaatgcagcaaaacctgtgaaaccgacggaaaacgcaatgtagtgtggtgattttgtcttttctcagcacaactgtaataggttgattttgtttagaagctatgctctaataacacttcaacattactacc

SEQ ID NO: 2804 - DNA, 1367 bp, Oryza sativa
  ref <308>: DATABASE ACCESSION NUMBER: AK060599
  ref <309>: DATABASE ENTRY DATE: 2001-12-06
aaatctcatcacggtgcacatatagcacagcaaaacgtgtgcgtgtgcgtgtgcatgtgcgagtgcatgacgtgctagctactagctaagtactagctagccagtcagctccgacgatgagcagctgcttcaacggcggcgccggctggccggagccggtggtgcgcgtgcaggccgtgtcggactcgtgcggcgcgacgatccccgagcggtacgtcaaggcgccgtccgagcggccgtcgtcgctggacggcggcggcggcctgaacaatatcccggtggtggacatgtcaatgccggacggggaggagaccgcccgcgccgtggcggcggcttgccgggagtggggtttcttccaggcggtgaaccacggcgtgcgccccgagctgctgcgccgggcgcgcgcggcgtggcgcgggttcttcgcgcggcccgcggaggcccgcgaggcgtacgccaactcgccggcgacgtacgaggggtacggcagccgcctcggcacggccaagggcgggcccctcgactggggcgactactacttcctccacctcctcccggcggcgctcaagagccacgacaagtggccgacgtcgtccgtccccgcgggcggcggcggcctgcgggaggcgacggaggagtacgcggaggaggtggtgcggctgtgcaggagggtgatgaggctactgtcgagggggctcgggctggacgacgggaggctgcaggcggcgttcggcggggtcggcggcgagggcgcgtgcttgagggtcaacttctacccgcgctgcccgcagccggagctgacgctcggcgtcgcgtcccactccgaccccggcggcatgaccatgctgctcgtcgacgaccacgtcaggggcctccaggtgaagaacgccggccactggatcaccgtcgaccctgttcccgacgccttcatcgtcaacatcggcgaccagatacaggtgctgagcaacgcggtgtacaagagcgtggagcaccgggtgacggtgagcgcggcggaggagcggctgtcgctggccttcttctacaacccgcggagcgacctgccgctggcgcccatgccggagctggtggcgccgccggcccgcccggcgctctacccgccgatgaccttcgacgagtaccgcgagcacatccggcggtgcggcctcagcggcaaggcgcagctccagtctcagcagatggcaaccgccatctgcggcgcccctcccgccgctactgcgttttcttcttcttcctcctcagcgagcagtctagctcgctagctagctattccctttgtgccaaaaaaatagcctatataagaatggaatataacttaggacaatgaatatgaacatatttatttcgag

SEQ ID NO: 2805 - DNA, 1556 bp, Oryza sativa
  ref <308>: DATABASE ACCESSION NUMBER: AK060600
  ref <309>: DATABASE ENTRY DATE: 2001-12-06
tggtgctgatgacaatactgaacagtcactcagggaagaccgtggtgcttaccgtcgtactaacggggagcagcacattgggatgcttaggcaaactcatgatagttatggatttgaaaggtcacacagaggttcagctgagaaattgttgtcagagagtaggttttctcagagagaacctatgcctttgactgcagacagttcagatttgcggcaaaggctattgaagcaaagaaggctcaataatcccagatcagggcaggtctctgatagacataatgtctatcctgaggatgaacgccatgaccgtcatcgtcagcgtggtgaagagcaagcttccaatgacggcgtctcaagctctcgattgcgtggtagaataagacttccagcggaaacaacgtttgacagacttggcttacagcctgagaaagagagagacagagggcctcgagctagattgtcaccaccaagtcaaacagaccttagagggaagcttcatgacaggctaaaggctaaaccaaatgaggatgtatctggtaatgtacaaagttctttgtcaaaagcaaatgaagatgctgaatcgttgaactttgctgggccaaagagccttgcagagctgaaagcaaaaaaggttgcaggcagtttaatgaagagtagtcgttctttaacagggccagttcgaatgacatccgaaatagttaccatcaaagactcttcggaccctgttctgtttgatggcccaaaaccattaaatgccatcctgaagagaaaaagagaggcagattctggaaatgctaccgattttggcagcaaacgggaagaacattctgggggagatgaagaaggatctcagaatgatttccgaaacatcgaggatgacatagttggaatgaacaccgaggggaatggagaagaagccttccaacctgaagacgatgtggtgtatggcgacagcctgtctcctgcggatgacattgctgctgaagctgcagacgatgcgagcagggagctggaggagcagcaagatgtagagacagcagaagagtacgactacgagatggatgacgttaatgcggcggaggaaaatgactaccaggagtatgaagacgaagacgatgatttggaggacgacgacgatttcgcgcgcaaagtgggtgtgatgatcacttgaagctgcgttgcagtaggcgtgccactatatatggtatgaccgaagaattggaagatgtgttagtatccctcccaacaagatgttggtctgtttttcttgtggtgctagatacttttacttcactgcgccagagaattcagctaataaagttgggaggaagataaaattggctcatcggagagcttgtgtttcagccaagaggcggctgcttgtactctaatgtgtgggtgtgctctcctctgcctgcttgtgttgttgtatcattagttaaatcaaaatgacctaacaggttacacaatgtactacttctatttatattcatcagtgtataagatgataaaaggccttgaagccttttctttctggtagagaatacattgctctt

SEQ ID NO: 2806 - DNA, 2040 bp, Oryza sativa
  ref <308>: DATABASE ACCESSION NUMBER: AK060601
  ref <309>: DATABASE ENTRY DATE: 2001-12-06
atgtttaatctcagaccccaaatgaagttgaaccaacctggagtttcatatcctatgcatgagtcagttgacaggttctcgacccacatgcgcccatttgggtggcccaatcctctagatgaatcatgcccccctcacctgcaagtttggaatggaggcagtggcgtattcgccagcgtaccctatatgtatggcaggcaagagtgggatcagaacaggcaacatagtgtcagcagagggtgggagacaactggcgatgcattgaaaggacaaaatgaattgcatgagcgtgaaccttctgttactaaaaaggagcctgattgttcagcaacacctgttcccgagacttctactgggcaatacaatcttaattctcgtattgaacagaaggagatggatcagacattagagaaaaatggaacgaaggatgatctgaaaagctcttttagaaatactggaggttctggtggggcaccactcatgacttctatgccatcaaacagtggtactgcaattttttctaaaagttatctgtccaaaattagtgtgtcacgggatcttgttgagtcggagctgtacaaaaggtgcatatccttgctggcagactttggtattgcaaatactcctgaggttgttgggactggacttgtgcagaacaatggaagctttgggaagataaatagaaaacttggaacccccaatctgttgggttcacataaccttaaaaacaagagtgatatctttcagagagctttggcccttcacaagaatcagacagcaaagattgtttctcctacccactcgattctcgagactgacaggaagacatacttaccagaagataatcatgatgacacagaaatgactgaccatactgtgtcgaaggaattgcttgtcgataactctgaaccacatcatggtgctgataccatggagaaagagttaccattgagacaggagctagctggtggcattggcgtgacatctccagcaagtatagaacctggtaatgtgggggcacctccagtaattattgaacctgatgtaggcatggaggatgtggcacctccaaaaatcgtagaacctgatgaaggcatggaggatgcggcacctccaaaaattgtagaacctgatgaaggcatggaggatgcggcacctccaaaaattgtagaacccgatcaaggcatggaggaggtggcatctccaacaatcaaagaacctgatgaagacattgaggtgatgcctttaggaactgcagaacctggcaaaggcatggaggaggtggcacctggaggaatttcagaacctgagaaagggcctgctgccggccttggggatggtgtgccagaagttactgttgaactagctgatagcgcgcaggagaaacctccagccatgggagaattgggtgatggcatggaggttatgccaccaccagtcacagaaactagcctaggcaaggaggattctcctgctgttcctagttctcctgaagttcaagagatcgtctccggcatgcatgcaggcattgagaaaggtatggaaggagagactgataatttaattgatgataaccctggggatggtgaggtgaacgcatctagccttgagctggatgttgcaagtggcgctgatgattgtgaagccttggtggagagtagggtaaatttaagtcggatacctaattccccagaaagtacacattgaaactcctttcatttcatttttaattcctttcacattttcttttgtccgagggtgttgcgccttctgcctagagttattttgagttgcaccgttctttttgcctcccgttgttgctctagagtgtttgccgtgagcttccatgctgtccggaacttgacgtgcacatggagtgtagaatgcaggagctgcagatggggggtatctgtgtcatcagcaggcactattgccatgccctttcagcagtactcccatgtttttctgctcgcacgtgctacgttgctagtatccgtaggcatgagcttcataatatattagagagaaattttgaaatgc

SEQ ID NO: 2807 - DNA, 943 bp, Oryza sativa
  ref <308>: DATABASE ACCESSION NUMBER: AK060602
  ref <309>: DATABASE ENTRY DATE: 2001-12-06
atcgctgatgcagataagccgcgatcgcatccaccgttctagagacgcagcgacattgcactcaccatctcagaaattgcatccaacagcagctgccatagttgcaagtgagctagagctcagagaagaggaggaagaagaaggcgtcaatggcgaccaccatagctgcgatggccatgcttaagccgtccaagatcgtggcgcggtcatcgccggcgccgtcggggagcggcagggtgcctagcatctcgctcaagagcctggccaagaagggcatgtcggtgtcgtcgtcgtcggcggcggcggcgcccgtggcggcggcggcgatggcgggcgcgttcttctcggcgctggcgtcgacggacgcggcgctcgcggcgcagcagatcgcggacgtcgccgcggcggcggcgggtgccgacgacaaccgcgggctggcgttgctgctgccgatcgcgccggccatcgcgtgggtgctctacaacatcctccagccggcgctgaaccagctgaaccgcatgcggtcggagcaggtgctcgtcgccgggctcggcctgggcgcggcggcgggtgccgggctcgcgttcccgcccgaggcgtcggcggcgcaggaggtggcgaggctggcggcggaggcggcggcggcggaaggcggcgacaaccgcggcctgctgctgctgttcgtggtggcgccggcgatcgcctgggttctctacaacatcctgcagccggcgttgaaccagctaaaccgcatgcggtcagactgagagcttgagcttgaagattgcatccgtacatgtgtgtacgtggtgtgttttgagggtggtggagtggagtggagtggtagtgacgtggaatgtggtgtacttatgccttaattaatcctgttcctaatcctctcttcccttgaacaaaaattcagtacagctcttcttcttatttg

SEQ ID NO: 2808 - DNA, 1520 bp, Oryza sativa
  ref <308>: DATABASE ACCESSION NUMBER: AK060603
  ref <309>: DATABASE ENTRY DATE: 2001-12-06
aaccagaattctccagagcttcgctcagctcctctccccttctccctctccctctccaggcgctgctgctccgcgaaccctagccatggcgcgagtccaccacaagaacggtcgcggcggcggcggtggcggcggcggtggcaagggcaagggcaaaggcaagtggaagatgccggcgtcggtggcgcggaagcagcaggcagcgatggcgaacgtggaccaggtcactggcgacaagatccccaagagcttcgtcttctcccgcggcaagctgccctccacgctccgccatctccagcaggatctccgcaaggtcatgctcccctacaccgccctgaatctcaaggagaagaaacggaacaacctcaaggatttcgtcaacgtctccggcccgttgggcgtgacgcatttcttcatcctcacgaaccccaagagctcgccgcacttgcgcatggcgaagacgccgcagggtcctacctacacatttcagataaaggagtatgctctcgccgccgacattgcgaactcacagaagcgaccgaggtgtcccccagagatattcaagaattcacctctgactgtactcagtggctttggcggtcttggcgagcctttcaagagtttggtcgaatattttcggcatatgacccctgctattgatccagtcactgttaagctgtcaacctgtcaaaggattctgttgatacatttcgacagagaaaaggaaatgatcaatttcaggcattactccatcaagctccagcctgttggggtcacccgcaagattagaaagctcatgcagaacaaccaagtgccagacctaagggacctgaacgacgttagcgattatgtgacaaaagctggatacggatcagaaagtgaagtggatgatgaagcagcaactgtaagtctagccagtgatgttgacaaattaaaccgagcatccagaaaaagcgccatcagactccaggagatcggaccaaggatgaaactgcacttggttaaagttgaagccgggctatgttcaggagatgtgctataccctcaacctgtaggcaaagaagggttggggaagaagggaaaagaagtcgaggaagagacagaaggacaagaagatgaggacttaatggagtcggatgatgaccccgaggatgaatcagaggagtaatctggaaggaattaaggaagcaatgaagcactaggcgaccaacctacggggatctccaacaatgtgaagcctccactgtcttgcaacactattaagcgcttggtttatccttgtggcaacacagctgaaggagaggatgcaaaagataaccctgtgtatgttttcttcgggtaaaacaataggcctttagagatgtaacatgctttcgttcatcccaattttgtgatatggtctgcagattaagcatagcgtacagatcacaagagttactaactactgttgtgagaatgaacataatttggccgtgatgtgtttcagggtcccagtaagatgaccaaagttcttttttgcc

SEQ ID NO: 2809 - DNA, 987 bp, Oryza sativa
  ref <308>: DATABASE ACCESSION NUMBER: AK060604
  ref <309>: DATABASE ENTRY DATE: 2001-12-06
agaaacttgtcactcagccagcatgatgatgagattgaggttgatatagatagctttgatgttgagacattatgggagctcgataggtttgttacaaactacaaaaaaagtataagcaagaacaagcggaaggctgagaatcccgtggcagggcaggatgagatgaatcatgatatagagctagagaagacagagcatgcaaggttggatgaagtagagcaggatcagatgcctccagtacaagagacgttacataatcctgagccagaatcaattgatatcgaaccacctaaagaaaacacagcagatgataatgagaggtatgtaggctcatcatcacctgttcatttggaagatcagaagggggagaatgcgggtagatcaagtagttctggaagttctagtagcgattcaggctcttcgtctagtgcatatgcagatacagacacagatagttcatcagcagatggctctgatgctgcacagtcacccagaacgtagcatctataggccagatcttgatgtcaagctggaaagttcaccgacaattctggcatgatatcgtcagcgagattcaatgctgtcttgtaaattttggctatgtaggaagtctaaccaaaccaatgcttttgtgtccatctcgctgtctgttttagtgggtgccataaaatgcacatgcatttcatgcgtctgtaccattgtttgcagttatgtacttattgtagagtgctgcgtttaccctaatcattgagctggaaattatctaacattggatagaagaaacctgcacattgagggaagcaagacaaccggtgaagaccagaccaggaacctggaggccccaccctattgtaatattgtaaaattgctatagtagttgggtaatttcagctgtgttggattaccacggataaaatgatcttgctctgcttgttgtaagatttctgcacagtcacgtttgctctggaactttgtcttaatgatgat

SEQ ID NO: 2810 - DNA, 255 bp, Oryza sativa
  ref <308>: DATABASE ACCESSION NUMBER: AK060605
  ref <309>: DATABASE ENTRY DATE: 2001-12-06
cgcgacaagctcatcgccgactacaacaccatggacatctgggacttcaacgagaagtacggcgagctctgggacttcaccgtcgacagaagagatgagattgtgaaatcgtcttagatatggtattcagaaatggggggtcacatttgttagatgcagctgcagaaacagttcagaaaatcagaaccactccaaagaaaagcagggtggcaaagctgcaagatgagtctcttcaaaataaagaactttgagatg

SEQ ID NO: 2811 - DNA, 1752 bp, Oryza sativa
  ref <308>: DATABASE ACCESSION NUMBER: AK060606
  ref <309>: DATABASE ENTRY DATE: 2001-12-06
ctccgctcgcgccgccgccgacgaggtcgccggactccgccgccgccgccgcaccaccgcccgcgacatgctcctcccccctctggtggtcggctcgaccatggcgtcgctggcgtccctctcgctcccggtctccaccgcctcgcagggccgcgcgcgcggcgcgggacccgtcacggcggcgccgcggcggcggagggtgagcgtcgtgcgggcgaaggtgcgggagatcttcatgccggcgctgagctcgacgatgacggaggggaggatcgtctcctggacggcggcggagggggaccgcgtcgccaagggggaccccgtggtggtggtggagtccgacaaggcggacatggacgtggagaccttctacgacgggatcgtcgccgtcgtcctcgtcccggccggtgagtccgcccccgtcggcgcccccatcgccctcctggcggagtccgaggaggaggtcgccgtcgcgcaggcgcgtgcacaggctctcccgagaggcccgggccaagaaccccctcctccccacgttcccaaggctgcgccgccgccgccgccgccaccaccaccacatgcccctcctggaccgccgccgacgaagggcgtcgccacgccgcacgccaagaagctagcgaagcagcacagggtggacatctccatggtcgtcggcaccgggccacacggccgcgtcaccggagccgacgtcgaggcggccgctggcatcaagccaaagctaaagggcccaaagggcgctccacctccgcctccgcctccacctccatcgccacacagacaccccgctgctcaccctccgcctccgcctcaccaccccgctcctcgccctccgccgccgatggcggcggcaccccggcaaccagcagcgctgccaccggtgcctggcgcgacggtggtgccgttcacgacgatgcaagccgcggtgagcaggaacatgatggagagcctgtcagtgccaacattcagagtcggctacgccgtgtgcactgacaagctcgacgcactatgcgagaaggttaaatcgaaaggggtcacaaagacattgttgctggtgaaggccgcggccatggcgctcacgcagcacccggttgtgaatgccagctgcagggatgggaagagcttcagttacaacagtagtatcaacattgctgtggctgtcgcgatcgagggcggccttcttacgcctgtcttggaggatgttgataagttggatgtataccttcttgcacaaaagtggagaggcctgctcaagaaggcacgcatgaagcagctccaaccagacgaatacagttcagggacttttacgctgtctaatttgggtatgtttggtgtggatagattcgatgcaatccttccacctggtcagggggctattatggctgttggaggatcgagacctactttggtggccaacaaagatggtttctttagcatcaagaacgaaatgctggtcaatgttactgctgaccacaggattatatatggtgctgatttggcagcattcctgcagacatttgcgaagatcattgaggatcctgagagcctaacattgtagggaaaatgtccctcacaagtgctccctaggtatctgcagtttgtttgattcgaattggaagaataattccaccgagcatttgtagccattaattgtaaatagttttgttattgttttaatgttattgccatatgatcaatattttttcttatacccgccacggaataagtgaaatgctc

SEQ ID NO: 2812 - DNA, 3093 bp, Oryza sativa
  ref <308>: DATABASE ACCESSION NUMBER: AK060607
  ref <309>: DATABASE ENTRY DATE: 2001-12-06
atgcggtgcggggttagcggtggcgtcgccggagcgggcgagcggcggcgcgcgaaatggccgctccggcggcgagcggatcagcagaggaagctcggtgtggagagctctatcctgcctcccttccttaacagcagcgacaagattagagagaggcatgctgtattccattagtcctgcatcccccatgaagagcctgtacttttcaacctttgaaggtgtctcttctaccaccgttgaatgagcaggctcacctttcgcaaggaatgagatagttctgtcaagtctgagctgctgagcttggattgagcatgcaagcatagattttgcagaagacttgcagccacatatttgtatctgtcatcttggatcatggcagtgagctctctaatgaatgaatatcctggttctttcaacattgctgagcaattgttgatactttccatcgctagcatggctagtgcttgaccagccgttatttgtagcgaccggtcggaatttgtgtttgatggtggatgttgtgcaagaaatgcctggatcaacctgctaatgatcactcgggttgaacctatctcctgacttgtgtttccatcatcggcaaggtttctaaggatctctgctgccagcttcttatgttcttggctgccttcaatgtcacccaagatttctgccaggtttctcaacaggaagggatgatctgacatcttctgccgaagtgttataccaatttccccaccagtgtttgagagctttgtcagcaacttcagtgatgaacctttcagtatttttggctgcgtctcgttagtgtaccctataatcttctggatgaggtctcttgctctgctgatttccgcacagttgtcaggatcacattctgcaagtgtctctaggattgacattcccagtacaggaaggagatcatgctctatgaatgtcttctcctttggaatttttttgtgctttgaaatcaattgccagcaaccaagcatccaggagttcagtcggttgttgttatgaggatgatcttggtcaatatgctcttggccatcacctgtgtccacaatcgtaccttcttttccctcctggctgtaatatgtgtaaagtagcggatttcgtcgtctcaattggttttcggtgtccagaagtgaagatatgttctgcattgacccagggataccaataacttggaggctccttgaaagctcgacgatgacctttgtggcaagcaatctgacttgtgcatcctctggacttgtccagcccaacatggtgattagtgtgttcaatgtctctgtggaggtggtgagtctcaagagcagaagtgccttggtgcgctttcttttcagaaagctgtgcagcatttgaatcccatagagctggttgctgggtgagtttgagtttgtgaaatccatggcgaagctggtcagttccatgatccttggagcaagcgcacctccggaaacacattgctcgaatatgtacgaatagtacatgtcaacacatttccttccccacttccgtctgaacctgctttgacgaactaagtgtatcttggggatgaatgaaaacatctcgagaacacatgccacaatatagagtgccccttgggtaaggactattacatagaagacgtcaagagagaacttgacatttttcttggtatctcctaaagtaccgtcaggatatgcatgttctctggtgcaattcttcggaatgccgatatagatacctgatgttcgctgcgtcactgctgtcaaaatactttggacacagatgaccgttgttggttgtatcattgctatcacaacacgtgcgaccgctgctggtatctgcaagttgccaaatgactctaataccaaagcaaatatcaggaagaaggccattggtgctactatataggcagagtccgaaaacaggtatcccaatattgctattacagcgcacatgcacaagaacagaatcactggatgcaagaatgacatcttgtggccacaaggactattcactagtgaggttatgcatcgaaattgcaacttggttattgtcactatgatcactgccgtgaggagcaatgcgaaatattcctttaatctaggcaatctgtctggatggggtattgatgtttccaggaacagacaggggaccaacaataggattgcagccaggggactccatagtgatacagctctgagttgtgggtcgccgaacagcttaaggatcactgggcatacaagcttggcaactacaaacagggacatggtcatacccaggattataaacggtgttacctttaccggacctagatgatagactggagttgggctccatcggaactttgccaatctgaaatttgcaaatctgaactttgccatgacgattaccatggcctcagtcatgcatacaatcagaaccaatctgatcaggcgaggacgcctgaaagctccccttgtcctgaagaagaactggagagccagcagcgtcgcgcaattgaactcccgtacggtgagcatcgtcgagaagccgccgaggatgacgactgttgcccatgtgaacaccagcgtgcctaggccgttgccggccctctctatgaacgcgatgatgcggacgaagcggttcaggtgcttctccggcggcgctggcgccgccttgcaccgtcgcccagtagctgcggcgacggcggctgggcgcgccatctttcttcaacgatttttttgcagtttgccgcgcggcggctagctcaacctccatgcttttacaatgatatatagagcaaggattacagagagagagagagagatggcgcggtacgtatcaacacacagttgactgtacttcacgatcggctgcacgattggttcgtcgggccgcacgaaggacgcgagtacgcgacgccggagatgaggaagacggtggtcgtagccgccgctgccgccaccgccgccggggaggccgacgcggctactgcggcgccacttggtcaatctgctcatcacacttggtcatagtgccacgtgcaaattgcagacttttggtgtactgaaatgcatttgactagctgttcgccaggagatgaaattgagcaacctttagctg

SEQ ID NO: 2813 - DNA, 1573 bp, Oryza sativa
  ref <308>: DATABASE ACCESSION NUMBER: AK060608
  ref <309>: DATABASE ENTRY DATE: 2001-12-06
gagaccaacccccaactcgacgatgaccatggaggcggagcgcgacggcgaggagcagcgccgccccctcctctcctcctcctctccgccgccaccgtcgccagcggcggaacatcagcatcaacaccagcagcagtaccagtacctgggccgcagcagctcgtcggcgctgcgcggcggcggtggcggaggaggaggaggagcgggctggggcgtggggccggaggtcagcgccgcggaggtcaggtccgccgcgtcgatctcctccgccagctactacccaccgccgccggctctccaccacggcgtctacccgccggacatccactccccgtccccatcgccagctgcccctactgctccgcaccctcacggaggattagcaattgttcctcaagggccgtacccgtatggcggcgaataccagccttctcatgatggcagaagggatgtactggatgaggtagagatccggcagctccttattgatcatgttgggcatcggtgctgctggggaagtaggcctgctcgcacatggaaaattacctctattgaggattgcaatgtatatgttggaactttggaaactttcatcgaggaaagggacactgtaactaacaaggaaccctatgatggtgggaaaatagatggaagagacaagggtcctgtgcttgcagtgtgggaacttgatctgaggtctgagtttcctctactgtttgtaccagaaaaagaagtaatggtcaagatccctcactcagaagtaattgaaaaatgcttagattgcgagagtcgtggagagataccatgtcctatttgcaatgctggtcaggagcacggattttacaaggcaaatcagatgacccgttgcagtgcatgtcatgggaggggtttacttgctcaccaagatggatctgatacagtatgtggaatgtgcagtggtaaaggaatgttgccttgtatagcatgtggatcgcgtggcctagtaacatgcaagacatgtagtggctatggttcccttctcgcaaaaagcactgctcatgttcgatggaagacactgtcagcaagaaaagtgagcgcaactaggggagctgcctctgtgcctgacgaagtattccacagagcccaggggattcagctatgcaacatacaggcgtaccagtgcactcctgcattcttcgccgattcgtaccagctcaaccagttctcctcagaagtcgtagctagccggcttccagttccaccgtccgcgagggtcatttccgagaggcacatcatctccgtcgtgcctgtgatccgtgtcacaatggctcatcgcaagcaatgtttcagcttctacgtcgtcggctacaatagggatgttttcataagagattatccttcgaaattctgctggggcctctgctgttgctttgagtggctgcggaactagttatttcttgccatgtgacaaaaatcgagtgtgcagtattttatagtattacatacggagtaaggcttgtgtataattatagcaaaaccgaagattaaagagggttgaatgaataagcataaccctgtgtgttatgcatttttt

SEQ ID NO: 2814 - DNA, 955 bp, Oryza sativa
  ref <308>: DATABASE ACCESSION NUMBER: AK060609
  ref <309>: DATABASE ENTRY DATE: 2001-12-06
aagagatgtacgcaattggtggaagtgctgagccaaccatcaacagccggggcaaccgctaccttgctccgacaaatccctttgccaaggaggttacaaagagggttgagactgctcagaccatctggaagggctggaactggagatcagagggggatctcctcctgaacggcgccttcttcaccccatcaggtgcaggcgcctcggccagctactcgcgcgcctcaagcctcggtgccaagtcatcatccatggttggcaccatcacatccggtgcgggcgccttgtcgtgccgcgggggctcagcctgctagtgcacaccggagaagagaaagagagagttgcgcaacaccgcaatcgcgccacgacaacacaaaagaaacacaagaattatagaagaagctaaaagctactaccggaacatcgcgggttacagccttttcttttctctccccttctccctctctctctctcttttttgcagcttttgacaatggttatatatgaccctctccaagaagattcaccatttcctcaaaaaaaaaaaaaaaaaggccaagcatcgagtcggccttgttggcctactggtgggtgccaagaatgctgtgagctcacgcgcattattagccatcttgttgctcagtttgatgtatttattcttagagtgctcagtctagatatcttccaataattcattgttcccctcgtgcccctcagcttgtttttactttaagctgaacaataaacctttgtgtagtactgtagtagtactaggtcctagtatccttgtttcctctagctctattgcttcattgttactagctaattccctccccatgctttattgttctcagtaatatcctgcaaaactgttggctgtgtgcatcttatgatgcagacgttgaagatgtaatttttatcttatctaaaaaattcagttaagtcttgagcagat

SEQ ID NO: 2815 - DNA, 1287 bp, Oryza sativa
  ref <308>: DATABASE ACCESSION NUMBER: AK060610
  ref <309>: DATABASE ENTRY DATE: 2001-12-06
aagagcgacgaccccaccgtatcccacacctcgctcacctcactgccctcgctttcgtcccccgcatccgcacctcgtccttcgccaattcgccatgccgtcgctcgccacggccgcggccgcgggagcgggagcgcctctccgccgcggcccgtgcgcaccacgccgccaatccgcgcacgcctcctcctcctcctcctcctccctcccctcccccgcgctcgccacgtccacgcgcttcgccgccaccgcccccatcctgcggctcgtccaacgaaggccaagagcgcctctgacggcggcaagagcggcgagccccgacgccgccacgggggcgcgatcgccctcctccggcggccagatgctggtgttcgtgccgccgcacccgctgataaagcactgggtctccgtcctgcgcaacgagcagacgccctgcgccatcttcaagagtgccatggcggagcttggtcggttgcttatatatgaagcttccagagattggctgccaacaatcacaggagagatccaaacacctgtagctgtttcaagtgttgaatttattgacccaagagagcctgtcatggttgttccgatactaagagctggtcttgctatggctgaaaatgcttcatcagttctaccagccaccaagacttatcaccttggcctgcgtagggatgaagaaacacttcaaccttcgatatatctgaacaacttgccagacaagattccagaggggactcgtgtgctagttgttgatccaatgctggccactggtgggacaattgttgctgctattgacttgttggttgaacgtggagttacaagcaagcagattaaagtcgtttctgctgttgcagcgcctcctgcgcttcaaaagctcagcaacaaattccctgggcttcatgtgtacacgggaacaattgattctgaagttgatgagagagggttcatagttccggggttgggagatgccggcgatagaagcttcgcgacttaactatgctaattatcgcagctgctgttctacctccacgagagggattggcgtaagctgaaatttccgaggattcgagcgcttttgacttgggagtcaggaacagtcgagttcacgttcacctgtagattgcctcgttcgagattctcccttcggaacttatcgttttgtaattatccattttgtgttgtcatgttgaatataggattagttcacgtccatccacgtttacaatttgttgggaatatgcatgtttaatgttttcaattatatcttacagatttcttgat

SEQ ID NO: 2816 - DNA, 1671 bp, Oryza sativa
  ref <308>: DATABASE ACCESSION NUMBER: AK104319
  ref <309>: DATABASE ENTRY DATE: 2002-08-28
agctctcccccaagagctgcttacctaacatacttttacaactccaccattgtccattgccaaaggccttcgatctcgcctcccagatctgccccgcgtcggcgaagatgaagatcaacgtgcgggggtcgacgatggtgcggccggcggaggagacgccgcgggtgaggctgtggaactctagcctggacctggtggtgccgcggttccacacgccgagcgtctacttcttccggcgcggcgaggcggcggcggcggagggcgggagctacttcgacggggagaggatgcggcgggcgctggcggaggcgctggttccgttctacccgatggcggggcggctggcgcacgacgaggacggccgcgtggagatcgactgcaacggggaaggcgtgctgttcgtcgaggccgacgcgccgggcgccaccgtcgacgacttcggcgacttcgcgcccaccatggacctcaagcgcctcatccccaccgtcgactacaccgacggcatctcctccttccccatcctcgtgctccaggtgacccacttcaagtgcggaggcgtcgccctcggcgtgggcatgcagcaccacgtcgccgacggcttctccggcctgcacttcatcaactcgtgggcggacctctgccgcggcgtcccgatcgccgtcatgccgttcatcgaccgcaccctcgtccgcgcccgcgacccgccggcgccgtcgcacccgcacgtcgagtaccagccggcgcccgccatgctggcccccgagccgccgcaggcgctgaccgccaagccggcgccgccgcccaccgccgtggacatcttcaagctgtcccgctccgacctcggccgcctccggtcccagctgccccgcggcgagggcgcgccgcggtacagcacgtacgcggtgctcgcggcgcacgtgtggcggtgcgcgtcgctggcgcgggggctccccgcggagcagcccaccaagctgtactgcgccacggacggacgccagcggctgcagccgtcgctgcccgacggctacttcggcaacgtgatcttcacggcgacgccgctcgccgaggccgggagggtgaccgggtcgctggcggacggcgcggcgacgatccagtcggcgctggacaggatggacagcggctactgccggtcggcgctggactacctggagctgcagcccgacctgtcggcgctggtccgcggcgcgcacacgttccggtgccccaacctcggcctcaccagctgggtccgactgccgatccacgacgccgacttcggctgggggcggccggtgttcatgggccccggcggcatcgcgtacgaggggctcgccttcgtgctccccagcgccagcggcgacggcagcctgtcggtggccatctcgctgcaggccgagcacatggagaagttccgcaagatgatcttcgacttctgatcctctgaaatcaaacaacacgtacgtacgcacgcacgaacgcgcacatgcatggagaggaggcggggtggttcttaacacagcctatcatcggtaggatgcagcaacgattctttgattccacacgttagttcctgcaaatttttcccttcctgccttcccgcttttgggcaggacacattttgtgccaactgtatttgtattgtgaacagttaattaatccgtaaacattacg

SEQ ID NO: 2817 - DNA, 1219 bp, Oryza sativa
  ref <308>: DATABASE ACCESSION NUMBER: AK060611
  ref <309>: DATABASE ENTRY DATE: 2001-12-06
atacacccccattctcttcctcgcgccgccgccgccgaagcagctgcgaccgccgccgccgcgattcgagccccagccatggcgaagaagcggaagcgctcctccgatgcggcggccgcggtggagaagcccgacgagttcgcgccgcagcgcccggagcgcaccctcttcggcttcaaggagaagcccgcggacgacgaggaagccgaggccgaggccgcctctgagggagaagaggatgccgccgccgccgccgccgcggcgccgttccgcaacaaggagaaggtgctcgtgacctgctcccgccgaatcaactaccggtatcggcatctgatgcagaacgtggtgtcgctgctgccgcacgccaagaaggacagcaaggtcgagtcgaagcagagcaagggcaatgcgctcaacgagctgctcgagctcaggaactgctccagctgcctcttcttcgagtgcagaaaacagaaggatctttacctttggatggttaagtcccctggaggaccatcagtgaaatttctagttaatgctgttcacaccatggaggagttgaagcttacagggaaccatctgaaagggtcacggcctcttataacattttctacaaattttgatgaacaacctcactggcagcttgtgaaagaaatgctaacccagatatttgctactccaaaagatcatcgaaaggcaaagccttttcatgaccatgtgtttgtcttctctatcgttgatgaccatgtttggtttagaaattatcagatttctgttccccacaatgagattgacaaggttgataaaggaggtctggacaagatgacacttgttgaggttggcccaaggtcctgtttgaacccaatcaaaatatttggcggtagtttcggtggccctacattgtacgagaatccattctatgtgtctcccaatcagatccgtgcactagagaagcggaagaaggccggcaagtatgccaagaaggtcaaggctaaggtgaggaggaagatgcacgagatggagaacactctggagcctgatgaatttgctgaactttggaaaggggaggactagttcagctatagtgattgaaccatcaacccccgttaaactagttgctctcgctgtcacccgacacgagttttgtttactatatctcgtggaatttcttgtatgacaccatgagtctattatttacatgaataagattttagtgtcc

SEQ ID NO: 2818 - DNA, 2563 bp, Oryza sativa
  ref <308>: DATABASE ACCESSION NUMBER: AK060612
  ref <309>: DATABASE ENTRY DATE: 2001-12-06
aaaaaaaaaagacaaggatgttcccttgcctgaggaaggtgtggagcttccaccaaatgagcgtgaccttattgttggaaaggtgtatgccaagatcatggaaatagaatcacgcctcctaccatgcggtctgcatgtgataggtgagccaccaagtgccatcgaggctgtggccaccttggtgaacatagcttcccttgatcgcccagaggatgaaatatactcactgcctaacatacttgctcagacagtgggcaggaacattgaagatgtgtacagaggaagtgacaagggaatactggcggatgttgaactgttgaggcagataacagaagcttcacgtggtgccatcactacctttgttgagaggactacaaacaacaaagggcaagttgttgatgttacaaacaaacttagtaccatgcttggttttggtttatcagaaccatgggtacaacacttgtccaagaccaagttcatcagagcagacagagagaaattgagaaccttgtttactttcttgggagaatgcttgaagctaattgtggcagataatgagctgggaagcttgaaacttgccctcgagggaagctatgttgaacctggccctggtggtgatccaatccgtaacccgaaggttctcccgacagggaagaacatccatgctcttgaccctcaggcaatcccaactacagctgccttgaagagcgccaaaattattgtagaccgtctgctggagcggcaaaaggttgacaatggtggcaagtatcctgagacaattgcacttgtcttgtggggcaccgataacatcaagacctatggtgagtcattggcccaggtgctgtggatgattggtgtgcgcccggttgctgacacctttggccgtgtcaaccgtgtggaacctgtcagccttgaggagcttggacgtcccaggattgacgttgttatcaactgctcgggtgtcttcagagatcttttcatcaaccagatgaatctactggaccgggcagtgaagatggttgccgaactggatgagccagaagagatgaactacgtgcgtaagcatgcacaagagcaggcacgggaacttggcgtttcattaagagaggcggcaacaagggtgttctcaaatgcatcaggctcttactcatcgaatgtgaacttggcagtggagaatgcatcatggactgatgagaagcagctccaggacatgtacctgagtcgcaagtcttttgcatttgattgtgatgctccaggggcaggcatgcgagagcaacgcaagacatttgagcttgctctagcaacagcagatgccacattccagaacctagactcatcagagatttcactaacagatgtgagccactactttgactcagacccgacaaagctggtgcaaggactgcgcaaggatgggcgggcaccttcctcatacatagcagatacaaccacagcaaatgcacaggtgaggacattgtcagagacagtgcgccttgatgcaaggacaaagctactgaaccctaagtggtacgaggggatgatgaaaagtggctacgagggagttagagagattgagaagcggctgacaaatactgttggatggagtgcaacatctggacaggttgacaactgggtttatgaggaggcaaatgccacatttattgaagatgaggctatgaggaagaggctcatggacaccaaccccaattcattcaggaagctagttcagaccttcctagaagccagtggcagaggctactgggagacatcagaggaaaacttggaaaagctcagggagctctactctgaggttgaagacaagattgaaggaattgaccggtaaatttatttgatctatcagatcctgcattcaaccaaggaggagaaatccttctgtctcactgaatctagagttgagacttgtacactttgtataatttataaaaagttgtaacatgacatacacgaggataccgtgttttaacaaagagggtggctgtgaatgaaaaaaaaaaaaaaaaaaaaaaaaaaaaaaaaaaaaaaaaaaaaaaaaggccatggcctactggaaatgtggcgtccaccggaacgagctgattccgcacagtggcgacatgaggtctctccattcctcctcgagcacaacaagatcctactgcagccgcagcatgttacttgaatgtggccaggctcactctccgccggaaaccctatgactccacgtcattgcggttcacttgtagccatgaaatttttgctctatcatattcttgaggcctctctgttgcgtacgtgctttcacggtgaagcaagtcatagcatccgacttataccgagagcagcttctggtgaaaattaagttttggtgagagtgaattggcagatggtatgatgtgcaatttgctgctgtctgtgtagtgtggttggttggtgtggcaaagtcagaagccagaagcgaagactactgttattattggttgatactggaggcaaaaccatgcatgcacatactattatatggtgttgcagattaattttaccagatctgctgttctggtttctc

SEQ ID NO: 2819 - DNA, 1383 bp, Oryza sativa
  ref <308>: DATABASE ACCESSION NUMBER: AK060613
  ref <309>: DATABASE ENTRY DATE: 2001-12-06
agctcaagcaagtgcgcaccaccaccagcaacaatgtcttccccttcctcggcccattggctgagcttggtaggaagtatctggctccagaccatcaacggccccaactccgacttcccggtgtactcgtcgcagctcaaggagctcaagagcatcagccaggtgcagctcaacttcctcgccttcgcgtccgacgcgggcaagctcttcggatggttctccggggtggcggcgctgtacctgccactttgggtcgtcgcgttcgtcggcgccgcgttcgggctcgtcggctatggcatccagtacatgttcttggacagctccggcctccggtactggcatctcttcctgctcaccgcgctggccgggaatggcatctgctggatcaacaccgtctcctacctcctctgcatcaacaacttcgcgtcgaacagccgcgtcgcggtgagcctcgccaccagctacctcggcctcagcgccaaggtgtacaccagcctggccgagacgttcccggggctggccaactccaagacgaagacgtacctcctcctcaatgccgtcgtgccgctgttcgtcaccgtcatggtggcgccgtccctcagggtgttcgacctcaagagcgcggcggcgagctcggacgcggcattcctcgtcatgttcgcgatcacgctcgccacgggcgcctgcgcggtggtcggcagcatcggctcgacggcgaacgggctgtcctccaaggagcacatgatcagcctcggcgtgctgctggccaccccgatcctcatcccggtggggctcaagatccgcgagaccctgaccaagatacgggagacgcagcgggagaacaggatccatgacctcggcaccgacgagtcggagtccgtggagagcgtcgtcgtcatcgacgtcgccgccgacgcaaacgccgaggttgccaaggaggaggacgccgtggtgaagaagccccaagaggaggtcggcggcctccggctgctgaaaagcccggacttctggctctattttttcagctacatgttcagtggcaccctcggcttggtcttcctcaacaacctcggtcagatcgccgagtcgcgaggaatcgggcagacttccactctggtctcgctctcgtcttcgtttggattcttcggccgtcttctcccggcgttcatggactactactccgcgaagtaagcgatcattcctttcacacacttccatgattaaaaaaaaaactccaagcagagtagcaaaatttgtcaaaacagagtattctttaactactacatgagtcctgagattttggagaccacgtacacttgttgttatcaaagattcatgcagtctttgtttgtttttcttttcaagtttcaaagacgacgtgct

SEQ ID NO: 2820 - DNA, 1484 bp, Oryza sativa
  ref <308>: DATABASE ACCESSION NUMBER: AK060614
  ref <309>: DATABASE ENTRY DATE: 2001-12-06
ggcggcgcgccccacgagaactccgatgatttgcgcctcccccaccggcggcggtgcggtgatggatccttcgccggagttccgcgactgggccaacctgccggagctgccgctctcggaggtgctacggggcctcctcccctgcctccgctccgtctacgccttcgccgccgcgtgccagccctggcgccgcctgctccgggactccgccgccgacctcgtccgcccccgcatcccgccgctcctcctcctctgccccacctatcgcgtcgtccctttctcccagctcgtcgtcgcggcgctcctctcctcctaccccgtcccgggcgacgccaccctcctctcctcctcccgcggccacctcgtcctcctccgccgccgcgaccccttccacggcctccacctcgtcgacgcgctcaccggcgccacgcgccacgcgctgccgctcccttccccgcacttcgcctatcactacgccgccctcgcgccatcccgccgcctcctcctcttccattccaagcacgccttcttctccctccccgtgggcgacgcgggccacaaccctcgcctcgattggaccaagcacagcctcccccgtgccgcctccttcgttcgatccatcctcgaattccgcgggcgcgtcctcggcttgaccgatcgcgcgcagctgctggagttccacctcgatgccaaccctccgaacaaatccgcccaaatgttgcacgccgccggcctccctgaggtcagcacgttcgaccggtggcacttcggcccgcatctggtcgccgccggtgatcgattgctcctggtgctcttcatgatggggccgaaattgggccatatgtttgagacattggtgagtgtgaagaaggttggcgtctatgcacttgacatggtgaagatgaggtgggaagaggtggacaacattggggcttacagcttgtttgtggactgcgccgggaggagtacagctgcttgtgtagacgtggagaactgtggcgtggaggcgaaccgaatttacattgctgctcctgggtgccgtgactggtatgcatggcggcctgggcgtgaggtgcctctcggtggtcaagggcttggaccattgtccattcaagcaatgaaccacttgccatggccttcacagatatggatttatccacgtcttctcttttgatgatgcatggtaactagtgagacaagtgaagaaaccttatctatgatcagttgttttgctgtaaatctattactgtggatattttacttccgtagcatgttgtgccaacataatgagtgtttttctagcaattccctttcagccaacacatgtcatagtaagtcacatttttgtatcatatggaaacaccaagtacagattgtaattgtcgtcatgacttccggtggtaccacctggtaggccggtacatgctgatcaccaacgttttgtatgagtttgtaggcttctcttttaggcttgcataacatgc

SEQ ID NO: 2821 - DNA, 2018 bp, Oryza sativa
  ref <308>: DATABASE ACCESSION NUMBER: AK104320
  ref <309>: DATABASE ENTRY DATE: 2002-08-28
aaaccgagctcacacaccaccaccaccgccatcgccatggcgccacctgccatggccttccaagctctcgctctcggccccctccccctccccctccccgcggcgcgtcgccgccgccgcgtgcgagtcctcgccgtggccgcagaccacaccccgccgccgccgccgtcgccgtcctcccctcccgagccggcgaacagcccgagccggctcctccgtgagctcgcggagcggaagaaggccgtgtccccgaagaagaagcacccgccgcggcgcttcatcctgaagccgccgctcgacgacgagcgcctcacccagcggttcctcagcagcccgcagctgtcgctcaaggcgctcccgctgctatcctcctgcctcccgtcggcgccgctctccgccgcagaccggacatggatggacgagtacctcctcgaggccgagcaggcgctgggctacccgctcgccccctccgagacgctcggggacggcgacgacgacggctgccccgcgcggcacttcgacgtgctgctctacctcgcgttccagcacctggacacgtcctgcgagcgcacgcggacgcggcacgtccggagtggccactccaggctctggttcctgggccagtacgtcctggagctcgcgttctgcgagttcttcctgcagaggtacccccgggaatcccccgggccgatgcgggagcgggtgttcgcgctgatcgggaagagagcgattcccaagtggatcaaggcagctagccttcacaatttggtgttcccttatgacgatttggataagatgattcggaaggaccgggagccaccagcaaaggctgtattctgggcactgtttggagctatatatttgtgctttggaatgcctgaagtctaccgtgttctttttgaggcgtttggcatggaccctgaagatgagagctgccagccaaagctgcggcgccaactagaagatgttgactatgtatcagtggagtttgaaaagagacaactcacatggcaagatgttgctgcctatcggccaccaccagatgccctctttgctcaccctaggctatttcgagcatgcgtgccaccaggcatgcatcgtttcagaggaaatatttgggattttgacaatagacccaaggtcatgaacacactgggatatccattgcctatgaatgatagaattccagaaatcacagaagcaaggaacatagagcttggacttggtcttcagttgtgcttcttgcatccctcaaagcataagtttgagcatccaagattttgtttagaacgcctggagtatgttggacagaaaattcaggatctagtgatggcggagaggctgctcatgaagcatctcgatgcacccggtaggtggttggcagagaagcatcggaggttgctaatgaacaaatactgcggacgatacctccgggacaagcacctgcaccactacattatctacggggagtcggtgcaagacagatttgaacacaaccgccggctgagaaatccttccacgaccgccgtccagcaggcaatacacggccttgcttactgcgtctatggcaaaccggatgtaaggcgattgatgttcgaggtgtttgacttcgaacaggtccagccaaaagcagtatgagggtggtcacaaaacctgtgcttgtgctgagctgctgatacgctgacattaccggcgtttgaaagctgaaatgcttcagtgttgtgacctgtgaacagatccaagcgcagacagttctgagtctgatccccgaagtcgaaaagcaggttaacacacgtaactcatgcaccctcgtttctacgagatgaactggattagagatgttgtaaatcgaacgctgttgttttctgaatttacagttttgacgatttgatgtaaatttccatttgagcagaaaatgcaagcagcatcagagacaaaaaacagcataggaagaatttttcctgtgaaacatgcttgtaaaggagtttgtaatagatctgcagaacatctttgcaacc

SEQ ID NO: 2822 - DNA, 1170 bp, Oryza sativa
  ref <308>: DATABASE ACCESSION NUMBER: AK060615
  ref <309>: DATABASE ENTRY DATE: 2001-12-06
gtgtgcgggtctctgcggttacacgccaaggagtgatgctgtgataggtaaacatgtagcagcgaggcgtggtcacggccctgtccttgctgcgcccctccactctgcagcatcgccccctctatttgtacatttgcccatgtcgtttcattcctcctcccacttcgcaaatttgctagtactcgtttaggccactgaccactctcctctcttacgttcctctgccgccatcgctgcgcatctccaaccttagctccaaggagaaccagctagctagctgcgtcgtctctactaatctagggtgacgcatggaggaagctagcagctagcttactgtccaatctcactgcttcacaaagaagcttctcttttcttttactgttcaggaggcttcactcttctcggcaacctctccccaatacagactagctggctgtaacgagatggtctcatggccgtgagatcacctcaccgagcattcctagtggccatgattctggtgagcttccttctcggagctgcagccggcatccgcagcacgacgctgtcttcttctcagagcctagcggaggacaagtcgcggctggggtcgacgccgccgagctgccacaaccggtgcaacgcgtgcaacccctgcacgcccgtccaggtggcggcgctgccgggggttagccgcccggcgagcgccgccgaccgagttgatgtcgccgggttcgcgcagtactccaactacaaaccgctgggttggaaatgccgctgcgccggccgcctcttcgacccctagatgtcagtctacttagctcaattctcgacggcgctccgcctctgtaatctgaatatgtactactatgccagtagatgagtatcaggccatcatcctccatggtcaggttttggttagttaatctgctctgctccctctccactcttcaaggctgcaaccacagtttttcatcgccatatttttgttgtgttgagtaacactttaactagcacatgtaagagtgattgggagcagtaaattcagtgtagagtagagtgtagtactcctagctactagtagtagaagtaatgctctgctcatggcatgttaaaaaggcaaagggcaagcctgcatggctgcatgtgacaccctctgatgaatctgatgaagctctgaatcccatcgtc

SEQ ID NO: 2823 - DNA, 1509 bp, Oryza sativa
  ref <308>: DATABASE ACCESSION NUMBER: AK060616
  ref <309>: DATABASE ENTRY DATE: 2001-12-06
agcgctccacaactcacgagacgaggcagaggcgctcgccgcggaggagccaccaccacccaccgccgccgccgccaccgcaaactctctttcttctctcgcctggacgagccgccggagagctcgggggagagctctgctgcttggggaggggaggcggaggcgatggagtcgatggagcccaaggacatcgactggagcagggtggtgtcgcggtacgtgcgcgacgagacctacgagggcatcgaggccccgcactgggccgacctcaccgatcccgaggccggcgtcgccgccgtcgacgacgaggcctggttctgccgccccgattaccggcatccaaagacggtcgaggacttcctcaagatgagccccagccccaagggcaagctactgcgatcagtgtcggccatgatgatgccgttcggcgagagggacaccaaccttagagacggcaacaacaatctcaagaggcggggagccgtcgccggcagcggcatcgccgccaccttcacgccgcccaagcccaaggctgcggccaagaagaggttccagggcgacagcgagaaccaggacccggcattggccactccacctccgccgccgccggcggcgagtaggccaccgttcggcgcggcacggtgggccaagaacgccaaggacgccatcaagtccagcgcggagaagcggccgggcaatgcagagaaggaggccctgctcagcaagaacgccgcgccgaggcagctcaagagcaccctctcggcgaggaacctcttctccgggaaggacatacttggccagatatcagacttctacaatgagctcaagcggatggccggcggcaatggcagccggcctgggtcggaggccatggaggaattaagctcaaacccaataaatgagggcgatgtggccgagaagaaggtcgattgtggctgtggcactggtgatcaggttccctctgaagaagccatcaaggagaaatcaaggcaagaaacagcagaaaagagtccaagcacaatgaaggggaagaagatgggattgaaagtggaagctgcgaagcccaccaggtcctctgtgttgaaggaggtgaaggccacaccaccgactccgcagcggttcccatctccctcgacgaaccgtgtcaagaacgtgaaagcaggaggcatgtcgatggcaagctcaccactcaagaagccactgaaggagaaggggacacctagtaaggatctggagaacagcaaagatgctaagaggcaaccttttggtgtcaaggacatgaacaacaccaaggcttgtgatgcagaaggctctagtagcatgttttggttcttgaagccctgcaccttcctagtggagtagcagcaaaataacgggaagctttaaagaactgcattttatgtagttagaatacattatttcattctatttgagatacctgtttggttgattcatttgatggacatttttgtcagggaaataaacagcaagctatgtatagttactagc

SEQ ID NO: 2824 - DNA, 1347 bp, Oryza sativa
  ref <308>: DATABASE ACCESSION NUMBER: AK060617
  ref <309>: DATABASE ENTRY DATE: 2001-12-06
aacctaatttcttcttccacttctcgcggaggagaggagattccgatcgagaagcggcggcgggcggccggccggcggcgagggagagggagaatcgaatatactgtagcagaagatgcttccaattttcaatggcgggttaggaggaggagttggcgaacacgctacctaattagctaggtttcctttgcttctccaccatatccgttcccctcttctccgctacgatgcaggccgccgcggcgccatggagggccgtgctacggacgacccacctcctcgtcgatcccacgcgtctcgccgcgtcctccttccactccacacccgtctcctccgccaagtggaaggacaagttcgattgcaggcatgaacatggagcgcggaagctatccaagaactacgagaggtatgttgttcgtcaaaaacgagcagaaggtaaaaaggccctaaaagattatcttctatttggaaagagttcacctcatttacagggtggaagtacgggcagctttgctaattcgcatgatatcccacgattcaaaacctttaggaaaggatctcagtctcatggctcaacaaagtcgcgacaaggtgtacaccatcacagaaaatgtaaaaaagacagggagaggttctacaatttcttccgtgaggagtattatgtgcatcctgacaaaatctttgaagacatgttcggtgagaatcatcgttttacctggtcccatatatcgtgggagagttttagcttcagagattcatcgtccagatttcgaaggactggtgaatcgaagagagaaagagtttgtagcgatagtgacgatgaaaatgaggatgaaacaaccaacattgggtcacatgcacaccgggctattcttggactaccagcttgtggtccactaactctagatgctgtcaaaactgctttccgggcatctgctctgaggtggcaccctgacaagcacccaggctcatcacaggccgtggccgaagagaagtttaagctttgtgtcaacgcatacaattctatctgcaatgtcctcaaggctgcttagctttcctcttgcatcgatggtggttcaagcttgcagttgctggaggctgtgaactcgcagcaacagcatttcaaggcttgtagctgacaaggccaagcatgaagctgctgcattgtttcagagcatcaatcggatgacacattcagttcaccaactcaccaagctcagagaaggaaggggatttgtgctgttgtaacaaacatgtacgtactactaatcactgtaacaaacatctattccttcatttgatttgatttcctattccttgagcgaataaaacaaacactgttcacag

SEQ ID NO: 2825 - DNA, 2037 bp, Oryza sativa
  ref <308>: DATABASE ACCESSION NUMBER: AK060618
  ref <309>: DATABASE ENTRY DATE: 2001-12-06
tcccagtgcgccgcgccccccgtcgagctcaggccgacggccttcatctcctcgccaccggcgccggcgccggcgtcggcatcgtcgttcctcgggtcgccccagtctctgatgctgccggcctccaccagcaccggcccctcgccggactcctcggcggcgacgaagttcatcaggatgtcctcgcagttgcgctcccggtccaccacggcgcgcgccgcggcgagctccggcgagcaggagtactcgcggaggaggcccgcgccgaggacgaggagcttggtgagcaccatggagtagcgcgcctgctgccgcgccgccgcgccgtacgcccacctcccgcgggccaggtcgaggtggtgggacctcgggaagaacccgacgagggtgcccgggcgggcgcgctgctgccaggcggcgaacgcgaaggagagcgcggcggcgtccgggagcacgtcgtcgtcggcgacggccacggcggcggtgcggatggacgggtgcgggaggaagcgggagttgagggaggcggaggcggtgcggtggagggtgacggccggcgggaagcttgacaggaggctgtccggtgtggaggggttggaccagagcacgacgacggcgaggacgagcgggtgggcggcgtacgctccggcgatggcgcggagcagcgggagccgccgctccgagtagccgctcaggagcaccgtgagccggtccggcctcagcgtggccgcgtccggcatggactccactccgcagaacgcctcttcttcttccacaccggctacggcagcggcggcggcggcgagcgtcgccgcgagcaaaaggaggcggaggcggcgatgcgacgccatggacgcggtggcgagatctggttcaagtgttcaacgctggagccgttgacttgtgagttaaaaatgtctcgagttggattctgtgtgggccccagtgtcagcctcggtggtgagtggtcgtgtacgatccgacgtggactcgcgtgggcccggggcgtcaggcgcgggagccgttcgttttccccgcggctttatccacacgaggagggagagaagaggtggagagggagaggcgaggtgtaaagaggcggaacaatggcggcggcggcggcggcggcgcagtggtgcggcgcggctgggctagacaggtgggtgggccggtggcggtgtaccttgtcgccggcggctctgccggtgccgtcgcggcggacgaggaggaagggcggggtcgtcggctgcgtgtccgttccaagggaggtcgccgcggccgcggcggtggagccggcggcgccgccggaggctgaggccgagacagaggttagttatcttgcatgctccctgagctcgccggcgctttgccggagcagtgtgtggtgcaaccgtgcaatcctcacaccgacaggacgggcccacgggtcagcgagacagcagtggtgccctgtggtagttctctctaggaagtccaaccgcttaccatttgtaactgtcctaaccttgacctccctccgccgtccgatctaccataggcggttcagatcactaggggcacgtttggatcctgggcaagggtcaccctagccttgcctggcaaggctatccgtttggaactagtaaaatagcttggcttttaagggcgagttagttgtacagggcgagaaaaaccttgccggctagggagagccaatttggctcgctttcgacgtcaaacttcactcgcgtgaaaatattgtctgcgggcgacgcggacttctccggaatcgctgatattctctccccgatcaggagacgaactcattagcagcagctcaatccggaggcgatctcatccgcgtagactcctagatttgatttcttctttatcgtcagctcctaacctcttctttctgagatacatggtgtgctgtcttgttcaatcgctctgtcaggaagttggtagagttagaaaagagcgtctttgagatcgtttgctttgtgctagatgcagcctttgcgttgccaagatcatttattatgatggtacttgatt

SEQ ID NO: 2826 - DNA, 281 bp, Oryza sativa
  ref <308>: DATABASE ACCESSION NUMBER: AK060619
  ref <309>: DATABASE ENTRY DATE: 2001-12-06
agcatcgcgctggtggattgctgcctataataatagtatgcagctttgttttgggctatgttgatgatatatcaatatataatatgctatatatttttattttacagtttggttatgtaccatctcaatggcctctgctcttaacacatatgtaataatctcttccctccctctccggccggttttattgtaagagtactacaattatcgttgggtgaggatatgtgaaaacaaagctccggctatatacacacaagatatgtatctagagcatatctgat

SEQ ID NO: 2827 - DNA, 1212 bp, Oryza sativa; identical to SEQ ID NO: 1843
  ref <308>: DATABASE ACCESSION NUMBER: AK104321
  ref <309>: DATABASE ENTRY DATE: 2002-08-28

SEQ ID NO: 2828 - DNA, 1721 bp, Oryza sativa
  ref <308>: DATABASE ACCESSION NUMBER: AK060620
  ref <309>: DATABASE ENTRY DATE: 2001-12-06
tctcgagcggagcttgtctttgcatgagcggttgcatagaggaggtcaaggtatccactcccttgagagatctggctctttgcctggtggcgctcctctacctaacctggatgttgtaaattccctagcacgccatcatggcattggtcagttagaaacacatggagatttgtattctctaggacaaatgcctatggttccttcaggggttcatccgcagcaacacaggcttcaggaacagctttctggtaacttggcaaggctggataggcactggtcagatgccaatggacagttgcaaaacacacttatggaaccttcacgcatcagccagatgcaaatggaagcacagaaacagcgaaggaatgtggaaatgaaccttgccgttgacaattcacatgcatgggcatcacttaggaacaacgagaggagcacagagcaagatttgagcgacttgttccatcaaaaactagttcagtcacaacaatctcgtggttatcctgatgttccagtaccggcatcctttggacgtaaagacccttcatcgctctttgcacagcctgctgcagataaccctttaagatcacctgcggacaggttgtcttttgatgatcctcttgcagaaaggtccctttttgctaaagctgggcaggcaggacaagagggagcagcaaatttggagagtttgactagcagtattgagaacagtggaaagttgggcctgagatcaagctcaggatcaatgcttgatatgcaaaggggtgatttttcaggtattatggggggtggtgcatcaggtaatcaattggttggacttgccaatgaggtaccaagaggaaaaaggcagggttcaagcgcgagcttggtaggggatgacactaactttgctgaagaagctggtagcaactggcctgaagctaccatgccaaaagggggcactcattccttgctgaagcgcccaccaagccaacacggttctgcaactcaggcattgtccacggatatatcttcaaccattaggctgaagaaagcaggccatgcgtcttctgatgatcataagttggaatcaggaggagtcacctcggcagcccaacctgtggatatccctgtctccactaacaaagaggcaggctctttcatctcgccatcaggaacaagcgtcgatggtccgtccttcagggaaatggtgaagagcacgaagaagccggcattgcagcagtatgatgcctctgaatctgcagatggtggcccgggcggcaagggtgcaaagaagaaaacgaagaaaggaaaacagattgacccgtctcttcttggcttcaaggtccacagcaaccgcatcatgatgggtgagattcatcgccttgatgattaacatgcatctctaggcgccattttgtgttgtgtacatgttcatctctttgtagcgatgcagaaattttgtaaacattgctgtggagaagatcatgactcccaccccctttttcacccctccctcccacctttgttcattcctttagccataggatacagaattagtcagaagatgaaattagggaggatttgtctttctttttctttccccccttgtgtatctgtggtgccctcaggtttttacaggagagattgtacaggacagtgcaaaatggtcagcatgtttgtagggttcttattttttttgaaggactttttgtccttttaatcgatggtctctcttccaagtt

SEQ ID NO: 2829 - DNA, 1273 bp, Oryza sativa
  ref <308>: DATABASE ACCESSION NUMBER: AK060621
  ref <309>: DATABASE ENTRY DATE: 2001-12-06
tcgcctctccctcccgaggccttggccggcgcgaggtcgaggagaggaagctcccatggcggaggaggcggcgcaggagcagcagacggaccccgccgcctcccgccccgtccgctgcatcgtcaaactcggtggagcggccatcacgaacaagggagagctggagagcatcgacgcggcgagcttgcggtcggcgtgcgcgcagctgcggcaggccatgtcccacggcggcgcggcggggaaggttgtggggatggactggagcagacggcccggcgatccgaccggcccggtcgtggatgtggagggcttgtcggagatgggaggcttggggctcgactccaacttcgtcgtcgtccatggtgccgggtcttttggtcacttccaagcaagtagatctggagtccataaagggggtcttcattcaacacttgtgaaggctggctttgtggctacaagaatttcagtcacttctctcaaccaggagattgttagagctcttgcaagagaaggaataccgtctgttgggatgtcaccgtttgcttgtggatggtctactaagcaaagaaatcttgaatcagtggatgcttctcaaatcatgctatcactccatgttggctttgtccctgttttgcatggagatgctgttcttgatgaattgctggactgcaccattttgagtggggatgtcattatacgccatcttgcacagcttctgagtccaaaatatgttgtatttctgacagatgtccatggagtatttgatcgtcctccatcagacccgaatgcagtacttctcagagagatagcggtggatgaaaatggcagctggtcgattgtaaaaccagcattgaaaggcaacaagaaaggagtggagatatctgtagctgcacatgacaccactggcggaatggagaccaaaatattggaagctgctgcgatagctaggcttggagttgatgtgtatattacaaaggttggtacagaacattcactgagagccttaaaaggggacacgagctcagaagattggcttggaaccgtcatacgatcttccagatagaattcttggcctatcattttcgggagtaagcatccattggcaaatattttatcaccattattgtaggacgattgtgaagctatgagctgatcacctgtcaaatgattcatggggttattattgctgaatctcatagcagacaatgaggcagagctcggtgttatgctacaagtaacagtcctacgacattataataagtaaccttatttt

SEQ ID NO: 2830 - DNA, 1398 bp, Oryza sativa
  ref <308>: DATABASE ACCESSION NUMBER: AK060622
  ref <309>: DATABASE ENTRY DATE: 2001-12-06
aacaagtccatgctacccgtgactcttggaagggttcctccaagtcatttggtgttaaaggactcagaggtgtcaggaaagcatgcacagattgactggaatgcaaataaactcaaatgggaaattgtggatatgggtagtctaaatggaacatttttgaattcccggtcagttaatcatcctgatgttggatctaggcgttggggtgagcctgctgaacttgcagatggtgatattataacacttgggagttcatcaaaagtatctgtccaaattgagctacaaaaccaacaacctgtaggagttggtatagcatctgatccaatgacagcccgtcgaactgggaagaaacttcacatggaggatgtcagctgctgccagtatcctcttatcggtgtggaaaagtttgggctatttggcatattcgatggccatggaggggatggtgctgcaatagctgccagcaggattcttccacagaacattgcaaacattttgtctcaacaggaaacaaaagaaagagttctttcatgccatagtgcttcagatgttcttagacatgcctttgcattgactgaagctgcactccatcatcaggctgcacagcaactatccttctgatttggttcgaccagaacgaagattgcttcgcccaatgtgctaatcttggtgactcagcttgtattatgagtgtcaacggggaaataattacaatgaccgaggatcatcgagtagtcagtacaacagaacgagcccggatggcaaattcaggacaacccctgaaagacggtgagagccgtatatgtggactaaatcttggcaggatgcttggggacaagtttttaaaggaacaagattcacggttcagctctgaaccatatgtgagccaggcagttcgcatgacaaaagcatgcttagcctctgcccttattgctagcgacgggctatgggatgttattagcgctaacagggcagcgcagcttgtccttgagggtaagcagaagtacagcgagcagaaaacttcagcagataaagtagcacatcatgtgttaagtgaagctaggaaattgcgaaccaaggacaacacatcagtaatatttgtagacctggacactctgagaagtgatccctgatcctgaatccccaattgcttttgtcaggtccggagatcgtcctacctgctgctcgaacagttgaacaacactatttcttttgtttcactggtagttaatatcctttgtcaaagttgagccaggtgctccggtgttgcagaggatgaatgctacagttctccttgtatgcaaatacccagggagccccttgtgcggttatgcctgtaaattgtgagtgaattggttaaaagaaatgtttatgaactttaaattctggagttccatc

SEQ ID NO: 2831 - DNA, 1406 bp, Oryza sativa
  ref <308>: DATABASE ACCESSION NUMBER: AK060623
  ref <309>: DATABASE ENTRY DATE: 2001-12-06
aaaaaaaaaaaaaaaaaaaaaagaaaaaaaaaaaactcgaaatagcccgcgacctctctctctgtgtctccgccgccgccgcctccgccgctcgccgcatccgtcggaggcgagatgggcatcaagggtttgacgaagcttttggcggacaatgcgcccaaggcgatgaaggagcagaagttcgagagctacttcggccggcgcattgccgtcgacgccagcatgagcatctaccagttcctcattgtagttggaaggacggggatggaaaccctcacgaacgaggccggtgaagtcaccagtcatttgcaaggtatgttcaaccggacaataaggttgctggaggcaggaatcaagccagtatatgtttttgacggcaagcctcctgatctgaagaaacaagagctcgcaaaaaggtactcgaagagggaggatgccaccaaagaactaacagaggcagtagaggaaggagataaagacgcaattgaaaaattcagcaagagaactgtgaaggtcacgaagcagcacaatgaagaatgtaaacgactattaagacttatgggggttcctgttgtagaggcgccatgtgaagcagaagcagaatgtgctgcactttgcataaatgatatggtttatgcagttgcatcagaagatatggactctcttacttttggagctccacggtttcttcgtcatttgatggatccaagttccaagaaaattccagttatggaatttgaagtcgcgaaagttttgaaggagcttgaactcactatggaccaattcattgacttgtgcatcctatctggatgtgactattgtgatagcattaaaggtattggaggtcaaacagctctgaaacttattcgtcaacatgggtccatagaaagcattctggaaaacataaataaagacagatatcagattcctgaggactggccttatcaagaagctcgacgcttgttcaaggaacccaatgttacattggatattcctgagctgaaatggaatgctcccgatgaggaaggtcttgtagagtttctggtgaaagaaaatggtttcaaccaagatagagtgacaaaggccatagagaagattaaatttgccaagaacaaatcttcccaaggaaggctcgaatccttcttcaagccagttgttagcacatcagtgcctctgaaaagaaaggacacttcagaaaaaccaaccaaagcagtcgctaacaagaaaacaaagggagccggcggaaagaagaaataagttcgattgtgccattcatcaacaagacctcctgcacgtgtcatttcaattttaactcccatgtttgtaactcatcctccatctgatgttttctatgttcctagtaaaccagaagtccagaacttcgtctaatactagttcatctatgt

SEQ ID NO: 2832 - DNA, 286 bp, Oryza sativa
  ref <308>: DATABASE ACCESSION NUMBER: AK060624
  ref <309>: DATABASE ENTRY DATE: 2001-12-06
tggatatgtcaccgagaacgaggactacttggcagacctcaaggttggggatgtcattgaatcgattcaagttgtctcaggcttagactacctcgccaacccaagctataagattgtaggataaaatgtttctttttttcaggagttccttgataggcaattattttaccatattgaaatcagtgtaaagtgctataatctctaaccctcatctcatgaccttctatgttttgtgagttttgcaatatgcgggattcaatattacttgaaagtaaagacgttcatc

SEQ ID NO: 2833 - DNA, 1443 bp, Oryza sativa
  ref <308>: DATABASE ACCESSION NUMBER: AK060625
  ref <309>: DATABASE ENTRY DATE: 2001-12-06
accagtaccaccactaaaaattaaagtgagctaagccaacactttggcggcagaaacttgcagctaagcattgtccctcctcatctgcaaaggcagaggagatacattccctcgtcctctttcgcttgatatcaagttatcaacagtgctctcctatccgtgagccgtgcacaactgcacacgatggtgttgattcgtcttactatgctgatctttatcgccatcctccttgccggccgcacatgcgtacttgttgttgccggcggtggaatgccggcaaccttcgtgttcggtgactcgctcgtcgacgccggcaacaacaactatctcgtctccctgtccaaggcaaactacccaccaaacggcatcgacttcgacggacaccagcccaccggccggtacaccaacggccgcaccatcgtggatatactagggcaggaaatgtcgggaggatttgtgccgccctacctggcgccggagaccgccggcgacgtcctgcttaagggcgtcaactacgcgtccggcggcggaggcattctgaaccaaaccgggagcatcttcggtgggcgcatcaatctggacgcccagatcgacaactacgccaacaaccggcacgagctgatcaagcggcacggggagttggaggcggtgaccctgctccgtggcgcgctcttctcggtcacgatgggatccaacgatttcatcaacaactacctcaccccaatcttcggcgtgccggagcgcgccgtgacgccaccggaggtcttcgtcgacgccctcatatccaaataccgggagcagctcataaggctgtacctgctggacgcccgtaagatcgtggtggcgaacgttgggccgatcgggtgcatcccgtacctgagggacacgacgccgacggtcggaacggcgtgcgccaagttccctaaccagcttgcccgcaacttcaaccgcaagctgcgcggcctggtggacgagctgagcgccaacctcaccggctcccgcttcctctacgccgacgtctaccgcgtcttctccgacatcatcgccaactacaagtcgcacgggttcgaggtggcggactcggcgtgctgctacgtgagcgggaggttcggcgggttgctgccgtgcgggccgacgtcgcagtactgcgcggacaggtccaagtacgtgttctgggacccgtaccacccaagcgacgccgcgaacgcgctcatcgcccgccggatcaccgacggcgagccggcggacatcttcccgatcaacgtgcgccagctgatcacgagctgataccgataattcggttgtagtactagccttcacgggctaggagtagtagaaggaacttgcaggatagctattgatttctgtccgtttggacgcatattttggggagacgcactgatggatatgtgcatgtgatgccattgatggactgttcgatct

SEQ ID NO: 2834 - DNA, 232 bp, Oryza sativa
  ref <308>: DATABASE ACCESSION NUMBER: AK060626
  ref <309>: DATABASE ENTRY DATE: 2001-12-06
tacattgaaatttgcctagtaagtccctttttttggactgcttgcgatgccgttcatctaaacttatgtctggttgaacggcttttggtttctaagcctgtacttgtaggaagtagtgttcaattcgatctcagttgtagctgtttatgatatttgtattgctattgtttgataccatattgttgtcaaattgattaatcgaatgaatatgtatgtcgatgcatttgaatcc

SEQ ID NO: 2835 - DNA, 226 bp, Oryza sativa
  ref <308>: DATABASE ACCESSION NUMBER: AK060627
  ref <309>: DATABASE ENTRY DATE: 2001-12-06
gagaaaaaaaagtttattctttttgctagccagtatactgctgaatttgatgccaggcgcacatttgcgaaagaaactgcggcaaacttggcaactttttagtatatgatcaaaacaaacgtgtacaatgtagcatttgtacgtgttgttgccagttggggaatacgactaccgtgtattggattcatgatttacatatatcagtattggttcatcatttgtcaac

SEQ ID NO: 2836 - DNA, 1597 bp, Oryza sativa
  ref <308>: DATABASE ACCESSION NUMBER: AK060628
  ref <309>: DATABASE ENTRY DATE: 2001-12-06
ggtcgtcaggctcgaggagcaggtggtcaatttccggcaaggactctaccaggaggccataatcttctcctcggccaagaacacgagcctccccggcggcgagggatgcgtgccggcgcagctcatgccgtcgagcccggtgccgaactcagaggtctctccggcaaattgtcattctcctcctactcgaccttcaatgaacggggtcgccggtgcaaagcaaacgccgagaaagccttctccttcggcggcggtggcgcaagacgaccgctccggcgccgggaaagagaaccagtcgtgcagtaacacaccggctagaaattgtcgccattcgccgctgctgcagaaggcatcaaaatccagactgccgacagcagcagcgcctgagaaacgcagggctactgctcagacgattagcacagtgccggaccgtaaaaggctcgcagacactgtcagcaataattcagaaaaagcttcccaagatgactcgagcgtgccgaacagattgtcggaggaactgttgagatgcctgctcgccatcttctcgcagatgggcggttcatcagcaagcggccaagacgaggagcaggcggcattgtctccttcggtttcaggttcttgcgagagctcagaggacgcataccctcaagatccttatggcatactggaattcggcacaagagacgttgggtcatacaagcgattccatgtaatcgacgccacctcgttcgatcagacggccatggagaacgacaccatgcttacccggaaactcaaggctttgatccggaggcttccatcggttgacctgacggggctctcccatcagcagaagctggcattctggatcaacatctacaattcgtgcatgatgaatgcatttctcgagcaagggatacctaccacccctcatatgctcgtggcaatgatgccgaaggcgacaataaatgtgggtgggcgcacgcacagcgccatgtcgatcgagcatttcatcctgcggctgccctacaacgtgaagcatgtgaatcctggtggagtgaccaagggcgccgccgacgacgtgacgatgcgaggcgtgttcgggctggagtggcctgagcccctggtcaccttcgcgctctcctgcggcagctggtcctcccctgctgtgagggtgtacacggcgcggggagtggaggaggagctggaggcggcgaagagggactacctgcagtcggcggtggtggtgtcggcgccggcgaaggtggcgatcccgaagctgctgcactggtacctcctcgacttcgccaaggacgtggactccctcatggactgggtgtgcctccagctgccgagcgagctgcggcagaaggcgatgaggatcgtggaggacggcagaaggggtgtcgccgccgagtcgcgccgcgtgcaggtcctgccgtacgaattcagattcaggtacctgctggcctcatgaagagaggccagtgagtagcagcaatcagcgagtgaattcgagggtgttttactgcaccttgtacacaggcttccaataattgtgagttttgttcttcggtgatgtgaatgaatgaaaggaagtataaaaggtgtttccacc

SEQ ID NO: 2837 - DNA, 271 bp, Oryza sativa
  ref <308>: DATABASE ACCESSION NUMBER: AK060629
  ref <309>: DATABASE ENTRY DATE: 2001-12-06
ctaggggttgtagacaagataaaaatgctgtagttgtgatgttaggcgcaagtgcgcaacttttaatggttggttgaaccccatgcttgccaagaggccaatgacatcatagttgtgtcggatgatgttgtagctagcctgttgatgtcttatttatttaggccatatgagcaaatgagttttgtagctaatgtgccggtctgtcagccctgcctggcaccattaagaaatcctgtttttcagagctcatattcctctgcgagtagagtat

SEQ ID NO: 2838 - DNA, 1888 bp, Oryza sativa
  ref <308>: DATABASE ACCESSION NUMBER: AK060630
  ref <309>: DATABASE ENTRY DATE: 2001-12-06
gcgtgcgtggctggctgaaggctgtgagagtgtgaggtctagctgtgcaatgtgcaggtgcagccatcgctgctgctgctgctgctctgctcttttcatgttgacacttcgctaaacccctcccaaaacctcctcccccccccccccccccgatgcgttcttggccagggtcgggagcgaggcgttcttgatttttttcttcttctgtttttgttcttgattgattggattggggagtgattcggtttgttcttgattttgattttttgttgttgttgttgttgtttggggagaaagagacgaaggggaagctgtgattttctcttcctttccaccgagagaaaattttttgatctgtttgttgtttcttggaatcggttttggttcaagaacaggcgccgccttttgttccgggaaattcgcttgtgatcctccgaaacccagaatttcttttttcgatccgttttgatcgattgaaagcaaatatcatcttgaaaaggatcgttcttgctggtgttggtttggggaggagggggaggttttccctctgacgagcaagcaaagcatttggggccgcctgtcgatgactgagggtttgatccgatgctgtcggggtgcacggtgtccagtctcgcggcgaggttcgccttcttcccgccggagccggcgacctacgccgtcaggaaggatgaggcgtgcggcggcggagggcggctggtggcgtcgggcgtcccgcgggacgccgccgtggacgtgctgctggtggacaccaggaaggggagcaaggtggtggccttctacctgaggaaccccgccgcccgcctcaccgtgctctactcgcacggcaacgccgccgacctcggccagctctacgacctcttcgtgcagctcaaggtcaatctcaaggtcaatctgatgggatatgactactctgggtatggagcatctactggcaagccaagtgaagagaatacatatgcagacattgaggcagtttaccagtgcttagaaacagagtatggaatcagtcaggaagaccttatcttgtatggacaatctgttggcagtggacctacattgcatttagcttcccgtttaccaagattgcgtggcgtggttcttcatagcgctatactgtcaggcctccgagttgtttgccatgtgaactttactttctgctttgacatctacaaaaatgtgaagaaaatcaaaaaggttaaatccccagtgcttgttattcatggaactgatgatgatgtcgtgaactggtcgcatggtaacgagctgtggaaactggcgagggagccttacgatccgctatggatcaaaggaggaggccattgcaacctggagctgtacccggacttcatccgccacctctccaagttcatccgcgagatggagaacatcacaacgaagacaaggcttaagaagatccggcagtccctgcaacccgcacctaagaaggtccaccaccgggcgagcaccgggacgaccaccaccttcaccaccaactgctgctgccgcatccgggtccgcaaaccgagttgccgttgccctggctgcaacctaagctgcggctgctgctctggtctgatgagttgcttctcatcccggctgttcaagtgctcaacctgcttctcctcctgcagctgcaggggatgcttcaagtgcccaacctgcttctccttctcctgcagctgctgcaggagctgcctcaagtgcccaaccttcaaatgctgctgctgcggttcatgcagagatgagcaataatgcaaatctctatgtgcttgtgtataggaaaaagagtggttccgatatatctgacaagtttaattctgtagaaactagaccttggttctcttagctaaacaaaccatagcaagat

SEQ ID NO: 2839 - DNA, 948 bp, Oryza sativa
  ref <308>: DATABASE ACCESSION NUMBER: AK104322
  ref <309>: DATABASE ENTRY DATE: 2002-08-28
aaccgcacgcacccgagccccactgcaatcccacctccccaactccgccgcacgcatccccgcacccgccaccatggctcgccggagcggcctaatgctactactcctcgccgccgccgctgtcgcctccgcggccgtgccgccgtcgtgcgagcgcatcgagtgcccgtcgtacgaggtggtggacagcgccaacgggttcgagatccggcggtacagcgacgccatgtgggcttccaccgcccccatcgaggacatctccttcgtcgccgccacccgcaccggcttcctccagttgttcaactacatccaggggaagaacgcgtacaacgagacgatcgagatgacggcgccggtgctgacgcaggtggcgccgagcgacgggccgttctgcgtctcctccttcgtggtcagcttctacgtgccggcgaagaaccagccggacccgccgccggcggaggggctgcacgtgcagaggtgggccggggccaggtacgccgctgtgcgccgcttcggcggcttcgtggccgactccgacgtcggcgagcaggccgcgctgctcgacgccagcctgcaggggaccaggtgggccgccgccgtgtccgacgggcgcagggccgacccgacgtcgtcgtacacggtggcgcagtacaactcgccgttcgagttcagcggcagggtcaacgagatatggatgctcttcgacgcgaaggatgcatccgacatgtaacgcgatgagcgcgcggcaattccaaatcttcaaatgttcaccggagtagtagactcgatcgcacagctagtgtaatcttcaagctcctggtcggaagaataatggcatcttaaagccctaaactgctcgagtgaactgtttttttgcactgtaaagtatgtagttgagttgtgactcgtgcgtatcgagattaacaacaataaaagttctgtttagtc

SEQ ID NO: 2840 - DNA, 1165 bp, Oryza sativa
  ref <308>: DATABASE ACCESSION NUMBER: AK060631
  ref <309>: DATABASE ENTRY DATE: 2001-12-06
acgatcgtccaaaatagggaagagggagggggttcttcttctcctcgatccggttgaggactttgaggtagagagaggcagaggcgacgaggaaggatctgatctatcgatggcgcgcgtttcgcattccagaaagcggactagggctccctccaactccaactccaagcccacttcacaaacccaaccgccgccgccggagctcaccgaccgccctgtccgcgtctacgccgacggcatcttcgatctcttccacttcggccatgcccgcgccctcgagcaggccaagttgctgttccccaacacgtacctgctagtgggctgctgcaacgacgagctcaccaaccgctacaagggcaagaccgtcatgacccaggatgagcgatacgagtcccttcgccactgcaaatgggttgatgaggtcattcctgatgctccatgggtcctcacgcaagagttcattgacaaacatcagattgactatgttgctcatgatgcactgccttatgccgatactagtggagctgctaatgatgtctatgaatttgttaaaaagattggcaaattcaaggaaacgaaacggacagacggtgtatccacatcagacctcataatgaggatattgaaggactacaatcagtatgtcatgaggaatttagcacgtggatacacaaggaaagatttaggcgtaagctatgttaaggaaaagcaactccaggtcaacatgaagataaataaactgcgagagactgtaaaggcgcatcaagaaaagttgcaaacggtggcgaagacagctggaataaatcatgaaaaatggttggccaatgcagatcgctgggttgctggtttcttggagaagtttgaggaacactgccacaacatggaaactgccatcaaggggcgtatccaggagaaattgaggaggcaaacaagcagagggataattgggggtctaatgcagcaaccggtggcagcgtaataagttgtagaggagagatgacgttgagttggagtaagctgccctggggtcaccacggacgagaaatgtagtgaagatgccttcttggttggcggttatagtgtgagtgtgtgcttgtgtcatggaatgtgatgcttgtacgagttgttacagcttaattacatgggagaggctttgtttcttgtt

SEQ ID NO: 2841 - DNA, 280 bp, Oryza sativa
  ref <308>: DATABASE ACCESSION NUMBER: AK060632
  ref <309>: DATABASE ENTRY DATE: 2001-12-06
gatgccgcaagagaggctgataagctagccagcaaatcgcctgtgccagttaacaccaaggagcacggagagaatgtaaagaagccggcaaatggtgagaaatagcatgcctttgatgattctttacctgtacagtagctacgctattcggctgaggccatgaaccgatcctactcaatttttgttttcgcggttcatctccgatgcgttgcaatggatacacgcgaaaaggatcttgatcgtctacgtaataaaaaacaccacctcatatttttgtatc

SEQ ID NO: 2842 - DNA, 1376 bp, Oryza sativa
  ref <308>: DATABASE ACCESSION NUMBER: AK060633
  ref <309>: DATABASE ENTRY DATE: 2001-12-06
aagaggcgtgcaatgtcgcggccgccgtcgccgatgctctccgtcccggagaagaagacggccgccaccgagctcttccgggaccgccacttcttcaactcggccttcttcaccgacctccgggaggcacgcgcttccctctccgctccgagctcccaggcgacgacccaggacgccgcctcccgccgcgcgctcctactccggtaccaccgcctcctcgcctccgcgcgcgacgacccctgcgacttcgacgacgacctcgccttcacctggcacgacgccttcaggccccacctcaggcgcaccgcggcgtccctccgcttcgagaaggccgccgtcgtgttcaacgtcggcgccgcctcgtcgaggatcgcggcggccgtcgaccgggcggcggtgggcggggtcaaggctgcgtgcggggagttccagcgcgccgcgggggcgttcagagcggcgggggagatgatggagggggaggaggaggacacggaggacacggtggatatgggccccgaggcctccgcgatgctggagcggctcatgctcgcgcaggcgcaggagtgctgcttcgagcgcgctctcgccgcggggacgtcgtcagcggcttgctccaaggtcgccaagcaggctgccttgtattatgaagaagcttatgcttcactggttatccctccactacaaaaccactttgagagatcttgggtagcacacatcctgttaaaggctgctctattcaatgcagaagctagctatcactatgctattgaactgcatgagaaaacagaaatcggtgaagagatagctcgattacagtttggaattaatgcaattgtcgatgcaaagaaagctgtccgtggagccccaggatccctttatgatgctgcctccagactcgaacaagatatgaaccagaacttggagagagcactgaatgagaacaaccgcatctatcttctgcgagtcccagcagccaaactactagctcctctgccagcagcttcacttgtccggtctgcttccctgagtgagatcttagatgtgaagacagaaaccggtaatcaatcatcgtaaggaaacccttcacgttgcaaaaggaaggaatcacatgtgtcagtgccactgcatttgcatgttaaagatcgtctgctgcagtgaattgcagggtcgattacgatttgtttgtttacttgctgggggtgtaaatagccacaggaacctgcactggcgattacatgggttgttactatgatttaccataccatctttgtgggctcgttattgtagacaacatggatggttcatctacatgccacttaacattttgcaagaatattatgaggtagtgccttattttgttagccattttggcaact

SEQ ID NO: 2843 - DNA, 1380 bp, Oryza sativa
  ref <308>: DATABASE ACCESSION NUMBER: AK060634
  ref <309>: DATABASE ENTRY DATE: 2001-12-06
cccgccgcagagcccacctccctcccctctctctctctctctcctaccctaccaccatggcgtccgccgagacccccaaccccgacgccgaaatccccaacaccgacgccgccgccgccgccgacccagctgccgccgccccagctgccgccgccaccgaccccgccgccgctggatcgccgtcgcccccgctcccgccacgcaaacgccgcctctcccctacgccctcccccacccgccgctcctcccgctcccgctcccgctccccgcgccgcggccgcagccgcagccgctcccggagcaggagccgcgggcggagcgccagcccgcggtaccccgatgggaagcggaggcggcacaacgacctcaacgtcgaggtgtgccgcgacttcctccgcgacaggcgcgcccgcgccgacatcgagtgcaagtacgcgcacccgcaccccaccgtcgccgtcgacagggacagcaaggtgacggcgtgcgcggactcgctgcggaacaactgcttccggggaaggacctgccgctactaccacccgccccctcatatccaggagtcattattgagatcaattggtgtggaagacccaaaggtgaagatgcaggtttgcagagattttacacgtggacgatgttcaagatcagcaaacgagtgccgattcttgcaccattcaccccttgaggattgtgcaattgtttgccaagatttcttgcgtgggaggtgtgatcgtaaatcatgtagatactctcatgttatggcccatccaatgccacccccaatgagggatattcccatgcaataccctgatatggtttacatgccaccaccagcaccccttggagtacctatgatgatgcctcccccttcagcccctgcagccttttctggtaataactacggagtggaagtttgcagggactacttgaagaacatgtgtaatagagaatcctgcagatttgcacacccggatttgaataatgaggtgatgaatacccaagttgaagtttgccgtgattttaagcgaggagaatgcaatcgacctgcctgtcgcttttaccatccacctgcaagctcaaattctattggataaatattgagtgccctgccctgctgccgctgctaccgctctgctgctgctaaatctgctactgctgccaaagagctgctgcgctggctgttgtgctgcttgctaagatgtcatagacaatgaaaagcctaaaaaagttctatgtaacagaagagattatcatcgtgtgatgtttcagaggttgcttaaacttgactcagttctttctctctttaaaaaggggattgcacgagtggttgtgtactagccttcataaagatgttttaattttgagtttgccgtctgc

SEQ ID NO: 2844 - DNA, 1695 bp, Oryza sativa
  ref <308>: DATABASE ACCESSION NUMBER: AK060635
  ref <309>: DATABASE ENTRY DATE: 2001-12-06
tacaagatgtatcaatgtttcactgatgcaacaacgaggggactccttgctgataatgggatctccatttggcatattatcacctgtccacttcttcaatagtatatcagttggtgttgttgcaaattgcctccctccaggcactgccaggggctcattgctgatggctgatgtccactgtcttcctggtatggaaggtgctccagtgtttgacaaaaactcttgccttgtggggatgctgatgaagccattaagacagagaggcagcagcacagaagttcagcttgtaattacctgggatgcaatctgcaatgcatggaacagtgacaagctggaaagaattggccatcccccaagtgaattagttgatgacaaaagttcagattgtaaatataaggaatcatgcgttgcagataagcataggaggtttgtccctaattcagccaacaatcttaatcagtatgacgtttcaccttcactcacagaagctatatcctcagttgttcttgtcacggttagtgagacatcttgggcttcagggattatcctcaataaaaatggcttaattatgacaaatgcacatcttttggaaccttggaggtttggaagaacttcgccgttaggcttgcaaaacaaaattgcctcatttagtgaacacatctgtggaggagaaaacaatctgctgcagccacaacaatgcaaagtttcaaatgaagatgctgtaaaacatgaactttcattgtttaattttggattaaaaaaggacagggcaatatcggttcgtttggatcatggagagaggaagacatggtgcaatgctagtgtagtttttatctcaaaaggtccacttgatgttgccttgcttcaaatggaaaaaactccaattgaattatgtgccattagaccagaatttgtttgtccaacagcaggctcatctgtatatgtggttggacatggccttcttggacctcgatcaggactatcctcctccctttcctctggagtggtatcaaagattgtcaaaatcccatcaactcaacattcccaactgtctagcgttgtggaggttaacaatatggacataccggtaatgctgcagacaacagcagcagttcacccaggggcaagtggcggtgttcttcttgattcgcttggccgaatggtggggctaataacaagcaatgctaagcatggtggtgggagcacaatacctcatctgaatttcagcatcccctgtaaatctttggaaatggtcttcaagtactcagcaaaaggagacttcaaaattttggagcagttggacaaacccaatgaagtgctctcatccgtatgggcactggcaccaacatcatccccttttttcagtacctccccagaaaatggtagagggggaaaagttctggagttctcaaagtttcttgctgataaacaagaaggtttgaaatctataaaagatatagaggcattccttagagacaggattcccagcaaaatttagatgggaatgtttcgcaaagcacaggtatagaggtccggtggttacttcattgggtatatgctgaaaacctggttcagattaccccttccaaactgttagctgcatacaccattttgaaacatataaattgacaaattgtaacgttgaagccatctccaggaatgtagttaaatttacaggcatgtacagtttgtact

SEQ ID NO: 2845 - DNA, 206 bp, Oryza sativa
  ref <308>: DATABASE ACCESSION NUMBER: AK060636
  ref <309>: DATABASE ENTRY DATE: 2001-12-06
aaaaaaggctgtttaatcgtaatagaaagttccccagtaatttgttgacttttgatgagtttgctttgtgtatggtgaatatgttgctgagaggaccctttgttattcatggtgtgggagtctataaataatagctatacagggtgtttgttgtcgacttgtgaaatctgctatttgttctccacaatccacattatctactcagt

SEQ ID NO: 2846 - DNA, 2290 bp, Oryza sativa
  ref <308>: DATABASE ACCESSION NUMBER: AK060637
  ref <309>: DATABASE ENTRY DATE: 2001-12-06
tcgtagatgcattcaaattttatctcggagaacaaagaataatccagttttgattggtgaacctggtgtggggaaaactgctatagctgaagggcttgctcagaggatagtgcaaggagatgttccgcaagctctaacaaaccgcagactaattgcacttgacatgggtgctttgattgctggggcaaaatatcgtggggaatttgaggataggctgaaggctgtactcaaggaagtcacagattctgatggacaaaccattcttttcattgatgagattcacactgttgttggagcaggtgcaacaaatggtgccatggacgctggtaatcttctaaaaccgatgcttggtaggggagagctacgttgtatcggtgccacaacccttgacgagtaccgcaaatatactgagaaggatcctgcattggagcgtcgcttccaacaagtttatgttgatcaaccttcagttgaagatacaatctcaatactccgtggattacgggagagatatgaattgcaccatggggtacgcatatcagacagtgcacttgtggcagcagctcttctctcagaccgttacattagtggacgatttctgccggacaaagcaattgatttggttgatgagtcagctgccaaattgaaaatggagataacttccaagccaactgctctagatgagattgatcgtgctgtaataaagcttgaaatggaacgtctctcactaacaaacgatacagacaaagcatcaagggacagactatctcgaattgaagcagaactgtcactattgaaagaaaagcagaaggacctgactgagcagtgggagcgtgagaagtcggtgatgactaagattcaatctattaaagaagagattgatagggtcaatgtggagatccagcaggccgaacgtgagtatgatctcaatcgtgctgctgaactgaagtatggcagtctgagcgcattgcagcgccagcttcaaacaacagagaaagagctagatgaatatcaaagttctgggaaatccatgctaagagaagaggtcacccaagatgatattgcagaaatagtgagcaggtggactggtattccagtatctaaactaaagcaatctgatagggagaagttgctgtatctagaggaagaactgcacaagcgtgttgttgggcaggatcctgcagtcaaagcagtttctgaggctattcagagatccagggctggtttgtccgatccaaatcgccccattgccagtttcatgttcatgagccctacaggagttggcaaaacggaactagcaaaagcccttgctgcttttatgctcaacactgaggaagctgttgttaggattgacatgagtgaatacatggagaagcattctgtctcaagactgattggtgcaccaccaggctatgttgggtatgaagagggtggtcagcttacggaagctgttcgtcggaggccatattccattatcttgtttgatgagattgagaaagcccatggagatgtattcaatgttttccttcaaatattggacgatggaagggttactgactcgcagggcaggaaagtgagcttcaccaacagtatcattatcatgacatccaatgttggttcacagttcatactaaacatggatgaagaaggtgggtcaactgattcagcctatgagaatataaagaagagggtgatggatgctgcaagatctgttttccgtccggagttcatgaatcggattgatgagtacattgtcttcaagccacttgagagggaacagatcaacagcattgtcaaattacagcttgcaagagtacaaaaaagaattgccgatcgcaagatcaaactcgaagtgtcgcctggagcagtcgaattcctgggaagccttggttacgatccgaattacggtgccaggccagtgaagcgagtgattcaacagtatgtggagaacgagctggcgaagggtatcctgagaggtgatttcaaggacgaggacagcatcctggtagacacccaggtcaccgtgccatctaatggtcagctccctcagcaaaagctcgttttccacaaaatgagtgaagaatccgcaccagctgctgctgaagacgagaaatttttgccggctgtttgatgggccgaacttttagcagatgaggaataaaatgtagatagaagattagcaaacttgagtggatagcatagtatacagacacaatttcccttgctagttcaacattacataagcacaaagtctgtgctgagaaatgttattttgtctctaatatttccagcg

SEQ ID NO: 2847 - DNA, 1464 bp, Oryza sativa
  ref <308>: DATABASE ACCESSION NUMBER: AK060638
  ref <309>: DATABASE ENTRY DATE: 2001-12-06
agctgagcagagagctccaccgccgccggccaccatgagttctcaccaccgctacgcccacctcctcgacgaccccttcttccccttcccaccgccgtcctcctcctcctgccccttcctctccccacccgccgcttcctccacctgcccattcttcgccctcgactcccccttcgctgctgaccctttccatctccaccccttcctccccacgccgcccactagctccctcctcgaccccttcctcctccacaccctcaccgaccgcgtctcccaactcgagctcgccctcgccgcccgcgccccacaccccaggcccaccagcaggaagtgcacctatgtcaccgagtccaccggccgcaaggtcaagtggaccaccgaggacaagcctcgcgccggcgagagggtgctcaagtgggaggctgagctcgactccccctacgacgatggattcgaccgcaagtggaagtgggaggccaaggccaagaccgcctccgctgctgccaccaagctcaagtgggccacccacctcaagggcaagggttgcctcgagccatggtcacactcctacacctgggaggaggacttctctgccaccgacgacgacgacgacgaggagatcgaggaccaactccatcacaaggccctgcaggatcacagcaagctcaaaaccaaggccaaggacgacaagaagaaaaagaagaaggacaacaacaccgtggtggtcaacaaggagcagaagaaatgccccttctccgtcaagatcgaggagatcccacctgaggaggacaacaccgctggatgcgtcgccattagaaaggcttttgcattgggcaatggcaaggcaaagaagaaggaactgtccccacaggatgcggcattgctgatccagttgaactacagggctcacctggcacaccgttcacaggtgcttcgctgcctgcgtgatctggctgtggctaaggccaagctcaaggagatcagatgcgcttgagggtcctgactacatggtgaggacagcaaagaagtctatgcttgatgaacttgaaggtatgctggagattgtggaccctcagccaccagggaagcagaggtcgttgacccgcaggaagttcgatcttccagaaggagggccgatcacagatgagaagatggccggtgtgaacaatgcagtcaaagtcatccaaaagggaaagaagtaagaggccatatctcatctcgtctagtggttatcacgcatatgatggagcttgtagcactgtatcatcatcatcatcattgtagcactgtgataaccaccgttgttgttttcagtttgttgaggaacacattgtgcactatgcatggtagtctgattgtgctagctagcaagcactaagcagctgtttggtccggacgtccagccattttatttgctttgtactcgtatgctgttgttatccagatgttgttgttgctcttgtt

SEQ ID NO: 2848 - DNA, 1229 bp, Oryza sativa
  ref <308>: DATABASE ACCESSION NUMBER: AK060639
  ref <309>: DATABASE ENTRY DATE: 2001-12-06
acgccaacacacacgcactcgtacacatatactgcaaattaaaaagctagcttagccatggcacgtagcctctcgttgctgctactcctcgtcgcgtgcttcctcgtcgccggcgccaccgcggctcgcccggcgccgtcgacgagcggcgccgccgccatcagcagcttcgtgaggtcgtggtgcgcggggacgaagtaccccgccctgtgcgacgcgacgctggcgccgtactcggcggcggtgggggcgagcccggcgaagctggcgtgggcggcgctgacggtcaccctcagcgccgcccgcaacgcgacgtcggcggtgaggtccatcgcggcgaggtcgtcgtcgtcccatctcccgcccgtggcggcggaggcggccggggactgcgccagcgagctcggcgacggcgtggacgcgctgcggcggtgcgtggacgccatggcccgcgtcgccgtcggcgaggagtcgtcgtcgacggcggcggcggtgaggaggaaggtgaggttcgaggtggacaacgtgcggacgtgggccagcgcggcgctcaccgacgacaacatgtgcatggaagggttcaagggggaggccgccggcggcggcggcgccagggaggccgtccgcggccacatcatgggcctcctccacctcaccgcaaacgcgctcggcatcctcaacgccatggccaagcaaatataactcctccctagctagtagataactcagtgacatacatacccatgtacgtacgtcgagcacaagcacagcacagcaacagggtgagaaaagatctcttgatgtgttcaacgaaaagaacaaaaacgtctcatgtatcaggcacaaatatctgcagagtgcataagcaaagcacagactgaagttgatttggttcttaggacaattaatgtgaagggctgaaggcaataatgcaagtcgatctactgctaaaccacaggagcacaacacaatagatagacaaagttagttatgagtcacagtcagaaatcagaataatgcatgccaacatgcatggtagattggtagtacactcaaagttgtccatggaattgttgccatcctttgtgtaatagtgtaggtaaggcttaaactgatcatttgtgtgcacactggtgctgcattgtacttgactgttagtacttagtagagtctattaccttcagctgtctttgctgagaacatcaggccccagagcgagttcagcaatc

SEQ ID NO: 2849 - DNA, 1261 bp, Oryza sativa
  ref <308>: DATABASE ACCESSION NUMBER: AK060640
  ref <309>: DATABASE ENTRY DATE: 2001-12-06
aatgccgttcccgccgggccgcgcagcctcggcctccacgaagctcctcacgtctccacccttgtacaactagtacaacctgggtccactccgacggcggcctcgcccactttaaaccaccccctccgcctcgctccccttcctcccaccagccaccactcgcaaagctcgacctcgctcgccatggccgccgcgctcctctcgctcctcatcctggtgccgcccatcgggctcctcgcggcgctagcgttcctggcgcggcctagggcggcgcggatcccgctcaagggccggcacgtgctcatcaccggggggtccagcggcatcgggctcgccatggccacggcggcggcgagggagggggcgcgggtgtccatcctggcccggaacgccgcaaggctggaggaggcgcgcggcgccatccgggccgccacggggcgggacgtcggggtccacgccgccgacgtgcgggacgccgacgccgtggcgcgcgcgctcgccgaggcgggccccgtcgacgtcctcgtctgcaaccacggcgtgttcgtcccgcaggagctggagaagcaggagatggaggaggtcaagtggatggtggacatcaacctcatgggcaccttccacctcgtcaaggcggcgctccccgccatgaaggaacgcacaaaggagacgcgcctcccggcgtccatcgccatcatgtcctcacaggccggccaggttggagtttatgggtacaccgcttactcagcgagcaaatttgcgcttcgtggattgggtgaggccttgcagcatgaggttattgcggacaacattcatgtctcgttgatcttccctcctgacacagagacaccgggtttcgctgaagagaataaaaggaggccagagttgaccaatatcatagcaggatcatctggtggcatgaaagctgatgatgttgctaggaaggctttagatggcatcaaatccggaaagtttattgtaccctgcaatttcgagggagcaatgttagctgtagctactgctggtctatccccacagagttccccgctaacagcattcctggagattattggtgctggagtcatgcgatttgcagcaatttgcttccaatttaattggttcatgaccatcgagaactggtatgccaagaacaagaagcatgcgtgaaaggataagccgaacctgtgttcaagtcctccattgagaaattgtagaagttacaatgcaacaataaattaacttgttagttccagctgaactg

SEQ ID NO: 2850 - DNA, 961 bp, Oryza sativa
  ref <308>: DATABASE ACCESSION NUMBER: AK060641
  ref <309>: DATABASE ENTRY DATE: 2001-12-06
gaggtactaaagaaatttggtcgcaatatcggacttaaactaactgctgtgagggcatattcaaagcagcttttcatcgccctgaagcatctgaaaaactgcaaagtgctgcactgtgatataaagccagataatatgctggtgaatgaggctaagaatgtgctgaagctctgtgattttggcaatgcaatgcttgctggaatgaacgaggttacaccttatcttgtgagccgtttctatcgtgcacctgagataattcttgggttaccctacgaccacccattagacatgtggtcagttggctgctgtctatatgaactttacaccggaaaagtcctatttccaggtccatcaaataatgacatgcttcggcttcatatggaactgaagggccccttccccaagaaaatgcttcgaaagggtgcctttacgatgcaacattttgaccaagatctcaactttcatgccactgaggaggatcctgtgactaaaaaggctgtgacaaggatgattttgaacattaagccaaaggatattggttccttgatttcaaacttccctggcgaggatccaaaaatgctatccaactttaaagatcttcttgaaaaaatatttgtcttagatccagaaaagaggataaccatatcacaagcacttagccatccatttatcactggcaagtgaaaagatgttgattactcttggcattgctaacttagcataccttgtaaactacattttgggtcgctcttgtctaatcattggcatttctgtcttgtgtcctcggagctatgagatcagagtatgtgggcgaagctcggaaatatggaagagatggctgtcttacagaccttggtgcatgcagttatcatttggatatgttctgttgcttgtaagacaactggccagctggcatttcattacctgtatacattctttcctatggatttgcaagatatac

SEQ ID NO: 2851 - DNA, 1620 bp, Oryza sativa
  ref <308>: DATABASE ACCESSION NUMBER: AK060642
  ref <309>: DATABASE ENTRY DATE: 2001-12-06
atccactcgattcgatccaatccggcgaggtacaggatgctgccggggtcggcggcgccggcggctgggagcggcatgttcgtgccaacgcagacggtgggcacggtgctgtgctgcatctgcggcgtggcgatgcagcccaacccggccaacatgtgcgcgcgctgcatccgcgcccgcgtcgacatcaccgagggcgtcccgcgccacgccgccgtcgtctactgccccgactgcacctcctacctccagccgccgcgctcctggctccgcgccggcccggagtcccccgagctcatgcagatcctcctccgccgcctcaaccgccccctcgcccgcctccgcgtctccctctccgccgccgagttcgtcttctccgagccccactccaagcgcctccgcctcaagctccgcctccgccgcgaggtcttcaacgccgtcgtcctcgagcagacccaccccgtcgagttcaccgtccacgatcgcctctgcgatgcctgcgcccgcgcccagtccaaccccgaccagtgggtcgccgtcgtccagctccgccagcacgtcccgcaccgccgcaccttcctctacctcgagcagctcctcctcaagcacggccaggcctccctcgccctccgcgtcgccgccgcccccggcggcctcgacttcttcttcggctcccgctcgcacgccgcccgcctcgtcgacttcctcgccaccgtcgcccccgtccagacccagaccgccaagcagctcgtctcccacgacaccaagagcaacgtctacaactacaagcacaccttctccgtcgagatctgccccatctgccgggaggacctcatcgcccttagccctcaggtgtcccgcgatcttggaggccttggacctatcgtcctctgcatcaaggtcaccaatgccatcgctctgcttgaccccctcaccctgcgtgtgcaccacctcgaggaaaagaagtacagggtctacaacttcaaggctgctctcaccagcaagcagctcgtcgagtacatcgtgctagacatcgagcacgagtcaccagagattaccattgacggatctcgctaccagttggcttatgcccaggtcgcccgggtctccgactttgggaaaaacgacaccatgttcaccgtgcggactcatcttggccacctgctgaatcctggagaccttgcccttgggtatgatctttatggtgccaacttgaatgatgatgacatggacacagctatgatgcgccacagtctgcctgaagtcattcttgttaagaagagcttcgccaagaggccacgcacacgccgatggaagctgaagaggcttccaatggaggaagatgctgtaaataaggccaagggggagctagagaagagggctgatgagtatgaggagtttctcagggacttggagcacaactctgatattagattccagattgatctatacaaggatgaggactacaggtcggagatggcatctactattggtgatgatgttcccactgtgccgattgaggaactaattgaggacctaagtcttggtgatgatgaggaggaggatgaaggtggggaaggcaaccaacatgctgttatggtgggatgagttaatatgttt

SEQ ID NO: 2852 - DNA, 1397 bp, Oryza sativa
  ref <308>: DATABASE ACCESSION NUMBER: AK060643
  ref <309>: DATABASE ENTRY DATE: 2001-12-06
ctcatcgtggtacactcaagaggctaaagaaagctatggatggtttagacaaggctgctgcaggtaccacaaaatttcttgaagttgtgagatgcatcaatggagccacctctagcagtcaaaagctgggacatttggctagcagcaatgatcgtcagacaggttccatgttaacggtagataagtttgttggccgagaatcagagaagaaaaggattcttgagtggttgaccaaggacacatcagttaaagagtctgaaattgtgcctagtgctaatcatgttcctatcttcccagtaattggtcatggtggtatggggaagactactttggctcagagcatatgccaacaagatgaggttgtaaagcatttcaaggtcatttggattactgtatcaactagttttgatgcaacctcagtgacaaggaaaattttggaatctgctacaaagggagaacctagcaataaacatttggaagcactacagcaagaacttaaagagaaactaaactctgttaagttccttcttgtcatggatgacgtttgggaagaagggaaaagagatgaatgggaaaagttgtttgctcctctgcggtccggaaagaatgggagcagaattctgttgacaacccgtatggcatccgtggcagacatggctgcaaaagcaatgggagttgcaagagattgcttgatattaggagaactggaagaagacgaaaatattgaactcttcaatcatcatgtattttctagtttgaatttgcaggactatagccacttcaaaaagactggagaacaaattgcaaggaaactgggaggatgtcccttggtaattaaggtcacctgtggacatttgcaaggtaacatgagcgttgcatactgggaaaatttcttgcacatacacttggaacattttaaagggtctgacattgacattatgaaggttctcaaattaagctaccaacatcttccaactgagttacagatttgctttaggttttgtagcttatttcctgaggaccacaaatttcgcaaggaagatcttgtgcatatgtggatgtgttcaggattgatcccgcaggccacaaatgagacactaaatttcgaggatattggagaacgaatattggctgacctaactagaaagtcattctttgatctaaagtccagagtatatagatatggtctagaccaagaagaatactatgatctaaagtccagagtatatagatatggtctagaccaagaagaatactatgtcatgcatgacttaatgcatgaattagcaagaaatgtatcctatggtgaatgcgcaagaataactagtcctgtcaagtttaaagatatacgggacacagtcagacacatatccattttatgcattcctcaattttct

SEQ ID NO: 2853 - DNA, 1533 bp, Oryza sativa
  ref <308>: DATABASE ACCESSION NUMBER: AK060644
  ref <309>: DATABASE ENTRY DATE: 2001-12-06
atgccttcccctgccgattccaccccctgctactaccagtctctctgccttccaagaaatggccaccgcgaagccagcctctccctcgccgccgccgagcaccgccgtcgtcccggccgccaataccgcagcagccgcggacaagccggcggtcgagcagctcctggaggtggcggaggacgaggtcgtcatcgacttcaagcccaacgccaagtgccgcgctgacctccgcctccgctcgctgcacccgtccctccccgtcgccttcaaggtccagacctcctcccctctcaagttcctcgtcagccccccgcgcggcgccgtgcagccgctctcgtcggcctccctccgcgtcgtgctccgcccgcagcagcacgctcccgcgtccttcccgcgctcccgaggcgaccgcttcctcgtgctctcctccctctccgccgcgcacctcgactcctccgcctcctccagcgccgctaccggcggcaccaccgccatccgcctccgcgtgttcttcggcgggccgtacctgctccgcctcgcggcggaagccggggacgccgcggccgtgcgcctcatcctgcgccggcagccgcacctcctgccgctcctggagcccgaggcggcggtgcccgacggcgccgagcagtgggcgccactgcacgcggtggccgcgaggggggacaccggggaggtgaggcgcctggggccggactcgatgggagcgcgcgaccgtgaggggaggaccgccctccacgttgccgccgcggccggggaggcggaggcggcggcggcgctggtggacatgggcgccgacgccgcggcgaccgacgcgcgcgggaggactccactggacgtcgcgcgcgagaagggctatcaagaagtggtggacgtcctggaacggtgggaactggtcatgacggcggcgaggcgaggcgacctccagagcctcgagtccctcctcagcaagcgcgccggcgtccggggacgtgaccagtacggcctgacggcgctccaccttgctgccatcaaagggcactgcgacgtgatcgcgctgctcgccgggtcaggctgcatggacatcgagtgcgaggacgtggaagggcaccgcccgctgcacctcgccgtcgaaggcggcagcgccgaggccgtcgagctgctgctcgacatgggcgccgaagtgcacgccgccaccaggcggggcgcgacgccgctccagatggccgtgacgatggggtacgaggccatcgcgctgctgctgcgaggccgtggcgccgacgaggcggccgcgccggcgttgtgcatcgcgtcctcgtcttcctcctcgatatcgtgtgcgtagattcgttgtgtccactgctcaatccagagttgttgtttatactttgtaatttgtaccaggagtctaggtgacagtattgtactgtatagttttatagtttacagaggtgattgttctgtttttgtcagtaactcttgttaagcaaagtgaatgtttgcatcggattcctttctttatagttcgatatggggaac

SEQ ID NO: 2854 - DNA, 1600 bp, Oryza sativa
  ref <308>: DATABASE ACCESSION NUMBER: AK060645
  ref <309>: DATABASE ENTRY DATE: 2001-12-06
gcttaatgtcacaagagacaccagtgattacctctggtacattacgagtgtggaggtagacccatctgagaagtttctacaaggtggcacgcctctgtcactcactgtgcagtctgctggccatgcgctgcatgtcttcatcaatgggcaactccaaggttctgcctatggaaccagggaagatcggaaaatctcatatagtggcaatgctaaccttcgtgctggtacaaacaaagttgcactgttgagtgttgcttgtggactgccgaatgtcggagtgcattatgagacgtggaacactggtgttgttggtcctgttgtgattcacgggttggacgaaggttcaagagatctgacttggcagacttggtcctatcaggttggcctgaaaggtgaacagatgaatctaaactccttagaaggctcaggctcagttgaatggatgcaaggatcattggtagcacaaaaccaacaaccgttggcatggtatagggcatactttgatactcccagtggtgacgagccactggctctggatatgggcagcatgggtaagggtcaaatatggataaatgggcaaagcattggacggtactggacagcatatgcggaaggtgactgcaaaggttgccattacactgggtcatacagggcacccaagtgtcaggcaggttgtggtcagcctacacagcgctggtatcatgtgccaagatcctggttgcaaccaactagaaatctgctagtggtttttgaggaacttggcggtgattcttcaaagattgcccttgcgaagcggacagtctcaggtgtctgtgctgatgtatctgaatatcatccaaatatcaagaactggcagatcgagagctatggggaaccagagttccacacggcaaaggtgcatttaaaatgtgcacctgggcagaccatttctgcaatcaaatttgctagctttgggacacctcttggaacttgcggaacattccagcaaggggagtgccattcaattaactcaaactctgttcttgaaaagaaatgcattggactacaaagatgtgtcgtcgcaatctctcccagcaactttggtggagatccctgcccggaggtgatgaaaagggtggcggttgaggcggtatgctctaccgctgcatggggcaatttctttgccgagacgaatttagagatggcaccaaacaggtgggcttgtgcttgatcaaagcacacagaaagcgatgcagagtagagttcaactgtaaagtatcgacgccacatagctgtggctggaggattagagatcgattctagcattcactcagtcgaatttcagattagaggattctaactctactgcatctccatgaattgttcagagtgaccaactgctaattgaagttggtcctgggatggagtgcagggagagtaaaggcaaaagattggtgcattcttttgctcgcgttagtgtgcgtgttgtgttgtttcatctttcttgaaaggaagaaagatgccgatgaattgtgcatgtgtcccatatgaggaatcgttgattgtgcagtgagcatgatatgctgcagaacaattgctcgtgtcatattctgaagttcag

SEQ ID NO: 2855 - DNA, 1417 bp, Oryza sativa
  ref <308>: DATABASE ACCESSION NUMBER: AK060646
  ref <309>: DATABASE ENTRY DATE: 2001-12-06
agaacaactgcagctagcgcttctatctgaaactctgaatatacacggatatttagggagtagaggagtgcagcaagcgcgcacgggcagaccatggatcagccgcatgaaccagccggcagcgagcctagcgaaaatgttcagaacatcgaggaagacaatgagtacctgaacaacaagcgcgggtggctgatggcggtggccacgctgttcgtgggcatggcattccaggcggcgatacagttgcctgcctggttccccgatgactggcctcaggcgtttagctcccacaacatgaagcatagcggtataatattccgagccacggtcgcctctgctccttccccgataagtcctcaacaacacgccgccaccaccctcaccgagggccaaatgagggggatacggtggtatatcatgttcaacacggtgaccttcacgattgccctggcgcttctgatcacgctggtggcggtagggaggtccttggctagtcattccatgagactcatgaatgccatattgttcacggtgatcattagcaccagttgcacctttgtcttggccatctcgagtgattggactgtcatcaggtggatgttacctgtgcttttggtccttggctcctataccctctttatcagcttagtatggcccaagatcatcgagtatcggaaggaaaagaaaagacagcgagaggctcaatcgaacacagcatcgccgccaccttaatttattttcaatgttcaggatctcttaatatcctaggtagtgttagtgttacaaactcatcactatcaaggtttatccctttgagaactgatgtacgtaacatgggatggtactagcccggagatcgagccttcagccttggatatgaatttgatcaagatgtgttgtcttacaaataacaggaaattcgcatggatgtgcatgatgcaaatgtagtgaatttatacttgatttgaacgtttgatgtcggcgatggttttgacagtgtttgagagagcactgacagtattctaccagaggtcaccggtcagaccaagagcatgtactacagagtttctgtgaattggagtattggaccaatcatgcaacaactttgtaaccgagaaacagggattgaggccatgggccattgcgttggatgatgattcaggagcctacagattggctctagactccacctctctctgaatccgccgccggtcgatgatatgcaaaccttggatgattgaatacagtttggtacaccttctcattctgccaaactcaaactcaccatgtacttcacctgctctgcgattgtaacttgttctcgacttcatgtgacagtctagctagttcagctagatatgatattgcagttttggcaaggaataccaaactagtaacagcagaataattataaaat

SEQ ID NO: 2856 - DNA, 944 bp, Oryza sativa
  ref <308>: DATABASE ACCESSION NUMBER: AK060647
  ref <309>: DATABASE ENTRY DATE: 2001-12-06
atatcttttttgccggtgcaaagctttggttcttggccggtggcggcggcgcgcatggcggcggacggcggcgcgctgaggcggctgttcgagaagccgctgccggtgccggagaacccgacgctgctggaggcgctgtcggcgtgcaaccatgtgcaccaccgcaagaagctcgtcgacacggcctccttcaccgagatcttcggcgagctccacttccaggagaagccggtggacgtcgccgccgccgcccggttcctgccgccgccgccgccgcctgttcgcgcggcgtcgtggatcgacgtcgccgacgacaagagcaaggacggctcgtccctggacgcgctgctccggccgaagtcgtccgccgtcaagaggagcgccagcttctgcctcaagagctccgagtcgtcgctgctgctctgcaccgaggggctcgggacggagagcacggtggacgccgacgacatggtcaaggacggcgacggcgacggcgaggccatccgccgtggcgaggaggagacggacggcgtggaggaggacgacggcgcggggagggagaagcggggcacgccgacgctggcaccgacgccgccgacgttcccgccgccgatacggtcgatcgggcgcggcgggaagccgtgcgtgtgcttccggtcgttccgggcggaggggaggttcgtgctgatggaggtggtgatccccgggaaggagctcctgcaggcgacgcgcgagggcggtcgcctcacgctgcgcttcgccaacgccgcggccgtgggcggcggcggcgaagcagacgacgatgtcaacgacgacgacgtcgatggcggcgagaccaagaatgcatgcgcagcaagagatgatatgctagctaataactgcacttgttaattaagaatttaagatggctgcaagttgcaacgaagaacttgatgcttttgaat

SEQ ID NO: 2857 - DNA, 1916 bp, Oryza sativa
  ref <308>: DATABASE ACCESSION NUMBER: AK104323
  ref <309>: DATABASE ENTRY DATE: 2002-08-28
acgcaacccgatccattcccaaatccctcctctcatcaactcgactctcggtcggcgtcaccggcgtcggaggcggaggcggaggcggcggccgcgtcggcaaggtagtgctgtgctggatcgagtcgagcagctggctgcgcgcgcggtttgtggctctctgtgtgagtccggcgctgctgcttcaattccttcttccccagggcacctcccgtgagccgccatctccctccctcacctacctctggattcgctccagatccgcccatgagtaggcccccacgcccaccgcctgctcgccatcgcgcctccactccaccacaccatgccgatccccaccacctctgacactactccgcccctccccctctctcattcccatggaggacctcgccctgcccgccgctcctcctgcccccacgcttagcttcacgctcttagccgccgccgccgccgtcgccgaggccatggaagaggctctgggcgccgcgctgccgcccctcaccgcccccgtccccgcccccggagacgactccgcctgcgggagcccgtgctccgtcgccagcgactgcagcagcgtcgccagcgccgacttcgagggcttcgccgagctaggcacttcgctcctcgcggggcccgccgtcttgttcgacgacctcaccgccgcctccgtcgccgtcgcggaggctgccgagccgagggctgtgggggccactgcgaggagcgtgttcgccatggactgcgttccgctctgggggctggagtccatttgcggccgccgcccggagatggaggacgactatgccgtggtcccgcgatttttcgaccttcctctgtggatggttgccggcgacgcggcagtcgacggcctcgaccgggcctccttccgccttccagcccatttcttcgccgtctacgatggccacggtggcgttcaggttgccaattactgcaggaagaggatccacgccgtactgacagaggagctgcgtagagcggaggacgacgcgtgtggctctgacttatctggccttgagcccaagaagctgtgggagaaggcgttcgtggattgcttcagtcgtgttgacgctgaggtgggaggaaatgctgcgtctggagcaccgcctgttgctccagacaccgtggggtcaactgctgtcgtcgcagtcgtttgctcgtcacatgtcatcgtagccaactgcggtgactcgcgtgctgttctctgccggggcaagcagcccctgcccctgtcactagatcataaaccaaatagggaagacgagtacgcgaggattgaggcgctgggtggcaaggttatccaatggaatggttatcgagttctcggtgttcttgccatgtcgcgatcaatcggggacaaatacctgaagccatatataatcccggtccctgaggtcacagttgtcgctcgtgcaaaagacgatgattgccttattcttgcaagtgatggcctttgggatgtaatgtcgaacgaagaggtctgtgatgctgctcgcaagaggatattactatggcacaagaagaatgcggccaccgcatcaacgtcatcggcccaaataagcggtgattcttcagatccggctgctcaagcagctgccgactacttgtccaagcttgccctacagaaggggagcaaggacaacatcactgtcgttgtaattgacctcaaggcacataggaagttcaagagcaaagcatgacattgcctccatgaacaataacaatagtttataggaagctagaaatgtgggaaatccaagacaatttatttagctgctgcaccggtacaatttgtttagctgctgttcagtactggtgctgctgcagctgcagctgcttctttgccctcgccatttatttctgccgagggatgtactactagtatactgtatttttct

SEQ ID NO: 2858 - DNA, 995 bp, Oryza sativa
  ref <308>: DATABASE ACCESSION NUMBER: AK104324
  ref <309>: DATABASE ENTRY DATE: 2002-08-28
attttgcctccccaaccaagcacaaacacaagcctcgccgtattctctcggagcaaagcgaacgcgaaaccccacccgcggcggcgagaaatccggcgacgatgagccgcggcacgggcgccggctacgaccgccacatcaccatcttctccccggagggccgcctctaccaagtcgagtacgcgttcaaggcggtgaagtcggcgggggtgacgtcgatcggcgtccgcggcaaggactccgtctgcgtcgtcacacagaagaaagtgccggacaagttgctggaccatacgagcgtcacgcacttgttcccgatcaccaagtacatcggtctgctcgccactggcctcacagctgatgcaaggtccttagtctaccaagcaaggaatgaggcagctgaattccgtttcaaatggggctatgagatgcccgtagacgtattagcaaaatggatagcagacaaagcacaagtctacacgcagcatgcctacatgaggccccttggagtagttgctatggtcttgggctatgacgaagagaaaaacgctcaactattcaaatgtgacccggcaggtcacttctttggacataaggcaactagcgccagtcttaaggagcaggaagcaataaattttctggagaagaaaatgaaggatgacccacagttctcctacgaggaaactgtccagattgcaatttctgcattgcaatcagttcttcaggaagatttcaaggccaccgagattgaggtcggtgttgtgaggaaagatgatcgtgttttcagagcactcacgacagaggagatcgatcagcacctaacagccataagtgagcgcgactgagctacaatgaagttggacatgttactgcttcacactgcactctagtctttcagcagtgtcattttatttcatgttcagccaagaaacattcagtgaaccatttcatgtaactccaaaaaacagtcatcagctttacttgttggatcatcctct

SEQ ID NO: 2859 - DNA, 1764 bp, Oryza sativa
  ref <308>: DATABASE ACCESSION NUMBER: AK060648
  ref <309>: DATABASE ENTRY DATE: 2001-12-06
gagagagagagagagagagagagagatttggtgttggataggagaagagagtggagacagtgggggtgagaggattggaagcatccagattctgaatctcctgcaagcctacttcctgttatcttctttgggctttcagcaagcatccattgtgatgcactggtcagtggatgataaagccatcaatcaactgaaccagcatgagctcccagagtgttgttgcagtgaagcagattactgctccggacaaaatagtggaaacctgtccatccacaaaacattctgcacataagctgttcgatgttaaaccggattttcaagggttgatagatgacaatttgtcatcctccagtcagtcctcaagcatcaagattgagctgatcagatcatcaagcttgccaaatatactgccgtttcagaaaagaagctctgaacctgaacctgaaagtccactgtctcatgtttcacatcccaatgtttcagagccagtttactcaaattcttcaaccttctgcacaagtttgttttcgtcgtcgtcgatggagacggagccgtgccggcaattgggcactctaccattcctgcctcaccctcctaagtgtgagcagcaggtttcagcagggcactcatcaagctcctccctgctagtacctggtggtgatggtgatattggcaatgctcatgatgaacctgaacagtcagatgatctgaaggatttcctcaatctctctggaggagatgcttctgatggcagcttccatggagaaaacaatgccatggcttttgctgagcagatggagttccagttcttgtctgagcagctagggattgccatcactgacaatgaggagagccctcggttagatgacatatacggcacgccgccgcaactttcatcacttccagtatcatcttgctccaaccagagtgtacagaaagcaggatctcctgtgaaagttcagcttagctcgcctcggtcatcttcgggatccgcgacaactaacaaggcgaggttgaggtggacactggagctccatgagcgttttgtagaggctgtgaacaagctagatggacctgaaaaggcaactcctaaaggtgtgctgaaacttatgaaagtagaaggcctgactatctaccatgtaaagagtcatttgcagaagtatcgcctcgcaaaatatctcccagagactaaggaagacaagaaggcatcctcagaggataagaaatctcagtcaggtagcagtggaaatgattcagtcaaaaagaagaacttacaagtggcagaagctctacgaatgcaaatggaggttcagaaacagcttcatgaacagttagaggtgcaaaggcaactgcagctgcgaatcgaagaacacgcaagatacctgcagagaatactggaagagcagcacaaggtcagcatcagcagcaactccctctcactgaaacccccagccgaatcgcaaccggaatcgccaaaaccaacatcagaaaagaaggaggccgaatccgaagcaggcgccgccacttcagctcagccatcatccgaggataaatcaccagacgcagaatgcaagtcgtcgccgccggtgggtagcaagagagctagggttcatgtcggcgatgagcaccagtgttcatagcttgtgtagagaggaagaaggcaaggatttctcagctgcatgcaaatgcatctctcttcttgagaattttagccactgtatataaatttggacttttggggaatgagaatctgaatttggaagc

SEQ ID NO: 2860 - DNA, 1377 bp, Oryza sativa
  ref <308>: DATABASE ACCESSION NUMBER: AK060649
  ref <309>: DATABASE ENTRY DATE: 2001-12-06
tcgctctcgctcgcctcccccttcgcatatcaccgcgcacgaacgcacgtcgcagctagcgggtcgtctcagctcggcgtggtgtcgttgaggtggtcggtagctaggtagctaggcgcgcgcggccccggccacgaagagagatgacgatgatgggcgggcagccgcagcagacaccgccgccgccgcaggtggtgcaggtgcagcaggcggcggcggcgttcggtgacacgacactgaccaaggtgttcgtgggaggactggcgtgggagacgcacaaggacacgctccgcgagcacttcgagcgcttcggcgacatcctcgaggccgtcatcatctccgacaagctcaccggccgctccaagggctacggattcgtgacgttcaaggaggcggacgcggccaagaaggcgtgcgaggacgccacaccggtcatcaacggccgccgcgccaactgcaacctcgcgtccctcggcgccaagccgcgcgcccagccgccgcacctcctccgcccctcgccgccggcaaccccggggccgcacgcccccgcgcttccctcccctcaccaccaccagcccgcgccagccatcgcggtggggtccaggggcgtgtcgccggtgccgtggtactaccacccctccacgacgccgcctccgccgccgccgccggccgcgcactacgccgcccatggcggccaccaccagcaataccacggcgttctccccttctaccccgccgccaccacctacgggtactccccgaactacgtcgctgacctgagctacaacgcgaagctaggccaggcggcagcggcgcatggcacgaacggggcctacctgcaggggcacttctcgtacccggcggcggcgcagggaggcatgctcgcggcgaacgggatgatacccgtgtacccgtactaccagtaccactaccatggcgcgcagggcctgggcgtccccgccgcccacttcttcccgccggtccggccgcagccgtcaccaccgtgcccgccatcatctccaagcccaccgtcatggcccctcccaaagtggagcaggtgacgggatgcagttgaaggggcacggcgacagtgcgaggaattaagaggaggccaaaggtgctctggcgattaacaagctgcacatgaagggttcgtccggttgtcggactaggctgcctattcgattcgtttaattcgctctaactcgtgcgtccatgggggcgcacgcccatcaaaaatctgtaacaagaaagattcaattcgtctctcgtttaccagcgtatttttcaatggtaaaccccttctttttccaagtgtctgtagtccagtcgctgcaggggacagtgaacctgaataaatcgtcataatctctcgtc

SEQ ID NO: 2861 - DNA, 1015 bp, Oryza sativa
  ref <308>: DATABASE ACCESSION NUMBER: AK060650
  ref <309>: DATABASE ENTRY DATE: 2001-12-06
gagacgatgctgctgaggagctcgtcgacgccgttcctgcactccttcctcccgccgtcgtcggcggcggctgcgccgtcctctctccagctgcggcgagccttctccgacggccacctgccttccctccacccgccctccgacggtggtggtggtagcaagaacaataccaccggcctccgcacggagctctccttctccatctacaacaccttcaacaagatggcgccgccgccgccgccggtgcaggagcaggaggaggctgagcagcagcaggcccccggggagccgaagctgccgctgttcttggcgagaggcctcgggatcgaccgcatcgcttccggcctgttcaccgccggcggcggcggcgacggcgacggcggcaacggtggcgctgggaggatgagcgccgtggaggaggagcacgccgagaaggtggcggcgctcgacgcgcagtacaagaggatgatggacgagcagccgggcgacgcgctgttcctgcgcaactacgcgcagttcctgcacgaggtgaagggcgacgcgaggagggcggaggagtactactcgcgcgccatgctggcggatcccagcgacggcgagatcatgtcgcagtacgccaagctggtgtgggaggtgcaccgcgatctggacagatccctcacctacttccacaagtccgtgcaggccgcgccgcacaacagcaatgtcctcgccgcgtacgccagcttcctgtgggaacaggacgacgacgacaacgacgacctcggagaaggcgagcaggacgtggccgtggcggcgcagccggggcatgtgaggcagctggcttccgtggccgtttgatccgtgcgagacgggctgacaacgtgctaaatgcgctgtgctttctactactaaatgcgctggtgcttacaaaccgaagaataaataataccgcggttggaagttggatgtaactatatcatgaagttctctttttcctttcacgaatcaaaaccgatgaatgtattttgcatct

SEQ ID NO: 2862 - DNA, 1348 bp, Oryza sativa
  ref <308>: DATABASE ACCESSION NUMBER: AK060651
  ref <309>: DATABASE ENTRY DATE: 2001-12-06
tggaggtagctttgtcaggagaagctacagggagggatatccaattgccgttgctggagatggtggagactgtggcggaagctcaggaagaagtttctgttccaggacctgaggaagaggagcaagagatgaagggcaggaggtcaagcaattgctgctccccatcgacagcactgaaggaggacaggaaactgcgacggttgagcagccgcagacgggtaggtagcagtagtagggcctcatcgggcagtgacagggttgggcggcggcacagcttctcagccgagacagaagcacgtcggtcaagcttctcgagcttgaaggactcaaggagagctagtttctccatcgacagggatggccgcagatggagcttctctattgagcaggaacatcttgttgcagagcctaaggtgctgatgggatccagaaagggccagaaaatttcatctgagccagagtcggaaaaagattgcgctgttcatgctgccccaaacagtgcagaggaaactcttgaatctcatgacgacggaaaggaagaagcaacattggatggacaggaagaaggaacaacacaagagacacaagttgatgagaagggtgagaaggtagaagtcggaggtgttgaggcacaagatgtggtcgaagaacagaagcagagaagaaagaaaagtggtgaattgccagattgcctcctcttgatgatgtatgagcctaagctctctatggaggtctccaaggagacatgggtctgcagcacggacttcgtccactggaagtcttaccagggccagaaccgccgcaaccgccgccaacaaaaggctggttgcaatgccgctccagcggaggagctcaaggatacagacaatgctgaaggaaccagtgatgctaagaacacagaagagagtgtagcgcctgcatcagcaaacttggtgtctatgccacctccggttgtgcagaaatcaccactcaaagaagctgcggagcagaagttcaagatagagctgccactggttactggcgctgcaacatatgcaccgtttgttctgaagcgctgcaaatccgagccgatgcgatcctcggcacggctggcgcccgatgcctgcttctggaaggaccggcataggcccctcaatgccaccggagttggcttttgattccagccgaacacaacctctggtatgcctagttagctaacgagtgagttgagagttttcaagctttgtcgtgtaatagtgatgaagttctttcatgcttggtgctgttatgtgatgtggacaaacaaataatagcatgttaagttacatcagatagattaggggggagtatatgtaaatctcttggggtt

SEQ ID NO: 2863 - DNA, 1242 bp, Oryza sativa
  ref <308>: DATABASE ACCESSION NUMBER: AK060652
  ref <309>: DATABASE ENTRY DATE: 2001-12-06
ctctcctctcccgcaacctccacctcctatccgccgccgccttcttcttcctcctcccacccgcgtaagctatccgccgccgcatcgcgtcgtcgacgaggagatggtggggccaggcctgtacccggagatcggcaagaaggccagggatctgctgtacagggactaccagaccgaccacaagttcaccctcaccacctacaccagcaatggcgtcgcaatcactgctaccagtacaaagaaggctgatctgatttttggtgagatccaatcacagataaagaacaagaacatcactgtagatgtgaaagcaaactcagactcaaatgttgttactactgtaaccgttgatgagctaacaccaggattgaagtccatcttgagctttgctgttccggatcaaagatctggaaagtttgagcttcaatactcgcatgattatgctggtgttagtgcaagtattggtttgactgccagtcctgtagtcaatctctccagtgtttttggaaccaaggctcttgctgttggtgctgatgtctcacttgataccgccacggggaacttgaccaaatataatgctggattgagcttcagtaatgatgatcttatcgcgtcattgaacctgaacaacaagggagatagtctcactgcatcttattaccacattgtgaaccattcggccacagctgttggagctgagctgacccacagcttctcgagcaacgagaactccctcaccttcggtacccagcacactctcgacccgcttaccgtcgtgaaggcccgcttcaacaattccggcaaggccagcgcgctgctccagcacgagtggaggccaaagtctgtgtggaccatctcagcagaagttgacaccaaggccattgacaagagctcaaaggtcggcattgcggtggccctcaagccttgatttttctcagggtgtacttacatttcaaagatgaaattgagatgagttgaaaaacatcttggcgcatgcgcatcttttggttgttgcagtctattagattccaagaactgccatgtttaatttgaggattttttttttctgttatcggtgttagcacttgttcaatgagcaacccttgcaccccaataattcaagctcggcaaaattatgaacttgcttctaggtgacaattttttgttactattttcacactgtcattgtccacactgtgcttgtggttatggtgctccaattaaactaactgtttatatgct

SEQ ID NO: 2864 - DNA, 1369 bp, Oryza sativa
  ref <308>: DATABASE ACCESSION NUMBER: AK060653
  ref <309>: DATABASE ENTRY DATE: 2001-12-06
aagccagctagtagccgccatcctccacgcctacaaagctcgcggccccgcaggtgcatgctccgctgcccgcctcctcgccgcctctgcctccgcctcggctcgccggtgtctacgatggcctccacgctcgccttcctcaggccctccgcgccggccccgctcgcagcctcgcgcggcgccgcgaggggcgtccccgcggccgtgagggtgccgtgcagatctagggtctcggcggccggcgtgtccctcggatcggaggtggcggtgggctccgacgcgctcttcgccgactacaagcccaccaccgcattcctcttccccggccagggtgctcagactgttgggatgggtgcagaagcagtgaatgttcctgcagctgccaaactatttgataaggcaaatgatatacttgggtatgacttgttggatttttgcaccaatggaccaaaagaaaagcttgactcgacagtaatcagtcagccagctatatatgtcaccagccttgcagccgtagaggtactacgctcacgtgatggaggccaaaatgtaattgactctgtagatgtcacatgcggtctcagcttaggggaatacactgcacttgcatttgctggtgcctttagctttgaggatggtctgaagcttgtcaagcttagaggagaagccatgcaggatgcttcagatgctgccagcagtgctatggtcagtgtgattggtctagattcagagaaggtgcagcaattatgcgatgctgctaacgaggaagtagatgaaaaggaaagagttcaaatagcaaactttctgtgtcctgggaactatgcagtttctggtggtgtgaaggggattgaagcagtcgaagccaaagcaaagtcctttaaggccagaatgacggtgcgcctagctgttgctggtgctttccatacaagcttcatgcaacctgctgtttcaagattggaatctgcattagctgagacagagataaaaacaccaagaatcccagttatctccaatgtggatgcatcaccccactcagatcctgacacaatcaagaagattttggcgcgacaggtaacttcccctgtgcaatgggagagtaccgtgaagactctgatgggtaaaggacttgagaaaagctatgaacttggtcctggaaaggttatagcaggaattcttaaaaggattgacaaaggcgcaagcattgagaacattggtgcatgagtttggaggtatcaagagtcaaagactatagggataataaggttagggagagcctgcaaattcaagcagtactccgaatgtatcaatgttagcccacatggctgttgtggcaaactggcaattgccgtctgaggaaacgatattgatt

SEQ ID NO: 2865 - DNA, 1702 bp, Oryza sativa
  ref <308>: DATABASE ACCESSION NUMBER: AK104325
  ref <309>: DATABASE ENTRY DATE: 2002-08-28
aactcatcagcacactcactctgcaacaagcatgcagacgccaaccatgtcgacgtccatggccacgccggcgaagctcccctcaccgccgtcgctgccgatagcgaggcaatgctgctgccacctgctgcagctagggcggcgcggcggcgcgggcgtggcgcgggcgtcggcgaagaagaagaacccgtggctggacccgttcgacgacgggcccgacgacgagttcgactaccgcggcgcgttctcgggggggaagcaggaggaggacccgcggccgccggaggacccggcgaacccgtacgggttcctgcggttcccggcggggtacaacccggagctggatagcctggcatccaaggtgcggcgcgacgtgcggcgggcgtgctgcgtggtgtccggcggggtgtacgagaacgtgctcttcttcccggtggtgcagctgctgcgggacaggtaccccggggtggtggtggacgtggtggcgtcggcgagggggaagcaggtgtacgagatgtgcaagaacgtcaggtacgccgacgtctacgaccccgacgacgactggcccgagcccgccgagtacacccaccagctcggcgtgctcaagaacaggtactatgatctgatcatatcgaccaagttggccgggatagggcacgcgctcttcctcttcatgtcgtcggcccgcgacaaggtcggctatgtttaccccaacgtcaacagcgccggcgccgggctgttcctcaccgagatgttccggccgccgaccaccaacctcgccgacagcggctacaacatgtatcaggacatgttggagtggattgggcggccagcgaagggtgtgccggagcacccggtaccgccgttgcgggtgtccatctccaagaagctccgagcgttcgtggaggacaaatatagccgtgccggcgtcgagaagggcaagttcgtcgtcgtccacggcatcgcctccgactccttcgccaacatgaggtcgaggggggacgatgactgcctcctccctctcgagcattgggctgagatcgccaaggagatcagctctgaagacaatggtctgaagcctctgtttgtgatccctcatcagaagcacagggaagaggttgaggagactgtggggaaggacaccaatatcctgttcatcaccactcctggccaactcacctgcctcatcaacgactccgtcggcgtcgtcgcgaccaacaccgccgccgtccagctcgccaacgccagggacaagccatgcgtggctctcttctcatccaaggagaaggcgaggctgttcctgccgtacttggaggagaagaagggctgcaccgtcgtcgcgtcggagaccgggaagctgatcgacatcgacgtcgaggccgtcaagaaggcggtgaaggagttcaaggccgccccaagcgttgcattggctcaaacatgatgaagaccatcatcttcttgttgcactgtacatagatctgcacggttacagtgagctcgcctgagcaagtgagcagcaaaagctccttgcctggctctgattcaatgtgtcttgtagtcgttcagttcagctacaaatgttccacatacaaccgcatgaaatgcccaaactcaccttgtctactgctcaccgagcagacaagcgatgcagcctgtgttactctgtttatagaatggaaatggcatacaccttgcacgtttt

SEQ ID NO: 2866 - DNA, 1127 bp, Oryza sativa
  ref <308>: DATABASE ACCESSION NUMBER: AK060654
  ref <309>: DATABASE ENTRY DATE: 2001-12-06
actcatccaccacccaaagacaaagcaagcaagtacagtagccatggcgaagcatctcgcgctgtccgtggccgccgcggtggccgtgtcgtggctggcggcgtcgtcggcggcggcggcggggttctacgagaagttcgacgtggtgggcgccggcgaccacgtgagggtggtgagcgacgacgggaagacgcagcaggtggcgctgacgctggaccggagctccgggtccgggttcacctccaaggacacctacctgttcggcgagttcagcgtccagatgaagctcgtcggcggcaactccgccggcaccgtcacctccttctacctctcctccggcgagggcgacggccacgacgagatcgacatcgagttcatgggcaacctcagcggcaacccctacgtcatgaacaccaacgtctgggctaatggcgacggcaagaaggagcaccagttctacctctggttcgaccccaccgccgacttccacacctacaagatcatctggaatccccaaaacatcatattccaggtggacgacgtgccggtgaggacgttcaagaagtacgacgacctggcgtacccgcagagcaagccgatgaggctgcacgcgacgctgtgggacggcagctactgggcgacgaggcacggcgacgtcaagatcgactggagcggcgcgccgttcgtggtgtcgtaccgcgggtacagcaccaacgcgtgcgtcaacaacaatcccgccggcgggtggtcgtcgtcgtggtgccccgagggcacgtcggcgtggatccaccgcgagctcgacggcgccgagctcggcaccgtcgcgtgggccgagcgcaactacatgtcctacaactactgcgccgacggctggcgcttcccccagggcttccccgccgagtgctaccgcaagtgattttgaactcgatcgattcaaatcctcctccattgatgagttcttggcaatgatttgtaattgcttcttgttcttgttttcgtcttcgtcttcgtcttcttcttcttgatccatgtacattttgccatccattcgttctccatttgttacagttacagagacaggttgatggtgaattactattgccgccaatttttttcttcttcttgtt

SEQ ID NO: 2867 - DNA, 1001 bp, Oryza sativa
  ref <308>: DATABASE ACCESSION NUMBER: AK060655
  ref <309>: DATABASE ENTRY DATE: 2001-12-06
accaccaccactccatcacagtctgctcattagctcgagacctggtcagctcgccgccatggcttctgccaagctgcttctcctggtcgccacctcgctcctgagctgcggcgtcatcctcgccgactacgcgccgatgacgctgaccatcgtgaacaactgcccatacccggtgtggccaggaatccaggccaactccggccacgacgtcctcgagggcggcggcttcttcctcccggcgctctcccaccgctccttcgccgcgccggcccacccttggtccggccgcatctgggcgcgcacgggctgcactggcgccggcgcgcagctccactgcgccacgggcgactgcggcgggcggctccagtgcgcgggcctcggcggcgcggcgcccgcgacgctggcgcaggtctccctccaccacggcaacgaccagacctcctacggcgtgagcgtggtggacggcttcaacgtcgggctgtcggtgaccccgcacgagggccggggcaactgccccgtgctggcgtgccgcaagaacctgaccgagacctgccccagcgagctgcagctgcgcacgccggcggggagcgtcgtggcgtgcaagagcggctgcgaggccttccgcaccgacgagctctgctgccgcaacatgtacaacagcccgcgcacctgccgctcgtccaagtactcggagttcttcaagcgcgagtgcccgcaggccttcacctacgcgcacgacagcccgtcgctcacccacgagtgcgccgcgccgcgcgagctcaaggtcatcttctgccactagaatccagcgcgccaaggcgtactcggtaggatcccttccggggtgtctgtgactgtgttctaatgttcgattagctcgcgggtttagatgctggagtcgttacttacgttcgattagcccgtaatcggtgtgctgctgcttgtgttggctgcagggatgtctgtgactgtaatggtgttactgccaggtttccagcctg

SEQ ID NO: 2868 - DNA, 1482 bp, Oryza sativa
  ref <308>: DATABASE ACCESSION NUMBER: AK060656
  ref <309>: DATABASE ENTRY DATE: 2001-12-06
acacaaacaatacaaccatctgctatagccaagctaattaattaacctaagctagtaattaatctgaagcttgggtaagctaggccatggcggtggcggtggagatcacacggagcgaggtgctcaggccgtcggaggcgtcggccgccggcggcggcggcggcaagaggagcccgctcaccgtgttcgaccgtgcggccacggactggtacatcccggccgtcttcgcgtggtacggcgccgcggcgccgtccaacgacgaggttaagggcggcctcgccgccgtgctggccaggtacccgcacctcgccgggcggttcgacgtcgacgagcgtggccggaggtgcttcaacctcaacgacgccggtgtgagggtcctcgaggccaccgtcgccgccgacctcgccgacgccctcgcgcacgacgtcgccgctcacgtcaacgagctctaccccaaggccgacatggagaacggcgacgaggcggtgttccaggtgcagctgacgcggtacgcgtgcggcgggctggtgatcggcacggcgtgcaaccaccaggtctccgacggccagtccatgagcttcttctacgtcgcgtgggccgccgccgtgcgcagcgccggcgcgaccctcccgacgccgttcgtcgaccgcgccgccatcgcggtgccccgcggcccgccggcgccggcgttcgaccaccggaacatcgagttcaagggcgagaacagctggacccactcctacggctccctccccctggagaggatcaggaacctcgccgtccacttcccggacgagttcgtcgccggcctcaagtcccacgtcggcacgcggtgcagcacgttccagtgcctcctggcgcacgcgtggaagaagatcacggcggcgcgcggcctttcgccggaggagtacacgcaggtgagggtcgccgtcaactgccgcggccgcgccagcccggcggtgcccatggactactttggcaacatggtgctctgggcgttcccgaggatgagagtccgggacctcctctccgccagctacgccacggtggtcggcgtcatccgcgaggccgtggcgcgcgtcgacgagcagtacatccagtcgttcgtggacttcggggaggtggccgtcggcgacgagctgacgccgacagcggcgccgccgggcacggtgttctgcccggacctggaggtggacagctggctagggttcaggttccacgacctcgacttcggccgtggcccgccgtgcgcgttcctgccgccggacctgcccgtcgaggggatgctcatcttcgtgccgtcgtgcgcggcgaagggcggcgtcgagatgtacatggcgctcgacgacctccacgtcgacgctttcaggcaaatctgctactccatggactgatcacgactgtcacaaaaatattactcctatgtgtaccatattgttagtttgttacaagtacaacaacagcgtgcatatttgcaagatt

SEQ ID NO: 2869 - DNA, 1753 bp, Oryza sativa
  ref <308>: DATABASE ACCESSION NUMBER: AK060657
  ref <309>: DATABASE ENTRY DATE: 2001-12-06
aagccaccctcccctcgccgctgcctcttccctccacccgaggggaaaagcgagcaagcaaactgtgcggagcaagcacggcaaggcaaggcaaggtgacccaccgccattggcttcttccgttttatccaggagaaaggaggaggagtactgggagataggagcaatggcggagtcgacggcggcgacggcgccaccgggggacgagccggaggcgaaggggaggagcaactccatcctgctccccatcctcgggatccttctcgtctacctgctgtaccggtacctccggccgcgcctccgcggcctgcggctcgaccgcctcacgtcccgcctcccggcgtgcctccgccggagcaggacggccaacaccatgctcccctacttcgcgccgatcgccgaccgcctcggcgcgctgcagccgtacctggcccccatcgccgaccgcctcggggtgggcgcgcagggcggcgtcggcgcaggggcgtacggcagggcggacgcgctcgtcaagttccccggcggggaggcgctctccgtcgccgccatcctcgaggcgccgggggaggtggtggccaagtcgtcgcacagcaccctgtaccgcgccgcgatgcgctccggggaggccgccgtgctgctccggttcgtgcggcccgcgtgcgcgctcacctccgacgaggcctccgccgccgcgcgccggatcggcgcggtcagccacccgaacctcgtgccgctccgcgcgttctacgtcgggccgaggggggagaagctgctcgtgcaccccttctacgccgccggctcgctccggcgattcttgcaagagggaattgttgattcacaaagatggaatataatttgcaagctctctatcagtattgtcaagggactggattacctgcatacagggttggagaaaccgataattcacgggaacatcaagacgaacagcattctgctcgatgctaattacgagtgcaagatatcagactttggcctctaccttctgctgaatcctgctggtgcccaggagatgcttgaaacttcagcagcacagggttacaaggcacctgagctgatcaagatgagagatgccactagagagactgatatctacagcttgggagtagttctgcttgagatgcttgcccagaaggaatcagcaaaggataacacgccaaaccctcgcgacatcctattgcctgtctcgttcaaaaatttggttcttgagaggaagatttctgatgcattcagctccgatcttgtcaggcagagcaagaagtcagggaaggaaaagaatttgaatgctttcttcgagttggcaacagcttgctgtagcccttcaccatcattgagacctaacacaaagtttatactcaaaaagctcgaagagattgcaaaataaattaaactgggtagtttaccggcttgctatttaatcggcattgcattatagcggcatatacagcaatgacgagtactgaggcatttcagcctggccaaggctagaaacctgctgaatttgtgctggccagggaactgaatagccttgacatgaactcagagtaacatacatgctggaggggtgcttcagatgcaggatcactgtgtttttcttgtgcattacctggaaccgagaaaaaaaaatgtagaactgctgttcataggccagtgcccctgaagaactgtataacacactgttagtgaaatgtatatgttgtacttttaatgcatcgaaacactccatgtgaactgg

SEQ ID NO: 2870 - DNA, 1597 bp, Oryza sativa
  ref <308>: DATABASE ACCESSION NUMBER: AK060658
  ref <309>: DATABASE ENTRY DATE: 2001-12-06
aacaaaatagggcgtactaagccattaaagcgacgcccggttgctctgcctcgggggcgacgcgggcggcgaaacaagccgcgccgcccccgtccctctcctcccctcccacgccgagccgccgccggcaaagccgggcggctgcaaggacagcggcggcggggctctctctctctctctccaccgctcgcagtggagctggacggggcgccggcaagacggagcggcaaggcgccgacgacgacgaccagatccagcgccaggatgcacggatccggtacccctatggccggatctgctgcttccgggcggcggcgacccgggtcggcaagtcgcggcgtcggcggcgtggaggtggcggtgtcagcggccggagggcggcgtcgacaactggagggcggcctcggcggcgtggagttggcagcgaggcggaggacacggcggcatgaccgtggctgcggtgacaaacggcgagcgtgaccagttctggccggacggctagcggcggtgcttgcggccgtggtgcagctgcggcggaggtggatggcgacggtggcggcggaggctggtgagggcgacgacggctgaggcagccgctgcggtggctggcgatggtggcgacggctgaggcagccgtggtggcggcaacggctgaggcagctgcgacagcgaggtggcggcggcggttgaggcagccgcagctgtggtggtggctacacgcagtgtcgaccgtggatgagggggaggaggcacggcggcctcggacggctagctgagggcgtggtagacggctgcatctggccggcgcagtagcgtttggaggaggggtcggaggccggcttggtacagagaggcgcagcggatggcagtggaggtcggctcagcgcgagaggcgcgggcggcggagatggaggccggcttggcgcgagaggcgcggccgatggagggaggccagattggcgcgagagacgcgtccggtggaggaggccggctcggcgcgagaggcgcggccggcggtggaggaggcgaccttggtgagtggaggagctgctggtgggtgtggtgcggtcttcggcgcacgaaggctagccgatggagggcgccggtgcaggggtcccacatgtcggcagaggttgattggcggtggagcatcggtgtgtcagccgtggtttcgcaggtggtgagcggcaggtgaaaacccagcccggccttggctggaccgacaacgatggttaattccccctcctgagggcgttgtcgtgctgtctcgcctcttaagggtggttgccgggcaaaagcctagtcctggctcctttgagccttgacggatggctgcggcggttttccgtcgcttctcttcttgaagacgtcgttttggcaccctcttgctgtgtggcgatctcgtctgtgttcctttgttggtctagcggcggtcggtccggtgctagccttctcccggacttgtgtttaggcgctgtcggtgtgtgggtggtggtatttttttttctttttcctggttacgaccctccagggttgtaatcttgtaattttttcctgctatgtcaatagaacttcgcaccgtcttgtgcgagttgtt

SEQ ID NO: 2871 - DNA, 1556 bp, Oryza sativa
  ref <308>: DATABASE ACCESSION NUMBER: AK060659
  ref <309>: DATABASE ENTRY DATE: 2001-12-06
gcgagcttgttgctgtagtagtagttggtgtgaagttagcaaggtgtttgtttgatctttgatcgtttgtgttctaatggagtgctgcaccatgtgtgtaccatcaggggctagggctggtgaagcccatggaggagatgctgatggcagcgaacgcggccgccggcgcgaatccgaatccggcggcgacggcgccgtcgtcggtgactgggggcgcactgaggggcggcggcggcggcggcgcgccgccggtggcaggtggcgcgggggcgggtagcacggagcggcgggcgcggccgcagaaggagaaggcgctcaactgcccgcggtgcaactcgacgaacaccaagttctgctactacaacaactacagcctccagcagccgcgctacttctgcaagacgtgccggcgctactggacggagggcggctcgctccgcaacgtccccgtcggcggcggctcgcgcaagaacaagcgctcgtcgtcgtcggcggcatcggcgtcgcccgcgtccgcctccacggcgaattccgtcgtcacgagcgcgtccatgtccatgtccatggccagcacgggcggcggggcgtccaagaacccgaagctggtccacgagggcgcgcaggacttgaacctggcgtccccgcaccacggcgggctgcaggcgccgggggagttcccggcgttcccgagcctggagagcagcagcgtgtgcaaccccggtggcccaatggggaccaacggccggggcggcggcgcgctctccgcgatggagctgctccgaagcaccggctgctacatgccgctgcaggtgccgatgcagatgccagcggagtacgccacgccggggttcgcgctcggtgagttccgcgcgccgccgccgccgccacagtcgtcccagagcttgctcgggttctcgttggacgcgcacggctcggtgggcgggccatccgccgcggggttcggctccagcgcggggttgcaaggcgtgccggagagcacgggcaggttgctgttcccgttcgaggacttgaagccgacggtcagctctggcactggcggtggaggcgcaagcggcggcggcgccggcgtagacggcggccatcagtttgatcacggcaaggagcagcaggccggtggcggaggcggcggcccaggcgggcacgacacgccggggttctggaacggcatgatcggcggcggcagtggcacttcttggtaatgcggcggcggcggccatgcatgcatgcatggctcatgcaaaagcctccgcgctgtggtggcgtgggttcaaattggagataggcagtagagacgacgagggttttaataagaggttggcattggcgataatccatcactgattcactgttactccgtataaggtgttttgatctctcttcttcttctttcccggtgttgcatcatcatcttggtgttctttcttctcccttttgctgtctttcatgtgattgttgatcggctttggtgctcaacacaacaaccgagctcacatgattcctcaaaaggatcatgatgcatgatcgatctctttctg

SEQ ID NO: 2872 - DNA, 266 bp, Oryza sativa
  ref <308>: DATABASE ACCESSION NUMBER: AK060660
  ref <309>: DATABASE ENTRY DATE: 2001-12-06
aaagaaacaacatgctaaaatattacaagcctgagattgagaaagtataccaaaaactggaggaacagagggttgccgccaaatcaaagtaaagaaatatgttccctttgaacactaaatgaaaagctagaatgccattgtaaatttttcaatttttagataatggatatcgttccggcctctacatgtaaattttcagttgaactttggtactcaagattacatgaatgcaataaaatgtatatcgtgtgatgccttgtgtagct

SEQ ID NO: 2873 - DNA, 297 bp, Oryza sativa
  ref <308>: DATABASE ACCESSION NUMBER: AK060661
  ref <309>: DATABASE ENTRY DATE: 2001-12-06
atgcagaaaccgggagggcgattggtggtgcgctaccacctattacagtgatcgtcagtttgataatcggcattgccggagtaggggctttgcttgtatatggccttcaataggctgccaatatcttcacaggtttttgactgtgtaacaagaagctcagcagattgctggtgcactctcttatctagcaagaaattctgagtgatatatatcaagggggaaaggaaaaacatgagttggaggctaatggctaaatgaaaaatcaaatcttcttatatgaatggagattaattttct

SEQ ID NO: 2874 - DNA, 1219 bp, Oryza sativa
  ref <308>: DATABASE ACCESSION NUMBER: AK060662
  ref <309>: DATABASE ENTRY DATE: 2001-12-06
gaagcgaagaacaccgcgaagtggaagacgacgaagcgggcggcaccgcaccgcaccgaggaggaggaggaagcgcggcgaagctttcggtgggatagctgcgtcgcgtcgccatcgaggagcagctatggtggtggcgagctagctcaaggtacgcacgcgcggtggaggaggaggaggaggaggaggaaggagaagaggggaggaggaggaggaggaggcagtgatggtcctgtgctccatgcgcaaatcgttcaaggactcgctcaaggtgctcgaggctgacatccagcatgccaacaccctggcctcggatttctcgagggattatgacggggcttgcctccagatgcggatgtcgtacagccccgccgcgcagttcttcctcttcctggtgcagtggacggattgtagccttgccggtgctcttggcctcctcaggattctcatttataaggtttatgtagatggaacgaccaccttgtcaactcatgaaaggaaagcgagcattagggaattctatgctgttatatttccctcactcatgcaactccacaagggtatcagcgatgtcgatgaccggaggcagaaggcaatctgtactgagagatacagaagaagagatgaggatgagagcaagaggcatgtttctgagattgatgtcgagagagaggaagagtgcgggatttgcatggagatgaataacaaggttgtcttgcccaactgcagccatgctatgtgcatgaagtgttaccgtcaatggcgctcaagatcccagtcctgccccttctgccgtgacagcctcaaaagagtaaattctggtgatctgtggatgctcacagatgaccgagatgtcattgacatggcaacgattactagagagaaccttaggcgcctgtttatgtacattgagaagctgcctcttgttgctccggacaacatcttctatgcctatgattctcatgtaaaataaccagagctactcataatgacctactcataattgttttcggagagtgacgcatgtcttattcattcatgcagaggatgttccttgtcgtaggatgtggctaaccccaggagcagactgaactttgacaagagaacttgtgaattctgactagatccaatgctgtggtcagatgttgtaaatgcttgtacagatttgtaatttgcagtgtaaaaaaattagtgaggaaaaaccttgtgttccacattg

SEQ ID NO: 2875 - DNA, 1448 bp, Oryza sativa
  ref <308>: DATABASE ACCESSION NUMBER: AK060663
  ref <309>: DATABASE ENTRY DATE: 2001-12-06
atcagtggctactggccccagtgcagctgcagctagctagacatggctcgcaagaacagagatgggagagtagcagtgtggttgatgatggtgttcttgctactgtccggatcatatcagtgtgaggcgagagctctgatgaggcgaagcaggaggaacacgctgctgaacgcgctgtacaagctcaacttcatcaggacggtggagccgatgcagctgccttcttcgtctccttctccggcgaagccggacggcgacgcggcgagcctcgccgacgccaccggcgacggctcgagctcgccgtactgcgtcaaccctccgaacgcgcccccgtcgtcctccaccccgacaacgacaccgacgccgacacctcccttcgcctcgacgccgttcgccccggacgaccagcccccgccgctgccccccatcggcggcttcacgccaccgtcgttcgagccgagcccgcctgcgtcgtccacgcctggcttcaccccgagcacgcctgggtctgccccaccgagcccgatcttcgtcgtgcccagccctcccgagaccggacccggcggcggcggtttaggtggcggcagcggcggcgagggcggcggcggtgtaggtggcggcagtggaggcgagggcggtggcggtggtggtgtaggtggtgggcctggcggcggcggcagtggcggcgagggtggtggcggtggcggcagtagcggtggaggcgggagcaatggtggaggcgggagcagcggaggaggcgggaacagcggcggcgggggaggagggggagggttcttgccgccgatagtgtacccgccgccgctggcgccgccggcggcgccgggggcgggggaggcgctgtggtgcgtggcgaagccgacggtgccggacccgataatgcaggaggcgatggactacgcgtgcgggtcgggggcggagtgcgggtcgatccagccgagcggggcgtgctacacgcccgacaccgtgctcgcccacgcctcctacgccttcaacagctactggcagatgaccaaggccgccggtggcacctgcgacttcggcggcaccgccaccatcgtcacccgtgacccaagctatgaaaagtgccaattcgacctactatgaaggagttgcactgcagagatgcagcagaacaggctgcattgcatgtgcatgcagatcgatgtgcaaacattctttgcaagtttgttgggcagtcattccatttgcctctaggccacatagcactgcagattttgtaactagctgtttagcatgattttgatcattattacacgactaatacttgtgcaaaaaggtgattccttcacatgtggagtattatactagcactagtcactcctctctcgcctttttcctctttagctttttcaagctctctttgcccaattatttgagacataatatgctaacttgatattcacgcc

SEQ ID NO: 2876 - DNA, 1392 bp, Oryza sativa
  ref <308>: DATABASE ACCESSION NUMBER: AK060664
  ref <309>: DATABASE ENTRY DATE: 2001-12-06
acactgtaacacacacacacacactctctactctctctaagctaagctaatgacagcagcaatggcgccgccgcagctcgtgtccgtgctggtggcgctcctctgcgtggcggcggcgtcgccggcgggggtgggggcggcgcggttcgtgtgcaacgcgacggcgccgcgggcgtccacgtgccaggcgctggtggcgtacgcgccgcccaacgccaccacgctcgccgcggtgcgggcgctcttccagctccgctcccaccgcgcgctgctggcgtccaacggcctgccgctctccacgccgccctccgcgccggcgccctcgccgctccgcgtccgcctcccctgcctctgctccggtggcgccggcgccaccttccagcgccccacctaccgcatccgcgccggcgacaccctcgacgccatcgccaggggtgtcttcgccggcctcgtcacctaccaggacatcgccgccgccaacaacgtctccgaccccaacaagatcgccgtcggccaggagctctggatccccgtgccctgcagctgcgaccccgtcgccggccagcccgtcgtccactacacctacgtcgtgccgccgggggcctccgtggccgccattgctcaggacttcgccaccacggaggccaccgtcctcgccttgaaccggatgcccgacgccaagagcctcctcgccggccaggttcttgatgtgccgctccgagcctgctcctctgccattagcagtacagctatagaccgcaacctccttgttcccaatggaagttacattctgactgccaacaactgcatcatgtgtggctgcagctcctacacttggcagctggattgtcaaccaacacaaggaataagctcatcgttctgcccagcttcaaaatgtggagatatgttcctcgggaacacgaccacatcgccgacatcatcttgcgaaagcacggcgtgctcgtatgcagggtacaccaatagcacatctttcaccatccttgccaatcttaccaccagttctacatgcaatgctgctgcgatgtctccaatggcgcagcaggctcactcatcggcgttcaggctggcatcaacgtggttgagatggactgagctgatcgttcgtcttcatgtcattttcttgtgtgtaagcttcctcaatcatgtttgaggagcatttccattcttgttttctcagtgcctggactactgatttcgtggtctcatgttgtgagtaatctgggcagtgtaagtgtggacttaataagtagctgattggacgtgtaagtgtggatggacaccaggggaacacatgtttttgtgttagaatgtagatcaggagacatttgtactgtcgaactcttgcaaaggtagttctatgattttgctttt

SEQ ID NO: 2877 - DNA, 1226 bp, Oryza sativa
  ref <308>: DATABASE ACCESSION NUMBER: AK060665
  ref <309>: DATABASE ENTRY DATE: 2001-12-06
ggctggaatttcacttcttgttattgataccgagaacaagtttgtatccacaggatttgccaaggaaattgcaagggtcgcccaaggtaaatactattacctgccgaatgcttcagacgctgttatttccgccgccaccaagactgcactctcggacctgaagagttcgtgatcctggagagcgttttaaaaaaaaaaaagaaaaaccccgctggcgccggctcttcttctccctccgccggcatggtggccttggtggcggaggcctccaagcggtggcggtggcggcggcctcgattgcagcggtggcgtcgtcctcgaagaagaagtggtggcggcggcgtccccaacgtcgacgagctcggcgtcgacctggccaaggcgccggccgggaggaggaggtgggggagtagatccggccggcggctcatcctcggcggccgcagagcccgctctccctctctccagcccctcacggcggcgggatgcatccccggcggctgtggctggcgcgccggcgggagacgtccccggctgctgcggcggcggcggccaccactgcccgcgccgccgctcctcctcccagtccgtcgcgcctcctcgcctcccacgccgcggggaggagggagcaagaaggcgccgcacccactgcacgcagcggcgaggaggaggaggaggaggagtagattcggcggttggccaccaccaccggcctcgccgtcgcgtcggctgccccgtgccgttactcctcgtcgcggtccacggcctgctgctgggacttctccggcgggacggcgatttcgcagattccatctcccacgcgtgcgctagggcatggcaactcggagacacgaccttcacagcgcaggcgtgggtcgattttcctccgccgcgcgtccttgaggtggttgaggaactcgtctcccaactaaggagcgagggactacgcagggacgcggtgctgcgcgacacgtcggcatttttcctagttggcaccagaaagcaacgctccacctcatcgcactgtaagaggcctaaatttattcctttcagcgtgactgacaaaactcacgcccaagtgcgcgtgtcattaggctgcgcgtgtgtccgccaataatttttggctgatctgggaggcacaggtctgatcggacggatgcagatcaccaaagggtgtcggagttttaaactccgacgttggtaacaagaacgcctttgcatgcgag

SEQ ID NO: 2878 - DNA, 1651 bp, Oryza sativa
  ref <308>: DATABASE ACCESSION NUMBER: AK060666
  ref <309>: DATABASE ENTRY DATE: 2001-12-06
acatgcacttgcagtcagtggtacaacaccacagcaacgcaccaccggccatcaacctcctctcccctgcttctcgctcgctctcctgccctgtttcttggagaagtgagcttaagtgagagcctctgtccctcgcacacgctattggccatggtggttctcgctggcccgcccgccgtcgatcacatcccgctgctgaggtcgccggaccccggcgacgtcttctccggcgtgccggtcgtcgacctcggcagccccggcgcggcgagggccgtggtggacgcctgcgagcggtacgggttcttcaaggtcgtcaaccacggcgtggccacggacacgatggacaaggccgagtcggaggccgtcaggttcttctcccagacgcagcccgacaaggaccgctccggcccggcctacccgttcgggtacggcagcaagcggatcgggttcaatggcgacatggggtggctcgagtacctcctcctcgccctcgacgacgcgtcgctcgccgacgcctgcaccgtcccgtcctgcgcggtcttccgggccgctctgaacgagtacatctcgggggtgcggaaggtggcggtgcgggtgatggaggcgatgtcggaggggctgggcattgcgcaggcggacgcgctgagcgcgctggtgacggcggaagggagcgaccaggtgttccgcgtgaaccactacccgccgtgccgcgcgctgcaggggctcggctgcagcgtcaccggcttcggcgagcacaccgacccgcagctcgtctccgtgctccgctcaaacggcacgtccggcctgcagatcgcgctccgcgacggccagtgggtgtccgtgccctccgaccgcgactccttcttcgtcaacgtcggcgactcgttgcaggttctgaccaatgggaggttcaagagcgtgaagcacagggtggtggccaacagcctaaagtctagggtttccttcatctactttggagggccaccgttagcacagaggattgcaccattgccacagctgctgggggagggagagcagagcctgtacaaggagttcacatgggatgagtacaagaaggctgcctacaaatcaaggcttggagacaacaggctggcccagttcgagaagaagtagctagctagatgcctagcaacagaactggccggtcaagcaacaacgactttactgcatggcagctagctaccttagctatgtctcacgcacacgtacggtacaccatgaccacgagaagatgaagctgcttaagagagaaaaagaaaagaaaataaaaacaggaagaagataataacttcaagatgcacaatgtacagccaggttggatggatagctagatttttctcgtgtggctaatcaccgtgtgtggtgaggtgggctcctttcctgtttcggaatactgatcgatggatgaacagcctccaatagttaatgttaaccaaatatagcacaacaaaggggttcttttcttccttcggttgtttcttttttcctcttgcctttgattttctcgtcatgctttctgagcattaattatgtgtgcgtgtatttcggtatacgtaacgtacttttacctatgtgtgtatagtacgtggcttgtgttaacaagtaaatattatagtctctctctttcgtt

SEQ ID NO: 2879 - DNA, 1191 bp, Oryza sativa
  ref <308>: DATABASE ACCESSION NUMBER: AK060667
  ref <309>: DATABASE ENTRY DATE: 2001-12-06
cagatcagatcgatccgggcaggcgggcagcatggcgtcggcaggtggctgcaagaagaagacgggaaatagtcgtagtaggagccctcgtagcccggtggtgctgcggagggcgatgctgcattcgtccctctgcttcctggtcggcctccttgccggcctcgccgccccctccgactggcccgctgccgccggcgccgccgtcttcctccgcacgctccgtgccagcaatgtcatcttcagtcgcagtagcaataggccgcagcagccgcagctggtggtagtggtcaccaccaccgagcagtccgacgactccgagcggcgcgccgccgggctgacgcgcacggcgcacgcgctgcggctggtgtcgccgccgcttctctggctggtggtggaggaggcccccgcggagaagcacgcggcgccgcccacggcgcggctgctgcggcgcacgggggtggtgcaccgccacctcctcatgaaacaaggagatgatgattttagcatgcagatatcgatgaggagggagcagcagaggaacgtggctctgcgccacatcgaggaccaccgcatcgccggcgtcgtgctcttcgggggcctcgccgacatctacgacctccgcctcctccaccacctcagggacatcaggacatttggtgcgtggcccgtggcgacagtgtcggcgtacgagcgaaaggtgatggtgcaaggcccactctgcatcaacacatcctcctcgtcggtgatcacccgcggctggttcgatatggacatggacatggcggccggcggcgagcggcgagcggccgctgaccggccgcctccggagacgttaatggaagtgggcgggttcgcgttcagcagctggatgctgtgggacccgcacaggtgggaccgcttccccctctccgaccccgacgcctcgcaggaatcagtgaagttcgtgcagcgggtggcggtggaggaatacaaccagtcgacgacgagggggatgccggactccgattgctcccaaatcatgctctggcgcatccaaactacgctctaggctctagctagcttaatttcattcttcttccttaatcatcgatcgtcaatctccaaaacccacactcctactcctatctaagacaaatacctgcatataaatatatacacacgtatacgtggtgtgttcacgtacggttaatt

SEQ ID NO: 2880 - DNA, 1127 bp, Oryza sativa
  ref <308>: DATABASE ACCESSION NUMBER: AK060668
  ref <309>: DATABASE ENTRY DATE: 2001-12-06
acacgcaccacccccccttgcggcggcgcctcccctcccctccccctctcactccggcaccatgctgctgcgatcgccggcgaggtcgagcccccacctccgctcgctcctgcgggcgcgaggcttcatctcctccgcctcgccctcggccgccaccgcggcggaaggggacgacgggaagatcgtggcgtccgtgctgttcgagcgcctccccgtcgtcatccccaagatccaccccgtcgtctacgccttccaagaattctcgtttcggtggaggcagcagtacagacggaagtaccccgacgacgtgctgggaaaggccgacgcgaggggcaagggagattatcagatagattatgtgcctgctccaagaatcacagacgctgacaaaacaaacgacaggaagtcactacaacgagctcttgataatagactctatctccttctgtatggcaaggcttatggggctcctgatgacaagcctgtttggcattttccagaaaaagtttatgacaatgaagacactttgcgattgtgtgctgaatcagcattaaaatctgttcttggtggactcaacaatacgtattttgttggcaacgcgccaatggctcatatggtagttgaccagaaggaagattcaagcatttcatcattcaagcgattcttctttaagtcacaagtggtcggtgccacgaaatatgatatcggaaaatgccaggaccacgtgtgggtgaccaaagatgagttactggagtattttccggagcacaaggctttcttcaacaagatgatcattcacataagatagcccttttatctgattggggcaagctgggacactctgaagtttgaacaatgagcattgtgttgcttgacctgtgtacaagtttcctgccaccacttatcatcctgaacacaattggcaaggaaaattactcatcaagtgttcctccaaagacacccacatagatgtattgcccatttttgtcaatcatatggcaatcctgtagccttgtaggcttttttcccagctgctgtatttttaacatgatgtactaccgttctattattcttggtgaaataattaacatggcattttggcccctccttcctttgttggggtttct

SEQ ID NO: 2881 - DNA, 996 bp, Oryza sativa
  ref <308>: DATABASE ACCESSION NUMBER: AK104326
  ref <309>: DATABASE ENTRY DATE: 2002-08-28
aaccaatcgactcgcaccaccaccagcagctcaagcagcaacagctcaaacggaggaagatctcatcgccatgacgaccggcaatggcgacgcaccggtgatcaagaacgcccacagcgacatcgacagcaccaacaagacgctgctcaagagcgacgccctgtacaagtatgtcctggacacgacggtgctgccacgggagccggagtgcatgcgcgatctgcgcctcatcacggacaagcaccagtgggggttcatgcagtcgtcggcggatgaggcgcagctgctggggatgctgctgaagatggccggagcgaagaggacaatcgaggtgggtgtcttcaccggctactcgctgctggcgacggcgctggcgctgccggaggacgggaaggtggtggcgatcgacccggacagggagagctacgagatcgggcggccgttcttggagaaggccggggtggcgcacaaggtggacttccgcgaggggaaggggctggagaagctggacgagctgctcgccgaggaggcggcggcggggcgcgaggcggcgttcgacttcgcgttcgtggacgcggacaagcccaactacgtcaagtaccacgagcagctgctgcagctggtgcgcgtcggcgggcacatcgtgtacgacaacacgctgtgggccggcacggtggcgctgccgccggacacgccgctgtcggacctggaccggaggttctccgtcgccatcagggacctcaactccaggctcgccgccgacccgcgcatcgacgtctgccagctcgccatcgccgacggcatcaccatctgccgccgcctcgtgtgaggtcgagaccgagaccttaccggccgatccatccatcgctctcgcgtgattaattaacgtgtgttgctgtactcttctactgctacaactatactattacttccttaattgccgcttaaattttcctatacgtgtttcaatcaatgagattattatattcttcgagc

SEQ ID NO: 2882 - DNA, 1510 bp, Oryza sativa
  ref <308>: DATABASE ACCESSION NUMBER: AK104327
  ref <309>: DATABASE ENTRY DATE: 2002-08-28
acgaaactagccttctctccttctctctcgtgttctctcccaatctcttcttgcggcggaagcaaagcgagaagcgaggcgactcttctccggcggcggcggcggcggaagcggcggcgagatggacggcggcgtaggcgaggaagggaagcagcagccgcacctggtgctggcgcacaagctgttcctgctctcgcacccggacgtggacgacctcgccaaggtcgacctccgcgccgatgtcctcgccgcagtcaaatccgatgatatggcgtctctgtacgagtcgctgggggccggcggcgtgctggagacggacgctgcgctgctcgcggagatgcgcggcaggatcgaggaggagatccggaagcttgacgagaagatcgctgatgctgaagagaatttgggtgagagtgaagtgcgtgaagcccatctagccaaatcgttgtatttcataagggttggagagaaggagaaggcactagaacagcttaaagttactgaaggaaaaactgtagctgttgggcaaaagatggaccttgttttccacactttacagattgggtttttctatatggattttgatctcatctctaagtctattgacaaagccaaaaaattgtttgaggagggtggtgattgggagaggaagaacagattgaaagtgtacgagggcttatactgcatggccactagaaacttcaagaaagctgcaagcttatttttggattcaatttcaacattcacaacctatgagttgttcccctatgatacattcatattctacacagttcttacaagtgttatctcattggatcgtgtatccctaaaggcaaaggttgtagatgcacctgagatcctggctgtaattggcaaagtacctcacctctctgagtttctcaactccctctacaattgccagtacaagtcattttttgccgcattctctggcttgacggagcagatcaagttagaccgttacctgcagcctcatttccgttactacatgcgtgaagtccgtactgttgtctattcacaattcctcgagtcctacaagagtgtgacgatggaagcaatggcttctgcatttggtgtgaccgttgatttcatagacctggaattgtcacgcttcattgctgctggaaagctccactgcaagatcgataaggttgcttgcgtcctggagacgaaccggcctgatgccagaaatgctttctaccaggcaaccatcaagcaaggggacttcctgctgaaccgcatccagaagctatcacgagtcattgacctgtaggtgttagtgttggagctggtgcttgccaaaactctgctcgagctcccccgcacgagtaacttatttgctttggtcccaggggactacgaacagtacttgacttcgcattcgaagtaggttacgaggaaagagagcttaacaaaatcagcgttaaatctgagaatttgagcttatgtaacctactatatggatcgatgaaagttcagacccgttgtttct

SEQ ID NO: 2883 - DNA, 1383 bp, Oryza sativa
  ref <308>: DATABASE ACCESSION NUMBER: AK060669
  ref <309>: DATABASE ENTRY DATE: 2001-12-06
gcaacaaacgcacccacacatggatctcctccggcgagtcgccgtggtagccgtgctcctgtcgctgccgtcgcgtggccgctccggcggcggcggcagcgatctgcacccggtcgtgctcgtgccggggtacgggtccaaccggctctacgcgcggctgactgcggcgtacgagccggcggcgcctcgctgcggcgcgcgagaggggaaggatgagtggttccagctgtggccgatcgacgcggcggcgagcgaacccgcccaggccccctgcctcgccgagaagatgagcctcgtctacgaccccgtcgccgacgactaccgcaacgtcgccggcgtcgtcaccagggtcccctccttcgcctccacccgcgccttggttgggtgggacccactggtgcggcagctggaggcgatgggccaccgcgacggcgggagcctcttcgccgcgccctacgacttccgctacgcggtggcgccgcggggccacccgtcggcggtgggcgagcgctacttcgctcgcctcacgcgcctcatcgagagggcgagccggctcaacggcgggcggcctgccgtcgtggtggcgcacagcttcggctgcgcgctcacgtaccagttcctgcgcgcccgcccgctcgcctggcgccaacgcttcgtcaagcacgccgtcctcctggccgccgcgctcggcggcttcgcggaggggatggacggcctcgcctccggcgccggctccggcctccccaacctcgcgccgccggcgagggccaggcttgcgcggagccagcagagcgcgctctggcgcctgccgacgccgatggtgttcggtgaccggccggtggtggtgaccaagaactcgacctactccgccaacaacatcaccgagttcctcgacgccatcggcttcacggaaggggtccagccgtacgtgacacgggtgctgccgatgtggcgggcgctcccggcgccgatggtgccggtgacaagcatgtacggggtcggtgtcaggacgccggagacgttcgtctacggcgaagctgggttcgaggggacaccggaggtggtgtacggcgacggcgacgggaacatgaacattgtgagcctgatggctgcggaggagtggtctggggtggaaggccaaatcttgaaggtggtcaggttgccaggtgttagtcacgttggcttcttcagcgatcttgctctcaagaaagtagttgctgaaatacagaaggcagttagcagcatagaggtacacaggaaagagaaaatcttctcttttctgaataattttgaatttacaattcctgtgccactaggatggtgatgtccatatgtcattactgatccgtgcaaataaataatagcaataattttggctgctgt

SEQ ID NO: 2884 - DNA, 1562 bp, Oryza sativa
  ref <308>: DATABASE ACCESSION NUMBER: AK060670
  ref <309>: DATABASE ENTRY DATE: 2001-12-06
actctcactctgcagtgcagtgcccacgcgagccgagacgagacgatggcatcatctcccgctccaagccccgccgcgccgccgctcctcctcgccgcgctcgcggcgctcgccgtggtcgcgtccgcctccgccgccgcgtgctccgcgggcgaccgggacgcgctgctggcgatccgggcggcgctgtcggaggcgcacctcggggtgttctcgtcgtggacgggcaccgactgctgcaccagctggtacggcgtgagctgcgatcccaccaccggccgcgtcgccgacctcaccctccgcggcgaggccgacgaccccgtcatggcgcccgccggccgcccggcctccggcgtcatgtccggctacatctccgacgcggtgtgccgcctcggccgcctctcctccctcatcctcgccgactggaagcagatctccgggcccatcccgccgtgcgtcgccaccgccctcccttacctccgcatcctcgagctccccggcaaccgcctcaccggcgagatcccgcgctccatcggcagcctctcccgcctcaccgtgctcaacctcgccgacaacctcatcgccggcgaaatcccaagctccatcacctcgctcgcgtcgctgaagcacctcgacctcaccaacaaccagctcaccggcgggatcccggacgacgtgggcgacctcaccatgctcagccgcgcgctgctcggccggaacaagctcaccggcgccatcccaacgtcggtcggctccctgacccggctcgccgacctcgacctcgccgagaacggcctcaccggcgggatcccggacagcctgggcggcgcccacgtgctcacctccctgtacctcggcggcaaccgggtctccggccggatcccggcgagcctgctgcagaacaaggggctgggcatcctgaacctgagccggaacgccgtcgagggcgccatccccgacgtgttcaccgccgagtcctacttcatggtgctcgacctgtcccggaacaggctcaccggcgccgtgccgaggtcgctgtcggcggcagcgtacgtcggccacctcgacctcagccacaaccggctgtgcggctccatccccgccggcccgccgttcgaccacctcgacgccgcctccttcgccagcaacagctgcctctgcggcggcccgctcggcaagtgcacgtgacgtgccccaaccagagccgtccgatcgatcgggagagcctgatcgaacgtgtggtgtgcgatgtaccgtgtacgatgcaacgaacttacgtgttcgtatatatggttaattagttgctgcttaagtattaactcacttgggctatagttttgggcttgggtacatatagaacaagatgagaatttgtgcctagtgtgtgtgtgtgtgagagaaagaggaagtggttaaggaaaagaagaatgttttctctttcctgcctttctcttctttatacttttaaccttttttgctagtgatttacttgatagttctactttaaagtttgtattgtacaagtgacaaaagcataagaaatgctaaagatcttgtatgag

SEQ ID NO: 2885 - DNA, 1505 bp, Oryza sativa
  ref <308>: DATABASE ACCESSION NUMBER: AK060671
  ref <309>: DATABASE ENTRY DATE: 2001-12-06
aagcgatactgacgtgcaaatcgttcgtctgacttgggtataggggcgaaagactaatcgaaccatctagtagctggttccctccgaagtttccctcaggatagctggagcccattacgagttctatcgggtaaagccaatgattagaggcatcgggggcgcaacgccctcgacctattctcaaactttaaataggtaggacggcgcggctgctccggtgagccgcgccacggaatcgggagctccaagtgggccatttttggtaagcagaactggcgatgcgggatgaaccggaagcctggttacggtgccgaactgcgcgctaacctagaacccacaaagggtgttggtcgattaagacagcaggacggtggtcatggaagtcgaaatccgctaaggagtgtgtaacaactcacctgccgaatcaactagccccgaaaatggatggcgctgaagcgcgcgacccacaccaggccatctgggcgagcgccatgccccgatgagtaggagggcgcggcggccgccgcaaaacccggggcgcgagcccgggcggagcggccgtcggtgcagatcttggtggtagtagcaaatattcaaagttttgccgccccgtttcttctcttcttccatcttcgtcatcttcctcctcgactcctcgttatattagctctcgcagatcagatcggagacgaagaagatggcgtccaactacgtcgacaccaccggcgacgagggcaggttccacggccaccacagcaccaacaccacgccgacgggcgccgcggcgtcgtcgccgaggacgatgcgccggagcttctccaacgcctcctccggcagccacggcggcggcggcggcgccaagtgcgtgtgcgcgccggcgacgcacgccgggtcgttcaagtgccgcctccaccgcaccaactcccagggccacggccacggccacccgcacccctcccctcccacctccccggccgccggcggcgcctccgccgcgccccggccgtcctccgcctcctcccgcaccgtcgaggcccagtgacccctgacctccccggccgcaccaagaaaccaaccaaccaagaagaggaggagaatcagagtgggggagaagagagtaaaaaagagcatcgcgtatcatatcatcggaagggagtttatttttgatttccctcgttgtgatctccatgttcttggaagatttttcttccatttttccttttctttttcttcttcttcttcttccttcttttggctttatgggatctctcctactacatggccaaaccttcctcttcaccatgatgagaaactccaaatcatcccctgctcgaatcagctccactggctagtagctgctacttctcctccctctattattataatctattggatgatgataagctgataaatggaaagataagggttacccttctgctctactatgtaattactagtaccattttaccatcctattgataatccaatccccacctggttgattg

SEQ ID NO: 2886 - DNA, 1677 bp, Oryza sativa
  ref <308>: DATABASE ACCESSION NUMBER: AK060672
  ref <309>: DATABASE ENTRY DATE: 2001-12-06
ccggtgcatagagctcacgtacaaccgccgcgccgaacggtgcatgtgaactgttcggcgaaacgcgcaggtgaggagaggtcgcgaggagcggctgctgcggcggcggcggcggcttcgattcaggtgggggtgggtgccctagggtttcgctgccgggatggatggccgggagcagcagcagcagccgcgcgtgagctcgccgccgccggccggcggcggcgtgatgatgcctcagcacccctacggcgccgcgccggcgatgccgccggggtcggcgaatgttatgcacggggtgccgctctcgttcaaccccatggcgtcgccgaccgcctcgtcgcctatgaagcccgcggatatgtcggggaccatgtaccgcaccgatcccgtcgtgcagggcatgcagcagcagcccggttccggcggtggcggcacggcggtcggcggaggggagctcgtgaagaagaagagggggaggccgaggaagtatggtcctgacgggaacatcgggttgggactgaagcccgcggctgcagcagggacggaggccggcggaccttcaggtggtgcaggatcgaactcgaaccctgacgggaagcgcagagggcgacccccaggatccgggaaaaaaaaaacagctagatgctttgggatcttccgggacatcttttactccccacataataacagtgaagcctaatgaggatgttgcttcaaaaataatggcattttcacaacaaggccctcgcactacatgcataatttcagcaaatggcgctctttgcacagcaacactacgtcaaccagcaacttctggtggtatagtaacatatgagggccactttgatattctctctctgtcgggctcatttctgctcgcagaggatggcgacactcgtagcagaacaggtggtttgagtgtggcacttgctggaagcgatggacgtatagttggaggttgtgttgctggaatgctgatggcagcaacgcccgtgcaggttgtagtggggagtttcattgctgaaggtaaaaaaggcaaggaagaacatctgaaacgtgagccaacatctgccccgacgccgaaccacgcagctggctttggcgcagccacggctgccagtcctccgtctgatggatcatcaagcgaccactccgatgacccagggagtcccatgggacctaatggcagcacattcaataattcaggtcatcccatgcattcttcgtatgctcctgttagctggtcgctatctgggaatcaaggccgttacgatcccgacctgaagatgatgaccgactagataatcctgtgtttttaagctctgttagctgttgacccagtagagtgtagggatcagggattcagtgtttcctgcaccgacaccaccggcagcgttggccaataatccggtgcgctagtagtaatcagtatcacaatgcctgaacaaaagagatcaggaacaaataagtagccccagcgcatggcttggcctgtcaggtagctaatttttatttttctcaatcggtagcttatttagcatgctttgtcagttgtcagcctagttgtacggttttcttatgaatgtttgtacacctttttcttttctcgctagtattcggcgtgtacgaatcttaattaagattggaatgacatgttattggatattgtcgtttttc

SEQ ID NO: 2887 - DNA, 1675 bp, Oryza sativa
  ref <308>: DATABASE ACCESSION NUMBER: AK104328
  ref <309>: DATABASE ENTRY DATE: 2002-08-28
aaaaaaaaaaaaaaaaaaaaaaaaaaaaaacgggagattggatcggaagcttctagaagtttccgtgggcgatggcgatccgcgcgaggtcctcctcctacgccgccgcggcggtcgcgctggcgctcgcgctggcgtccgtcgccgctgtcgccggcgaggtcttcttccaggagaagttcgaagatggatgggaaagtcggtgggtcaagtcagaatggaagaaggatgagaacatggctggtgaatggaaccacacatctgggaagtggaatggagatcctgaggacaaaggtatccaaacctctgaggactacaggttctacgctatttcagcggagtacccagaattcagcaacaaggataaaaccctggtgctgcagttctctgtaaagcatgagcaaaagcttgactgtggtggtggatatgtcaagttgcttggtggtgatgttgaccagaagaaatttggtggggacacaccgtacagcattatgtttggaccagacatctgtgggtacagcaccaagaaggtccatactatctttactaagaatgacaagaaccatttgatcaagaaggatgtcccctgcgagactgatcagctgtcccatgtgtacactttgatcatccatcctgatgctacatacaccatacttattgacaatgttgagaagcaatctggcagcatctacgagcactgggatattctgcctccgaagcaaatcaaggacccagaagctaagaagccagaggactgggatgacaaggagtacattcctgaccctgaggacaagaagcctgagggatacgatgatattcccaaggaaatccctgaccctgatgctaagaagcctgaggactgggatgatgaggaagatggtgagtggactgcaccaaccattcctaaccctgagtacaagggaccatggaagcaaaagaaaatcaagaaccctaactaccaaggcaaatggaaggcaccgatgatcgacaacccagacttcaaggatgatccatacatctatgcttttgacagcctgaagtacattggcattgagttgtggcaggtcaaatcaggtactctgtttgacaacttccttattactgacgaccctgagttggccaagacattcgcagaggagacatggggcaagcacaaggatgctgagaaggctgcttttgacgaggcagagaaaaagaaggaagaggaggaagctgccaaggccggtgaggacgatgatgatttggatgacgaggatgctgaggatgaggacaaggccgatgagaaggctgactctgatgcagaggatggcaaggattctgatgatgagaagcatgtatgtaacactcctgcgttttcttgataccttctggattctggtgatgcatttcctgttaacctccatgtgtcctgatcaccgtccttcctttccaggatgagctctaagatggtgaggatgaagaatggaggccgccttcgcgacgatgccaggatttgctagttctcccattgttatgaagttccctttttcgtgatcagaaacttgacaagaaagtactctgtagatgagcattgctgaggaactttaatttggtctttgtagctctctctgtagtgtcatttttcccaccacaagaaaaagaactgataacttattgaacaagagaaatcttttgc

SEQ ID NO: 2888 - DNA, 109 bp, Oryza sativa
  ref <308>: DATABASE ACCESSION NUMBER: AK060673
  ref <309>: DATABASE ENTRY DATE: 2001-12-06
aagaatataggagtaaggatgcagacatttgtatgcactgtatttgttaccttcacccctattctttccgtgttctgttccatgtgctctttgagtccaaaaaaaaaac

SEQ ID NO: 2889 - DNA, 1844 bp, Oryza sativa
  ref <308>: DATABASE ACCESSION NUMBER: AK060674
  ref <309>: DATABASE ENTRY DATE: 2001-12-06
gagacccccccgcctccaccaccacccgccgctcgccgctcgcccaccatggccatggcgacggcgctccgcaagctctcctccgacgccctccgccgccagccgctctcccgcatcaccccgctctactacatggcgtccctgccggcgacggaggagagatccggagtcacctggccgaagcagctgaacgcgccgctggaggaggtggatcccgagatcgccgacatcatcgagcacgagaaggcccgccaatggaagggtctggagctcatcccgtcggagaacttcacctcggtgtcagtgatgcaggcggtgggatccgtcatgaccaacaagtacagcgaggggtaccccggcgcgagatactacggtggaaacgaatacattgatatggccgagtcattgtgccagaaacgtgctttggaggccttccgcttggacccagcgaaatggggagtgaatgtgcaacctctatcagggtcacctgccaacttccatgtttacactgccctattgaaaccacatgagagaatcatggctttggatcttcctcatggtggacatctttctcacggctaccagactgatactaagaagatttcagcagtttcgatattctttgagacaatgccctacagattggatgaaagcactggcttgattgattatgatcagatggagaaaagtgccgttctttttaggccaaagttgatcgttgcgggtgcaagtgcatatgcgcgtctttatgactatgaccgcatgcggaaggtttgtgacaagcagaaggcaatacttctagcagatatggcacatatcagtgggcttgtcgcagctggtgttgttccatctccttttgattatgcagatgtagtgactaccactactcacaagtcactccgtggaccacgtggagccatgatcttttacaggaagggggtgaaaggagtaaacaagcaaggcaaagaggttatgtatgactttgaggacaagatcaatgctgctgtcttcccaggtctgcaaggtggaccacataatcataccattactggcttagctgttgcgcttaagcaggcaactactccggagtacagagcttatcaagagcaagttatgagtaactgtgcaaaatttgcacagagcttgacagcaaaaggctacgaacttgtctctggtgggactgacaaccatttagtgttggtaaatctcaagagcaagggcatagatggttcaagagtggagaaggttttagaaaacgtgcacattgcagcaaacaagaacacagttcctggtgatgtttcagctatggtaccaggaggcatcaggatgggaaccccagcactgacctcaagaggatttgttgaggaggactttgctaaggttgctgatttcttcgatgcagcagtgaacttggctttgaaggttaaggctgcagcaggtggaacaaaactgaaggactttgttgccactttgcaatctgatagcaacattcaatccgagattgcaaaacttcgccatgatgtggaggaatatgcaaaacagttccccacaattgggtttgagaaagaaaccatgaagtacaagaactaagaaactttgaatggaacagcaagggtaaaagaaaaggcatcaagctgaattcctgaggtgactgttggaattcttgcaagaacaagtcggtgtaaacatatatccatggagtgccatcttatgtaaaagggacccctggcattttacagcgtgtggaaactttgtcaatagttcttatcgtagacacctactgtaagatgttatgctaatgctatattaaccttcactatcttcttggacaagcagttacacat

SEQ ID NO: 2890 - DNA, 1332 bp, Oryza sativa
  ref <308>: DATABASE ACCESSION NUMBER: AK060675
  ref <309>: DATABASE ENTRY DATE: 2001-12-06
aaaaccaccgctcgtctccaccgcgagcgaaacccaaaaaggcaatggcgaccgacggcgacgccctcgagtcccaggcggcggcggcggccgaggcggcgcgggagctgcgcgaggccgccgcgtccctcgtcgcccgccgctccgccgacgaggacgcgctccgccgccgcgccacggcgctcgacgccgacctccgccgcctccaggcctccctctccaccctcgcccccaccacgctcgacaaggttgaggaggaactggagcgtgccagggtaacaatctcagatagtgacgtggctgcatttctcccaagcaagcggaatgggaagttcctcaagacctttgttggccctgtaaatgtgcgggtggcgagaaaagaagataagctcagagtgaaggacgagtacaacaactacagggatagggctacctatatgtttctattgttcccatccattctcctcctacttagatggtggatatgggatggatgccttccagccttggcagttcagatgtaccaggcttggctactattcctttacacaagttttgctctgcgggagaatgtgttgattgtaaatggaagtgatattcgtccttggtggatataccaccactatttagcaatgctaatggctctcgttagccttacatgggagataaaaggacagcctgattgttccagcaagcagaggggggtacaacttttcctgcggtgggcaatcatgcaaggaattgcaatgcatctacagaataggtaccagcgtcaaagattgcgcacccggatagctctaggaaaggctaaaagaatggatgttgttgctggagaaacagctggtgtggaagggcagctcttgctactttacccggtccttttcacattacaggttttcgaaggatatgttggagtattacttcttaagacggctttgcacgggcttgcatcggaatggcaggttgtagtttgtgggatcttgctggtggtaatggcagtcggcaactttgtcaacacgatggagactttgatgttaaaattgaggttcaaagcaaaaatgaaaagagcaaagagcaggcaggatctcagtcgccaacaccaaaattgacaaagtgacccataatggtgactccatgcttggaaacagcgaatgctgacacaccatctctcttgtaaatcccttaatccataaactgttttggctgcccatgattttgtgttttggtaattgtttcacattgaagttcatattctacggtcaatgcacgattaaaaacactgttaactttaccacagatgggaacgctaaatttatgtgatttgtatgtgct

SEQ ID NO: 2891 - DNA, 295 bp, Oryza sativa
  ref <308>: DATABASE ACCESSION NUMBER: AK060676
  ref <309>: DATABASE ENTRY DATE: 2001-12-06
atgactacctgcttactcctaagaagtacactcctgccaagatggggttcaatggactgaagcagccacaggaccgtgctgatctcatcgcatacctgaagaacgccacagcatgagagtccctgctgccatcttcctaagatgaagagaagcttattgcccgtagcctcatactgactctttgtaacttgtaaggtgaactttgcaacaaaactgtgttgtaaatttgtaataataagcagtggcctcgtggaagagacgatgtgcagctcatccacttgggcagctgcgagct

SEQ ID NO: 2892 - DNA, 1645 bp, Oryza sativa
  ref <308>: DATABASE ACCESSION NUMBER: AK060677
  ref <309>: DATABASE ENTRY DATE: 2001-12-06
aaaaccaaggccaaaaccctcctcccctcctctcctctccattccgccgccatggccgccgccgccgccgccgccaccacccccaactccctcctcctccgccgcccggcggcacccaagccggcctccgcggcggcctcgccgctccgtctccccacgcgggcagccaggatctcctgcgcggccgtggccacgcccgcgcagtcctcctcctcccccgccgccgccgccgccgaccgcggggtctacaacttcgccgcgggcccggccacgctgccgctctccgtgctccagagggcgcaggcggagctcgtcgactaccgcggctccggcatgagcatcatggagatgagccaccgcgggaaggagttcgacgccgcgatcaagaaggcggaggccgacctccgcgcgctcctcgccgtgcccgacacccacgaggtgctcttcctccagggcggcgccacctcccagttcgccgccgcgccgctcaacctctgcgcctccccctccgaccccgccgacttcgtcgtctccgggtcgtggagcgacaaggcgttcaaggaggccaagaagttctccgccgcgtccgtcgcctggtccggcaaggacggcaagtacacctccctcccgcccttcgacgccatcgagcagaaccccgaggcaaggttcctccacatctgctccaacgagaccatccatggcgtcgagttcaaggactacccggagcccaagaacaagtcgggcatcctcgtcgccgacatgtcctccaacttctgctccaagcccgtcgacgtctcccgcttcggcctcatctacgccggcgcgcagaagaacgtcggccctccggcgtcaccatcgccatcgtccgcaaggacctcgtcggcagcgcgcagcccatcaccccggtgatgctcgactacaagacgcacgcggacaacgcctccctgtacagcaccccgccgtgcttcgccatctacatctgcggcctcgtgttcgaggacctgctcgcgcagggcggcctcgccgaggtcgagaagaagaacgcccacaaggccggcatcctctacgacgccattgatgccagcggcggatactacatctgccccgtggagaaatccgtgcgatcgctgatgaatgtgccgttcaccctcgccaagggtggggattttgagaagcagttcatcgccgaggcggccaaggagggaatggtgcggctcaaggggcacaggtcggtcggcggcgtgcgcgcctccatctacaacgccatgccgctcgccggtgtggagaagctcgtcgcgttcatgaaggatttccaagccaggaacccttaatttgactcatggtggttatggtattttgatgctgtcttcagtaggaatggtctctgttcttcatcatagcataattaggctccttgcaagagctgctttgcgcgtaagagattttcgatccatctgttgtatcggtaccagtaactatttcgcgatgctgctgctactgcttttcatgtgttcatgggatctcattcccattttgtgccattgaatgttagtatgggaataaaggtagattcttagctatctgagaggagtatatgctgatgctgatgcataataacaaggttgcttggtcttcttgtgtgatc

SEQ ID NO: 2893 - DNA, 1032 bp, Oryza sativa
  ref <308>: DATABASE ACCESSION NUMBER: AK060678
  ref <309>: DATABASE ENTRY DATE: 2001-12-06
gtgcgtgcgcgttcctctcaccacggcgaacttccagcctctcccgccgcggcttccgcgccgtccgctcggcagtggcgccgccgcctcgccgcgcaatggcccccgccgtgctcctccgcctcgccccctcgcctccgtatccccagaacccgccgccccggcggcggagccccgcctcggcatgcggcgcctcgcgccgcgacttcgccatccacaccgccatcgcctccgcctccgccgcggttgcggtctccgttcgtccggccaccgccgccgccgccgacgaggaggcgccaccgggggagccttcccaaaataagaagggctcccctctgctgggcggcatcgcgaacaccaagtcgtggtcgcagtactacggcagcggcttctccatccgcgttcccccttccttcgacgacatcttggagcccgaggagttcaacgtcggggtgacctactacggcgacaaggcgaagcccaggacatacgctgctcgcttcgcgtctccggacaggtctgaacttgtaagcgtggtaattaagccatcgaatcagctcaaaatcacattcctagaggccaaagatgtaacagacctgggcactttaaaggaggcatcaaagatatttgtacctggtggcgcaaaattatactcagctcgaacaattaaagttaaggatgaagatgatataaggacatattacttttatgagtttggtgtggacaaagaacatgttgctgtaatggctactgtgaatagtggaaagacatatattgccggtgccactgctccagagacaaagtgggacgatgatggcgtgaagttgcgatcggctgctgtatctttgtctgttttatgatgcaaagcagaataccaagcatttattcagaatttcaggccgcagctgcatagatgaatcatatcatcttattttttggtcgtgtttttttagataatagatagataaaacatgtcctctacacccaaatgggtgtacgcagccaaaggataatacaagagtacttagaccc

SEQ ID NO: 2894 - DNA, 1573 bp, Oryza sativa
  ref <308>: DATABASE ACCESSION NUMBER: AK060679
  ref <309>: DATABASE ENTRY DATE: 2001-12-06
acgcttccgattctgcccatggcgacgccgccgcacgacgcctcgccggccccaccaaaccctaaccccgtctccgacgaccccccgccgccgccgccggtgacggagacgaagccggagccggagccgcctctccccaccacctcgatcgaccccaccccgtctggcgacgaggagagcggcgatgactcctcgtcttctgtctcatccgcctcgtctacttcgcccacggccgccgcggctgctgctgctgcgggaggtggaggtggaggtggaggcgagagggcggctccccacccggcggcgaaggatctcctccatatctccttcaaccaggactacggctgcttcgcggcggggaccaagtcgggcttccgcatctacaactgcgatccattccgcgagatcttccgccgggacctcggggccgcgggggacaacggcgtcggcggtggaggaggaggaatcggcgtcgtggagatgctgttccggtgtaacatactggccctcgtcggcggcggagacgcccctcactacccgcctaacaaggtgatgatctgggacgaccaccagagccggtgtatcggggagctctccttccgctcccccgtgcgcggtgtccgcctccgccgcgatcgcatcatcgtggtgctagagaacaaaatcttcgtctacaatttcgcggacctgaagcttgttcaccagatcgagacggcgcctaacccgaagggcctctgcgcggtttcgcagcagcccggatcgattgtgctggtttgccctggtgcacagaaagggcaggttagagtggagcactatggtgccaggaagaccaaattcatcaatgcgcatacttcccgtgtcgcgtgctttgcattatcacaggatgggaggctcattgctactgccagcaccaaggggacacttgttagaatctacaatgctgccgagggcaatctcctgcaggaagtacggagaggtgctgatagagcagaaatatatagcttggcgttctccaacaatttgcaatatttggctgtatcaagtgataaaggaacaatacatgtgttcaatctaaagataaatgttggattaaccacgaatgataagcccctgcctgctccagatcctgatgttccacatatcagtccatctctttctttcattaagggtgtactaccaaaatatttccactcggagtggtctgtagctcagttcagactccacgagggggagcaatatattgttgcatttggccatgagaagaataccgtggcagttgttggcatggatggaagcttctaccgatgccagttcgaccctgtaaacggaggagagatgctgcagctggagtgctacaatttcctaaaaccatcatcggatcaaccacagtagcagcccaagcagcggatctgtttttcctcccttgtatcggggttgtacagtatctgtgtgccctctcgattattgttattatttgtaaatatatcttagtggtgattctacaagtatgctctgttgagggttaaaagaacccttgtgcagatggacataataatattactcccacgttagc

SEQ ID NO: 2895 - DNA, 963 bp, Oryza sativa
  ref <308>: DATABASE ACCESSION NUMBER: AK060680
  ref <309>: DATABASE ENTRY DATE: 2001-12-06
acgaagtctatctccattgtcatcggcatcaaaactctgcagtcgctgtggccaagcagatgagccgaagatggctgccaccaccttcagctcctctccctccaaggttactactgccaaactaggaggaggcgtcaccagatcttcctcgccatacacgcagctcaccttctgctcgaggcatcacttccagaaggcggcgacgacagcggcggccttccaccacaagcctcccccggccgagctgtcccttctgctctcgccggcgaggagcaagcatgcaagaacgtgcccggccgccgacaacgaccgcgcggcgcccgcggcacaggaagcaacaaacacgcctccgccgccggccgcgcccagcgccaacggcagcccgccccaggagccgccgaagcgggcgccactgacggcgcgggagcggctgcgcgcggcgcgcgtgctgggcaagtacgcggagcctgggggctcgtctccgaagggcaaggcctcggcagcgtcggcggcggctggggcggcagggaagaagccggagttcgggagccgggtgctggacgcgctccgggagacggacgggaaggccgggaagaagcggtcgtcgcggctgcccgaggcgccgagcaacatgttcgacgacagcaagcgcggcctgcccaaggaagggtggacgttcgaggcgctgccgttcggcaccgacgtgatcgtcatcgccgcctccttcacgctcatcaccgtcgtcatgttcggcaccacgtacctcgtctggaagctcggcgccattcacttcaacgagttctaggctacgtactatcactcacacaatgagctcgctagatttgtgggtctttgggtgatgaaatcgcgttggatttgtagctgccttttgcggtgctttgatcagatactcgtgtgatattgtactgaactgccggctttggttttaagggtggattttgg

SEQ ID NO: 2896 - DNA, 1645 bp, Oryza sativa
  ref <308>: DATABASE ACCESSION NUMBER: AK060681
  ref <309>: DATABASE ENTRY DATE: 2001-12-06
agccctatctagtgacacccataaaaaccagtgtgtgtgattagtaccgtaccggcagtctagtgagatcgggtaccacgagatatacttcttcttgtcgcgctgcttaccgttgatgcgcttagccgccgcctgccatggcctccgccgtcgcgagtaacttgcctgcagctgcgcccgcggctgtcatgccgttcggtggatggcatgctccgcgtgtctcgttcagccgcgacgccgccggggctgaggaggctgccgcggtggtcgtgtgttcttcgcccctggccgccgcggcggcggtggcgacgacgacgacgccggagccggcgatatccaaggacttcatcgacttcgagttcagcctcgggggctccgccaccatgctcccggcggacgagctctttgccgacgggaagctgctcccgcttcggaaggcggcggctgtgccggagatggatgcggcggcgccacggccgccgcagcctgaggcaatgccggcgccttcggagccgatgaagccactacgggcggctaccgccgcggttgacgccgccgacccgtacgttttctctcctaaggcgcccagctgctcgagccggtggcgggagttgctcgggctgaagagagcggcagcgcagagcccgaagccatcgccgtcgtctgcgcccgcgagaacccccgggagagcgatgaactcgacggcggcgaggtcgctgaagctgctgctccaacggaacaacggccgctcgtccggggcctccgcgtcggagctcgcctctgcgccgctcctccgcgacagctccgactcggaggcgtctctctccctcgcctcctcccgcttctccctctcgtcgtcgtcgtcttcctccggccacgaccacgacgacatcccgcgcctctccctcgactccgccgctgaccccaacccgccccgcatccgcctcgtccgttcctcccaccgccactccacctcctcatcctcctcatcccgcgccggccgaagccccgcgcgccgccgcccctccccgccgccgccgccgcgctgcctctccgtcgactccccgcgcatgaactcctccggcaagatcgtgttccagggcctggagcgcagctccagctcaccgtgcaccctccgcgccgcggcgaagccacgctcccgcgccgtcgaccggtcatactcctccggcgtccgcgtggcgccggtggtgctgaacgtgccggtgtgctcgcggccggtgttcgggttcttcaaggacaagaaggacgcggcggcgaaggacgccatggcggcgaggacgaggtcgtcgctggggcggaagacgacggcggcgccgcaagggtggagcggcgagctggggagatcttgtgggtaatttgactcttgtttgaccggttagttgctgttgggatttgtcttgtttgctgctgccggtatgatgagtgcacggaaagggaaagggggaggccatgatgagatgatagtttggttttaactgattttgtttgttctttggagacgcctcatggaaggtctaatcaattgactgttctttttttcttctttctttctttctcttagaactgtatattccgaattttgtttctgtctcgcaccatcaaagttgatcttctttcttctttt

SEQ ID NO: 2897 - DNA, 1597 bp, Oryza sativa
  ref <308>: DATABASE ACCESSION NUMBER: AK060682
  ref <309>: DATABASE ENTRY DATE: 2001-12-06
atcccaagcggcacagcagcctcgagctgaactgaagcaggggaggggaggagaggagaggagagagcaacgcgttcaccgttgagagaagagaaggaagtaagacgagcgcaatgcgtcgcgtcacggtgctcgttctgctcctcgcctgcgcggcggcgcgcgccgccgccgccgtcgtcaccgacgggctgttgccgaacggcaacttcgaggagggcccacccaagtcggacctggtgaacggcacggtggtgcgcggcgcgaacgccatcccgcggtgggagacgtccgggttcgtggagtacatcgagtccgggcacaagcagggggacatgctgctggtggtgccgcagggcgcgcacgccgtgcgcctcggcaacgaggcgtccatccggcagcggctcgccgtgaccaggggcgcctactacgccgtcacgtttagcgcggcgcgcacctgcgcccaggcggagcagctcaacgtgtcggtgagccccgagtggggggtgctccccatgcagaccatctacggcagcaacgggtgggactcgtacgcgtgggcgttcaaggcgaagatggacgaggtggcgctcgtcatccacaacccgggcgtggaggaggacccggcgtgcggcccgctcatcgacggcgtcgccatcagggcgctgtacccgccgacgctggccaaggggaacatgctcaagaacggcgggttcgaggagggcccctacttcctccccaacgcgtcgtggggggtgctcgtcccgcccaacatcgaggacgaccactcgccgctcccggcgtggatgatcatgtcgtccaaggccgtcaagtacgtcgacgccgcgcacttcgccgtgccgcagggcgcccgcgccgtggagctggtggggggcaaggagtcggcgctggtgcaggaggtgcgcaccgtgcccgggtggacgtaccgcctgtcgttcgccgtgggcgacgcgcgcgacgggtgcgcgggctccatggtcgccgaggcgtacgcggcgagggcctccatcaaggtgccgtacgagtccaagggcaccggcgggtacaagcgcgccgtcctcgagttcgccgccatcgccaaccgcacccgcgtcgtgttccagagcacgttctaccacaccatgaccgacggctcgctctgcgggccggtcatcgacgacgcctccctcgtcggcctccgcaagaagacggccggccggcggctgctcctgtaagacgaacggccgcgtggcatcgaacgccgtcgcattccctccattctatgaatatatgaatacaaggcgcggttaaacttgggggcagttggcacgaccaaagttgggtgctaaaatgggtagtattgctaggctcgtttttttggttttggtgtgtactctggtatatgtacgcgtgtgcgcgcgttgcatggttatactttggagctgcgctcgtttggtgttttgttgtgaagaggagaggtgatacgtggtgcaaggtctgtcacaaggggtttggttgatcaacttaaccggaggtgccaacctaaacgcaccatcagacattatgaatgggaagcattactagtgctcactttttt

SEQ ID NO: 2898 - DNA, 1438 bp, Oryza sativa
  ref <308>: DATABASE ACCESSION NUMBER: AK060683
  ref <309>: DATABASE ENTRY DATE: 2001-12-06
tattgaagggttgccaagatcttcatcttacaattgtatactggtggtggtggataaattttcaaaatatggccatttcttgcccttatcccaccctttcacagcaatagatgtggcaaaaacttttatgctgaacatttataaactacatggtcttccccagactataatctcagacagagataagatctttacaagccaattgtgggagcagctgtttactagatcaggaacacaactgcatctgagcactgcttatcaccctcagtcggatggccagactgagagggttaatcagtgcctggagatttatctcagatgttttacacatgcaactccttctaagtgggcagtgtggcttcatttagctgaattctggtataatactgcattccactcagcactgaatacatctccctttgaagttctatatggccacccacccaggtattttggaattcattcagaggattgtgctattcctgaactacaagtttggctcaaggagcgtagactgatgcattcattgattcagcagcaccttaaccgagcccagcaacacatgaaaatatggctgacaagaaacgcagtttcagatcttttgaattgggtgactgggtttatattaagttacagccctatgttcagtcttctgtcgcagctagggctaatcataagcttgcattcagatattttggccctttccaagttattcagaagtttggctctgtggcatacaagctccaacttcccactactagttctatccaccctgtgttccatgtgtcccagcttaaggcagccaagggtttccaaggagcattgcactccactctgccttcttctgatgatgctttccagtatcctatcatgctcctggataaccggctgattaagaaaggtaacaccaccgtttcccaggttttaatacagtggtctgatactgcagttgaagatgccacctgggaggaccttgaggatctccgggcgcgttttcctgaagctttggcttgggggcaagccactttccaaggggaagggattgtcaaggcgtcaggcgaggaggagccgagtgcaagcgccaagctgaagatgaagcctgtgccggatggtgagcaggaaggaggagaagaagacttgaggccggccagagtcattaggcctaatcgtaaatatgttgggccggaatgggccatgtaacctgtatcgctggcatgagctggcatctgtcttgtgagaggggaaggaagggagttggtagcgagagagagtataagaactgaggtttctaaattgtaagggacttttggcaatctggtggcgaatggcggcggcggctcaaccctgttgggttggagcaagattatcctagtaaaagattgcctaaacacatctctgttcttcctgagttgttcgagttcttccacttttccttttc

SEQ ID NO: 2899 - DNA, 1037 bp, Oryza sativa
  ref <308>: DATABASE ACCESSION NUMBER: AK060684
  ref <309>: DATABASE ENTRY DATE: 2001-12-06
aaaagctattactactagtacaaaaccaacgcgaagctctcgtcgcgcacaaccaactcgacaccgcggcgaggcgaaccaacgcgcggcgtgggcatggggaggtcgccatgctgcgagaaggcgcacacgaacaagggggcgtggacgaaggaggaggaccagcggctgatcgcctacatcaaggcgcacggcgagggttgctggcggtcgctgcccaaggcggcggggctcctccgctgcggcaagagctgccgcctccgctggatgaactacctccgccccgacctcaagcgcggcaacttcaccgacgacgacgacgagctcatcatcaagctccacgcccttctcggcaacaagtggtcgttgattgcggggcagctgccggggaggacggacaacgagatcaagaactactggaacacgcacatcaagcgcaagctcctgagccggggcatcgacccgcagacgcaccggccggtcagcgccgggagcagcgccgccgcggcgagcgggctgaccacgacggccagcaccgccgcctttccgtcccttgcgccggcgccgccgccgcagcagcacaggctacacaacccggtgcacgccgcggcgccgagcaatgcgagcttcgccaggtccgcggcgtccccgccgtcggaggacggccacagcagcagcggcggcagctcggacgcgccgcggtgccccgacctcaacctcgacctcgacctcgacctgtccatgagcctgccgagctcgccgcccaagacgccggccgccgcgtcgtccacgaccgcgtcgcgccaccatcaccaccagcagcagaagaccatctgcctctgctaccacctcggcgtccgcaacggcgacgtctgcagctgcaaggcggccgcgccatcgccggccggcccacgcgcgttccggtttctcaggccactggaggagggccagtacatatagcacagcaggctttagggaaaaaaaacctgtaaaaaacacaaaaaaaaacggtgggcaatagagttttttctaagttc

SEQ ID NO: 2900 - DNA, 1835 bp, Oryza sativa
  ref <308>: DATABASE ACCESSION NUMBER: AK060685
  ref <309>: DATABASE ENTRY DATE: 2001-12-06
aaaaaaaaaaaaaaaaaaaaaatctatcgatcttcttccacacgcgcgtacgtgtgtgttggtcgtctcaagggtatatatagcaaattaataatagatagatcgatcgatcgagtggagacgatgttgccgagaagccgaacgctcccgccaaggattcatgatggcgtcgtggtggtagaacgcgatgtgaggaggtaccagcagctgccgcagcaggtggagatggagatgacgacgaccaagaggcagcaggatcatcaggtggagacgatgacgacgaagaagattgatgaagaagatgaagaggtggacgacgacggtcgggcgaagcggagggggacggtgtggacggcggcgtcgcacatcatcacggcggtgatcgggtcaggtgtgctgtcgctggcgtgggcgatcgcgcagctgggctgggtggtgggccccaccgtcatgctcctctttgctgccgtcacctacttcacctccaacctcctcgccgactgctaccgcaccggcgaccccgccaccggcagaaggaactacacctacatggacgccgtcaaggccaacctcggcggtgccaaggtgaaggtttgcggatgcattcagtacctcaaccttttgggagtggccatcggttacaccatcgccgcctccattagcatgatggcgatccagcgttccaactgcttccacgcgagaggagagcaggatccatgccacgcctccagcaacgtgtacatgatcatgttcggcatcgtccaggtgttcttctcccagatccccgacttcgaccaagtctggtggctctccatcctcgccgccgtcatgtccttcacctactccgccgtcggcctcgccctcggcgccgcccaggtcgcccagaaccgcacgttcgccggcagcgccatgggcgtcgccgtgggcttcgtcaccaagaccggcgacgtcgtcacccccgcgcagaaggtgtggcgcaacctgcaggcgctgggggacatcgccttcgcctactcctactccatcatcctcatcgagatccaggacacgctgcggtcgccgccggcggaggcgaggacgatgcggaaggcgacggggatcagcgtggtggtgacgagcgtgttctacctgctgtgcggatgcatggggtacgcggcgttcggcgacgacgcgccggggaacctcctcaccggcttcggcttctacaagccctactggctgctggacgtggccaacatggcgatcgtggtacacctggtgggggcgtaccaggtgtactgccagccgctcttcgccttcgtggagaggagggcggagcggcggtggcccaacggcctccccggcggcgactacgacctggggtggataaaggtgagcgtgttcaggttggcgtggcggacgtgcttcgtggcggtgacgacggtggtggcgatgctgctgcccttcttcaacgacgtggtgggcatcctgggggcgctcggcttctggccgctcaccgtctacttccccgtcgagatgtacatcgcccaccgccgcatccggaggtggacaaccacctgggtcggcctgcaggcgctcagcctcgcctgccttctcgtctcgctcgccgccgccgtcggctccatcgccggcgtcctgctcgacctcaagtcctaccgtccattccgctccacctactaattaacgatcgatgattgtgctactagaaaggaaataggtatccgatgtatcatgagcttgggctggccataacgatgcaatattaataaggcctcaacccacaagatgcaacgatggtttcaattataaggttgggctagacacggttcatccac

SEQ ID NO: 2901 - DNA, 2013 bp, Oryza sativa
  ref <308>: DATABASE ACCESSION NUMBER: AK060686
  ref <309>: DATABASE ENTRY DATE: 2001-12-06
aactaaaccaccaccaccaccaccccccgccgagacagtgacactctccttccgcggcaatggcggcggcgggcggtgctgtgctgctgctggtgctggcgaccgcgacttcggtgacagggcagcatgactacagcgacgcgctccacaagagcatcctgttcttcgagggccagcgctccggccgcctgccacccgaccagcgcctccgctggcgccgtgactccgccctcaacgacggcgccaccgccggcgtggacctgacgggagggtactacgacgccggcgacaacgtgaagttcgggttcccgatggcgttcacggcgacgctcatgtcgtgggggctgatcgacttcgggcggagcttcggggcgcacgcggcggaggcgagggaggcggtgcggtgggcgacggactacctgatgaaggcgacggcgacgcccaacacggtgtacgtccaggtcggcgacgccttccgcgaccactcctgctgggagcgccccgaggacatggacaccccgcgcaccgtctacaaggtcgacccctcccaccccggctccgacgtcgccgccgagaccgccgccgccctcgccgccgcctccatcgtcttccgcgacgccgaccccgactactccaaccgcctcctcgaccgcgccatccaggtgttcgagttcgcggacaagtacaggggcccatacagcagcagcctgcacgcggccgtgtgcccctgctactgcgactactccggctacaaggacgagttgctgtggggcgcggcgtggctgcacaaggcgtcgcggcgccgggagtaccgcgactacatcaagcggaacgaggtggtgctcggcgccagcgaggccatcaacgagttcggctgggacaacaagcacgccggcatcaacgtcctcatctccaaggaggtcctgatggggaaggacgagtatttccagtcgttccgcgtgaacgccgacaacttcatctgcaccctcctccccggcatctctaatcatccccagatccagtactccccaggtgggctgctgttcaaggcgggcaacagcaacatgcagcacgtgacgtcgctgtcgttcctcctcctcgcatactccaactatctcagccacgccaacgtccgcgtcccctgcggcacctcctccgcctcccccgtccagctccgacgcgtcgccaagcgccaggtggactacatcctgggcgacaacccgctgcggatgtcgtacatggtgggttacgggtcgaggtacccgctgcggatccaccaccgggggagctcgctgccgtcggtggcggcgcacccggcgcagatcgggtgcaaggccggggcgacctactacgccagcgcggcgcccaacccgaacctcctggtgggcgccgtggtgggcgggcccagcaacaccagcgacgcgttccccgacgcgcgggccgtgttccagcagtccgagcccaccacgtacatcaacgccccgctcctcggcctcctcgcctacttctcggcccaccccaacctggcccagtccgatctcctctacgactgaaaatctgacggcccaacacaagtggccttccccgttttgcattggccgtagtgggccgatttgatcgagtaattggttagtaatttagtattgatcctgtagcgtgtgccgatcctttcctgtaaaaaatggcaggaacggggattggtcgtagcgtggttgtatgcactgtaccctagcattttagtagcaatttagcgtatgctggatgcgatgtcttattggcatcagatgtccatccggctatgcgatgcattctgttcggctatctactctaagcatcctttgtcaagtgtcaagggggccggaattagtgccaggattaagctttaagctaagcatatctgtaacgtcgtcgtccacaagacatgtcatgtgcagcattgggcctttttccggcttttgggattactcctcgctggaatccaaagctttgcttgaagcaggcagctattctcgt

SEQ ID NO: 2902 - DNA, 1183 bp, Oryza sativa
  ref <308>: DATABASE ACCESSION NUMBER: AK060687
  ref <309>: DATABASE ENTRY DATE: 2001-12-06
gtgcagacgacggactagtgcgtgcgtgcgtgacgcgagaggctgagaggagcattttggcccttggtttctttcggttcttctgctcttttttgctggcgatggggtggtcgtcgtcaagggctatgctcgtggcgcgcgctgtggccttggcggtggtgttcctcgcggcggaggctcagctgtcgccggggtactacaacgcgacgtgccccggggtggtgtccatcgtgcgccgcggcatggcgcaggcagtgcagaaggagtcgcgcatgggcgcctccatcctccgcctcttcttccacgactgcttcgtcaacgggtgcgacgcctccatcttgctcgacgacacggcgaacttcaccggggagaagaacgccgggccgaacgccaactcggtgcgcgggtacgaggtcatcgacgccatcaaggcgcagctcgaggcctcctgcaaggccaccgtctcctgcgccgacatcatcacgctcgccgcgcgcgacgccgtcaacctgctcgggggcccgaactggacggtgccgctggggcggcgtgacgcgcgcacgacgagccagagcgcggcgaacaccaacctgccgccgcccggcgcgagcctcgcgtcgctcctgtcgatgttcagcgccaagggcctcgacgcgcgggacctcaccgcgctgtcgggcgcgcacaccgtcgggtgggcgcgctgctccaccttccgcacgcacatctacaacgacaccggcgtgaacgccaccttcgcctcgcagctgcgcaccaagtcctgcccgaccaccggcggcgacggcaacctcgcgccgctcgagctgcaggcgcccaacaccttcgacaacgcctacttcacggacctcctcagccgccgcgtcctgctgcgctccgaccaggagctcttcggcagcggcgccggcaatggcaccacggacgcgttcgtgcgcgcgtacgccgccaacgcgacgacgttcgcggcggacttcgccgccgcgatggtgaggctgggcaacctgagcccgctcaccgggaagaacggcgaggtacggatcaactgccggcgagtgaactcatcatgaacatgaaatggattcttgatgtacgcttcgtgaacgccataaacttattatcaaatcttgtttttaccaaaagcaaatggaaaaaatgctgttcttgc

SEQ ID NO: 2903 - DNA, 1703 bp, Oryza sativa
  ref <308>: DATABASE ACCESSION NUMBER: AK060688
  ref <309>: DATABASE ENTRY DATE: 2001-12-06
aaagcgagtccctccccctcccgtctcgagcgccggtaaactccacgcctccaatcggccaatcgccaattcgcaatccattccccccgaaaccctaaccggcgcctctcctccacgcgccgcgccgcctcccgctcctccctcccagcagcgccgccgtcgtcgtccctctcaccggcgggtggcggcgatggcctcctcggcgtcgtcatccaggcaccaggtcaccatcaccctcggccgcagcggtcaggttgtcaaaaggcgagctgtatctgacattgataatgatgatggtgtgcacttaggaagaaaacgatctgtgagggacagactaggaaataatatggttggttctgagtcgtatgatggccagcagcgtaacaaaagacgacagatagaaaccaatggtttgcagcatggagataatggtacgggtgatgatgaacacttcgttttcttgcttatccactaaaatgtaaatgacccctgtttgacaatgatattttgtgcataccaatataccacataaagattgccaggtcggtagggatgatttgagattgaagcttatgaagaaaggcttgtctagcaatggtggtgcagaacagaatggagtggatctccgtgaaaagctttccaggaaacctaagaatatacggaggtatgatgcaagaggacatgtttcagaatcaaggtctagatatgacggaagagataaaattccagaattaaggtcaagatatggcatgagagagaggctccctgagccaaggacatctgctcttcctagtcgaattccttctgcaagaagcatggatgatctgttgaagttggactcttcaagagaagcttattcctcgtggtctggtaatttgaggcacaggtcccctgaaaaacttaaaagtgctcgcagagatatgtctccctcaagaacatatgatcatattcgttccatgccacccattagatctgctggtacctcaaggacttcaggtctcatcactagagacgctcctgatgcattaagaactcaaccttatgctggcaagtctaccatttctattgatacaactcagccagcaaatggagttgcttcatctgctacagtgatgcctacagctcctgtgatgccagaagtaccgctaacagttactgggttgctgaattcactaggacttgagaagtatgtcttcctcttccatgctgaagaggtggatatggctgcattgagtcagatgggagacagtgacctgaaggaaataggggtaccaatgggtcctagaaagaagattctccaggcagtggcaccttattcaaaacggcgtagatgaacagcatgctcaggaacttggggcgttcgtgggcaatgacaatttattggtgtaagctgcttcattgcagatcttgtatatcccaatggtctagtgctctagtcaatccgtttcattgctgatagatcaacgcatcgcttttcttggcatgcataatcttatctgtcagctgatgatcccaatcctgttattcacgacctgccccttgtgtagcaggatctgaaacatggatatgtagctttgctacactaaccagtcagttttttcttcctctttgggaattgggaacatcgatgacctgtaatcgaaatcccatgctttatgaccttgggagcgttggcaattgagtttactggaacatactagtgt

SEQ ID NO: 2904 - DNA, 1553 bp, Oryza sativa
  ref <308>: DATABASE ACCESSION NUMBER: AK060689
  ref <309>: DATABASE ENTRY DATE: 2001-12-06
gcatggggttcgcggtggtgaggacgaaccgggagttcgtgcggccgagcgcggcgacgccgccgtcgtccggcgagctgctggagctgtccatcatcgaccgcgtggtggggctccgccacctggtgcggtcgctgcacatcttctccgccgccgccccgagcggcggcgacgccaagccgtcgccggcgcgggtgatcaaggaggcgctggggaaggcgctggtggactactacccgttcgcggggaggttcgtggacggcggcggcgggccggggagcgcccgcgtggagtgcaccggcgagggcgcctggttcgtggaggccgccgccggctgcagcctcgacgacgtgaacggcctcgaccacccgctcatgatccccgaggacgacctcctccccgacgccgcccccggtgtccaccccctcgacctccccctcatgatgcaggtgacggagttcagttgcggagggttcgtggtgggcctgatctcggtgcacacgatggcggacgggctaggggccgggcagttcatcaacgcggtgggcgactacgcccgcgggctggacaggccgagggtgagcccggtctgggcccgcgaggccatcccgagcccgccgaagctgcccccgggcccgccgccggagctgaagatgttccagctccgccacgtcaccgccgacctgagcctggacagcatcaacaaggccaagtccgcctacttcgccgccaccggccaccgctgctccaccttcgacgtcgccatcgccaagacgtggcaggcgcgcacccgcgcgctccgcctcccggaacccacctcccgcgtcaacctctgcttcttcgccaacacccgccacctcatggccggcgccgccgcctggcccgcacccgccgccggcggcaatggcggcaatgggttctacggcaactgcttctacccggtgtcggtggtggcggagagcggggcggtggaggcggcggacgtggccggggtggtggggatgatacgggaggcgaaggcgaggctgccggcggacttcgcgcggtgggcggtggccgacttcagggaggatccgtacgagctgagcttcacgtacgattccctgttcgtctccgactggacgcggctggggttcctggaggcggactacgggtgggggccgccgtcgcacgtcatacccttcgcgtactacccgttcatggccgtcgccatcatcggcgcgccgccggtgcccaagaccggcgcccggatcatgacgcagtgcgtcgaggacgaccacctgccggcgttcaaggaggagatcaaggccttcgacaagtaaaatgcttgtgaaatgtgaactttgttattgttactacttctatgggctcgttgctcaatgggcttttttttgcttttgttttgtgtgtgtgggccgacacgattggtcaaaagggatttggtggaggcccagttgtaataagatggtccacgcatcatggattaatcgttaattgtaaggtagtactacacggatttgttaacaaggaataagttcacttggtgacccagt

SEQ ID NO: 2905 - DNA, 1594 bp, Oryza sativa
  ref <308>: DATABASE ACCESSION NUMBER: AK060690
  ref <309>: DATABASE ENTRY DATE: 2001-12-06
atccatcaagtcgcacttgccactccaccagcctctgcctccctctccctcccaaatcgccgagaaaagaaggagataaaataatcggcagttcggtttccagcttccagcaattgcgattttgggtgattagctccagcagcagataggtgattagttctttcagactttcaccgtttcacgtcgccggccggcgggacacccggcaaatggcgcgcgccggtgcggtgctcgtggtggtgctcgccgcggcgtcggtgctgttggcgccgtgggcggcgacggcgcagacatccagctgcgacgacgcgctgcccccggcgctcgccggcaactactccgggctggcctgccgcccggtctggaacaacttcgtcctccggtacgcgcaggggaaggacaacgtgctgcgggtggtgatctcgtcgatgtacagcacggggtgggtggggatggggttctccaaggacgggatgatggtgggatcgagcgccatggttgggtgggtcggcaagacggggctgtcccacgtcaagcagttcagcctccgcgggaagacgccgtcgcaggtggtcgccgacgagggcttcctccagtccaaggaccacgaccacaccgtcgtggtgcagcaggccaagatctacctcgccttccagctcaggttccagtcgccgctcaggcggcagcaggtgctcctcgccttcggcaacgccatccccgtcaacgaccgcctcactgagcaccagggcaagacgtccttcaccttcgatttcaccactggcagctcttcaggttcgtcttacccggatggtctgaagagggcccatggggcactcaacctgtttgcctggggagttctcctgcctatcggtgctatcatcgcgcggtactgcaggagatgggaccctctgtggttctaccttcacgccggcatccagcttgtgggcttcatccttggtctggctggcattgtggccggagtatcgttgtacaataagatccaagcagatgtcccggcgcataggggccttggcatatttgtgcttgtgctgggtatcctgcagattctggccttcttcctaaggcctcacaaggactcaaaatatcggaaatactggaactggtaccaccattgggtaggcaggcttgcgctcttctttgcagccatcaacattgtccttggaatcaaggtcggagccgccggcaactcgtggaagatcggctatggcttcaacctggccatcctcctgatcaccattatcaccctggaggtcctgctatggacaaggtggaaaaacaacaacagcagttcgatgccaacatattaagtgtgattaaattaggttgatcttgtcgctgtaacttataactgaaggccctattcttccattagtttcttttaatggttgtaccatttgtgtgatgctgttgctttgatgtttctgcaagatcttttagcagaaaccaaagatgtagtacaagactagtcagttgatgtcttgatgatgagctgtgacgtgcaaaatgacgaggtgaacacaactggtaattgtaatgcagtggcaaaggtgtagtattatactccctccgtttc

SEQ ID NO: 2906 - DNA, 1310 bp, Oryza sativa
  ref <308>: DATABASE ACCESSION NUMBER: AK060691
  ref <309>: DATABASE ENTRY DATE: 2001-12-06
actctcagtgtcactcacttcactgcttacaccgcgcgacgcgtcacacacgtacgtagtagctagctgcaatggcgtcgccgctggtacggctgctcctcctcctcctcctcgtcgtcgcggcggcgagccgcggcgcggcgtcggcggcgaaggcgaaggcggcgcgggtgacggcggtgatcgtgttcggggactcgacggtggacacggggaacaacaaccagatcgggacgccgctgcggagcgacttcccgccgtacgggcgcgacatgcccggcggcgcgcgcgcgacggggaggttcggcaacggccgcctcgcgccggacttcatgtcggagtccctcggcctgccgccgctcgtcccggcgtacctcgacccggcctacggcatcgccgacttcgcccgcggcgtctgcttcgcctccgccggcaccggcctcgacaacgccaccgccggcgtcctgtcagtgatcccgctgtggaaggaggtggagtactaccgggagtaccagcggcggctgcgcgcgcacgcgggcgccgcggcggcgcgcgacgtcgtgcgcggcgcgctccacgtcgtgagcatcggcaccaacgacttcctggagaactactacatgctcgccacggggcggttcgcgcggtacagcgtgggggagtacgaggactacctcgtcgccgcggcgcgcgcgttcctcgccgcgatccaccgcctcggcgcgcggcgcgtcacgttcgcggggctctcgccgatggggtgcctgccgctggagcgcaccgccggcgcgctcctcggcggcggcggcggcggctgcgtcgaggagtacaaccgggtggcgcgcgagtacaacggcaaggtggaggccatggtgaggtcgctccgcgccgagctcccgcgactcaaggtcgccttcatccccgtctatgacaacatgctcgacctcatcacccacccggaaaagtacgggctggagaacgtggaggaggggtgctgcgcgacggggaggttcgagatggggttcatgtgcaacgacgagtcgccattgacgtgcgacgacgccagcaagtacctcttctgggacgccttccaccccacggagaaggtgaaccggatcatggcgcagcacacgctcgacgtctgctaccagcaaggcgtcctctgatccatccatcagattatctgtaatgcgtaggatttgtactggattcttgacgagagaaaaaaatcgataaatatatggcggcacatcatcatggtcagaaacccctagatctcaaatcaatgggaagaatcaaatttgtattgc

SEQ ID NO: 2907 - DNA, 217 bp, Oryza sativa
  ref <308>: DATABASE ACCESSION NUMBER: AK060692
  ref <309>: DATABASE ENTRY DATE: 2001-12-06
gtcgatgtgtattttgtaacagtctatctatgcctgaaaacatcatctctcttgctggtaaatcgtttgcagatcgtgggcaagaagaaagctctaacaatgtttactgtactacacaagcctgtggcaacctgcaagttgtaattggcttgggcattttaccatctcatctcaagtgtaagctgacgatttgttaacagttcagaacctccgaacc

SEQ ID NO: 2908 - DNA, 1770 bp, Oryza sativa
  ref <308>: DATABASE ACCESSION NUMBER: AK060693
  ref <309>: DATABASE ENTRY DATE: 2001-12-06
aaaccaccaccaacgaacctcttattcgccggcgacgacgatgtccaaggccgccgccgccgcgtcgctccctccgccgccgccggaggtggcgcacctggtggatcagctccagcgccaccacctcgcccccgacgcctccctcctctccagctgcgcccactccgacctcctccaggcgcgggaggaggtcgcgtcggagcgcgcgcgatacctggaggcactggctgtgtacgcggaggccattgctatggtggaggagtatcagcacgccatctccactggcgtcgccaacgctgggaagaagctcaactgctccccgcaggtgtacgagtcattggagcaccatttggcggttgcagaggctgcgcagaggttaaggcttccactgctctcgcaggatggagatgtacatgaggaggagatagagaagctgagcaccttgtctaggagctcattcgatagcaccatgacaagtgccgcacctagctcgagttcaatctcgactagttacaataactacagcagcaccgcaagtgcagccactgttgctgcggcccctggtactggtggttcggagccagttgagcctggtgttggcggtgttcctgatcgttttcttggaatcacatcggattatctctaccaggtgcagcaagagcagccagccatgaccgtggtatgtataatcttttgcaaccaaatttatcgtgtgaaccagttgttggtgggttcaagtttcattttagttttggatatattatcgtatgtttcttggggaatcagacaattactgcttcactgcttcctatctttgtttaccatttactgaagagcaatcaggacatacattgtttcttttcaaaaccgggctgtttaaacgtttacagcatgtacctctgatttcccgttgcaggacatggttgactatcaacgaactctggcaagagagattgaggcccgcttagaagccaagtgtgatgctttagctgatctgtttgcaatggatgaaagggattcatcatccattagtcagatttcaagtgccagacttccagaaagggtgaagttaattattgaagagattgaaaaggaagaggcccttctactagacgatcttgcttcgatggatagaaaatttgccgaacactataatgtcctggagcaaattcttgctgtacttatacagttcgttaaagacaagaaattggaacatcagcatcaatatgatgatctgaagaggacttggcttattaaaaggtgccggacaatgaatgctaaattaagctatcttgagcatcatctcttgcgtgacacctataccaaggaaacagtaccggcactacataggatcaggaaatatctagtagaggccacgaaagaagcatccaattcttatactgaagcggtttcacggttgcgcgagtaccaaggtgtagatccacactttgatgtaattgcaaggcaataccatgagattgtaaagaaactggagggcatgcaatggacgattcatcaggtcgaaatggatctgaagcctcaccatgaccatgcagatgtctaggctccatctctccaggagtgcaggcatctttcatgtttgtttccagaatgtgatagcctgtggatgttgccatgcccttgttccactttacaggcttgttgtttattgctcccagctgattgccgagtaagctggatagcttctgcattatgtaaagtttaacctcaagcatgcaatatatatggagatgtgtgtttgtattgtgt

SEQ ID NO: 2909 - DNA, 1493 bp, Oryza sativa
  ref <308>: DATABASE ACCESSION NUMBER: AK060694
  ref <309>: DATABASE ENTRY DATE: 2001-12-06
ttaaggagactaaaaaagtatttcgctcagaggatgaaaatggcagcaagatggtcaaccaatatgtccacctggggaagattggttctggaagctatggcaaagtggtcttataccgaagcatgaaagatggaaagctttacgcagtgaaggttttgaataaatcttacatgatgaaagtacgtgttgtgcgatcagaaactgccatgacagatgttcttcgggaagtatccatcatgaaaatgttggatcatcctaatatagtaaatctcattgaagtgattgatgacccaaatgcagataaattctacatggttcttgagtatgttgaaggaaaaatggtctgtgacaatggtttaggagaagctacctccagaaattacttgcgcgacataatctctggtgttatgtatcttcattctcataatattattcatggtgatatcaaaccagacaatttgttggtcacaagcactggcagtgtgaagataggggatttcagtgttagtcagatttttgaggatgatgatgatctgctttggaggtctccaggtactcctgttttcactgcaccagaatgctgtcaaggttcagcctaccatggtcgggcagctgatacatgggcagttggcgttactctgtattgtatgattactggtcactatccatttctaggagataccttacaggaaacttatgataagattgtcaatgatccggtgcaaatacctgacaacatgaacccccaacttgctgatttgctggaaaggcttctctgcaaagatccagcaaatcgtatcaccctgcaggctgtaggtgagcatccttgggttgctggggaccaggggccagttgttgaatacttctgtagatgtgggtttggccgaagaaagagagatgatcttaagggagaagtacaatagcaaaggcttgttcacagtttatcatccgatggtttactgtagataggcgatgagtgtggctaaacaaagaaagtgagatgatcgacaaaccgtgttactcttttttgtgttcttcctccctttaccgattgacctgttggttgctcgcctcaccacctctgcaagttttgttgcctaaccgagggagcccctgtttccatttttctgtagatcaattttggctgctgcaacatgtaagcttttttcatttggttgttgaatccagtatagcaaccattcatagaaaatatagtgcaaaattctttgtgaaggctgtagtcggtgttagcaattcatgagcaccgagtacagatgggtgcaggctgatctgcgggtacccttaaaagtgagatttagtttattttagttttagttgaactatggtgggttggaagatgtggccagcaccatcctatattagattttacttaagactcatccattcatggtgagtgaatctcttgtcaacggaaattgctgtaagttactgcatattttccgtaaggaagcttactgcaattacaggcttac

SEQ ID NO: 2910 - DNA, 1566 bp, Oryza sativa
  ref <308>: DATABASE ACCESSION NUMBER: AK060695
  ref <309>: DATABASE ENTRY DATE: 2001-12-06
aaaaccacccaaaagcgtagcgacacacgagaagccaccagccaacgtagtacgcgccgagagctgaggccatccacgacacacgaacatgagcacactagtagacgcgctgtgcgctccctgcagcgacaccgcgctcatctacgacaccttcaacgcctccgccgccgcgagcttcctcttcgacaatgccgccgccttctgcgacgctgacatcctcggcgccacggcgacaggggagaaggaggcgacgtcgtcggccgcggccgcggccgcggaagccgccccgccgaggaagaagcggcggcggcgcgcgaagagctgcaagtcgcgggaggagacggagacccagcggatgacgcacatcgccgtggagcgcaaccgccggcgccagatgaacgagtacctcgccatcctccggtcgctcatgccggagccctacgtccagaggggcgaccaggcgtccattgtgggaggcgcaatcgagttcgtgaaggagctcgagcagcagctgcagtcgcttgaggcgcagaagcgaacgctgctccctcaccacaaggcgagatgcgacgacgcaacgccgatgcataacgccagcggcagcaacgtcggggccggcggctgcatggagcccacgacgataacgagcaactgcagcagcagcgtcaccgaggacgcgccgtccgccgacgcgcccccgttcgcgcagttcttcgcgtacccgcagtacgtgtggtgccactcgccgcgcgactccaccaccaccaccaccgcggcgtctgcgtcggcgtcggcttcggcgtcgtcgtcgtcgccggccacggtggcggcggcgctccagtcggagcaccgctccgggttggccgacatcgaggtgagcctggtcgagacgcacgccagcgtccgtgtcatgtcaccgcggcggccagggcagctgctcaagatgatcgccggcctgcaggccctccggctcaccgtgctgcacctcaacgtcaccacgctggactcccttgtgctctacaccctcagcgtcaaggtggaggaaggatgcagcctgacgacggtggacgacatcgcggcggcggtgcaccacgtgctctgcatcgtcgacgcggaggcggccgcctcggagcatctcctcgcggcggggcaactggccacgacggcgacggcggtggcgaagagagaactcgcgacgtacatgtactgagccgctccaagtgccttacatgtcgtcgtttgtgtggtcgcgtgtactgtatgccgcgctcccgtttttctcccctttttaggctcgtcacgtttttgctgtgtagtggcccggcaggttagatctagttctagttgtactagtagatgcaaaatgctatgtgtccagtagtcccagcctctcgacgagggcgtacttgtctgtttctcgttctgaaaacagaatgttgtattgctgtacctgtacagtatcctgcctcgcctttctgtaataagagcgactagcgagtagcgacattggaaggaacagttcgagattcgtattatccgaacagggccttatgagggtactagctt

SEQ ID NO: 2911 - DNA, 1051 bp, Oryza sativa
  ref <308>: DATABASE ACCESSION NUMBER: AK060696
  ref <309>: DATABASE ENTRY DATE: 2001-12-06
ggctaattccattctcgctttcccccaattcgctttcttttccccctttcctcgcctctccgcaaccgccattgccaagaacctcacctcgtcttctcctccttcttcttcttcggcggcggcgatggaggacggctgcagcaaggttgtgagcggtggtgggagcgggagctgcggcggcggcgccaagaagccgttccacttcgcgcggtcgctgacataccaccaccaccaggggcaccgggtgctgccgccggcggcgaagtggaggcggcaccagctcgccgacgagccgcgagcgcggcccaaggacgtggtgctgtacacgacgtcgctgcgcggggtgcggcgcacgttcgcggactgctcctcggtgcgcgccatcctgcgggggttccgcgtcgccgtcgacgagcgcgacgtgtccatggacgccgcgttccgccgcgagctgcggtccctgctcgacgcgcgcggccgcgccttctcgctcccgcagctgctggtcggcggccggctcgtgggcggcgccgacgaggtcaagcagctccacgagagcggccagctgcggcgcctcctcgacggcgccgccggccaggacccggcctacgtctgcgacggctgcggcggcgtccgcttcgtcccctgcaccgcctgcggcggcggccgcaaggtgttcgtcgaggaggaggatcgcgtgcagcgctgcggcgattgcaacgagaacggattggtacgctgccctaattgctgttcttgatcgccaaaaaacacatgatctttccaattcaattcgagctgctaattactaaaggattagaggctttagaatcaagaacagaggcgcctttcggtttctgggtgtgatttgtgttcatccgattcatttgggggattggatttgctgctcatggatgagagaacgaattgttcttgactccttgatgcaaaaattgccatgaggtgtggcgattgaaaaaaaattaataagagccgatggctgcatgtatgtattgtatgtaatatatatgggagattgtcactgaaaaac

SEQ ID NO: 2912 - DNA, 1136 bp, Oryza sativa
  ref <308>: DATABASE ACCESSION NUMBER: AK060697
  ref <309>: DATABASE ENTRY DATE: 2001-12-06
aacgctaatagcctctctcatctcagtatattcatcagtagaaagcaatggactgctgcttgtgcaggtgagggagtgagcgagcactatactagtagtggtaagagaagagagaaatctaagagagagagagagagagagatggatcatcaccagcaccacgagcagcagcagcagcggatggtggagatgcggatggggatggcgatgggcgaggcgtacgtcgggggaggagaggtggtggcgcgggaggcggcggcgcaggcgctgggggcggtggtgcagctgcacttcgacaagacgctggagaagaagcgggcggcggacgcgcagaagcaggagctgtggcgcctcttcctcgccttcttcctcttcctcgccatcctcctctccgccgtcgcccagtccccgccgtcccgcctccagtgccgccacctctgggcccccgccggcctcctctccctcgcccacctcgccttctacgccgccgtcgcacaccacctccgatgcctcaacggattcaggtaccagcggcgttgccacaagctgaccctggcgctggcggcggacaggctgcggatgctcaagtccggcggcgacgtggtggcggccgccgacgtggaggtgccgtaccaggagccgcccgagagctacctggccaagttcaagcgcagctgggccatccacttcgccttcctcatcaccaccttcgccttctccgtcgccgccgccgtcgccatcctctgcttctagctctcagatctcctctcaactggactactcctccaatccaatcttactagtaggagattttgattgatcatcagatcagatgatggaagagtcgttcgttgtttatctctactgtaatccctccctctctttctctttcttgtcgtattcattgtgatttattagtagaatgttctatgttaattgcccttcagcgagaggccctcacatgcattatctcaattgtcagccagtgtcacattcactcgctcaaatcgcggcagcagccagcagccactgtggcaaaagcaactgtatttatccttaactacagtatctagtactatgatctctcttggagattggttagtttgtgagtaaaagctgccaagcttgttgctatc

SEQ ID NO: 2913 - DNA, 1814 bp, Oryza sativa
  ref <308>: DATABASE ACCESSION NUMBER: AK060698
  ref <309>: DATABASE ENTRY DATE: 2001-12-06
ctagctttccccctccacctcgtcgtcgtcgtcaacccacctcacccccaacccccaaccccaactcctcctcccccccaaatcccccagatcccgcacgccgccggtggccgcagcgccgccgccgcccaaaccctagccggcgggcgggcgcagtagcggagatctggtaccgtgccgcgatgggggacttcaacgtggcgctggcgatcgtggcggcggtggtgagcgtcctcgtcctgctcgtcagcgtctacctgctcatcaactaccagcaccccgacgacgccaaccaggcctacttccccaagctcgtcgtcgtcctcggcatcaccgtcgccctcctctccatcctcatgctccccgccgacgtcgccaaccgccaggcctgccgccgcgccatctacagcggcgcctgctccctcaccctccccatgaagaccctctggctcgccgtctacatcgccgacgccgtcctcgtcttcctcgtcatccccttcgccatgttctactacgagggcgaccaggacaagtcagtggggaagaggctcacctccgctctcctgtgggtcgccgtctccgcggtggtttgcggcctcatcctcggcatcctatacggacttgttggcaaagtggacttcactgtcaggcatctttcttcagcagttgagacatttccaaattcattcactagtttctcaactggtcaaccttgcatcagtacatcgcccaagcaggaagcaactgaactaggtaagaaggctcgggaattgaagaaagcagctgaagcccttcaccaagaagagaaaagtgggaagaagggcagaaaatggcgcaaaaatgtcaaggcccttgggaaggaattagtacttttagaagatgacatgaaggctcttgaagagatgtgccctcaaggagaacaggctgaggctacctgggctttgacagttcttggttacattggaaaacttttatttggtgctgtcgggttaattatatcgattgcttgggttgcacatatcgtcatatacttgttgattgaccctcctttgtcctccttcctgaatgaaatcttcgtaaaattggatggtgtttggggtctgcttgggactgctgcctttgcattcttctgtttctatctcctcatagcagtgattgctggggaaatgatgctgggtttgaaattagttttcatcaccattcacccaatgaaatggggaggaactttgatgaactcgttcctgtttaatgttggactcatcctactttgctccatcagtgtgattcagttctgtgccacagcttttgcttattatgcgcaagcaactgcagctcaggagatctttggccacacactgcaatctctccgtggaattaagtatctctacaagtacaatgttttccagtatggctttgtggctcttgcgatactcacactcttttactatgcaatatttggatggcgaaagaggaaaccgacaggaagattccagctctcaaattgatttgtggtttgttctgtaaggaagcctgacgaattgaactacaaacatatttgttcacgagtgatagattggttagcaatgtatatgatctttgaaaccgctttctcaaagagctggagagtttatccatgtaaattagcaaccatgaagtataaggagaaaactgagatttcagtagggcacggacatggttgttaaaagcagaacccagctgcctttgtaatgtacacatttctcatcgcggctcttcttttccttgtgtattattattttacacttggctgatgttattcttgacaaaaaaaaaac

SEQ ID NO: 2914 - DNA, 2147 bp, Oryza sativa
  ref <308>: DATABASE ACCESSION NUMBER: AK060699
  ref <309>: DATABASE ENTRY DATE: 2001-12-06
accccattcctcctccccatcacaaaacccgccacctctaaaccctcgccctcctcctcccatggcgatggccggcgccgccgggcggtgcctcatgctgacccgcccgtcccctctcctccgcctccgcctcctccgcgccgcgctcgctaccaccacgaccaccaccacggcggcgggggcatccgccgtcaccgcgccgaccgagcccgagaccacggcgagggaggccccgtcccgccacgagctcctcctcgagcgcctccggcagcgccacctcaagggcgtgcccgctgctaccccgaggccggcgcagcgggagaaggggaggggcggcggcggcggtggcgcgcaggagctgcagcagaagaggagggtcgaggtggtggatagtttcgaggagctcgggctcggggaggaggtgatggccgcgctcggggagatgggtatctccaagcccaccgagatccagtgcgttggtgtgcccgccgtgctggctggcaccagtgttgtgcttggctcgcacaccggttccgggaagacgctcgcctacctgctcccgcttgttcagctactgcgtcgtgatgaagcaatgttgggaatgtcaatgaaaccaaggaggccaagagcagtagttctctgccccacaagggagctgactgagcaggtcttccgtgtcgcaaagtccataagccatcacgcacgttttcggtcaacaatggttagtggaggcagccgtataaggccccaggaagattctctgaacatgcctgtagacatggttgttgggactcctgggaggattcttgatcatatcaaggatggaaacatggtttatggtgatatcaagtatctggtccttgatgaggcagatacgatgtttgatcaaggttttggaccagacattaggaagtttcttgctcctttgaagaatcgtgctgcaaaacctggcgatcaggggttccaaactgtattagttactgctactatgaccaaggcagtacaaaagctgataggtgaggaatttgaaggtattgttcatttacggacaacaacctttcaaaaaagagttgcaactgcacggcatgacttcatcaaactgtctggttcagaaaacaaactagaggctcttctgcaggttcttgagccaagtttagcaaagggaaataaagttatggtgttctgcaatactttgaattcaagtcgtgccgtggaccattttctgactgaaaatcagatatctactgtaaactaccatggggaagttcctgctgaagagagggttgagaacctgaacaagttccggaatgaagaaggggattgcccaacactggtctgcactgacctagcagctcgaggcctagacttggatgttgaccatgtcatcatgtttgacttcccatcaaactctattgattacctccatagaactggaagaacagcacgcatgggagccaaagggaaagttacaagccttgttgcgaagaaagatgtgactttagcaacacggatagaagaggctatgaagaaaaacgagagcttagaggcactgacgactaataacgtcagaagggcggccgtcaacccacagtacactagtaccaaaggacgaccaagcgctctaaaggtagtaaaccagaagggtagaaggggagttgcactgcagaccaagtcatcaaggattgtcaaggacacaacttcatccagaaggcgctcgccaattaggagtcaaccaaggtcgaaatcgacatcttcaggaaaagcaaaaccagtgcgatctgctaagccgagcaagagtagcagccctagccccaaggttgcaaagagccgaccgagaccagagggtcggaaaggggatgctctgaacaagctgggtagtaagctcagtgtggttggattcagaggccgcagctcagggaaatcggcacaagcatcatagtgaggcctcgagaattttgggtagtgaaattcaactttttgtaaatatctgtgacttgtttcggccgttttccctgcaggcttgcaagaccctaattgagacgccccttctaaaagaaaacgtagaacactgaaatcttaccacagtacgtacatctatctgtttacattgttgaacaataatatcatctgtttcactgtccatgaat

SEQ ID NO: 2915 - DNA, 1352 bp, Oryza sativa
  ref <308>: DATABASE ACCESSION NUMBER: AK060700
  ref <309>: DATABASE ENTRY DATE: 2001-12-06
aaacccagccagcggagggtcaggactctggagcggagcaagaagcagattgctgtgcaagccgcctcctcctcctcccccctgcctctctctcctcgcccttcttaaccccgtctcgcgagagaggagaggagccaccaccaccgcctcgacgccgagaaccagcctcgccgtgacccccggtcgccagggacaggttactctcatctttggtgcttgtgaacaggacgacagccaccgctcatcaaagagcaagccatggaggaatccaatgatcagggccttgcacagaagagcactgcccccactgggttcttcagggtccccggcctctttgtgaggctgagcagcaaaggattgaacgcagtggaccctgattctgcctggagcccaacctctccattggatttcaagaacctgtcatcgagcactggaagcacaaatctcaaatcctctgggctactgggtgtcgaggctgatcagaagttcagaactaaccctcccagagtcggcctcggcctcgtcgacgccctcaccgccgacgagagctcctcgtgcttgggtgtcacgagctcgtttcttgattccatcaggccatttcttgagctcgggttgccgaaggcggcgagtgatgctgcaatgcagaagaacggttcaggtagcgtcactctggacgagattgcagactttgctctgtctgaagagtacacctgtgtgatcgagcacggcccgaacccgaggacgacgcacattctgggagacgagacactggaggtgtgcaagggtgtcccaaggagttccaagaagtcaatcttcaccatcgagcccatcggcgagctgccgtcgacgctggcgtgtgctgtttcccgctcatgctgctactgcaggaagaggctgcagcaggacagggatatctacatgtatctgggagagaaggcattctgcagcaacgagtgcaggagggactacatcgatgaggagatcgaggaggtggaggagctcatgatgctggattctgccggttcttctgccctcttggcttggtgaaaatcggcagtagatgactagaagtagtagtagtagtgctggtgagtggtggtgcaggaaagcgactactacctcttttggatggagattcaggttttggtagggaaaggaaggaaaacatgcttcccgttctagtttttctgaatggagaagtttttaatttagccggtttgtgcaaacagaggtgcaacggctaaatgattttcatggattgtgtggggattccccattttgcctgtaagacgagcaaaccccccataatttcacagcaaacagttctccctgctgaattctcactgaaaaag

SEQ ID NO: 2916 - DNA, 1383 bp, Oryza sativa
  ref <308>: DATABASE ACCESSION NUMBER: AK060701
  ref <309>: DATABASE ENTRY DATE: 2001-12-06
accaccacctcgcccaactcccaaaaccctagaaccgcgccgccacaatgcaggccgccgccgccgccgtccaccgcccgcacctcctcggcgcctaccccggcggtggccgcgcgcgccgcccgtcgtccaccgtgcggatggcgcttcgggaggacgggccgtcggtggcgatcgtgggcgcgacgggcgccgtcggccaggagttcctccgcgtcatctcctcccggggcttcccctaccggagcctccgcctcctcgccagcgagcgctccgcggggaagcgcctcccgttcgagggccaggagtacaccgtccaggacctcgccgcgccgggcgcgttcgacggggtggacatcgcgctcttcagcgccggcggcggggtcagccgcgcccacgctcccgcggccgtcgccagcggcgccgtcgtcgtggacaacagctccgccttccggatggaccccgaggtgccgctcgtcatccccgaggtcaatcccgaggccatggcgcacgtccggctgggaaagggggctattgtggccaacccgaactgttccaccatcatctgcctcatggctgccacacctctgcaccgccacgccaaggtggtaaggatggttgtcagcacttaccaagcagcaagtggtgctggggctgcggccatggaagaactcaaacttcaaactcaagaggtcttggcggggaaagcaccaacatgcaacattttcagtcagcagtatgcttttaatatattttcacataatgcaccaattgttgaaaatgggtacaatgaggaggagatgaagatggtgaaggagaccagaaaaatctggaatgataaagatgtgaaggtaactgcaacctgcatacgagttcctgtgatgcgtgcacatgctgaaagtgtgaatctacagtttgaaaagccacttgatgaggatactgcaagggaaatcttgagggcagctgaaggtgttaccattattgatgaccgtgcttccaatcgcttccccacacctcttgaggtatcggataaagatgatgtagcagtgggtagaattcgtcaggatttgtcgcaagatggtaacaaagggctggacatatttgtttgtggagatcaaatacgtaaaggtgctgcactcaatgctgtgcagattgctgaaatgctactcaagtgattttcttttctgtacctttctctccttgcccctctttgctctagtcattgtttgacggatgtactctggttagtatgagatcaattttgatcatcttttgtaatctatattcctagtgaaataaatgtaaaacggttttgctctatcttctgcacaagtgtagaagaaatctgaaattgggaaattggagtgtggcccttgttcatcc

SEQ ID NO: 2917 - DNA, 1345 bp, Oryza sativa
  ref <308>: DATABASE ACCESSION NUMBER: AK060702
  ref <309>: DATABASE ENTRY DATE: 2001-12-06
aaaaaacgaaaaaaaaaaatcaaaatccttccccctttcaaattcgaaatttcgaatcaaacacgcgcacgctcctctctcctctcccctctcgatcgaggcacgcttctccgcggcggcggcgcgcgaccggatcacggcggcgggggaggggaggggaggggaggatgcagcagaagcccgcggcggaggccatggaggaggagttgaagggggaggccgtggggccccgccgccccgggctagggttatggttggcggcgcggcggcggctggcccccgacgaccccttcttcgccgccggggacatggagcgcgagctcctcgccaagcaagttgctctggatctctccgaagatgaacggtaccagcttgagaggatggaagtggcgagtgccaatgcccttttatgcccaatttctggctgtggtgctcatctagattgcctggagaactttgaggaccactatcgcacccgtcatactgcttcatgctctgtatgttggagagtgtatccaacttcaaggctgctgagtattcatatttctgaggcacatgattccttttttcaagcaaaagttgcccgtggttttccaatgtatgagtgtttggtggagggttgtggggtgaagttgaagagctacaaaagtcggcagcagcatcttcttgataagcaccagtttcccaagtcatttgaattcttcaaaaaagcacgcccttcgcaacgccagcggaacaagaaccagaagcaacggcaaacagttcacaagggagacgatacaagcgaaacactaatggatgttgatgggaagaagagctcaaggtacatgaattccagatatcggccaaagcaacatgatggaaaagagtcaaaagaaaatgagcatagtagctgtaaggaggccaagaacaacgaaatggaggttgacaagcaggttgatgagcttgcttcggccgtatcaagactgagcacagcggattcaactccttctagcataagctttggtcatcgtcgctctcgcggtcttgcttttgtccctaggtcgattcggcaaaacaagcaggtttctcagacagaaccaaaatgacagcatttgataccatctttctcttcattgctgatctcggatgcatcaacaatcctgaatgtgctgtttcctgtacctggacattcaccgaatccactaatatacattcttgtagttgtatcacgagatatgtcttctagctggttatccttgcttatggatgtactgagcttcctgttactgccatgtagtagaacaatttttctgaagcggcaaatatgaagtgcaaaatacaagacagttcttgtggttgatcg

SEQ ID NO: 2918 - DNA, 289 bp, Oryza sativa
  ref <308>: DATABASE ACCESSION NUMBER: AK060703
  ref <309>: DATABASE ENTRY DATE: 2001-12-06
tataattagcgaaaagttatttccgtgtgtgtggcatcaaataaatagagggtatgaacttttgtcatggtgttgcatcattgttgtatgttggtagattggtttttcacgagtatctatactccttataaaaaggagtagtggtgatgattctgctaccaccccactaccaactcttatctttttttaaggacatctaggattagtgggcccatatgtcattactctcaccaacttttattcttgtgaaaggttattaccgtgcgaataaatagtgggtttgaactgt

SEQ ID NO: 2919 - DNA, 264 bp, Oryza sativa
  ref <308>: DATABASE ACCESSION NUMBER: AK060704
  ref <309>: DATABASE ENTRY DATE: 2001-12-06
ctgacgcttcccggcgatggcggcggcggtggatgtggatgcagtggatggatggatgatatgttgtgtagtagtagtagtgttctaggatgcctaggtgttgcgttgatctctagtaggatctgaattagatgcttaattgtgcttgtaccgatgctaaaactaagaaggtgcacttgtgtatgatggacagggggattagttgctctgtaattcgttacctgtgttctatataaaagtatcatcctttcgatgattttcttg

SEQ ID NO: 2920 - DNA, 1714 bp, Oryza sativa
  ref <308>: DATABASE ACCESSION NUMBER: AK060705
  ref <309>: DATABASE ENTRY DATE: 2001-12-06
agctctcccccaagagctgcttacctaacatacttttacaactccaccattgtccattgccaaaggccttcgatctcgcctcccagatctgccccgcgtcggcgaagatgaagatcaacgtgcgggggtcgacgatggtgcggccggcggaggagacgccgcgggtgaggctgtggaactctagcctggacctggtggtgccgcggttccacacgccgagcgtctacttcttccggcgcggcgaggcggcggcggcggagggcgggagctacttcgacggggagaggatgcggcgggcgctggcggaggcgctggttccgttctacccgatggcggggcggctggcgcacgacgaggacggccgcgtggagcgactgcaacggggaaggcgtgctgttcgtcgaggccgacgcgccgggcgccaccgtcgacgacttcggcgacttcgcgcccaccatggacctcaagcgcctcatccccaccgtcgactacaccgacggcatctcctccttccccatcctcgtgctccaggtgacccacttcaagtgcggaggcgtcgccctcggcgtgggcatgcagcaccacgtcgccgacggcttctccggcctgcacttcatcaactcgtgggcggacctctgccgcggcgtcccgatcgccgtcatgccgttcatcgaccgcaccctcgtccgcgcccgcgacccgccggcgccgtcgcacccgcacgtcgagtaccagccggcgcccgccatgctggcccccgagccgccgcaggcgctgaccgccaagccggcgccgccgcccaccgccgtggacatcttcaagctgtcccgctccgacctcggccgcctccggtcccagctgccccgcggcgagggcgcgccgcggtacagcacgtacgcggtgctcgcggcgcacgtgtggcggtgcgcgtcgctggcgcgggggctccccgcggagcagcccaccaagctgtactgcgccacggacggacgccagcggctgcagccgtcgctgcccgacggctacttcggcaacgtgatcttcacggcgacgccgctcgccgaggccgggagggtgaccgggtcgctggcggacggcgcggcgacgatccagtcggcgctggacaggatggacagcggctactgccggtcggcgctggactacctggagctgcagcccgacccgtcggcgctggtccgcggcgcgcacacgttccggtgccccaacctcggcctcaccagctgggtccgactgccgatccacgacgccgacttcggctgggggcggccggtgttcatgggccccggcggcatcgcgtacgaggggctcgccttcgtgctccccagcgccagcggcgacggcagcctgtcggtggccatctcgctgcaggccgagcacatggagaagttccgcaagatgatcttcgacttctgatcctctgaaatcaaacaacacgtacgtacgcacgcacgaacgcgcacatgcatggagaggaggcggggtggttcttaacacagcctatcatcggtaggatgcagcaacgattctttgattccacacgttagttcctgcaaatttttcccttcctgccttcccgcttttgggcaggacacattttgtgccaactgtatttgtattgtgaacagttaattaatccgtaaacattacgaaacacagagggttaataaggttaatcacggtggtttacttcgcc

SEQ ID NO: 2921 - DNA, 1426 bp, Oryza sativa
  ref <308>: DATABASE ACCESSION NUMBER: AK060706
  ref <309>: DATABASE ENTRY DATE: 2001-12-06
aaaacgcgcccctcctcttgcgttctcgcctcggtctccaactctgcaaccaccgccgtctcttctccagatctccaccgcgccatggacgccgcacccaccgcgccgccggcggcgtcggccgacgacgagatcgtgtacgagtcgatgccctgcatccgcatctacaagaaccgcgtggagcgctacttcggctccgagttcgtcgccgcgtccaccgacgccgccaccggcgtcgcctcccacgaccgcgtcatctcctccaacgtctccgcgcgcctctacctcccccgcctcgacgactccgccgccgccaaggccaagctccccgtgctcgtctactaccacggcggcgggttctgcctcggctcggccttcaaccccacgttccacgcctacttcaacaccttcgccgcgctcgccaacgccctcgtcgtctccgtcgagtaccgcctcgcgccggagcaccccgtcccggcggcctacgcggactcgtgggaggcgctcgcgtgggtcgccggacacgccgcgggggatggcgacgaggcgtggctcgtcgaccacgccgacttctcccgcctctacctcggcggcgagagcgccggctccaacatcgcgcaccacatagcgatgcgggtggccgaggaggggctcccccacggcgccaagatccggggcctcgtcatgatccacccctacttcctcggcactaacagggtggcctccgacgacctggaccccgccgtgcgcgagagcctcgggagcctgtggcgcgtcatgtgcccggccaccacgggcgaggacgacccgctcatcaacccgctcgtggacggcgcgccggcgctcgacgcgctggcgtgcgaccgcgtgctcgtgtgcatcggcgagggcgacgtgctccgcgaccgcggccgcgcctactacgaccggctcacgtcgagcgggtggcgcggcgaggcggagatatggcaggcgccggagaaggggcacacgttccacctcctcgagccgcactgcgacgcggccatcgcgcaggacaaggtcatcagtggcttcctcaaccgttgactcgccgtcgccggcgatgacaccgtcgtcgtcggaatcggagattaccaagattagcatcggttcatacccagaataactgcagctacgtcgccgacggatgccgctgccgcgccatacttactactccactactacattttacattttggattcaggattgtgttgcatcttttgcaattgggtgtatggatggaaggaaatcgccattgatttaggtgagggtattgtagtatcaggaagttgggggagataaatgataatactacagtcatagacttcatacagatgaaattattctgctttgtttgacacattgattcattttctttggaactccagtgaaagcattgttctt

SEQ ID NO: 2922 - DNA, 1262 bp, Oryza sativa
  ref <308>: DATABASE ACCESSION NUMBER: AK060707
  ref <309>: DATABASE ENTRY DATE: 2001-12-06
agagaccaaacgggccaaggagagaggagcagcagcagcgccaccgctcgcgagatctcctactcctcgtcgccgacgagccgcctcctcctcgtcgtcgccggcggcagagcaccggagcagccaccccatggcgtccccggacctcctcttcaacctgcgcaacctcttctacctcggcgcctaccaggccgccatcaacaacagcgacgtcccgggcctcgacgccgacgccgccgccgagcgcgacgccatcgtcttccgctcctacgtcgcgctcggctcctaccagttggtgatcagcgagatcgactcgtccgcggcgacgtcgctgcaggccgtgaagctgctcgcgctgtacctctccggagacaaggaaagtgcgattgtcagtctgaaggaatggttgagtgattcggcggttggaagcaatcctgttctacgattgattgctggaattatatttatgcatgagcaagactacactgaagctctcaagcacacacactctggtggaactctggacctgcatgcattgaatgtccagatcttcattaagatgcaccgttcagactatgccgagaagcaattaaagatcatgcaacagattgatgaggaccatacactgacacaacttgcaaacgcatggctggacattgctgttggtggctctaagatccgtgaagcttacctcatattccaagactttgctgaaaaatacccgatgacaggaatggttctaaatggcaaggcagtttgctgtatgcacatggggagctttgatgaggctgagactcttttactcgaagcattgaacaaggatgcaaaagatcctgaaactcttgctaatcttattgtgtgtaatctccaccttggcaaaccgtcatcaagatacctcagccagctgaaactatcacaccccgatcatgtgctagtaaagcgtgccgtatcagcagaagataacttcgagagagctctccaagccgtcgcttgaacacgtccgcggaaaacgcttgccagattgcagataacacaattgatcccccatgttccattttgagtgccttaacacagcgaaaattatgttgcatttgctcagtctgttttgctcaaatggtgatatactacccggccaatcttgtactctgaacccctgctgtataaacaaatataatgtagaatcttgaatggtgacgtttgtggtcagcatcgacattttgttatattctgctggattgttgttacatcgctcgattctttgt

SEQ ID NO: 2923 - DNA, 1603 bp, Oryza sativa
  ref <308>: DATABASE ACCESSION NUMBER: AK060708
  ref <309>: DATABASE ENTRY DATE: 2001-12-06
acactcgccagtcgtcacctcctcctcctcccccctccgctcgccgccgatggatccggccgccgccgcgcgggggcaggcggagcagtggatgcgggtggcggagaagctcctggtggcgcgcgacctggagggatgcaaggagttcgtctcccaggcgctcggcaccgacccccacgtcccgggcgccaacgacctcctcgccgccgccgacgtcctcctcgccgcgcagcgccgccgcatccccaacggtcatccagatccctacgccgtcctcggcctcgatccctccaccccggcctcccgccgccccgacgccatccacgcgcagtaccgtcgcctctccttcctcctcaatcgctcccaccccgaccgcccttgctcgctctccttcgccgaggccgcccgcctcgtggccgattcatgggccttcctctccgatccgatacttaaatccgccctggatgctgaactcgacgccgccgccgccgcagccgcggcggcggcagctcgcgcgtaccatcctccagctccgatgcaacagccgcagccgcagcctccgccacagccaactccaccgagggcggctcccctgccaactccaccaagggcgcctccccaatcaactccaccgagagcagcgccccagtcaactccaccgcagcgggtggctccacagccacccgccactgcagcggcgccgccgattgagcctgtcgcgccgccttcgcccacgttctggacagtgtgcatgtcctgctgccacattcaccagtacgaccgcctctatgaggcgcggaaggtgttgtgccctagctgccgccagccatttgtagccgaggaaatggcggagccaccacccattgtgccgggtactgacatgtactactgcacctgggggttcttccctgttggttttcctggctgtcctggcttcgagaaactgatcagttcgcagcagcatggaacagatcagccgaatacaccttggcttggaaccactggtggtgcggaagctgatggtgtggctggtgctgagaatggggcgccggttagtgctgccgtggaggtgcaatctgtgccgaaaccagcgaaacccgtgagagtgaaggtgggcgcgaagaagcgaggccgtcccaaaggcagcaagaacaagaagaatttgtgaatgataccaatgaaggtgattggtatgatcatagatcagatgggtttgttgggttattcgtttgatcctgctatcattgtcatcgactgaaacgtttatctgtaggttgaatgctaattcgtggttgacaggatcctacattgagaagcactgcaatggtgatagaaacttagtttttcaggcagtcttgctcagttgctgggttgtactaccttgctgctctcatgctttagatgcagttagctgctgtatgttgtctaatttcattgacttcagttgagctagctgttctgatctaagattattaggagatagcgattttagtaccgtgcattgtaaattttgaaatttgatgctactataagctcttctctgcataggattgcagacttgcagcaatgaatgagagttttattttcccagtcatttatgctc

SEQ ID NO: 2924 - DNA, 1432 bp, Oryza sativa
  ref <308>: DATABASE ACCESSION NUMBER: AK060709
  ref <309>: DATABASE ENTRY DATE: 2001-12-06
aaaaaaaaaaaggcttggaatcacttctgaagttgttggtaccattgatccgacatttggtgtgttgtctgggagaaatggcagttctctaaccagcattggtaagaagcagccatgcatgttgctaatcgagagtgattcctggggaccacagatggatgtctccttacatgctagacttcaggagatgaaacagagtgatcgcatacatgtattgcccaaggttttccttctttctgctgcagaatcagacaaagtaaagaagatacatgcagttgattctgtgataccaaagcctctgaaagcaagtgcacttgcggcctgtctgttccaagcacttggtatcacacagccgagccatgagaaacgtgacgattcaggttctcttcatgggcgtgatggttcaggttctcttcatgggttgcttcttggcaagaacatattggtagttgatgacaacaaggtaaacctcagagtggccgctggtacattgaagaaatatggggcaaaggtggagtgtgtggagagtggaaaagatgctctttcccttctacaagtgccgcacaagtttgatctgtgtctcatggacattcagatgccggagatggatggatttgaggcaactcggcaaatacgagcaatggaagggaaggcaaatgagcaggcagacgacagcgaatcgggttcagaaatcgcagcaaagacggccaaatggcacttgccaatcctggcaatgaccgctgatgtcatccaggccacccacgaggaatgcacaaagtgcgggatggatggctacgtctcgaagccctttgaggagaagcagctcttccaggcagtacagaagttcttgggcccatgcgtttccagctgacaccaaccgatgcattctgctgtacaccaagagagtaaagaatgagcactgactgtgaactgaggcggctaaaattcttctccattttgttgctcttcaacagaggatgcgatctgaatgagagcctgcactcaaggcgacattgcacagaaaggatcggagccttcattgtgtacatgtatttttatcggcagagaccaagagctatagttttaagctaggagaagcataagttttagggtgacatgtccggcctcctgttatcggagccacaggtgtgttgctgggctattggaatcttgagcaatttttttttcctgtacagctcccacgatttttcggctccagcccactgttgacagaagacatgtttgcagggtgcagcatcttggaaaaacctgataacctgagaattttttgttgtgtcattctgtgtgcagtatattagaatttgagcagtattgtatatcaatgtaccatcggtgtatggatgtgaacaaggaaggcgaaacctgtgattaggacactgattaaaacttgcactcgttttttccatcccgt

SEQ ID NO: 2925 - DNA, 1509 bp, Oryza sativa
  ref <308>: DATABASE ACCESSION NUMBER: AK060710
  ref <309>: DATABASE ENTRY DATE: 2001-12-06
tctacatgttcggcgaggaccacaaggacctccgccgccggatcgcgcccaacttcacgccgcgcgcgctctccacctacgccgccatccagcagcgcgtcatcctctcccacctccggcggtggctcgaccggagcgccgccaacggcggcaaggccgagccgattcgggtgccctgccgcgacatgaatctcgagacctcgcagacggtgttcgcggggccgtacctcaccaaggaggcgagggagaagttcgagagggactacaatttcttcaatgtcggcctcatggccctccccgttgacctgccggggttcgcattccggagcgcgaggctgggcgtggcgcggctggtgcgcacgctcggcgagtgcgcgcgggcgagcaaggcgcggatgcgcgccggcggcgaaccagagtgcctcgtcgacttctggatgcaggagacggtgcgggagatcgacgaggccaaggcagcggggaagccgcctccggcgcacaccgacgacgaggagctcgggggcttcctgttcgacttcctcttcgcggcgcaggacgcgtccacctcctccctctgctgggccgtgtccgcgctggactcccacccggacgtgctcgcaggcgtgcgcgccgaggtggcctccctctggtccccggagtccggcgagcccatcaccgccgagaagatcgcggagatgaagtacactcaggccgtagctcgcgaggtggtccggcaccggccaccggcgacgctggtgccgcacatcgccggcgaggagttccagctgacggagtggtacacgatccccaagggcaccatcgtgttcccgtcggtgtacgagtcgtcgttccaggggttccccgagccggacacgttcgacccggagcgcttcttctcggaggcacggagggaggacgtggtgtacaagcgcaacttcctcgcgttcggcgccgggccgcaccagtgcgtcgggcagcggtacgcgctcaaccacctcgtcctattcatggcgctcttcgtctccgtcgtggacttccggcgagaccggacggagggctgcgacgagccggtgtacatgccgaccatcgtgccgagggacagctgcaccgtgtacctcaagcagcgatgcgccaagttcccatctttctgagctggtttcccttgtcctcttgctctgctcctcttcccgtgcatcgcataatttttcttcttctccatttttcttttcaatctggtggatcgtgtcgcagctgtgatgcattgttgatttgtaggttttgatgtttggtccattcaattatttttgttggtaattgggttcagttggggtttggactcagctttgggtcccagccggctaggggatgatacgaacactacatctggggttgttggccacatgtgtgggtcttctggtttggttggttggcatgtctcaggaaattggtggtatttggaatggatttgctcgattgttttggcaactaaaatgtgagcagttgcacgct

SEQ ID NO: 2926 - DNA, 1641 bp, Oryza sativa
  ref <308>: DATABASE ACCESSION NUMBER: AK060711
  ref <309>: DATABASE ENTRY DATE: 2001-12-06
attcgcacgcccgcgccaccacaaaaccctagccgccgccgccgccgccgccgccgccgccatggccacccaaacccgccccctcgtctccgtcaaggccctggagggcgacatggccaccgacaacagcagcagcctcgccctcgccgaggtgttccgcgcgccgctccgccccgacgtggtccgcttcgtccacaggctgctctcctgcaacaagcgccagccctacgccgtgtcccgccgcgccggccaccagacctcggcggagtcgtggggcacggggcgcgccgtgtcgcgtatcccccgcgtccccggcggcgggacgcaccgcgccgggcagggagccttcggcaacatgtgccgcggcgggcgcatgttcgcgccgaccaagacatggcgcaagtggcaccgccgcgtcaacgtccacctccgccgcgtcgccgtcgcctccgccctcgccgccacctccgtcccgtccctcgtcctcgcccgcggccaccgcatcgagaccgtccccgagctccccctcgtcatttccgactccgccgagtccatcgagaagacctcccaggccatcaagatcctgaagcaggtcggcgcctacgccgacgccgagaaggccaaggactccgtcggcatccgccccggcaagggtaagatgcgcaaccgccgctacatcaaccgcaagggccccctcatcgtctacggcaccgagggatccaagatcgtcaaggccttccgcaacctccccggcgtggatgtcgccaacgtcgagcgcctcaacctgctcgacctcgcacccggtggtcacctcgggcgcttcgtgatctggaccgagagcgccttcaagaagcttgaggaggtgtatggcaccttcgaggcgccgtcgctgaagaagaaggggttcatcctgccgaggcccaagatggccaatgctgatcttggcaggatcatcaactctgatgaggtgcagtctgtggtgaagccgctcaacaaggaggtcaagcgcagggagaagaggaagaacccgctcaagaatgtcgccgctgtgctcaagctcaacccctacttcggcactgcacgcaagatggccacccttgctgaggctgcccgcatcaaggccaggaaggagaagcttgactccaagaggaccaagcttagcccggaggaggctgctaaggttaaggctgcaggaaaggcatggtacaagaccatgatctcagacagtgactatgctgagttcgacaacttctcgaagtggctcggagtgacgcagtgagcgttgtcttgttttaagttttgagtagcagcgttaccggatcttatctcaaggatttatcaatctgtttttacctgaacatctccataagaagttatctgtgggattttgagactagtttctctgttttgttaatgtgctgtcgtgagaacatagagtatgtggtttggaccagctatctaaattatgtatgcacttccatgttctctgtgatgtcctgtattttgatgctgtgatcttgtatcgctgtatcatattgttctagggctcatggcttactcggtcaccatggcgctgattccattcacagtgttcagcctacttaaacatatttgcaattttggttagatgagtttgttgtg

SEQ ID NO: 2927 - DNA, 216 bp, Oryza sativa
  ref <308>: DATABASE ACCESSION NUMBER: AK060712
  ref <309>: DATABASE ENTRY DATE: 2001-12-06
aaaaaaaacaaaaaaattaagttcgccgctggtcgttttgtttcagcagctgctcctcctcctgcttgtcgtgtgtgtgaagtgaacatccatgtgtttgtaatctgtttttaaatcgagggatgtctcatgtgtttagcctgtactcccatttaatttagcgacgataagcatcgatgcccgcctctcctatctggaatatactccctccgtccc

SEQ ID NO: 2928 - DNA, 1344 bp, Oryza sativa
  ref <308>: DATABASE ACCESSION NUMBER: AK060713
  ref <309>: DATABASE ENTRY DATE: 2001-12-06
ggtgcaagagctggagattctaatggccctgtcaagggtacaatgcaactgccattacagctttctggcagctttattcgcgctccagtaaaacatgagcttgtaaagccaactcaatcaggaagctttcaagtccttagccgtgagcagaatggtactgtaaatactgccaaagaaagtactagcaatcctgcgagccctgttctaggccgatcatattcagtagaaccactgagaaagcctattgtaaaccaaaagctaaagggtgttgctaatggtctccctttacaactgcaaggatcatttggtgagagaaaatcaagtgcgaaagataagcataaattctttgagttgctgcgcagcaaatcattgaatggttcgtgcacttctactgtgtcttcatctacattgcttgatgagcaaaacaactcttgtcttgaattgtttgattctggagtcaaatgtatggaacatggaagtagttcttgtgaggaagcaaattcttgtgagggatctcagcagcacctttctgacaatgaggaaatcaatccaccatgggaaccacatgatgtttttgatgaaggaatgcaagaggttctgtctgacaacagggattttaactcttcatcagaaattgctgacacacaagatgtatatatgaagccccatacaaataatgctggttcctctccgtccatcatacctgcagaaatttatgatggctccatggggtccaactgtagtgatgatgaaactgttatgttgtttgaacccattggaacaggggaagaggaatcctatcctgctcaagacagacctagtccagaggagatggctttcttggtttctcttggctggaaagaggatgaaatagttccacctctgaaacaggaagaaattgctgattgtttacgtcacaatgtgaggctgcagcagaagcttgaggagtgtaggggttaatgcagtaacgccagaattttaccgagcaacatgacgggggatctcatcgtgctgataacctgtggatgtgaagctgtatcttgatggttttcggcaaccacttcagccgtcagtatgactgtctagcttaacaaattgagtttttttgttgatgtttcagcgatgtggggatgtttcatgagtagaaaattttccctgctgaaaagaggttttaaggttttctccctcattttcccagaaggaatactaagtgaaattctgtctggtgttggaggcacataggtgtgcggtgctctgaaagaataggttttctttttactactcatgcttgtccttgtttcagaaatcagaaatgaaaggaaaagagtactgggtcttaacatg

SEQ ID NO: 2929 - DNA, 1271 bp, Oryza sativa
  ref <308>: DATABASE ACCESSION NUMBER: AK060714
  ref <309>: DATABASE ENTRY DATE: 2001-12-06
gcatgcacttgcagtcagtggtacaacaccacagcaacgcaccaccggccatcaacctcctctcccctgcttctcgctcgctctcctgccctgtctcttggagaagtgagcttaagtgagagcctctgtccctcgcacacgctattggccatggtggttctcgctggcccgcccgccgtcgatcacatcccgctgctgaggtcgccggaccccggcgacgtcttctccggcgtgccggtcgtcgacctcggcagccccggcgcggcgagggccgtggtggacgcctgcgagcggtacgggttcttcaaggtcgtcaaccacggcgtggccacggacacgatggacaaggccgagtcggaggccgtcaggttcttctcccagacgcagcccgacaaggaccgctccggcccggcctacccgttcgggtacggcagcaagcggatcgggttcaatggcgacatggggtggctcgagtacctcctcctcgccctcgacgacgcgtcgctcgccgacgcctgcaccgtcccgtcctgcgcggtcttccgggccgctctgaacgagtacatctcgggggtgcggaaggtggcggtgcgggtgatggaggcgatgtcggaggggctgggcattgcgcaggcggacgcgctgagcgcgctggtgacggcggaagggagcgaccaggtgttccgcgtgaaccactacccgccgtgccgcgcgctgcaggggctcggctgcagcgtcaccggcttcggcgagcacaccgacccgcagctcgtctccgtgctccgctcaaacggcacgtccggcctgcagatcgcgctccgcgacggccagtgggtgtccgtgccctccgaccgcgactccttcttcgtcaacgtcggcgactcgttgcaggttctgaccaatgggaggttcaagagcgtgaagcacagggtggtggccaacagcctaaagtctagggtttccttcatctactttggagggccaccgttagcacagaggattgcaccattgccacagctgctgggggagggagagcagagcctgtacaaggagttcacatgggatgagtacaagaaggctgcctacaaatcaaggcttggagacaacaggctggcccagtttgagaagaagtagctagctagatgcctagcaacagaactggccggtcaagcagcaacgactttactgcatggcagctagctaccttagctatgtctcacgcacacgtacggtacaccatgaccacgagaagatgaagctgcttaagagag

SEQ ID NO: 2930 - DNA, 1341 bp, Oryza sativa
  ref <308>: DATABASE ACCESSION NUMBER: AK060715
  ref <309>: DATABASE ENTRY DATE: 2001-12-06
aatacaacctttgagcatataggaggtggtctacagacaatattaactgatcaaaataagctagttgtagcagttggaggtgtcacagcacttgcagctgggatatacacaacaagggagggtgcaagagtggtctggggctatgttgatcgtattctaggtcagccatcacttattagagagtcatcacgagggaaatatccctggtctggtgtcttctcacgtgctatgagtacaatgactagtaaactgaataaaggaagcaacttggggaacaacgggaatgggtttggtgatgttattctaaatccttctcttcagaagagagtgaagcagcttgctaatgccactgccaacacaaaacttcatcaagctccttttagaacatgcttttctatggtccacctggcacaggaaaaacgatggcagcaagagaactagctcggaaatctggattagattatgcactaatgactggtggagatgttgcaccattgggatcgcaagcagtcactaagattcatcagttgtttgactgggcaaagaaatcaaatagaggtttactcctcttcattgatgaagctgatgctttcttgtgcgaacggaacaagacatatatgagtgaagctcaaaggagtgccctgaatgctctccttttccgcacaggcgaccaatctaaggacatcgtccttgcacttgcgaccaacaggcccggtgaccttgactctgctgtcgccgaccgaatcgatgaggtccttgagtttcccttgcctggggaagatgagcggtccaagcttttcaaactatatctggacaagtacataatgaaagctggtgaaaaacacgaaaagagctggctcaggttcttccgcggtcagcctcagaagatagaggtgaagggtgtcacagatgacttgatacgggaggcggctgccaagaccgagggtttctcaggaagagagatcgcgaagctgatggcaagtgttcaggctgccgtgtacggaagcaaggagtgcgtgctgactccagacctgttccgtgaggttgtagactacaaggtcgccgagcaccagcagaggagacgacttgctggctatgagcagaagaatgcttaggaagtctcttttcgcgcaaccccccccccctcccccctcttttgctgtaggctcacaatgtttatttcttgcgaggttgcctgaacggccaggtgatttatctgcttcgttgtctttagctttattattcttttgctgcaatccttacccttacatggggagtttttggcaatggtggatgatcaacagaagaagaggattacatgtatgaacgataacctaacgc

SEQ ID NO: 2931 - DNA, 1225 bp, Oryza sativa
  ref <308>: DATABASE ACCESSION NUMBER: AK060716
  ref <309>: DATABASE ENTRY DATE: 2001-12-06
gctgaggaccttggtggagcatcagtgcattgtaagatatcaggagtctctgatcactttgcacaagatgagcttcatgggctaacattgggaagaaacattgtgaagaacctccacttggcagctaaagttccaaatgtacaaaattctgcttgcgattaccaagagccattgtatgatgtacaggaacttcgctcaattgccccggctgatatgaagcagtcttttgacattcgccaagtaatagctcgcatagttgatggaagtgaatttgatgaattcaaaaaattgtatggaacaacactggtgactggttttgcaaggatttgtggacagccagttggaattattggaaacaatggcattttgtttacagaatcagccctaaagggttcccacttcatagaattgtgtgcccagcgcaatattcctttgatattccttcaaaatattactggattcatggttgggtcaaaatctgaagcaagtggaattgcaaaagcgggagcaaaaatggttatggcagtttcctgttccaaggtaccgaaaattaccataattgttggtggaagttttggtgctggaaactatggaatgtgtggacgtgcatacagtccaaattttttgtttatgtggccaactgctaggatatctgtcatgggtggcatccaggcagctggtgtccttgctcaaatagagaagaacaacagaaaaagacaaggagtggagtggaccaaagatgaggaagaagccttcaaagcaaaagttgtggaggcttatgacaaagaaggaagcccatactactccaccgctagactttgggacgatgggattatagatcctgcggacaccagacgggttttaagcctctgcttatctgctgcggcaaagccggttccagaagacacaaaatatggagtatttcgaatgtaaatcatgcattataattgtgtacaaatccctgtatactgtatagtaaaatccgctttcatgcgcattgaaataaggcaaaataaaatgccattccaaggcttatttcgcaagtataatttcgccctgatgtgtataacaaagttatgtttaccagtgttttagtggcgaataaactgtttaagttgttactgtagctaaaatacattgatagactattgttctgagtccacaatccgtcaatgtatattttttctcttaaagcttacaaaatgagcatactaatgtttgctct

SEQ ID NO: 2932 - DNA, 1324 bp, Oryza sativa
  ref <308>: DATABASE ACCESSION NUMBER: AK060717
  ref <309>: DATABASE ENTRY DATE: 2001-12-06
atgatgatgcgagcggcggcgggcccgggcaggccgtgctgctgctgcaggagaccgatcacggcggcgacgacgacgaccggccggagagggacgacgtgtggaacatgatccagtcgcagaggccgccggtggcggcggggaagcagcagcaggcggcggcgccgtacgtgcacccgctcgtgcggaggtcgtcgagcctgctcagccagaagagcctggagatttgcaccgagagcctcggctccgagaccggctccgacggcttctccgacgccgatgggtccaccgaccgctcgtgccccgcgtcggacgatgactccgacgggggcgcggaggaggtggccgcgcgcgccagcccgccacgcgcgttcccgccgccgctgccgtcgctggcgcggcgcacggtgggggcggtgcagatgacgcaggaccgccgcgacggccgcctcgtcgtcaaggccgtccccgtgccgtccgccacgctgttccgcgcgcagcgctgcggcgggcgcctgctcctctccttcgccgacaccgccgctccctcctcggacgaggacgacgagaacaatgaccaagaagaacccgagcagcaggccgacgaggtcgcgcacgacgaggaggaggaggaggacgacgaggatgacgaggaggaggtcgaggtcgtggacaggggcaccatcgtcgaggtcaaggtcagcacgcagccgcaggcgcgcagcaacggcggcggcagtgttgggccgcgggtgcaccgctcctcgctcgtcatcaacaagttcgtcaacgccgagccggccatcgccgcctccgacatcagcgacaccgccgccaccgcacccaatcccccgagacgcccgaccgggtccaccaccacggcggccgcagctctcgtcgcagcctcatctctgagcgcgacctcggctccgtcgggcagtgacaaccccggcggcgagagcaagctgctgatgacgacctgccggcgccggcggagcaaggaggagctcatgaaccacatgcgccgatgcgggcagctcagcggcaagctcttcatatgggagccacgcatcgccacctcctcctgagccgacgagcctcgccgccgcctcctctgctcgcttgtgccacgagtgctctgctctgctctgtttgttcgtagccgttgtaacgtaaacgtgcgtaatatttgtgttagtagcaaggtgatcgccacgtgattggcttagccctcttgtctgtgtctccttccgtgagtgagagggagggagctagatttgctttcgtttatctccatccgtccccgtgtctcgttgcatgctgt

SEQ ID NO: 2933 - DNA, 1410 bp, Oryza sativa
  ref <308>: DATABASE ACCESSION NUMBER: AK060718
  ref <309>: DATABASE ENTRY DATE: 2001-12-06
tcttgcggacattctgcagcactcaaagttggaagagtcccgcattgaacgtgagcgcgatgttattctgcgagagatggaagaggttgagggacaatatgaggaagttatattcgatcatctccatgcaactgcattccagtacacttctcttggcagaccaatcttgggttctgcagaaaatgtcaagtcaattacccaagaggacctccagaagtatattgaaacacattatacggctcctagaatggttatcactgctgctggtgctgttaagcatgatgatattgtagagatggcaacaaaactgtttaatgacctaccaactgaccctacaacaacaagcatgttggtttctacccaaccagcctgctttactggttctgaggtccgcatcattgatggtgacatgccccttgctcaatttgctgttgcctttaatggagcatcatggatagatcctgattctattgccttgatggtcatgcaatccatgcttggctcatggaacaagagtgctggaggagggaaacacatgggttcagagcttgtacaaagggtagcgatcaatgacattgctgagagtataatggcatttaatacaaattacaaggacactggcctctttggtgtctacgctgttgctaagcctgactgcttggatgatttggcttttgcaatcatgcaagagattagcaaactgtcataccgggttactgaggaagatgttatccgtgcacgtaatcagctgaaatcttccatccaactgcacctcgatggttccactgctgttgttgaggatattggccgtcagttactcatctatggtcgaagaattcctattcctgagctttttgcaagaatagatgcagttgacgcaagcacagtcaagcgagtggccaaccgtttcatttttgaccaggatatcgctattgctgcaatgggacccattcagggtcttccggactacaactggttcaggcgccggacctacatgctccgttactagactctccaaccgatgtactatgtttacattctgcaaaggcaagataattgcctcttttggcatcagtatattatggcctcgtccatgcacattgtgtgtgcgacgtggaggaaatttttttgagcaccattttccttgttttctttgtccaaaaccaacaaagctgtcaataatgataggcaaattcaactgacgtggcttacttgagttgccacccgttgtttctacgatgaatcgttacccctacttatccttttttttattgcaagattgctttctttttcttggaataatttgatgaagctgcttatgtaaagatgatagttttgctgtgtcgactattgacaactgcacgaggtgcgaattgtaccgatctgttaatctcttattgcctcttggag

SEQ ID NO: 2934 - DNA, 1249 bp, Oryza sativa
  ref <308>: DATABASE ACCESSION NUMBER: AK060719
  ref <309>: DATABASE ENTRY DATE: 2001-12-06
catgggaaacacacacgtttctggcccaccccatgccatttacgcttaggcccttcacagtgtgtttgcgtggtgagtttctttgtgccgccagctcaaatgaatgcctacgtggcgagtaattgcgcatccctgcagagcatctcacctccacgcagggagatgagttttctcgctcttcgtgagtccacacatggcccacaaacgaatcgtgcctgcgttgttggggtcgagcctccatctcgtcgtctcctcgcgccacatcgaaaaacctattcccaaaatcaccctcccggccatggattgatccctcccatgccaccgattccgccactcccgcacaaacctcgccatccccttcggagaaacgcacggaggccaacggagcaccgtcgatgtgaggtggatcctcgacttcgccgctggcgggctagatgatgacgacgacttcctcttccacgccacggaggagttggagtggagccactacaaggccaagcgtcgcgcttctgcctcaccgccgccgccatgaggcggatcctcaacttcgtcgccggtgggctggatgacgatgacaacttcctcatccacacagcggaggaaacggagtggagccactatgaggccaagcgtcgcactttcatcctgccacctccgccgtgaggtggatccttgacttcgccatcgacgggctggacaacgacggcaacttcctcttccacgcccaggagacagagcggagccatgtgcggatgacgaggaagacgacgacgacttcctcttcttcgagaagtggtgcatttgcggccgtgacgcctggttgagagaggcgatggcgatagggaggagagaggcgaaggagagggagctcaggcggtgggcaacaggttgagggaggcgatgccgatagggaagagagaggagaagggtagctgggggaattaatttattgggctggggcaccttcattgtcttggtcacctgtattgtgagctttgtagtctcgacactagctcgccccaatcaaagccatgcaaaagaagtaacatgcactgtggagttgaatggccttgggctgatttcgtgtgtcacataggctagagacacgcatagcgtggcttgcatagttattgcttaaaggcaaggtctgtggcttcgcagttgcaatcctttactatgtgcacgccacctacttaccctaatccccttagcccatatgcatatactatctccgtctctaaatgaagct

SEQ ID NO: 2935 - DNA, 1700 bp, Oryza sativa
  ref <308>: DATABASE ACCESSION NUMBER: AK104329
  ref <309>: DATABASE ENTRY DATE: 2002-08-28
agctagcgcgcggtacggtaggcaccagctatacagcgcgccacacacaacaatggccggcgctaccgctgccgccgtctcctcctccttcctcgcgctcgcgttgctctcgctctgcgccgcggccgctggcggctcgcctcagctggacgcggaggccgcgcggcagcaggaggccgaccgcgtgacgaggctgccggggcaacccgccgtgcggttcgcgcagtacgccgggtacgtgacggtgaacgagacgcacggccgcgcgctcttctactggttcttcgaggccaccgccgccgccgacaagaagcccctcgtcctctggctcaacggcgggcctgggtgttcgtctgttgggtatggagaagcggaggagctcggtccattcttggtgcagaagggcaagccggagctaaaatggaacaagtactcgtggaacaaagaggccaatctgatgttcctggagtcccctgtgggtgtcggcttctcatacactaacacaagctccgatctgcagcagcttggcgacaagatcaccgctgatgatgcttacatcttcctgctcaactggttcaagcgcttccctcagtacaaatctcacgacttctacatcgctggagagagctacgctgggcattacgttccacagctttcggagaagattttcgacggcaacaagcaaggccccaaggagaactacatcaacttcaagggtttcatgatagggaatgccctgatggacgacgagacggaccagacgggcatgatcgactacgcctgggaccacgccgtcatctcggaccgggtgtacgccgacgtcaagaagtactgcaacttcagcatggagaacgtgaccgacgcgtgcgacagcgcgctcaccgagtacttcgccgtgtaccgcctcatcgacatgtacagcctctacacccccgtctgcaccgaggtctcgtcgtcggcggcgttcggccagcgccaggtcgccgtccacggcgccgccccaaaaatcttctccaaataccatgggtggtacatgaggccggcggggtacgatccgtgcacgtcggatcacgccgaggtgtacttcaaccgggctgacgtgcaggaggcgctgcacgccaacgtgaccaatatcggctacaactggacgcactgcagcgacgtgatcggcaagtggagagatgctcccttctcgactctccccatcatccgtaagctcgtcgccggcggcatcagggtctgggttttcagcggtgacaccgatggaaggatccccgtgacgtcgacgaggctcaccctgaacaagcttgggctgaagacggtgcaggagtggacgccgtggtacgaccatcagcaggttggaggatggacgatcctctacgagggcctgacgttcgtgacgatccgcggcgccgggcacgaggttcccctgcacgcgccgaggcaggcgctcagcctcttcagccacttcttggctgacaagaagatgcctccgacggcgttcccctagtcgctcgcatgcagtctgccttcttcaacgatggcgaggaacgggcgtcgtgcgcccactaggttgttttccagcgataccaactgatcaggaaattttcttttctttggtccaagactccaagtcatgtaacacagtggaaattcgattggaacaatcgataacaataaaacatatatagtgttgattg

SEQ ID NO: 2936 - DNA, 1330 bp, Oryza sativa
  ref <308>: DATABASE ACCESSION NUMBER: AK060720
  ref <309>: DATABASE ENTRY DATE: 2001-12-06
acccacgagcgcgcgcggaatctgtagtaaactagtaatccatccccgatcggcggcgatgcagaacccgccgagccaccccgttgacctgccgctggcggcggcgccgccgccggtgaaggcgccgaccccgcgcccccccacgccggcgtcgctgcagccggagtccccgggggtgttcttcacggccgccgcggcggccgccccggtcgggtcctcgcaccgccgcatcgccatcgccgttgacctctccgacgagtccgcgtacgccgtccgctgggccgtcgccaactacctccgccccggggacgccgttatactgctgcacgtccgccccacctccgtgctctacggcgccgactggggctccgtcgacctctccctccccgccgccaaccctaaccctagcggcgacccgccgtcggccgaggacgacgctgaggccgcggcccgcaagatggaggacgacttcgacgccttcaccgcgtccaaggccgacgacctggccaagccgctcaaggacgccgggatcccctacaagatccacatcgtcaaggatcacgacatgaaggagaggctctgcctcgaggtggagaggcttgggctcagcgcggtcatcatggggagcaagggcttcggcgcctccaggcggaccagcaaggggaggcttggaagcgtcagcgattactgcgtgcaccactgtgtgtgccccgtggtggtggtgcgtttccccgacgatggtgtggcggagggcggagaggccggtggcgcatcggagttggcggtgggcgaggaagtgctgcaccctgtgccagaggaggatgccgagtaccatgacgccactgaagagcacaagggtaattgatttaccgtctggtgtgcacttgtgttgctgactctatatgtgttgtttcctactttgatttgctatacaaagtgtaatctgaataatcaaatagtgggtatggataaaaaaacaaacgaacaatcaactacacctgcaaattatcgttattcgtgcaaaaataacgagaaaaatgagttgtaagataatgtaaggttgtgtagtacaacaatgaagcaatgttgacactcactgcagagccctatgttttggtttagttccccacaaccccaactccacaacatacataaaaccccttgacattttaggagttgctctatgtagtcacagggaggtgcaataatatggtggggatgtggcttttaagtgtagggatatgctgtaacatactgcatttcctttctattctcaaaattacatgatctagtctattgttcatgacatctttatgtgcaaaagcgattt

SEQ ID NO: 2937 - DNA, 1323 bp, Oryza sativa
  ref <308>: DATABASE ACCESSION NUMBER: AK060721
  ref <309>: DATABASE ENTRY DATE: 2001-12-06
accgcgagcacgccgcgcgcctgcttcctccacctgcgccgggcgagaagatgatgctcccccggctcctcctcctcgtcgttgcctccgcgctgccgctcgcttccgtcgctgcgggcgccgtcggcgtcggcgaggggttctgctcggcggagccgtcggcggcgtcgggcggctgctccggcgtgcggccgccgctctactggaaggccaccaacccgactctggcgcccgcgcacctccaggatttacctggcttcacacgtagtgtttacaaaagggatcatgctttgattacaccagagagccatgtattcagccctttgcctgactggatcaacacattaggagcatatttaattagtccagctatcggggcacatttcacaatgtacctggcaaaaatgcatgatggatcaaaatcagccctaccaccaaaaggtgttgaaaggcttatctttgtactccaaggaagcattctattgtctgaggagagtgggaatacccatactctgctggtggactcttatgcctatcttcctgcaaacatgaaacactctgtgatctcagatgaagtaactacccttgtaatctttgagaggaggtacacaaccattgagggttaccatcctgatctcattgttggatcaactgataagcaaccccttcttgaaaccccaggagaggtatttgagttgaggaagctgctacccacttctctgccttatgactttaatatccatataatggattttcagcctggggaatatcttaatgtgaaggaggttcattacaatcaacatgggttgctgcttttagagggacaaggaatataccgattgggagacagctggtacccggtgcaatcaggggacaccatttggatggcaccgtttgtgcctcaatggtacgctgcccttggaaaaaccaagacgaggtacttgctgtataaagatgtcaatagggatccactgatatgaggaatgcaacatttcctgaccgatggtaatagatcaaattggagagctattacgctggtcttgaagagtccctgtggaagatgatctcagaaaaaaataaatcttctttctcgctgatgaacccttcaaaatgatgaatcgacgcaagaatctcagatctgtacatggaatggtcaagctacccacttgttcttattggtcaatatgaattcagaaaaaaagttgctgtactattttctggacagaactgggctatgctgtgactcttcggaaatctgtattggctaaccccttgaaatgtcgaaataatgcgtcgctgtaatgaaaccaggtacctgattcc

SEQ ID NO: 2938 - DNA, 1383 bp, Oryza sativa
  ref <308>: DATABASE ACCESSION NUMBER: AK060722
  ref <309>: DATABASE ENTRY DATE: 2001-12-06
ccgcgcctgcggcttcgccgaccgcttcatggtgttcatcccgagctccgacccgcagtggaaggccctgcgggggatccacgcctcgcacgtcttcaccccgcgggtgctcgccgcggtgcgccccatccgcgagaggaaggtgggcgacctcatcgcctacctccgcgcgcacgccggggaggaggtgctcgtcggccacgccatgtacacgggcatcctcaacatggtgtccttctcctacttctccgtcgacatcgtcgacatgggctcgcagatggcccgcgagctgcgggaggtggtggacgacatcatcttggtggtcgggaagcccaacgtgtccgacttctacccgttcctccggccgctggacctgcagggcctgcgccgctggacgacgaagcggttcaacagggtgttctccatcatgggcgacatcatcgaccgccgtttggctcacatccgcgacaacaagccgaggcacgacgacttcctcgactcaatcctcgagctcatggctgccggcaagatcgatcgtgtcaacgtgctcaacatgttgttcgaggctttcgttgccggggctgacaccatggctcttaccttggagtgggtaatggccgagctgctcaaaaacccgagcgtgatggccaaggcgcgcgccgagctgagggatgtgctcggcgacaaggagatcgtggaggaggccgacgcggcgaggctgccctacctgcaggccgtgctgaaggaggccatgagactgcacccggtgggcgcgctgctgctgccgcacttcgccatggaggacggcgtggaggtcagcggctacgcggtgcccaagggctccacggtgctcttcaacgcgtgggcgatcatgcgcgacgcggcggcgtgggagaggcccgacgagttcgtgccggagcggttcgtggagaggacgccgcagctggacttcagagggaaggacgtggagttcatgccgttcgggtccgggaggcggctgtgccctgggctgccgttggccgagcgtgtcgtgccgttcattctggcgtcgatgctgcacacgttcgagtgggagctccccggcggcatgacggcggaggagttggacgtgtccgagaagttcaagactgccaatgtccttgctgtgcctctcaaggctgtgcctgtcctgatcaaatagttggacgactatattattggccagatcaattaccatactcggcaccagaattatattatttttaacgaatttgtactagtgcacattgaatagagaagaagcaaaactatacaagtataagcctacacaggagaaagaaaaaaaaattctatgctattgtaaaatgtcacataatctttctgctccgcctgagcctctttgcc

SEQ ID NO: 2939 - DNA, 198 bp, Oryza sativa
  ref <308>: DATABASE ACCESSION NUMBER: AK060723
  ref <309>: DATABASE ENTRY DATE: 2001-12-06
tggacaaatcagattttgggacctgggaacttagtttgtggttgtactcaatgttctaggtgttgatgtcctttgcttccgattttattttaccttactgtggtgatgtataagaaaaacttctcagtgggctctttgctaaacactaaaatttaaatgcttgtaatattgtttggagggcacagattgacttaccac

SEQ ID NO: 2940 - DNA, 216 bp, Oryza sativa
  ref <308>: DATABASE ACCESSION NUMBER: AK060724
  ref <309>: DATABASE ENTRY DATE: 2001-12-06
agacaaaaaagaccctgtattttcttcgttcgttgccgtttggtttatagtgatctcgtgttctttgtgttagctgctctgctcagcttgccagccatggcggcaaagcaagcggcttttctaagatattgtcgctaaactgtattttggggtgaaagtattgctactcgattccatccttaaaaagttgtggtaatagaaatgttttgatcctat

SEQ ID NO: 2941 - DNA, 1375 bp, Oryza sativa
  ref <308>: DATABASE ACCESSION NUMBER: AK060725
  ref <309>: DATABASE ENTRY DATE: 2001-12-06
gagacgatgcatgctgccgacacagtcagtcggcgcaatgcccatggaaatcgtcaccaggcgggacaaggaggggctgcggtgcaatggcgccgacggcgagaagctcccgcagctgctcgactcgccgctccccacgccgcgccggtcgtgcgcttcggcggacgcggccagcgtgcggtgccgccgcgaagcctccccgctgcgcacgcaggtgccgttttcctgggagagctcccctggggtgcccaagaggagcagcgcgtgcatgcacatggcgcaggagatcatgccgccgccgaagccgccgcctgggcgctggaagcagtgccccggcagcaactggtgcggctacggcaactcgaccgccgcgagcagcgacgacgacgatgcgtcgttctccgacgccctggacagggtctccacgcccgatcagcgggtcggctcgttcgaccggatcacgtccaagcgcttcgaggacatcttcctcggccgcgccacgagcttcgtcaatgaccggtcctcccgccgtgcaccagcggaagcctccctcgccacgccgtcctcgtcctcgggcagaggcccgaaacactggcggcgacgcaccacgcgccgcgatcacgacgggcagcagccgacggccaggcaaagcaacgaccaccccgtccaggtgcagcttttgccgcgcatcaacatcaacggccgcgacgagcagatgtcaccgagagcctgcgggctcatggtgttcttcccctggagcgccaagcccgccgtttgcgggttcaggagcccgccggcgcagtacgcgccgtcccctctcgccggcgccagcaacccttcgtcctcacagagccgcaggttcgtcaccctacgcgacgcaatgcaggaggagaacaagaccggcagcggcggccgagacttgccgcggccgcgtggcgagaagaggagccgcgaggaatggcaggccgcaagccgtggatggggcgtgtcgtcgctgctcgacgcgagcaagaagtactgcaccgacgcacggaaggctctgagcaagctgtccatcgggttaggaacggacagcggcagtggcagtggcagcccgagagttggcagcagggagaggaagtgcggcaagcaggacccctcatcgacgatgccggccatggccaccaagctgacgcagctcaggactagcagaaactaaggtcagatcattcagattgatcggtagttgcaagaacaactgcgcgtggagcatgtatatctatgcatttatgtaggactgctctcatctcctgacagctagaataaatcagatgtgcctataaacatgttaatcatggtgttatgcctataaagtaattatggtatttatctttgc

SEQ ID NO: 2942 - DNA, 115 bp, Oryza sativa
  ref <308>: DATABASE ACCESSION NUMBER: AK060726
  ref <309>: DATABASE ENTRY DATE: 2001-12-06
atgttgcacgctccgtgcgtgcatgctatcttaattttcttgactctgtacaccgctctgtgtacgtgtaatcctacgttgatgaattgcatcttgtccagacttggacctagct

SEQ ID NO: 2943 - DNA, 223 bp, Oryza sativa
  ref <308>: DATABASE ACCESSION NUMBER: AK060727
  ref <309>: DATABASE ENTRY DATE: 2001-12-06
tctcttttctaaactacctactggatactgaagttgtgggtctattgtgcttcatacttcaatgttattaggaacttaatttaagcagaccatatcatgtattcaagtatcatcgtctgacatttactctagcaaggattggctttctgctgaatcaagttttcttgcttaatgctcgtcgaatccaatgtgatgcatgtctttagatggcactgcaattgtg

SEQ ID NO: 2944 - DNA, 260 bp, Oryza sativa
  ref <308>: DATABASE ACCESSION NUMBER: AK060728
  ref <309>: DATABASE ENTRY DATE: 2001-12-06
ggcatgatgtaaacaacaaagggttcagagtctagagcaactgatacttgtcttgtaatcttgtttaaaggtgcacgttctttatagtcatatagtttgatagagctactacaatatttgggttgggtgggccaaaatggcacgtaggcagtctggtggtcgtaggttgggccgcttggtcgctgtattattaggcccaaacatagggatttcaacacattttttaatgaaaactttcatctgaaaaaaccttcgtttgg

SEQ ID NO: 2945 - DNA, 2884 bp, Oryza sativa
  ref <308>: DATABASE ACCESSION NUMBER: AK060729
  ref <309>: DATABASE ENTRY DATE: 2001-12-06
ttgtataatgactaagttagaacattaacatctttcagtgattccatgactctacaggtggtatatttgcgttgtactctttgatttgcagaaatgcaaaagtgagtctcattccaaaccaagtacactctgagaagaggatgtcgagtttccgactcaagcttccaacgccagagcttgagagacccataaaagtaaaggagaagcttgaatcttcattgctattgaagaagttgcttctaggtctagtgctatttgggactgcaatgttcatatcaaatggagttatcacaccagctatgtcagtgctgtctgctgtcagtggcttgaaagttgggataccaaatgcctcacaaggtgatcctttagatccctgtatctgatagcacctaagcaaactatttatttaactccactaaatgttatttgcaggccttgtggtgatgatttcagttgtacttcttgtaatcttgtatagtgtacagaggtatgccactagcaaaatggggtttgcacttggcccttctttacttatatggttttgctgtctcggaggaattggtatatacaatctcagtacatatggcccagcagcttttaaagcatttaatcctctctacattatttattattttgggaggaatccctttcaggcttggctgtcccttgctggctgtcttttatgtgcaacagggtccgaggcaatctttgcaaatctttcctactttcctgtaagatatgttcagtcaatgtttgcgcttcttgttcctccttgccttgtcttggcctatttaggacaaggcgcttttcttattgcaaaccaaaattcatctgagcagatcttcttctcatccatcccaagtggagttttctggcctgttttcttaatagccaatttagccgcattgattgctagtagaacaatgacgacagctatattccaatgcctaaagcagtcaatagctcttggttgctttcctcgactcaagatcattcatacgtctcggaaatttatggctaagatatacattcctgtcgtgaactggtttttattgttttcctgcttgggctttattctgctgttcagaagcatatatgatgttggcaatgcatatggtaatcctatatacttgtatagttcatccccactaagtgtagttaatgttatctctcttctatcattaagccacatcaccttaattatttctagccattggatgatagatctatggttcaaattgtctcttctttcttccctcataacaccaagtaatctcaattttttaggcctcaaaattcataagtatcaatttgttttagttttaatattcgtatttaatcttatttgtgcatattatgcaacttaatttccctcagcaatgtggcagggtattcatctagtaataacttaatatatggttatactttttagtgcaaatctgtctatttatctgctttttaataagttgtaatgctcagtgttctacatgcgcttaccctgttccatattgaacagccatagctgagcttggggtgatgataatggccacagtctatgttacaatcataatgcttctaatttgggaaaccagtattgtgaaagtgttgtcatttgtcatcacattcctctccttagagttggttttcttctcatcgtctctaagtagtgttggagatggaggttgggctctgataatttttgcatctggtattctaatggttatgttcatctggaattatggaagcaaactgaagtatgacagtgaagttaaaaagaagctttcaaaggatttgatgagaaaattggggcccaaccttggtactattagagctcctggattaggcttggtctacagtgagatagtgaaaggagttccggcaatttttggtcattttctgattgcccttcctgcaatccactcgataatcgtttttgtatgcatcaggaatgtaccagtgcccgtggttccccagactgaaaggtttcttttccaacgtgtttgtacaaggggttatcacatgttccgctgtattgcaaggtacggctacaaagataagaaccaggagagccaaagcacatttgagcgccttctgattgaaggcctcgagaagttcatacagcgggaggcagtagagctatccctacaaagtggagacgacatcgactctgacgaggagcctccaaccccatctaggacaatcgtagcgccaaatggtagcctctactcgcttgacgtccctctcctggcagactttgtgccttcggcagaagttattcctgaggccagttgctcaacgcctcagcacgatcctgtggtggattacacacagaaccttgagctggagctcgcattcatcaggcaggccaagcaatctggagccgtctatctcattgacaaccccatcgtcaaagccaggaagaattcctggttcttcaagaagctgatcataaactacttcttcgcattcttgaggaacaactgccgcagggcgatgatgtcgatgagcattccacacacaaatgtgatgcaggtgcgcttgacctcttatgtttgattgccgaatggtaccctttccgacacccttttgttttgttcgttgctatcaagtagagataacactaactagagaagaatggcattgcaaagagaagaagagtatagttgcacctctagcattattcaggaagggataacatctgttttaggaatccacgtctcctgtaatttttgtacaattgcgaaatgtatctgcaagcaaatgttgtgtagcaaacacatcagagtgtggtgagctaacatgtgtattcctgtgtgaggaagagattcttttgccatgtactagacaaggtactcgttttgagtttttgagtaaaaattttgat

SEQ ID NO: 2946 - DNA, 3426 bp, Oryza sativa
  ref <308>: DATABASE ACCESSION NUMBER: AK060730
  ref <309>: DATABASE ENTRY DATE: 2001-12-06
aaaaatgacaacaattagtgacggtttttcttttgtgacacatatagtgtaggtttacttccagcttcgtcgattaccagacggcaccggcgtcgcgcgagcgagcttgatcttgcgccttgtgcctgctagctgcttcggcggcggcggttatcttcttccgatctgtaacagccccgatcaagaaaggatccaacccacctaggaggactaacctgaacgtgctaatgagttcaaagctagtaacatcacctctgaaatccatggagcagggccatctagagcaacctctgcgcgatccgcaggcgccggcggagcagcatgacatggggttatctcccctgacgctcctcggcttcgccttcctgaccttcaactcgggaatggcagtgtacagatcagatagagacttggcaaccatcttcttcgtggtcttctcctacgttgacctcgtatcgctcttctacttcctccgattatttgagaagacgccgccggagtcgcctcgccgccaccacatcaagacggcggtgtggctcctgacgacgatgctcaccgccgtgttttcatataaagtggcggccatcatgcctttcccggttcaggtgctggtttgggccatggccgcagcaactgtgcttggagggttctacgcattcttcctccactccgatgaaaaaaagcctattgaggtaacgtaacataagtattattactccaaattgaagtttaaccatcatcatgatgtatgtatatatagggactgacagaatgaaagtttaagaacttcatcatgagatgtgatcgatcactggaagaatatttcacagaaaccaaacgaaagggacctattgattgattaccttgtgccaattctgctctaatggctctgaaacagatgtgcccacggaactgcataaatttcaagagtggtctatgaaaattggagaatgggaggaattgcacacatgaactgtcttgccagagtggagatgctatggtaatgatatactggaactcctttttatgggctccataatggccgcacttggcatccgactatctgagcacggaaattttcagtggcaaacttactgcgaatagaagcaaagcactgcaaaatctagagctttgcatgggtcaagtactcaagtttatgacctttttcagacaagggatacaatctggcttggcccaaagaacacattacagagacagagacaatgggctccataatcttccattgaaaagaaaaataagaaactggagctggagtgggagatgtttcaagaagaattgagccatcaatctctctctctctggtttcctactggccctggagcctccatatgcaaacattcttttaataaatatgcaaattttctgcactaaaatccgccacacatcaataaaaagggcagtccttttgatgataaaacagcgccattatattaaaacaaaacctttaatataatatcgatatattaagggcatattcggtaagctgggactgcagctgcagctgctacagcccctgctatcttggagctagtccagccgaacagccctaagaagcaaaaagagtgtgtcgagagtcgaacacggtttgttgggacttgggagcacaatgacagccctacccactcaaacatatataaatttgacgataactagtatttgtaccaaacaaagttactcgaatgagaaaactggaacagagctcaaccaatcaaacgaaagtgacaacaccccattcaacatgctggtacagcagctaggatcatactagtgacttgagcaaatgcacattccatctcctccctttgtaccttaatttcttctttagatgatttgcagtttaaattaccttgttctcggttttgtcgatatataggtcatctctcctgtggcagtctaattaaccctggtttgttgttcaattgtgcagggataggcaaaatacttgatagggctttctggctgtttggcatttgtcagacgccctgtgtgtggtaacatctcgatcaaattggaggtcgaaattaaatatatccggtgagaagagatcacgagatcgatcgctacctatatatcacagatagaaatcagagtcctatcgatattttcgccgagcatatataagtagtgctgtcgatggcgagcccaattcgtgctttataaaaacagaacaaaaaaaaaagaatatgagtttgtgtgcgtatcattttttctgggttaattgtattttgatcaatcagcatgtacctgtaaaatgaggtcgtgtagatcatgtgctaccgtactgtgtcctgtttttagtttttcctttttttcttcttccactgtttacatttctacttgtctgcgtctagtcactgtgtgctgttcacccagcacaaagtgagcaagcatgacactgtacccctcttttttttcattcttgaaccctaataagcaccggacacacatatttgcttgtaccacagtattgctagcaagatagatttgccaaatagccaatgtaccttgtgcacaccctttgtgtaaataaggaataattaactatttgccactcttacgagtggtgctaaattatttgctactagacccatatgtcatagacacatgagggcccacatgtcatagacagcgagttaaatgtccctgtaaataaagtctcatgtgtcacagtgtgtgcctattttcagaattggtaaatgctagcatggcctgaaatttttatatgagatttctcttccaaaaaaaaaaataaaaaatatatgagatgaggcgggaccctggatggataaatgtacggtataataactaaatcattgctacaatcaacatagacggaatattatgtaatctgtctttttaaagatgaaagtattagtgtattatggcattctgattatgttgacactttctctgaacttgttgacagagtgcacccgggatactgctaatactgcctttcatcgaattgaagtagggatgcacactaccctgcattcgcctctggagcagcaacgtgagacagacagaggaagacgcaagacacagcggcattgctgaacttgtgcacacagattacgagaattgggaagcgtcgtttacaagaacaaagaagaagtaatttagcaagaatcaaaggaagcggccagattagttgcattgcaatgtcagctaatgagacaatcctctggccatgtgcaaagagcttgagacaaggtgctcgacgacttgagagaggtcgatgtttacatgttaaaacttgaaggcgaaaacaagggttccaatctccccgtcgttttttgtaggtacaatttttgtgctccaggcttagagaagaccaggacgcagtcaagtcaaatgtacaaaattaagatttttaaagatttcgtcagcaatgacatttcctgg

SEQ ID NO: 2947 - DNA, 1882 bp, Oryza sativa
  ref <308>: DATABASE ACCESSION NUMBER: AK060731
  ref <309>: DATABASE ENTRY DATE: 2001-12-06
agagctcagctcgacgcaacgcagacgcaggcggcggcttcggcctacctcgatctctctcccatggcgcactagaccaaaaccctaaccctaggtccgcctcctccgtccggcggcaatggacgcgaaggacatcctcggcctccccaagaccgccttcccgtccgtccaggagaagaagccccgcgcgcccaaggagccgcagcggaagcccgatggcgtctcgcgcgaggtgtacgcgctcactggaggggtggggatggctccactcatgccgaccatcgaggcttcgcacctgaagcggcgaccagctgttgagaaggagaagatagcatggcagtggctacctttcacgtcctctgcacggactgacaaccttcaactttaccattgggttagagttgtaaatggtactccacccactggtgactatcactttgcaaaatacaacaagaaggcggatgttctcaaatacaccgatgaggagtatgagaagtatttaaccgatcctgcatggagcagggaggaaacagataaactatttgaactatgtgaacgctttgaccttcgcttcatagtaatagttgataggttcccaactgatcgcagcatggaggatttgaagagccgttattattctgttactcgtgctcttctgattgctagagctcggtcatttgatgaagttgctggtaatccccttgtgaaggaaacattcaatgctgctcatgagaccgagagaaagcgtgctttatctgcacttctctcccagacaaaacagcaagaacgaaaggatgctgagattttagcagaagcaaaacgcattatggaaactcgtgctgctagcaaacatactgaggaagcgggagcactggcacactttgataatgttgatggtgtatctcccttgagcaacacacacccattgtcaactgctacacttccagctgcagcagtgaataactccatacctgcttcactgcgaatgcttcgagtgtatttgagaacccaagcgcttgatcaaatggtccaagcagcaagtgcctcggcgggctttagagttatcaaaagggttgaccagactttacaagacctcggggtgaatttgaagcccaaggtcccgacgaaagcagtttgcgtcgagcatcttgaactacggaatgagatacttacactgcttaacttacagaagcagctgcaaaataaagaagctgaagtttcagctaacagagaaaattcctttacagaggcaccaagcacacctaagcgtgctaatagagatgttgatagaccctttgttcctgatactgttgggtttgcaggtgagagagcaggcaagcgggaccacaagcggaagaccactggaagatttatagatgcacctccctcaccaccccagtccaagaggcctcggaagttgaaagcatctgattgatgagtttcagattgagctgcatagaatttcaacaagccaaaacccctgatagtgctatggatcaactccattcttgcttggaagcttcccggcgtgcactttcaccaagagtttgctcccgtcggtagaagccgttcttggcttttgtctgtacagtgcatctgccctgagaaggttttcttcgtactcctcgttggaagatgagacgaatcaggtggaagcagctgctggcgccactgagaagtgatcgccttgagcccttgacgtctccccctactcaacgaagagtgtaactgtttcttttgtttgtttgagctgtagctaccgtttgtaaaatgagttatctgacaataccgtgtttgttcaagtagaactgtaacacaactgtttacacccaatcaatcctgtaatcttggacaatttaacgaggaaccgcgatcccaatgc

SEQ ID NO: 2948 - DNA, 1705 bp, Oryza sativa
  ref <308>: DATABASE ACCESSION NUMBER: AK060732
  ref <309>: DATABASE ENTRY DATE: 2001-12-06
aaaaaaaaacacttcttgttcttggcagcgagcgccatttccagaggatttcttgggttctataggtgaggttggaggcgcagcttcgtcgtcgtctgatggcgccatggcgtgcggcggcgatggcgtcgtcccagctcgcgcgccgcgcggcgaggaggctgctttcgtctcagcatcgccgtcactgcgccgcgcccgcctgtccctggctcctgggctcggcgccgccggttcttgcgccgtctccggtggctgcggcggcggcgggagatcgtcggggattctgctccgtccggcgtttcaccggggggagcaacgccgccgccgccgtcgaggaggcggagaacgggttggtggccggtggtgatcaggcaatagatttccctggaggaaaggtctcctttgttgctgaaatgaacttccttccagaatctcagagggataggatcaactgttaccgtgttcttgacgatgacggcagaacaatatctggaagcagattccaagaggtcagtaaggagctggctctgaaaatgtacaatgaaatggccaccctccaggtcatggatacaatcttctttgaagctcagaggcagggaagaatctcattctatctcacttcacatggtgaggaagcaatcaatatagcctctgctgctgcacttactattgatgacattgtactgcctcagtacagggaacctggtgttcttctatggcgcggcttcacactgcaagaatttgcaaatcagtgctttgggaataagctggattatggtaaagggaggcagatgccaatacactatggatcgaaccgtctgaattatttcacggtgtcatcgcctattgctacacagctccctcatgctgttggagctgcgtactccttgaagatggacaagaaagatgcatgtgccatcacgtattttggcgatggcggcacaagtgagggagacttccatgctgcactcaactttgcagcagttatggaagcgccggtgatcttcttctgccgcaacaatggctgggcaatcagcaccccaactagtgaacagttcagaagtgatggagctgttatccgtggtcaagcttatggaatgcgcagtatcagagtagatggaaatgatgctcttgctgtgtacagtgcagttcacacagccagggaaatggctatcaaggaaggaaggccaattttagttgaggcactgacttaccgggtcggccatcactcgacatccgatgattcaaccaaatacaggccggtcgatgagatcgagcactggcgaacagcgcgagatccgatttccaggtacagaaaatgggttcaggggaatggttggtggtgtgatgaagatgaatctgaactcaggaacaatgtgaggcaagagcttctgaaagccattcaggtggcagaaagaatgccgaaaccgccgctcgctgaactattcaccgatgtttatgatgaagttccttccaacctaagagagcaagagcgattgctgagggatacaatcaagaagcaccctgcagactacccagctgatgtgcatatttagttgtattgggtgaccagaggtttccatattgtagtaactattgataatttaggttcatagcattgataaataataacaacaataattcaggcaataaaatgctgatccaacagttataaatcaaatacaaaaaaaatattgttgct

SEQ ID NO: 2949 - DNA, 2400 bp, Oryza sativa
  ref <308>: DATABASE ACCESSION NUMBER: AK060733
  ref <309>: DATABASE ENTRY DATE: 2001-12-06
aggctccttctgcaggatggaaggggtacggctaatgctggcgcgcgttttgctggttctccagctggtggtgctggtggtgatcctctcccctctcgcggtgttctacctgttcggcctcctcatcaccgccggcctctcgctgtggcgcttgctgcagcgcggctacggcgccggcgaggaggcggccaacctcgcgccggcgctcaacgtgctctactcgctggcgctcgtccagggcgccctcttcttctactacttcacctcgcgcctcctcgggaggcggctggcgaacttggtcgccggagtttacagcttcggcggcgagggggaggaggatgacggcgggcgcacgtcggtggtggagtacatgcggcagacgaggaacggatgcgagaaggacccgtcgtcggtgagagggaggaacctcgtcacgttcgccgtgacgatgatgaaggagtcgtcgtcgtcgtcgctgtcgtccggcgactactcctccggggctaggatcctcgacaagctcctgtcacaggcctggctgcgggagcagcacgagctcatcaggcagctcgtcgggtcgtccaccgacctgatggacaagctgctgcagacgctccggtgcacggggacccgcgaccgcggcgttcgggagcacgccgcgaggatcgtggcgcacctcgccggcgagatcacgctcgccaggttcccgcaagggatccggtgcatatactcgctgctcaccaccccgagaaaccagcagcaagacgacgacaacgacgacgacgacgacgacagcgcccagtcctccgatcactacaagaagctcatggtgcagggcctcgtcatcctccacaagctagccgccgcggagcacaaccggcggatcatcatcaacagcacccagggacggcagctgctctccatggccatggcgcccgtcagcgccgacctgctccaccgcatcgaccacgaagcgtggaacgacatcgtcgcctgctcgctgcagctcatgtgccggctcgtcaccgcccccggcgagaccggcgacaagctgcgttcccaggtgctgaacgacaaggacgccatcggcaccatggagaggatcctcaactgcgacggatgcaacgagaagaggctctatattctcgccattaacatcctcacgcagcttcccatggcggcgaagaacaaggtggtggacgaggcttcgagcatgagcgtcgagagcagaaggaaattcaccaagctacttctactcatctataccgacgaagagaaggacgcctttatgagacaaatggcaggtgaagcattggcaatgctgtccgaacgaagcaagagcgacgccacaatcatcttgaaagcaagtgacagcactctcaaggacctcaccgcaatgctcttggatgtaaatagcaacagaggatacagaatatgtgcagctgaaatcctggagcatctgtacattcgatacaccaagcaagatggctatctcaacaatctgacggaagccatgaaagatgtgttgccaaaggtgctcggagaaatttttcttgtgtcatggacgcataaagaaaagcaaccaggaatgacagaacaaggaacagagggagttaatttctcggcacaaaaagctgacattgaaagtcaagatcccgttgcttgtcaacatgaaaaggttaaagaggaaaacgaaaaggttaaagaggaaaatgaaaaagttaaagagcaagatgaaaaggttaaagagcaaactgtggatatgaaactttatgcagctttactgtcacttagtgaggcaatatttcaaagattggtcaatgatgataaagatttggctgaactgactgataaaattgccccaggaggaggcactgcatttagcttcgccggaaagctcaaggagatggtagaaggaaacagtgaacaagcaacagccaattgcctgagaatgctgaagattactaccaggatgatcatatcattgataaatctcaatggagccaaagtcggagcagacctggagagcttgatgcattctctgttaaaagcttcagaaaagatgttggaactggagggcttcatgattttctctagcagcgatcgtaccgaaagcgcgaatcctgccaacattctcgcttccctcgtgaaagaagcacaggagcttctggagaagaagaggcaggcacaaactacacccgctccatcaatggagaccagctgattgagtaaacagactatcaacacgatcgtatgctgatctgcagactgttggcagtaatacctggaaactgacaccgtacaatccctgaaaactgtctctgtaatctgtatgtgtgctgaaacttatctatcttgtcaattgtcccatctatttcaaaaactttcaagttgaacttt

SEQ ID NO: 2950 - DNA, 1950 bp, Oryza sativa
  ref <308>: DATABASE ACCESSION NUMBER: AK060734
  ref <309>: DATABASE ENTRY DATE: 2001-12-06
atcatgccccttatgccctgggcgacacacgtgctacaatgggcgggacaaagggtcgcgatctcgcgagggtgagctaactccaaaaacccgtcctcagttcggattgcaggctgcaactcgcctgcatgaagcaggaatcgctagtaatcgccggtcagccatacggcggtgaatccgttcccgggccttgtacacaccgcccgtcacactataggagctggccatgtttgaagtcattacccttaaccgtaaggagggggatgcctaaggctaggcttgcgactggagtgaagtcgtaacaaggtagccgtactggaaggtgcggctggatcacctcctaaaagacaagcgaggattagcgatcgataactggagggagtatacagttggaaaattcaaactagacgctgatcatatcgagggagagttcaactcaactggagcgcggagatggcaacgcccaagctgtcccctgtatcgccggtgcggccggaagataagcagcgcgcgtcctcctcgtcgtcgtcgggggcggtggctgcgcctctgagggtgcaggacgatacggcggtcgaggagtacgagcagtacctgcggcttccggagctcgcaaggctgtggaaggataggtgctgtccggagtgggccgacgagggcctcgtcaagccggcgctgcaggcgctggagatcaccttccgcttcatctccgtcgcgctctccgacccgcggggctacgccagccgccgcgagctcgcgcggcggctggaggcgctcgcggcaagggaggtggagctggtggccgcgctctgcgagggcgagcagtgcccgccgctggccgagctgagcgcgtccaaaggcgtgctcccgcgggagcggagcgcgtctgaggtgtggaagattcccggtagcgccgccgcggtggtgtgccaggtcagcgaggccagcctgctcccgcggctcgccgcttgggacaagtccgagaccgtggcggccaggatcaagtacgccatcgagagccagatgcagggctgcgtgttcacccgcctaaacaaccggatcgaagcaagaaactgggaggccgcggcgagcgactgctggatcctggaacgcgtctggaagctgctcgccgacgtcgaggacctgcacctgctgatggacccggacgacttcctgcggctcaagagccagctcgcaatacgggcggcaccgggctccgacgcgtcctcctgcttccgctccagggcgctgctgcacgtcgctaacgccacgagggacctcaagaagcgtgtgccatgtgtgcttggcgtcgaggtggaccccaacggcgggccgagggtgcaggaggcagccatgaggctgttccacagccggcggcgcggcgagggcgaggaggccggcaaggtggagctgctgcaggcgttccaggccgtggaggcggcggtgaggaggttcttcttcgcgtaccggcagctcgtggcggcggtgatgggcaccgcggagtcgtcgaccaaccgcgcgctgttctcgccggcggaggagatggaccccctggcgcagatgttcctcgagccgccctacttccccagcctcgacgccgccaagacgttcttggccgactactgggtacggcggatggccggtgacggtgactctgcttcgtccaggcgaagctgagcggcggaaatagtggcggatggatgccgccggaccctgaattttgcagtctttcaaggttgatgatacatttaatacatttatgatttatttctgtagggtagtggtcgcgttcatctttcagttcgagtaaatgttttattgggagacattttggtttagatttgattactagatggtaacgggaaaatgatctaggatcatatatttcaattagagtactgatgatgtatataatgctctgtaaatatgtttcaatggattatgtgtccg

SEQ ID NO: 2951 - DNA, 1707 bp, Oryza sativa
  ref <308>: DATABASE ACCESSION NUMBER: AK104330
  ref <309>: DATABASE ENTRY DATE: 2002-08-28
gtccagccaaagaggatcgaatcgccatcagccaccgccgccgccgccggagacctccgatccgccgcctccaatcgccgacgatggaaccgctcaatcatccaaggtgacgcatcggcatcgcctcttccaatccccctattcatccatccactaaattcgtcatcatcgccatggccaccaccaaatcctttctccctcccccattcatcgccctctcttcgaaccctcgtcccaccaccctcgctcccactcccaatcccaggccccgccgccgcaattccctcgctatctgctccgcctccgcctcgggcgacccttctcccacacccgaggccgagggcggcggcaacccgctcctcgcgctatggcgccgcacgctccaccccctgggtgactacggcttcggcaagcgcagcgtctgggagggcggcgtcggcctcttcatggtctccggggccgcgctgctcgccctcgccctcgcctggctccggggattccagctccgcgcccgcttccgcaagtaccaagccgtcttcgagttcacccaggcctgcgggatttgcgtcggcacccccgtccgcatccgcggtgtcaccgtcggcaacgtcgtccgcgtcgactcttccctcaagagcatcgatgcttatgttgaggttgaagatgataaaattattgtgccccgcaattcagtggttgaggtgaatcagtctggtcttctaatggagacactgattgatataacaccaaaagatccactccctacaccttcagttggtcctcttgacccagactgttccaaagaaggtttaattctctgtgacaaagagaggatgaaaggacaacaaggagtaagcttagacgcactggttggaatatttactcgtctaggaagagatatggaggaaattggtgttcacaaaagctacaagttggctgaaaaagtagcatcaataatggaagaagcgcagcctcttctttcacggattgaagcattagctgaagaaattcaacctctgctttctgaggttcgtgatagtgatctggtgaaggatgtcgagattatagctaaaggtctggctgatgcatccggtgatttaagaaggctgaagtcttccatgcttacccctgagaacaccgatcttattaagcagtctattttcacccttatctttactctgaagaatattgagagtatcagctcagacatctctggtttcaccggtgacgacgcgacaaggcggaacatcaagctgcttatcaagtcacttagcagactgttgtgattgctcaggaataacacgggggagctttctccattgggaagcgctgatacaggaatttgctattagtgtagcatttcttgaaaaaaggaagaaaatgagaggaaagcgcaggttgagaatgagattagaaagaggtcatttggagagaggggaaccaagtttttgaatagtggaattatagtctctggttttgttttccaagtttcctgcattcccggatattattaaaacaagaaaagcacggggaaatgtgtaaatctccgttagttgtgtagggcatcttcttaatttgtttttgttttttttttttgggaggcagtgtaggccggtttttgtttgatattgtgatgtttcattcttgtgcccttgcgcaaaggtaaccagcaaggaatgcataaatacatgaaaactttgttgtctg

SEQ ID NO: 2952 - DNA, 1972 bp, Oryza sativa
  ref <308>: DATABASE ACCESSION NUMBER: AK060735
  ref <309>: DATABASE ENTRY DATE: 2001-12-06
gtgcaggctcgaattatattcgaggggcttcttgctgataagattactccaaatgtctatgtcttcaacagccttatgaatgtgaatgcccatagcttcagctacaacttttcagtctacaagcacatgcaaaatcttggcgtccctcctgatttgacatcatataacattcttctgaagacatgctgcaacgctaaggagtataagttggctcaagaaatttatgaggaaattaagaaaaaggaacagaacggtcttttaaagttagatgtttttacatacagtacaatgatgaaggtgtttgcagatgcaaaaatgtggaagctggcttccgacatcaaacaggatatgcaatcagctggtgttcgtcttaacctagtcacatggtcatcattaatcaacgcctatgcaaattctggtttagttgaccgtgccatagagatacttgaagaaatgacaagggatggttgtcaacctactgctccatgcttcaatattatccttactggttgtgttaagtcatgccagtatgatagagctttccgcttgttctatgactggaaagaatatggagtcaagatatctctatcccctgaacagaaaggatgttttggtgacaacttctcatactgtgaagaacatacaagtaacagcagtactctgttagtggttccatttagaccaacagttacaacatataatattctaatgaaggcctgtggcacaaatggagaacgcgcaaaatctgtaatgaatgaaatgaggcgaaatggcctttgccctgaccttattagctggtctattctgatggatatttatgggtcatctcaaaacagggatggagctattcaggcactcagaagaatgcaacgtgttggaatgaaacttaatgtcactgcatatactgttgctattaaggcatgcgttgaaaacaaagacttgaagttggcattgcacttgtttgaagaaatgaaagcacatcaactgaaacccaatttggtcacatacaagactcttttgacagcacgcaataaatatggatcattacaggaagtccagcaatgtttggcaatctatcaagaaatgagaaaggctgggtatcaagcaaatgactattacctcaagaatttgatagtggaatggtgtgaaggagttttgtctagcggtaatggaaatcgagaatattaccaattggatcagaggaaagaatcattcaagctcgttcttgagaaagtgacaacattcttgcagaaagatgttgatcaaaaccaaactgtcgatgttcgtgggctttcaaaggttgaatctcgcgttgtagttctctcagttctccggaagatcaaagagaagtatctactaggacgagcagttcaggatgatgtagtaatcatcactggtcatgggaaggcatcaagcgccaaggccgagactagtgttgtcgaggtcgagcatgcaatagttgctgttctgacggatgagttgggtcttgaggttttaattggacctggaagtcgcccggcttcgtccaaacccacagttccagctcgttctaggagtcatttagatctagcttctaaacatttttccaggagaccgcaggggatgataaagatcccgatcaactctctgaatcattggttgaagaggaaagctgtgaggactgtgcagtgacagttcctcaaccttttgcagagtcatcctaagataaggtagtgtatacagatgtacaggttggctggtgctactcagtgacatcaacccaacacggtttcacaagaaggaatttgtggacggccatccagatacggtaaaacatcagaattaaagttattaggttattgctggaaacttgcaatccccgcaattccatggaaactgaaaaacatgctgaccgagtacagtgaaatactccactgtctgtggattttgagcaccattgcctaatatagatttgtaacaagtttgttcgctc

SEQ ID NO: 2953 - DNA, 2039 bp, Oryza sativa
  ref <308>: DATABASE ACCESSION NUMBER: AK060736
  ref <309>: DATABASE ENTRY DATE: 2001-12-06
tttaaaacctagcactgctcttacttcaatggagcattttcagaaaaatgggcatgataacctggattattctgaagcccctgttatatcaaggcatttgagtgatgaaataaattggtcggcacaggacatgtgccaccaacatgatgaatcttttcgaggttgcatgcagtcaaatatgttcatcagagatagagtgtactatggatatgctgaagaagagggtagtagcttcagtgactcggaaattggaagtccaacatcacgccattcctgggagtacatataccggtttagcaatccttacttcggctcaactttaagccatgcttcttgttctcctgactcgcttgtaactagggaggctaagaagcatacctctgataggtggccaactgtatcttctaatgagattagccaagaaaaggtgctggtgcggaggagcttgagcacactcggtgaaatgcttgcgatgtctgatatgaagaaaaaaggggctgctgaacaagtggtcactaataccagcaaccagttgtgcagcaatgaaccaagacttgcagtaccatctaaatgttctgttgatggagacggagagagctccctcaggaaaatttcaaggtcaaaatctgttccagtctcatcagcagcctttgacagcctgaggttagatgatggatgctcaaatcctgaacatgaagaacccacatcatcaaaagaggagatcaaacccaagaatggcaagtcatctctcaagggaaagatttcaagtttcttcctgaaacgcaagaaatcaggaaaagataagcttgccccatcccccttgggggccttgggtaccagagttccgttggccagtaatgcatcaatagttagctcagatgtatcacagactgaatggactagcttacaagatgatgttgcttcagaaaatttagagaagtttgatattgcaccaacagtagttccggtcaatgaacctgaagcaacttcttcatctaagcctcccataattactcttgagaaagcactctcgtttgagatccgaaattcccactttgatcagcccagccctacatcagttcttgatgcatcatttgaggatgctagtgagaagtcacccaattcatccgagcacgcaattatcgctaaacaagaacctctatcaagatctcttcctattggatcaatcgcgcggactttatcatgggatgattcttcacaagaggctacattgtgttcagccaaaggagatagccacgaacaagatcaacacgaatttgtcgaaaagattctatcttctgttgggttcgacaacgaaaagaccagcgatattttcgtgcggtggcattcgcatgatttccctctaggcaccggcgtgcttgaccagttcttggaacgcaaggtggaggatgccaagtgcagggagaggcggtcaaaccagaggctcctcatcgattccgtcaatgctgccctactagacatcggccaaagcaagctttggggagcttacccttgcactgacccacaagttaacaatgcacggagagttgccacaggcgaggtgctggttgttgatgaggtatggaggttagtgaaaggctggctctcggacgatgatggcgagaaacatatggtcaatgcggaggacaatgcggggttagtggctgattgggttgtcggcaaggagattcaaggcaggtcatggcccgaagcactgcggttggaggtggatgaaatcagcacggagatatgtggggaggtcctggacgagttggttggggaggcattttcagaactagttgggtgtcattgaagctgaattttattttccctgcctgtggtgtccacctattgcttttatttccaatctggtggagaccaaggctcatgtgcactcccctgaggctcttactcttgtgtatattgccctcattactgctctgtatgctcaagatgttcccactccctctctgttaaatgtcactgccattcatacattctacagcaataacgtttatgaatcgatacagctgcattcc

SEQ ID NO: 2954 - DNA, 1345 bp, Oryza sativa
  ref <308>: DATABASE ACCESSION NUMBER: AK060737
  ref <309>: DATABASE ENTRY DATE: 2001-12-06
gagccagcagcaacacgcacgcacgcaccacacacgtagcagcagagcaatggcggcggccatggcgctgcaggtggtggccggcggcggctgctgttgccagcggcccgttcttggagctggtcggcggcggttggcggcggcgcgtgcggtggcgtcggacgcggcggcggcgaaggtgagcgaggaggaggggaaggtgaggctgggtgggtcggaagtggcggtgagcaagctcggcatcggcgcctggtcgtggggggacaccacctactggaacgactccgagtgggacgacaggagactgcaggaggctaaagcagcatttgacacaagcatagataatgggatgaccttatttgatacagcagaagtttatggtacagcgctgatgggagcagtaaattctgaaagtttactcggaggtttcatcaaggaaaggcaggagaaagaacagattgatgttgccgtcgcaacaaagtttgctgcacttccatggagatttggccggggaagtgttctttccgcactgaagaaatcgcttgaccgtcttgggttatcttcagttgagctctaccaacttcattggccagggctatggggaaatgaagggtatcttgatggacttgcagatgcctatgagcaaggccttgtaaaggctgttggagtctcaaactacaatgagaaacgccttcgggatgcatatgcgcggatgaagaaaagaggagttccacttgctgcaaaccaagtgaactacagcctaatatacaggactcctgagttgaatggtgtgaaggcagcttgtgatgagcttggcatcaccctgattgcttattccccaatagcccaaggtgttctgtcaggaaaatacactccagaaaaacctcctaccggtcctcgagcaaacacatatacccctgagttcctcaccaagcttcaaccactcatgaacaggatcaaggagattggagaaagctatgggaagaacccaacccaggtttcactgaactggctgacatgccaaggcaatgtggtgccaatccccggagccaagaacgccggccaggcgtaggagttcgccggcgcgctcggctggagcctcaccggcgacgaggtcgaagagttgcggtctctggcacgcgagatcaagggcatcaagatgcccatcgaggagtcatagacatgtaaaaactgaagaagtttttcatgtatatgataggagatgtgtattgattgtaccatgcaatagtaaacattttacggcgataaaatgtgtagaaggtgtagaaaatgagtcagaaatttctgcctgcatgaatagaaaaggtttatatgactttgagcc

SEQ ID NO: 2955 - DNA, 2043 bp, Oryza sativa
  ref <308>: DATABASE ACCESSION NUMBER: AK060738
  ref <309>: DATABASE ENTRY DATE: 2001-12-06
accttcctctccaccttcctcttcctcccgaccaaacaacctccctcctcctcctccacctcgtcgtcgtctccgccgcgctgtctcctcctctatataccctcacccacactcgcacgcgcaaacccaacccccgcatatgcttaactccccaacccaaaccctcctcctcccccatgggcgcgtgcttctcatcccacactgcgaccgccgccgccgatggcgggagcgggaagcggcagcagcggaagggggatcacaaggggaagctccccgatggcggcggcggcgagaaggagaaggaggcggcgcgggtggagttcgggtacgagagggacttcgaggggaggtaccaggtcgggaggctgctcggccacggccagttcggctacaccttcgccgccaccgaccgggcctccggtgaccgcgtcgccgtcaagcgcatcgacaaggccaagatggttcgccctgttgctgtggaggatgtaaagagagaagtgaagattcttaaagaacttaaaggccatgagaatattgttcacttctacaatgcgtttgaagatgactcatatgtatatattgtgatggaactatgtgagggtggtgaactattggaccggattttggcaaaaaagaacagccgttatagtgagaaagatgctgcagtggtggtgcggcagatgctcaaagtggcagctgagtgccatctgcatgggctagttcaccgagatatgaagcccgagaacttccttttcaaatcaaccaaggaggactcacctttaaaggcaacagattttggtctgtcagacttcataaaaccagggaaaaagtttcacgatatagttggcagtgcctattatgtagcaccagaagttttaaaacgacggtctggccctgagtcagatgtttggagcataggagtcataacttatattttgctctgtgggagacgccctttttggaataagacagaggatggcatattcagagaggtactaagaaacaagcctgattttcgtaagaagccttggccaggcatcagttcaggtgctaaagatttcgttaaaaagttacttgtaaagaacccgagggcaagattaaccgctgctcaagctctctcgcatccatgggtaagagaaggaggagaagcatctgagatccctgttgatatatctgtattgtccaacatgcgtcagtttgtcaagtacagccgttttaagcaatttgctctgagggctttagcaagtacactaaaagaggaagaactagcagatctgaaggaccagttcgatgcaattgatgttgataaaagtggatcaattagtattgaggaaatgcggcatgcccttgcaaaggatcttccttggagattgaagggcccccgtgttctcgagattatccaagcaatcgacagcaacactgatggtcttgtggactttgaagagtttgtagcagcaaccctccatatacatcaaatggctgagcttgactctgaaaggtggggcctacgctgccaggctgctttcagcaaatttgatctggatggtgacggatacatcactccagatgaactcagaatggtgcagcacactggcttgaagggttccatcgagccattgctggaggaggccgacatcgacaaagacgggagaataagcttgtcggagttccgcaagctcctgcggacggcgagcatgagcaaccttcccagtccaagaggacctccaaatccacaacccctgtgaacgtcggtaagaaccgagatgagacgtcgtaaattagtcttgtaaaggttgtcttgttcctgtccgcgtgccatgtgatgttgagggtgtcttgagtttttagcatccaggttccgtgtgcagcatgcagataaagtttcggtgtagtacggagtacatacatatttttttcaaaaaaaaatgttacaagcagaaatgctgttctagtctcccattctcctccttgtacataattctatatatgtatgatttgattgcacgtattcatcgcaataaagttgcctgggattgcatgatc

SEQ ID NO: 2956 - DNA, 1603 bp, Oryza sativa
  ref <308>: DATABASE ACCESSION NUMBER: AK060739
  ref <309>: DATABASE ENTRY DATE: 2001-12-06
cccttgccaccttcacctccagccttgccattcatcgggcacctccacctcatcggcgccctccctcacgtctccctctgctgcctcgccacgaagcatgcgcccgacctcatgttcctccgacttggcacgtcgttgccggtgctcgtcgcttcctcgccctgtgccgccgaggccatcctgcgcacgcatggcgacgtgttcgcgtcgcggccacgcaccgttctagcggatatcatcttctacggctcgcgcgacattggcttcgcaccgtatggcgaggattggcggcaggcaaggaagcttgtgaacacgcacctgctgagtgtcaacaaggtgcagtcgctatggcttgcccgtgaggaggaggtgaaaattgtgatggagaagataagcaaagcggcattcgcacgtgaagcagtggatataggccagattctttgctcattcacaaacgatctcgcatgccgtgttgtgtcaaggaagttagtcggggatgacaggcagaaaaagctcctccaagagttggttaataagacaataaagctgctttctatcttcaacgtggaggagtacttttcaattttagctcggattggcgtgattgggaaggtgatgtgcgcaagagctgagaggttgaaaaagaagtgggacatgctgctgaaaaagctgatcgccgaccatgagagcaagtgcgattcatacttagtatgtggccgtaacaaagatgactttgtggacattttactgtctgttaggaaggagtatggtctcaccgaagaacatgtcaaagctattcttgaggacgtctttattgcgggaacacagtcgtctgctcgggtgatcgaattcacctttgctgagctcatgcggaagccacacatgctcaagaaggtgcaggatgaggtgagggcttgcattcccaatggacaagcaattgttagtgaagttcaagttaacaacatgacttacctgagagcagttgtgaaggaggtactaaggctgcaccctgtggcaccactccttgcgacacacgtctccatggctgactgcaacatcaatgggtatatgatcccttcagggatgcgtgtcttggtcaacgcctgggccattggtagggacgaacgcttctggtatgatccagagaagttcatgccagaaaggtttgttgaaagtgtgaatggttctgccactgcgtcagtcaacttttgggtgaataactatcaatacttgccatttggttctggaaggagaatgtgcctcgggatgaactttgccatggcagttatcgagatcacactagcgaaccttctctggaaatttgattgggcgctgcctgcacatgcaatggaggttgatatgtcagaagagtttgggttgtcggtgcgtctgaaagaaaagctattgttggttccaaagcaacatgtgtagctgctagcaagtactcgaaggaattgaattgtccaactttaatgtgagaaagtctaccatgacctatgggggtctacactaatgttaacctctggacaaagtcattatacaccgtttctctatgcttcaacccttggaggatccaattcttatcacaaaatatgtgtgtaac

SEQ ID NO: 2957 - DNA, 1675 bp, Oryza sativa
  ref <308>: DATABASE ACCESSION NUMBER: AK060740
  ref <309>: DATABASE ENTRY DATE: 2001-12-06
gatgctcagcgtcaggcaaccaaggatgctggtcgcattgctggacttgatgtccagaggatcatcaatgaaccaactgctgctgctttgtcttatggaacaaacaacaaggagggtttgatagctgtgtttgacctgggaggaggtacctttgatgtctcaattcttgaaatctccaatggggtgttcgaggtcaaagcaacaaatggtgacacttttctgggaggagaagactttgataacactcttttggagttcttggtgagtgaattcaagaggagtgaagctattgatctggcaaaggacaggctggctctgcagaggttacgtgaagctgctgagaaggctaaaattgaactctcatcgactgcccagaccgagattaaccttccattcatcacagctgatgcttctggagctaaacatttgaacattacacttacaagatcaaagtttgaatctttggtgaatagcctcatcgagaggaccagagagccatgcaagaattgcttgaaggatgctggtataactaccaaggaggttgatgaggtccttcttgttggtggaatgacaagagttccaaaagtgcaggaaattgtttcagagatttttggcaagtccccaagcaaaggggtcaacccagatgaagctgtagccatgggtgcagccatacagggtggtattctccgtggagatgtaaaggagctgcttctccttgatgtgacccccctttcacttggtatcgagactcttggtggtatcttcaccagactgattaaccggaacactacaatccccacgaagaaaagtcaggtgttctccactgctgctgacaaccagacacaagtgggcattcgtgtcttgcaaggtgagcgtgagatggcgacagacaacaagcttcttggtgagtttgatcttgttggcattccaccagcgccaagaggtatgccacagatcgaggtcacatttgacatcgatgccaatggaattgtgacggtctctgcaaaagacaagtctaccgggaaggagcagcaaatcaccatccgatcctccggtggcctctcagaagctgagattcagaagatggtccaggaggctgagcttcactctcagaaggatcaggagcggaaagccctcattgacatcagaaacaacgctgacactaccatttacagcgttgagaaaagtctgggagagtacagggacaagattcctgcagaggttgccactgagattgagacagcaatcgccgatctccgctctgtgatgacctcagatgacatcgagaagatcaaggccaatatcgaagcggccaacaaggctgtttcaaagattgggcagcatatgtctggtggtggtggtggcgcaggcggttcagagacaggaggatctcagggcggaggcgagcaggctccagaggctgagtacgaggaggtcaagaagtgaaaccgcatgtgctaacagttgccctgcttttagagatagcagctagtagttttttggaagagaccgggatactaggaccttgcgcgttgtaataagttttgtcatacgaaaacacacctaagctcgtaggcctgtctagttgggttgtaatgcatgacttggttgcattggctccttttgcttgcgatacatcgcgcaaactggacgtgatattgtgatattttttttc

SEQ ID NO: 2958 - DNA, 1995 bp, Oryza sativa
  ref <308>: DATABASE ACCESSION NUMBER: AK060741
  ref <309>: DATABASE ENTRY DATE: 2001-12-06
agatcgcaggaaatcgtatctgcctgcttttcgagagcttaacaagggagggagagctccttaattgccacgtcccggccttgctcttgatgcaagctaagcttccacttccaacggggacatctcttctcttgcaccttcctctgctcctgcttctgcttccatggatcggaccagccagtgggtctcgtcgccagacatacccgccgatcttctcatccggatcgccgacgacgtcttccctctccttaagggggtgatggtgcccaagtgcggctacatccgcaaggccgtcgcggcggcgcgcggtggcgccacggccaccgtcgacctcgacctctccgcgctgcccggcggcgccgacgccttcgacaaggctgcgcgctactgctacggcgccaacttcgagatatccgtgcgcaacgcggccgcgctcctctgcgccgccgccttcctcgacatgcacccaacggacggcggcctggcgcgccgcgtcgaggagttcctggccaaggtcggcctccgcacgctgcccggcgccgtcgccgtgctgcgctactgcgaggggctcctcccggccgccgaggagatcggcgtcgtgcagcgatcagctgacgctatcgcgctcaggatctgtaacgaggtgctgttcccgacgaggtcgccgcccgagtggtggacggcggagctcgcggccctctcgccggcgtcgttccacaaggtcatcacggcgctgcgctgccgccgcgcggagcccgaggtgcttgtcgctgcagccaccgcatacgctgagctcttgctggccgaagtgctcgccgccgacggccatgctgctgatcactccgggatgcaccgcgcgcttgtcgagtccgtggttgccgtgctcccttccacggacgacgcgcccctccccgccgcgttcctctgccgcctcctccatgtcgccatcaccatctgcgcatccgccaagacgtgccgtgacctggagctccgcgtggcggcggtgctcgaccaggccaccgcgggcgacctgctgaccgtcgcgctcgacagcgccggtgagcgcgtccagaacgtcgacaccgtgcgccgcatcatcaccgccttcgtggagcgcgactcggcggcgtcatcgggcggcgcgaacggccggagccggagggcgtccctgagcggagccggggcgctgcagggcggcggtggcgcgatgcagacggtggcgaagaccgtggacgaggtcgcggcggagatcgcgacggaggagtcgctgccgatctccaagttcgtggggctcgccggcgcggtgccgaaggaggcgcgcgcgacgcacgactgcctgtaccgcgccgtcgacatctacctgaaggcgcacccggcgctggaggagatggagagggagaaggtgtgcagcgtgatggacccgctgaagctgtcgtaccagggtcgcctccacgcgtcacagaacaatcggctcccgctgcaggccgtgctgagcgcgctctactacgaccggctcaagctccgcagcggagacgagggcggcggcgggtggggcgcgtatgggaatggcgtgatgaggtcgtcggcggcggggtcggcgaggaagcaggcgaaggagggggcgtcgctggcgagggagaacgaggcgctgcggtcggagctggcgcggatgcgggcgtacgtgtcggggatgcagcagcagagcaaggggtcgtcgtcgtcgagggggaagaagggctcgtggttgcggacgttgagccggctgaacccgttcaaggccggcatctggggcaaggacacgtcgggcatcgtcgacgggaagacggacgccatgaattccgtcaagtccaagaggaggaggttctccattagctaggctagcttagtgttgagatgatccatgtcatctcgtgctagctacatatatgcgttgtcaatgactgtatattgattgattggttattcgcaagaaacatgactgttcttgtgtagtct

SEQ ID NO: 2959 - DNA, 1694 bp, Oryza sativa
  ref <308>: DATABASE ACCESSION NUMBER: AK104331
  ref <309>: DATABASE ENTRY DATE: 2002-08-28
ctctctctcttcttctcttctcttctcctctcttccccgtcgccgcgcacctcccgatccctccctccgctcgctcgcccatcgcgccaggtgggctctttggacacccggtgatggatcacgcggagctgaccaccgagcaggttctcaagagggatattccatgggaatcatacatggcaaataagttgatttccgggacatgccttcagcttttgcgacgttatggccacaaaccagaaagccaacgaggtcctttgcttgatgaggatgggccatcctatgttcgagtgttcctgaatatcttgcggaacatctccaaggaagatactgttgaatatgtgcttgccctgattgatgagatgcttgcagtaaatcctaaacgagcagcactgttctatgataactctctctctggtgaagacatctacgaccctttcctaagattgctcttgaaaggtaactggtttgtgcaagaaaaaagttgtaagatattgacccaaataataagtgcacgacccaagatgcagaatggcatagttccaaatggagaggcttcaaattcaaagagcaagctaacatctactcaagatgtgttaagaggtttggttgattggctctgttctcagctgaggaatcctacccacccaaactgttctgttcctactgctatgcattgtcttgccactttgctaagagagcagtatgttagagctttatttgttcaggcggatggtgtaaaactgctcattcctttaatttctccagcttccacacaacagtcgatccagcttctctacgaaacttgcctctgcatctggcttttatccttttatgatgcagccgttgattatttgtccactacaagggttatgccaagacttgtagaggttgtgaaaggttcaacaaaagagaaggttgtcagggtcgttatcatgtctatccgtaacttgcttgcaaagggtgcgtttgctgcccaaatgattgatcttggactgccacacatagtacagaatttgaaagctcaagcatggactgatgaggatttattagatgcgctgaatcagctagaaataggactcaaagacaaccttaagaagttgagttcatttgagaagtacaagcaacaagttcttcttggccatcttgactggtctccaatgcacaaagacccaagtttctggcgcgagaacattaataattttgaagaaaatgatttccagattctacgtgtgcttatgacaatcatcgacacatcggccgacacgactgctcttgctgtcgcctgctatgacctctcacagttccttcagtaccacccttctgggcgcattgtggtggcagatctgaaggcgaaggaccgagtgatgaagctcatgaaccacgagaacgccgaagtgaggaagaatgccctgctctgcgtgcagaggcttttccttggtgcgaagtacgcgagcttcctgcagacctaagacccagacaagaaactcttgaagttttgtatttatgctttagagccagagaaacaccaggccatttgtcataaatggtgaaaaccatgattgagaaagacagacctcgaaaattcttgtccagtatatcctgtcgttatttcatttactaaaccgatgtataataaataatcagctattccttgctcgatgtaataaagtgtcacagagcttgtttcttcc

SEQ ID NO: 2960 - DNA, 1591 bp, Oryza sativa
  ref <308>: DATABASE ACCESSION NUMBER: AK060742
  ref <309>: DATABASE ENTRY DATE: 2001-12-06
actctctgtaaaaacaagcaaacaaagaaagaaaagcatcacaaatctcacgcactgtctctcgttcgcgcaaagcacgctgcttttctccgctttgcgagcaccatagcctagcccaccatgtgcggcggcgccatcctctccgacctcatcccgccgccgcggcgggtcaccgccggcgacctctggctggagaagaccaagaagcagcagcagcagaagaagaagaacaagggcgcgaggaggctgccactgcgccaagaggaggaggatgatttcgaggccgacttcgaggagttcgaggtggattccggcgagtgggaggtggagtccgacgccgacgaggccaagccgctcgccgcgccccggagcggcttcgctaaaggtggattgaaaaacactactgttgctggtgctgatgggcctgcagcaaggtctgctaaaaggaagagaaagaaccaattcaggggtatccgccagcggccatggggcaaatgggctgcggaaatcagagatcctcgcaaaggtgtccgcgtctggcttggcaccttcaactctcctgaggaagctgccagagcttatgatgctgaagcacgaaggattcgaggcaagaaggccaaggtcaatttcccagatggggctccagtggcttctcagaggagtcatgctgagccctcctccatgaacatgcctgctttcagcatcgaagagaagccggccgtcatgtcagcaggcaacaaaaccatgtacaacacaaatgcttatgcctaccctgctgttgagtacaccttacaggagccatttgtgcagattcagaatgtctcatttgttcctgcaatgaacgcgattgaggatactttcgtgaacctgtcctctgatcaagggagcaactcctttggttgctcggactttagccaggagaatgatatcaagacccctgacataacttccatgcttgcaccgaccatgacaggtgttgatgactccgcattcctccagaacaatgccagtgatgcaatggtacctcctgtgatggggaatgctagcattgatcttgctgacctggagccgtacatgaaatttctgatcgatggtggttcggatgagtcgattgacacccttctgagctctgatggatctcaggatgtggccagtagcatggacctttggagcttcgatgacatgcccgtgtcggccgagttctactgaggggtttggggtgtagcaactggtgcctgtatatataaggacaaatggaataaacattctggacatccaagaagcggcatgtgtctgtcgggcgcttctagttgcgctatatagctatgttagtatgttagtatgtgctgtgtctagcttagatgctgaagtctcaagtactatttggcagtgaaactatctatctgtaactgctatatgaggctggaacaagttacttagcttctaccttatctgtacttgctatagtggctgtgaaccttgtggatctgaactctgaagccaatgtttactatataatgtggttggttttataaactctagttgatttggacccctgtcaatggtcatgctatggctggggataagaacc

SEQ ID NO: 2961 - DNA, 1838 bp, Oryza sativa
  ref <308>: DATABASE ACCESSION NUMBER: AK060743
  ref <309>: DATABASE ENTRY DATE: 2001-12-06
ctgtggtgactaatgctgatggcaggttaggagcgccgtagcttttggtgaaattgcataattttaactgaactgatgatgatgccatatgtactgacagagctatagaggctggattaatgaaaatccattatctaaaaaaacatgtactgacagagcgaatttatgcttatggcatgcttgaatttcaaattatcgatgttatgttaaaattaaggtgcttgatgtccgtagtatttatgctccgacagataacattaagtgaaagttgtgcgtatcaagggtttcaatgtgtcatattaaaatcatatagtggaaggattagtacaagaaaattcgtttgctatttgttaagtacaactgttaataagatgatccattgtactttacccttgaatttgaccaatactgttattgccaaattgtggagttgagtaacagacttattcttctttctttagcaactgaatttgatgtgattgagttcattgggtcaagtgggtgatcaatggtcgatgtactgacataaaatgcatcaagccatcatcaacataaatgactgggagcttctgactgaaatttcaaatgctgattaggacttgagaattttagacttgttggacataattgaacttttacatgattgcctgttatatattgacctagttgatatgttttttcatcgggtgacccatttgttatgttacagtagttaataactaatgcaaacaaaaagttatttcaaagcatgattgcatctatttaaactgacttcaatataggtttatgcaacaaactgtttgctaaaatccttttcttctgtccatattagaacattttttgagggcggccatcatgttgtcactgagaaggacctagaacacctcgtacaacttcttgataacaaggagagtggggatacaacatggcagcatttgatggaacgtaccacttccaacatgacttacaaggcctggcgccgtgagcctgaggtgggacctatcatgtactgtagtcgcactatttttgaggatgctactcctgagcttgttagagatttcttctgggatgatgaatttcgtctgaagtgggatcccatgcttgcatatttcaaaattttggaggagttcccccaaaatggaactatgattattcactggataaaaaagttccctttcttttgcagtgaccgtgaatacatttttgggcggcggatatgggaatctgggaaaacttactattgtgttacaaagggagttccttatccagctttgcctaagaaggaaaaaccaaggcgtgtggaactgtatttctcaagttggcgtattagagcagttcaatcaccgaaacaagatggacagcaatccgcatgtgaggtaacgctggtccactacgaggacatgggcatccctaaagatgtcgccaaggtgggtgtccggcatggcatgtggggtgctgtaaagaagtgatgactgagtactgatgatgagtgatcagcaccctacctgtcagcttctgcaagatggcgttgagctctcttgcgcttcagactgtgcatgttgcaagtagagaagaggtaaagcgaaaaaaaaaaggacatagatgcggtgctactacaggaggcagataattagcacgcttaattttggatctcgtatttatgcagtatcgctgtcgcacatgtgtatcgtcaccataacgtaacaacagatcgtcgtctctggctaatgtacctgaattgaagatatgtctaatgggggattaattattaaaaggttttgctaatgtgcctgaactgttgcagttgataataaaattctccgccgtaattctcgact

SEQ ID NO: 2962 - DNA, 2233 bp, Oryza sativa
  ref <308>: DATABASE ACCESSION NUMBER: AK060744
  ref <309>: DATABASE ENTRY DATE: 2001-12-06
actctctgctcctgtcttgcacagccgcgagcccctgaaaccgggaggatagagcagtgctcatcgatggatgaacggttaagatggaatcaaccgggggccatcgcaggttgatccggatccctccgcggctccgccgaatatccgccgcgctgctgcctgctgcctgctgttgctgctatccatcctctcctctccacctcgcttccgctcgttcgttcctcttccccctcacccacctggtcgccaccccccaaccccaccggcgtccgagcccgctccgctccggcctcctcctgcgaggccatcgatatagctaaccgtagtggaagataaaggacatgaaaatggcacatatggtaactaactgtagtttcagcccttcgcctgcagttaagacgtactcgaaatctcctggttattgctgcaatgtgacccaattccagagctcaaaatgttccaatctagtgctcaaatcatgtactgcgacaagaccgaacaggccatttgtcgctcgtgctagcgctgctgtacaaggacagacacaaacaccccttactggaagtcagcaagcatctgggcactcatcctctaaacccaaaaaggtcatggttatcggcggagatggctactgcggctgggcaaccgcacatcatctctccaataaaggatacgaggttgccattgttgacaatcttgtgcggcgcctttttgatcaccaacttggcctggattccctcacacccatagcctccatccagaatcgcatccgtcggtggaaggctctaaccggaaagacgattcagctctatgttggtgatatatgtgactttgatttcctttcagaagccttcaagtctttcgagccggattctgctgtccactttggtgagcagagatcagcgccatattctatgattgatcgttcccgtgcggtattcactcagcataacaatgttatcggaactcttaatgtattatttgccattaaggagttcagtgaagaatgccatctggtcaaactaggaaccatgggtgagtatggaactccaaatattgacattgaagaagggttcatcactattacccacaatggaagaactgataccttgccttacccaaagcaagcgagctccttctaccatctaagcaaagtgcatgactcgcacaatatagcatttacatgcaaggcttggggtataagggccacggatcttaaccaaggtgttgtatatggagtgagaacagatgaaactgcaatgcatgaagaactatccaacaggtttgattatgatggcgtctttgggacagcactgaataggttctgtgttcaggctgctgtaggtcatccacttacagtttatggaaaaggtggtcagacccgtggatatctggacatcagggatacagtgcaatgcgtagagctcgcaatcgccaacccagccaaaccaggtgagttcagggtcttcaaccagttcaccgagcagttctcggtcaacgagctggcaaagctggttacggccgccggtgcaaagcttgggctggaggtgcagaccaagtcggtgcccaacccgcgggtggaagcggaggaacactactacaacgccaagcacaccaagctcatggagctcggcctggagccccacctgctgtcggactcgctcctcgactcgctgctcaacttcgccgtccagtacaaggacagggtcgacacggcgcagatcatgcccagcgtgtcgtggaagaagatgggggcgaagccgaagacggtgtccgtctaagaggaggctggttttgccatggcggggtataatgtcaaccgtgacattgacattataaatttggtgtgtagtaatgcaataattatgtgcgtttagtataatgcacgttgtagtgggtgtggttacggtgttagatttcttttttgttcttcctcacgaatagatgctgcaatctgatcgaaggggattccttctgtatttctgttgtaaacttttatccagctcttgatcagcaaatgggtatccaggatgcaggggggtatttgagccttttttttttttttttgagtgtttccgaactgaagatggtgtaataataccatacataccactaatttcttttattgttaattgaacttataaaatagtaatatcgcgaaaacattttccaactgacagttctaccataggaataaagcggtggtagaaattcacatctgattggatactgt

SEQ ID NO: 2963 - DNA, 2122 bp, Oryza sativa
  ref <308>: DATABASE ACCESSION NUMBER: AK060745
  ref <309>: DATABASE ENTRY DATE: 2001-12-06
tatttggaagttcctgctggggaaaagcttgctcaatctcttcagttaaaggggattccatatgtattatattggagaaattcattttcatcgtatgcagcatctcattttcgccaagccttgatatcagttgttcagagctcctgcagccatacatgggatgcatttcagcttgcacaagcttcttttcgactgtactgtgcaagaaataatgatgcgcaaagtgttaagcttgggcctcgtttactaggggatgctccaaagataaatatcttccttcctgagaatgaaatggttgaggaagaaggtagctctgaacattttccagccataaagatatatgatgaagatgtgaacatgaagcttcttatttgtggagcaccatgcatcttggatgctagtttgttgggctcactggaggatggtttgaatgctctgctcaatattgaaattcgagggtgtagactccagaacagagtcagtgctgctcctccacctcttcatgctgaaactcttccacatggggtggttacaatgcgttgtgatatcacaacatgcagctcttcacacgtgtcattgcttgtttctggcagtccgcaaacatgttttgatgacaagcttttggagaaccatattaaaaaggaaattgttgagaagggccagttagttcgtgctgtcttagttagggaggacgacaaaccatcttcagttgagcctttgacttcgatatctgtggcttctggagcttctacttttgaagtctggatgaccctacctaagtgggcaggacaggttttgaaatatcttgctccggaaatctcttacaaaagcctggttccacttggaattgcttgcgtaaatggaactccagtttcttcgtttgatagacaagatgtggatcggcttcttttcttttgcaaaaatgaagctattgtaaatggtctatattctcatctgccaagatggtcagcatcccttgttaaggacagactgaagggaactccagagtcaaaatcaagtacttttagtgcaaatggagttggagagtaccagaaacatccaatgaaagggacttccctagtagtcaaaccaaagctgaaatctgcaaaaatgaggcctattccacactcttcgaagcggcagatgcacccttttgtgggtatccctccgtcctttattcatgatgctagtcaagttaagcctagcttgccagcacctccggtaaggcataatgcattacctgttgctccaacaactcaaagaaaattatcatctgggacatcacgtgttgaaccagctgttccgttaaatcctctgccaatgaagaaacatgggtgtgatcggttgcctattggaatttgctctgaagaagacttcttaaaagatgtcatgcaatttctacttcagaggaggcacacccgacttgttcctcaaggaggactagccgaatttcctgatgcagtactaaatgcaaaacgccttgatttatataacttgtataaagaggtggtatccagaggcggattttatgtaggcaatggcataaattggaaaggtcaagtcttttcaaagatgagcaaccatactgttacaaacaaaatgacgggtgttggaaacacgttaaagagacattacgagacatacttgttggaatacgaactttcacatgatgatgtcggtggggaatgctgcttactctgccacagtagtgctccaggtgattgggttaactgtgggttgtgcggtgaatgggcgcactttgggtgtgatagacggcaagggctaggcacattcaaggattatgcgaagacagatgggttggaatatatctgcccccactgcagcctcgcgaactataagaagaagccaccgcctcccgagagtgctaatggcttcagaatagcatctgcacaacggaatatttaatttttgttactcttttttagcctactgtcccacttttgggtaagacagggctggtagatagcatgttttaaacaatgtagtgtttagctgtattatgtcattaacatcatttatttagtgaaaggttttatattgattgtaatcagtgaagtgacaactcagaaaggctctaattaattgctgggttcaatcgtgt

SEQ ID NO: 2964 - DNA, 1711 bp, Oryza sativa
  ref <308>: DATABASE ACCESSION NUMBER: AK060746
  ref <309>: DATABASE ENTRY DATE: 2001-12-06
gaagaggagaggagggattgattttctttctcctcctcttcttgttcttcttcttgttgttccactcttattgttcatcatcctcctcctcatagctgaccaaatctctgctgtgacagcaatctctgctgcttggttctgcctcccatgaggagcacaccatcagtgtggttacaaagcaaggaaccctcctaccgcgtcgctgagctgatgaaggagctctgacgactcggatgcattcttctgccatcaatcaattgatcaacaaggcaactcgatcggaatttgagtttggtgaactctgtaattgattccctgcaagtatccatgcctttgcagcaatcttgctaattgagttgtcaaagctgcatacatggctacttactactcgagccctggcaatgaaagggactcgcaagctatgtacccagcggattcaggcaattcatcatatcctgtgccatcagcaataggaaacatgttatatcctggcaatgggtcttctgggccatacacggaattcagtggcattatccagcatcagcagaatttcatggagctgcctggccatccaactgcgatctctcaagattcatcgtcacgggaacctaacatggtcgcgtcgtacatggatcagcgctcttttggacctgccaaagatatgagaaatgagatgttgatgcatctgatggatggagcacataatgctggtgctgatctcatccacaatgacactcatagcagcgcgcagattgagtttggcctattgaacaaccacaattcgatgagcgttgcaccagcaccaggccaaggattgtctctgagcctcaacacgcatatcctggcgccttcgtatccatactggtctgcgaaaacagagttgctaacaccacactcttaccatggtgatgacaacagaatgaagaatatgcaatctgaggcctcacaggcaatcagaaactcaaagtatctgaaagctctatgagccagacttatcaaccaagccaattaggtgaatccaaagccaacatcgggatgatgagccttggtggggcaccagccggcttccacaacgaaggcaaccaggatgacagcttcatgaacctaatgctgaaggaccaaaggccgggcgaagccgaaggcagcctcctccatgatgccgtcgcccatcattccgatgagaacgctcggttcatggcttaccatttgtcggggctcggaagatacgggaacagcaatgtgtcattgacacttggcttacagcatcctgacaacaggctttcggtacagaacactcatcagccaggtttcgccggtgctggagaagaaatttacaactccaccgcttctctcggtgtcgctgcagcttcctcttcggactacgaatccacgaaccaaatagatcaaaggcaacggttcgaaccatcgcctctaatgcatgattttgtggcctaagatgctcaaaataccaaaatatatggaggcaagatttgcctggggggagcatttgtaatttgtagtgccagaataacatgcctcagaaagcatggaaattgttagctgtagttgcatttggtacagaagaggggggtatagcatgaaatgtaatataattaagtttagcaggtgggggtttatagggggtaaagaatcctgtaaaaatggaatacatcatacatgtaaaagattatgattttcagaaccattctgt

SEQ ID NO: 2965 - DNA, 1595 bp, Oryza sativa
  ref <308>: DATABASE ACCESSION NUMBER: AK060747
  ref <309>: DATABASE ENTRY DATE: 2001-12-06
aaacaatttgatgatatcggagagcatggaacaaaaataattgtattcaacctctggttcaatgatgatggggatatggagcttgatttcaactccgataagaaggatatcctcattactggggcacacaggaaggtgaataccaacaaggcagataaggtcgcaacacagaactacgtttcaactcgactccgttattctcttagagcatacacatctgtcttgtaccttcacattcctgataatttcagaatagtcttgcgtggacatgatgtggaatcacataatgtaataaatgatttgatgtatcctgaatgcgtgttgtataaaccacaaattgctgggcttgcagagctatctgcaataaccaccattggatttgtcaaaggcgccccagaaattgatgtacaaggctttaatgtgtaccacaagaatcgtttaatagcgccattttggaaagttgcgaacaactcatatggcaaagggcgaggagttgtgggcattctggaggcaaacttcatcaaacctacccatgacaagcaagattttgaaaagtcggtcctttatcaaaggctggagagccgcttgaaagaaatgacatatgaatactgggacctgcattgccatcgtattggttatgacaacaaaaaattacctaaatcttcccgtgcacttaatcgtgctaatcagatgaatgctggcagttccccgccaattgttccacgtcagctattggctgctgatattccgacaagcagctgtgctgtccctacatttatggcccctgcattaaggcaaaaacagatgggattgaagagaaatattgatgcccttggatccaaggcagacagtgctgaccaagatggatctcacttggacgtttctcaacggagacggtttaacgaatacaggactttgacactagagaatgataaatgcttgcaatacgaggagtcagcaaaacaacttgctctgaaggaacaaaagctccgatctcaaattgctttggaaagaaagaaatatgaggaattattacaagagctcaggtcgttggatgtgaagacagagaaatagcaaactgtttctgcttttgtccgccatgatgcttctcagcttgcttcttgcctgactgttcatgtgaggattacaattaacttgctgttggagttctgcagtcgtgattatggaagaattggaccttggacaactgaggtcgtcagcttaactttcatttggtagagatgtacaattttggtttggagttgagcgtgtacaactgttgtaacattatctgtatgtacagcagtgatatcatgacattgacctgctgattcacatttttttacagttaatacacatctgttacttatgtccagtgtaaaacgaatgttagattttgatctgctagttgcatcttagtgtttcgagcaaactattacatttatattgttatgcagtagatcagttgcccgacctttgtagtgccaaagtttgtggagtggcacgtcattattctttccataaatcagagggtatcaatgtagatgcactgcattgtaatttcagatatagccgaaagtatccatcctttttat

SEQ ID NO: 2966 - DNA, 1682 bp, Oryza sativa
  ref <308>: DATABASE ACCESSION NUMBER: AK104332
  ref <309>: DATABASE ENTRY DATE: 2002-08-28
gagcagcagcggccggccatcatcagtgatcctctacaatcatcgactttcagcaaattaagatggctgctgccttctcctccaccgttggagctccggcgtccactccgaccaacttcctggggaagaagctgaagaagcaggtgacatcggcggtgaactaccatggcaagagctccaacatcaacaggttcaaggtgatggccaaggagctggacgagggcaagcagaccgaccaggacaggtggaagggtctcgcctacgacatctccgatgaccagcaggacatcaccagggggaagggtttcgtcgactcccttttccaggctcctacgagtacctcagccagggtctcagaacgtacgacttcgacaacaccatgggaggcttctacatcgcccctgctttcatggacaagctcgtcgtccacatctccaagaacttcatgaccctccccaacatcaaggtcccactcatcctgggtatctggggaggcaagggtcagggaaaatccttccagtgtgagctcgtcttcgccaagatggggatcaaccccatcatgatgagcgccggagagctggagagcggcaacgccggagagccggcgaagctgatcaggcagcggtaccgtgaggcggcagacatcatcaagaaggggaagatgtgctgcctcttcatcaacgatctggacgcgggtgcaggtcgcatgggaggcaccacccagtacacggtgaacaaccagatggtgaacgccaccctgatgaacatcgccgacaacccaaccaacgtgcagctccccgggatgtacaacaaggaggacaacccccgtgtccccatcatcgtcaccggcaacgacttctccacgctgtacgcgccgctcatccgtgacgggcgtatggagaagttctactgggctcccacccgcgacgaccgtgtcggcgtctgcaagggtatcttccgcaccgacaacgtccccgacgaggacatcgtcaagatcgtcgacagcttcccaggccaatccatcgatttcttcggcgctcttcgtgcccgtgtttacgacgacgaggtgcgcaagtgggtgtcggacacgggtgtggagaacattggcaagaggctggtgaactcgagggagggcccaccggagttcgagcagcccaagatgacgatcgaaaagctcatggagtacggatacatgcttgtgaaggagcaggagaacgtcaagcgtgtgcagctggctgagcagtacttgagcgaggctgctcttggtgacgctaactccgacgccatgaagactggttccttctacggttctgcgccatccagctgaataaaagatctctagctattcgcatcccatcgatgcatcgtaggcggcctgcataggaggaggagggcaaggagcacagcaagcaggtaacctgcctgtgccggaaggttgcaccgaccctgttgccaagaacttcgacccaacggcgaggagcgacgacggcagctgcctttacaccttttaagcaggccggcttgacgcttgctattaattatttctcctttttatgttttctctttgttctgtgtatcagatcgcgcccaagccatagctgggcatgacaagtttttgttaataataatataatataaagatatgggctatactatacatgagtatatttcatttgggtatc

SEQ ID NO: 2967 - DNA, 2479 bp, Oryza sativa
  ref <308>: DATABASE ACCESSION NUMBER: AK060748
  ref <309>: DATABASE ENTRY DATE: 2001-12-06
tctcctttcctctcgcccaccggaatcctcctcctccgcccctaggcaaggcaaggctaggattgccgcccgccggaatatctcccccaccgccgccgccctcccgccggcccacgggattggattcgcctctttacaaggcctatcctgccctctctactaccacccttatcgatctctatctggtttcctttacctttcgatttgattcaaccacatcgaaatcgattctatctctacccgcgacgcgatgaccacctcctaccggatctaacctcgattggtggatgttaactgctagttccctgtgttgctagtatgttctcttcatccttcactcattacatgtcatctaaaaggtgtatttcacttactcttttggatagcatggcttatatcggaactacctctatgctaacattgtctaggtctcattagctagattaacttaaccgttttcacttagtggtgttagtctgtaaagaaaatgaatacccagtcttagttgagtcttttgtaaaaaaaaaaaatggaaccaaagaatgcaattgcactggatgaacatgtgctggattctactatccgcaagaggaagcgtgtgggtgctactcaatgtgctgaggccaatgacgcccccaacctctctcagaatggtccaaaacagaatctcgctttatttcctgattcgactggacataagaagtccaagatgatgtgctctgccgatgacattctggagaggtacaataacttcaagataagcgggatgcctgttcgtgtgatgtctcaccaacatggtggatggagagacttcccagaggatgttgtcaattcggtacagcagagcttccagttgaagaggccaattactagtgcagtattccagaacaggcacatcctgttggacttcatgcagatggtttgtttagattctgtgatggccataagcaagccaattgcttggatcgatgatcatggtaaatgcttctctccggattcatgtgctggagtaataccatctgaacctctgcagcatggaaaaaatgagttcttgaaaagttttcatgatctaagcagtagttatgaagctcatgaacatgatgggatgtctgcagctgaaagctcaatgaaagtggtgaagtttctggggaaaataaaaagggccatttaagccatatgaatgaaactgctgatggggccatgcaagctcctcgtaataatcaaagtgtccagcgtgctgattcagctgttcggaatttgttgtttcaaggatcaggccatctatttactgaaaaagacatcatcggtatttatagaaccccaatgctagatcaacttgggaggtcccgttatagtcttttccagaaggaggtacaagtcacaaaaaatcaacggggaaatgcaaatgagcgttatgcatggcttgcttgcactaagggtactatggaggagatgatgatgaatggtgctttggaaatagcaaaacctctgcagggtccaatgtatggtgttggggctcatcttgctccagcaaactcctccaatatctgtgttggtttatctgatattgacgaaaatggaatcataaggatgatgttgtgccgtgttataatggggaatgttgaggtggttttccctggatcaaatcaatgccagccaaccagtgaaagttttgacagtggtgtggatgatctccaaaggccaaagcattacatcatatgggatgctaatgtgcataagcacatttatgctgaatatgctgttattatcaaagtaccttacatgaacaatggagatactgcatccaatatctctgagataagaaattctggtgcactagacaatccaaccaaggatgacagtctacagaccattgcgtcttcaggtgatgaacaacaagcatgtatgcttgggcgtgctccaagtccaaggtctcctagttcaccttggatgcccttttcaatgctttttgctgctatttccgctaaagtaccccgttcggacatggatctggtgcataaatattatgaagaattcaagaggagaaagataagcaggcctgacctagtgaagcagctgagacagattgttggtgacaagcttttggtttctacagtagtgagacttcagcagaagttgccacccatggcagcaactgaacaagcgccaagagcacctggaaggggaggaggtgctagtccgtaattaaaaatgacagtttgccgacataacaagctgtggaggagtcgggttgagcaaagagagctcaaggaaatgtgtgtaaaacgtttgtgccgtaatgcgcagactttagctcttgacaaacaaaactagtctaaacttccttgttgacaacatgttgtttggttgtataaccatgcatggtattctcgactaccggctgtagtgttgttctttttcgccgtcaaatgtagctgcggcttgaattcatcaatatctcctgtggatatttcgttcc

SEQ ID NO: 2968 - DNA, 1817 bp, Oryza sativa
  ref <308>: DATABASE ACCESSION NUMBER: AK060749
  ref <309>: DATABASE ENTRY DATE: 2001-12-06
agaagcactgatgattctaaaatatggcggtgtactcactcatgctgggagaaagcaggctgaagagttgggtaggtttttcagaaacaatatatatccaggtgaaggaactggtttgcttcgccttcatagcacgtacagacatgatttaaaaatatacagttcagatgaaggccgtgtgcagatgtcagcagcagcatttgccaaaggccttcttgatttggaagggcaactaacacctatactggtctctctagtaagtaaagactcatctatgctagatggattggaagatgctagcatcgagatggatgaagcaaaggctagattgcatgagatcatcattacaaatgctaaagcaaagaataccaatgaaccagtggagtttccatggatggttgatggtgcaggattgcctgcaaatgcttcgcagcttctccctaagatggccaagttgacgaaagaagtaactgcacaagtcaagctacttgctgaagatgaagatgagaagcttgcattaacaaactcgttttctagatatgaccaagcaaaggcttttggaaaaacaacaattgatgtagctcgtattgctgccgggttgccttgtggtagtgagagcttcctcttgatgtttgctcgatggaaaaaacttgagagggatttatataatgaaagaaaggaccgatttgacattacacaaatcccagatgtctatgactcctgcaaatatgacctcctgcataatgcacatcttaaccttgaaggtttggaagagcttttcaaagttgctcaacttcttgctgatggcgtaattccaaacgagtatgggatcaacccaaagcaaaaactaaaaattggctcaaagatagcacgtcggttacttggaaaaattttaattgatctacggaacactcgtgaagaagcaataagtgtttcagatccaaaatttacagaagatgaagctacattcttaccaacgaaagaatcagagtaccaacaaaacttcaaactagaaatgaggatggaagaagatctagttccacaagtgagaaatcattggatcaggaagatgaagatgatagagaaactaaataccgcttagatcctgagtatgctaatgtaaagacacctgacagacatgtccggacaaggctttatttcacatcagaatctcacatacactccttaatgaatgtccttcgctattgcaacttggatgaatgtctacaaggggaggatagccttgtctgccaaagcgctttagaccgactgcatagaaccagggagcttgactacatgagtaatattgtgcttagaatgtttgaaaatactgaggttcctttagaggatgagaaaaggttccggattgaaatgacatttagtcgtggtgctgatcttagtcctctagaggataaaaccagtgaaaatacttccttgctccaggagcacaccctgccgataatggggcctgagagactgcaggaagttggttcctgcctaacactggacaagtttgagaaaatggtgcgaccatttgcgatgcctcctgaagacttccctccagctgctgcgccacaagccttttctggctacttcaaaggctctggaatgcttgaaagactcgctagtctctggccttttcacaagggcgcgactaatgggaaataagtgaaaaagctacaaaatggtagaattgatccatgtgaatatttctcaacttttagcatctggtggcaacaccatttgcccaattttggtaactttgtcgaatgtttcagagactggatcctttataaatgctcttgcccaatgtcttc

SEQ ID NO: 2969 - DNA, 2522 bp, Oryza sativa
  ref <308>: DATABASE ACCESSION NUMBER: AK060750
  ref <309>: DATABASE ENTRY DATE: 2001-12-06
ctcgtccattcctttttccctccctccctcgcctgcctccacctccacctccacgggcgtcgcatcacaacgcaggcgcacccccagcaacctcctcctccaccaccgcagatcgcgctgcgaatccgcccgcgggcggcggcggcggcgaggacgcgagccccagaggagtacggaggagccttcgatctaataggggcacgcggaaaaaaaaataatgtggaggttcaatcccttcggggggaaagtacaaaatggattggaaggtcgcaccattgatgttggcaacattaagattacagtacgcaatgctattgcacaaggaagtttctcttgtgtatatctggcatccgacgcaatgcatccatcaaagcagtacgcaatgaagcacatcatctgcaacgactcagaattgcttgatcttgtaatggaggagatccaggtgatgaacctcctcaaagggcatcctaatgtggttacactagttgcccatgatgtttttgatatgggccgcacaaaggaggcactacttgttatggagttctgtgagaagtccttggttagcgcaatggagagcagaggtactggttattatgaggagaagaaggcacttttgattctcagagatgtatgcaatgcagtttttgctatgcatggtcagtcaccaccaattgcacatagggatctgaaagctgaaaatgttcttcttggattagacggtgcatggaaattgtgcgattttggaagcacatcaacaaaccataaatgctttgataggccagaagagatggggattgaggaagatatcatccggaagcatacaaccccagcatatagggcccctgagatgtgggatctttacagaagagaagttattagtgagaaagtcgatatctgggccttggggtgccttctatatagaatatgctacttcaagtctgcatttgatggagagtccaagttgcagatacttaatggcaattatcgtattccagagcaacccaagtatagtgccgctgtcacaaagttgatcaaagatatgctggaagcctctccaaatgacagacctgatgtcacgcaggcaagagctttgattgattggccattcatctccatgatactaggtctggtttcgtgtaaatgaactactacctctcgagttacagaaaaatctacccgatggagcttcgtcaggcatttccatgagtttgcaagatgaaggtgcttataaaagaacacatgtgatgcctagaaggaacccgcctcctcctccaatagaacaatccaatagttcgttatctcatggaagctcaaaggcaggagatgcacctctaggtgcattttgggcaacacagcatgcacagggttctcaagttgcagataataggaactctttgtttgatgaggaaccaataaaaccatcaccttcatcaaagcataaccaaagcagaggggatatcagcatcagtgcccctggagatagacatggtcgttctggccaggctgtccggggtacaccaagtaactctgtatcaaacaatgggcttgcaagtggtgctaacacaaatctgttcatggagtcacaaagttctttgaaaactaaagaatcacaaccaaaatcagagaaggatcccttcaacagctttgtcgctgattttgaagcaaacaatctccattctgggaccaatgttgctagtaaggaatctgagcttgaagcagaagtgtccaatctgaaggagcagttgaagaaaacatcatcagagaaggccgagatgacagccaagtttgaaaagttgtctgcaatatgccgctcccagcgccaggagattcaagagctcaagcgcactcttgccgagactacacctccatcaagcaaagtcagctcaagattaccagactccgggccacagcgtaaggagaagattgaaggaacggtgtgggagcttgagcaaggaatgctcgcaaactcattacctagctctgaagccaaaacatggcaggcattccctgaccccaaatctcaacctgctcaggtcagaccaaaggttgatcattctaccaatggagcgcaaaacctggcaaggaacgcaaactcaagacaatcaccagatggttggggtttcgggccagatagtttcaggacatcaccagggagtactgccgctcagatcaacaggcccactgctcaggggagttcctcccagagattcagctcaggagcagcgaagaaagtggagcaaccatcagggtgggccggattctaacttctcgtggccattcggcaattgtccattctcattccgaactactagctgccctatgctgcaattgcgagttgaagattgatgagtgtggctatggttcttgccctggcgtagggtgccatgattggttattttcaacattgttcatagttggtcaagccgacctagacattggtgttctgcggccgttttgccaataccttgtcaataaacacatcttcaaatctaattacaacgtctgtatgtactttacgtgtg

SEQ ID NO: 2970 - DNA, 1221 bp, Oryza sativa
  ref <308>: DATABASE ACCESSION NUMBER: AK060751
  ref <309>: DATABASE ENTRY DATE: 2001-12-06
catgttgatggaaatatgtgtgcatctgcaactggtgttgttagacttcagtcaagaagaaaagcagagatgtttctagtacgcactgatggattttcctgtacaagagaaaaagtaactgaatcatctctggcttttacgcatcctagcacccagcagcagatgcttatgtggaaatctcctccaaagactgtcctactattgaagaaattaggtgatgagctcatggaagaagctaaagaggttgcttcatttctgcatcatcaagaaaagatgaatgttctagtggagcctgatgttcatgatatatttgctaggattcctggttatggttttgtgcagaccttctatactcaggataccagcgaccttcatgagagagttgatttcgttgcttgcctgggtggagatggcgtcattctgcatgcgtcaaatttatttagaacttctgtaccacctgttgtctctttcaatcttggatctcttggatttctgacttcacacaatttcgaaggtttcagacaagacttgagggctgtcatccatgggaacaatacacttggagtttatataacccttagaatgcgtctacgatgtgagatctttcgcaatggaaaagcaatgcctggaaaagtatttgatgtgctaaatgaagttgttgttgatcggggttctaatccttacctgtccaaaattgaatgctatgagcataaccatttaatcacaaaggttcaaggtgatggggtgatagtagcaacaccgactggcagtacagcatactctactgcagcaggaggctcaatggtccatccaaatgtcccgtgtatgctgtttactccaatctgcccgcactcgctatcatttagacctgtcatccttcctgattctgctcgtcttgaattgaagattccagatgatgcaagaagtaacgcctgggtatcatttgatggcaaaaggaggcagcaattatcaaggggagactctgttcaaatatccatgagtcagcacccgctcccaacagttaataaatctgaccaaactggtgactggttccgcagcttgatcaggtgcctgaactggaacgagcgactggaccagaaggcattataggcattagaggctagttttcccttgtacatacatacatagccctacacatatagatacactttttaacaggtgcaatggctaatcaatatcgatagtatatagttccaatcc

SEQ ID NO: 2971 - DNA, 1800 bp, Oryza sativa
  ref <308>: DATABASE ACCESSION NUMBER: AK104333
  ref <309>: DATABASE ENTRY DATE: 2002-08-28
gctccttgtgcctgcgcccatcgactccatctggcgactcgcgagagcagagcaggggagggggaggggaagggcgccgtcgtcctgttgttcactcctgacctgcatcacatctggagatgtctttccgcagcatagttcgtgatttcagggacagtttcgggactctatccaagcggagtttcgaggtgaaaatttcaggcttttcgggccgtcacagagggaaatccattggaccatcaagcgagctggatgacacgcccgtggtagctcagcaaagcaagtgggctggtcttcctcctgaattacttcgcgacgtgatgaaaaggctggaggaagatgatagcaattggccctcccgcaaggatgttgttgcctgcgcttcagtttgtacgacttggagagacatgtgcaaagatattgtcaggaaccctgaattttgtggaaagcttacatttccagtgtctcttaagcagcctggacctcgagatggagtaatccaatgtttcataaaaagggacaaatcaaaactaacttatcatctctacctgtgccttagctctgctgtgcttgatgagactggaaagttcctactatcagctaaaaggagccggcgaacgacacacactgactacatcatttctatggactccaaaaatatctcccgatcaagtagtggctatattgggaagttaaggtcaaatttcctcggcaccaaattcatcatctatgacacgcagcctccatacaatgctcggacactttgctcacaagaacggacgagccgtcggttctcctctaggaaagtttccccaaaagttccaacgggttgttatcccatcgtgcaggtgaattatgagctaaatgtgcttggaacccggggaccaagacggatgcaatgcgctatgcattccatcccagcatcagcagtagagcctggtggcattgtgcctggccaacctaaagagctcctcccaaggttatttgaggagtccttccgcagtatggcaacttccttctccaagtactccatcacagatcattcgacagacttcagtagttctcgcttctctgagtttgggggaggggctctgcaagggcaagagcaagagcaagatggcgatgatgtgaacaaggagaggcctttggttctccggaacaaagcaccaaggtggcatgaacagctgcaatgctggtgcctcaacttccgtggccgtgtgacggtggcttcagtgaagaacttccagctgatagctgctgcacctcagccatcttctggagccgcctctgaaccttcacaggcagggcaggctgcacaacagcaaacccaaccttctcagccatcgagttcgtcgtcgtcgtcatcatccaaccatgatacggtgatcctgcaattcggcaaagttgcaaaggacatgttcaccatggattaccggtacccattgtcggccttccaggcttttgctatctgtttgaccagctttgacaccaagctggcatgtgaataaatgagtagaatagcgatcagaaagcactccagtgtacctgaggacctaagccactccaggcgtatggtattttaggataggagaattctgtgtctagtcacttgtgtgtattcatgtgcagttctttggttgaatccttgtgttcctccgccgtgcgtgtttgttagaagtgtaaaaaggggattgaagtgtagatgtctgtaagatagaacaagatcttgtttcttgtatgttgggcttaaaaagttttgagcaagagaatgaatgaatggttgagggagccgtcggtctg

SEQ ID NO: 2972 - DNA, 1014 bp, Oryza sativa
  ref <308>: DATABASE ACCESSION NUMBER: AK060752
  ref <309>: DATABASE ENTRY DATE: 2001-12-06
gctcctcctttctcgctctcgctctgtccgatcggagccatgagtaatacgctgcttcgtgtgcacccttccgagctcaagatcccctatgagtacaagaggaagaggtcttgctgcatgcagctgacgaacaagaccaaccagtacgtggcgttcaaggtgaaaacgacgaacccaaggaagtactctgtgcggcacgcctgcggtatactgccgccccggagctcgtgcgatatcacagttacaatgcaggctcccgttgaaatgctatccgattaccactgcaaggacaagttcctcgcgcagagcgtggcggttggatatggggcgaccatgagagactttgtccctgaattgtttactaaagcgccaggcagggtgatcgaggagttcaagctgcgggtggtgtatgttgctgctaatcctccctctccagtgcctgaggaggaagaggaagaggaagaggatgcatcccctcagtcagaggtcatgagccatggagtgaaaatgacatcagtgtttgatgctgtaactgtatccacactcaccgatgggtcagcagacaaagtttcatctgctgagggtgtctctgtagaatcaatgctggttgcagagagagaatatccagtagaagaaaatcagaagcttcagcaacagatggaactacttagggcagcaagatcatctcaacagggcttctcagcaatgtttgtgctgctagttttcatgtcatctgtctgcattgggcacttcatgaagcagatcaaggtttagtcatatgtttacgcaaaaaggatctctgtttatttccaccaagctaacgcaccatctccgctatctataatactgtcacaggcaatagagtagtagtgtacgcatagaaaatattcaataggttgtacattttcagatagaagacgagctatttgcattttattcatgtaaattgtatagcataattgaagtacttgtgatctgtaatgccgtgatagatagagaaaacaaagttttact

SEQ ID NO: 2973 - DNA, 2941 bp, Oryza sativa
  ref <308>: DATABASE ACCESSION NUMBER: AK060753
  ref <309>: DATABASE ENTRY DATE: 2001-12-06
cttcggtggccgaccaactattctcgctgctaaatgatccagctgcacaccggatgtttgctatgtggccatccatgggatcatcgccgtgtgctgctggtacgagtgaagatatgccgctcgatgcatattctggcctaggggaggcagtggaagaaccttctcaaataatgtcagtgaatccaactgaagcagagaaaacgggcaagagttcaggcgagcttggttcggacgatggtgcccatcaagggagtagcatggttccaaggtctgttgtgggcagttcacttgctgacaggatgctcatggctttgtccttgttcagggaatcattgggcagcggtgctcttgcccaagtctggatgcctgttgagcaggagggtcatgttgtgctgagtacatgtgagcaaccttttctactcgaccaggttcttgcagggtatcgagaagtatccaggcactttgtgttttcagcgaaggaggagcctggtctacagccagggcttccagggagggtcttcatctctggggtgccagaatggacctcaagtgtcctctactataataggccagagtatttgaggatggagcatgctctccatcacgagatacgtgggtcacttgcaatgccaatttatgaccccagcaaggattcttgctgtgcagtgtttgagcttgttacaagaaaggagaagcctgatttcagtgcagagatggacaacgtttgcaatgccttgcaggcagtgaacttgaaggctacaaaaggttctagcaatcagaagttttatacagagaaccagaaatttgccttcactgagattttagatgttctcagagctatttgccatgcacatatgcttccactggcccttacatgggttcctacatcaaatggtattgatggtggttatgttgttggaaaggatggtgccagtttttcacaatcagggaaaacaataatacgcatccatgaatctgcatgttatgttaacgatggaaagatgcaaggttttcttcaagcatgtgccagacgtcatcttgagaaagggcaaggcattgcaggacgagcactcaaatctaatttgccatttttctcgcctgatataagagagtacagtattgaggattaccctcttgcacaccatgcacgtaagtttagtctgcatgctgctgttgccattcgtctaaggagcacatacactggcaatgatgactacatactagaattctttctcccggtcagctgcaagggcagtggagaacaacagatgttgctgaataacctctccagtacaatgcaaagaatatgcaaaagtctgcgaacagtttatgaagcagaagttgataatgttaatgctggtactgcagctgtgttcaggaaaaacaatgagagttgcttgccaactggacacacagaaagttcttcacatggtgatcaatcaatcacaggagcttcattcgaggatacatctttagctaacaagccaggagtcatggaacctgagttggctgagcaggtacagcctagttccataggacatgcagagaaaaagcgcagtacagctgagaagaatattagcttggatgttcttcgtaagtacttctctgggagcctaaaggatgctgcaaagagccttggtgtttgtccaacaactttgaaacggatatgccggcatcatggaatttcacgatggccatctcgcaagataaacaaggttaatcgttcattaaagaagattcaaactgtcataaactctgttcatggtgtggacagatccttgcaatatgatcctgctactggatctcttgttccagtagtttctctgccagaaaagttgacattcccttcttgcgatggtttgccaactccatcagtcggaaaaactgtggaagagaattctgacctaaaatctgaagaagggtgttctttgcctgatggatcgcaaagacaaagttgccagttgcagatctctgatgtgaagaaaagtaacgaggatgaatttcacattggcagtggtaacagtgatttttatggtgcaaatgccacagcaaaatctaattctgaggtcacacaaggtccattatgtcccactggtgcttttagtgctttgcatctcaagggaacagattgcaccaatccttctagctctctccgcccaagttccgaaagcaccagaaatcaaatagttggaagaaactcaccatctatacaacaagaagatcttgatatgcttgacaatcatgaagccgaggacaaggaccacatgcacccttctacctctggtatgactgactcttctagcggcagcgcatcaagccaccctaccttcaaacagaacacaagaagtgctcttaaagatgcagccagtcctgcactgacagttaaggcaacctacaacggagacactgtgcggttcaagttcttgccatctatgggttggtatcacctattggaagaaatagcaaagagatttaagctgccaaccggagcataccagctcaagtacaaggacgacgaggatgaatgggtcatcttggcaaacgattcagatctccaggagtgcgtcgatgttctcgactccatagggtcgcgaatcgtgaaactccaggtacgagatctcccttgcatcgtcagcagctcgggaagcagcacctgcttgcagttggcggcacatagctcataacatggtagggaatcctgggctcctgtcacccaaccctcaactgtaccatattacagtaggctagtctttgttgtagcaacagccaatagggtttgtattatgtatgcagtagggtatattatgcagtttagctagcatcaacggtggagtcatcatcccacacagatcagatcatattctcgcaagaaacaatgccattaaggtcttaagtttgttgaacacgagtacatgacaataacctgttgtcatgatggtgt

SEQ ID NO: 2974 - DNA, 2282 bp, Oryza sativa
  ref <308>: DATABASE ACCESSION NUMBER: AK060754
  ref <309>: DATABASE ENTRY DATE: 2001-12-06
caagttggccacagcgattggcatcgtgctgtcgatgctatcgctgctggtgcaccttttccttgcgaattattctgctgggggaatcacaagatatagtctgcatatggatgatgtccttccgtttggaccaaggcctcgaccccggagattgtggggttcgttgagtacacttgatcatttacacccttatgcgaaacctagaaaaatctaccctgctctggattatcataatggttttatttatgcaaagatctatggtggctttgagaagatacaatcttcaatctgtgatcttgtcgccgttgccaggctcttaaatgccaccctagttattcctgagattcaagcaacgacacgtgcaaaaggcatcagttcaaaattcaagagcttttcatatctatatgatgaagatcagttcatttccgcactttccagtgatgtagctattgtgcgtggtttgccaaaggatctcagggaggctagaaaaaagataaaatttcccacagtatcacctaaaaactcggctactccagaatattacgtgacagaagtcctgccaaaactttccaagtcaaaagttattgggataatcattaatggaggcaaatgtctccagtcaatccttccagcaaccttggaggaatttcagaggcttagatgcagggtagccttccatgctttgaagttccgtccagaaattcgtgctctcgggaaccaaatagttagcagattacgtgtatctggtcgtccttatctagcatatcacccaggactgctaagagatactctagcttttcatggttgtgctgaactgttccaggatattcatacagaacttattcaatatagaaggaatcagatgatcaaacgaggaactgtaaaggaacaattatcagttgattcagtgtccaggaagataaatggttcatgtccactcatgccagaagaggttgggcttctgcttcaggcattaggttatccatcaactacaataatatacttggctggttctgaaacttttggtggacagagaatacttattccactacgagctatgtatgccaacttagttgatcgcacttctgtatgtagtcagagggagttatctgatttagttggcccagaggctcctcttgcatcagatatggcacaccctccacctcccaaaactgagaaagaactcgttgacgaatggaagagagcagggcctcgcccaagaccgctgccaccacctcctgcaaggccatactatgctcatgaaaaagtaggctggtatggctggattggtgagaatgacacagaaccagatccttctcccgttgaatttagaaggcaagcgcatcggttgctctgggacgcacttgattattttgtttcggttgaagctgatgcattctttcctgggtttcataatgatgggagtggctggccagactactcaagtttgatcatggggcatcggctataccaaaccccatctggtataacctataggcctgacagaaagactatttctgcgcttttcgaaaatgttagtgaccatcggtatcacccgccacggaattggacattggctgcacgccaacatctcaataacagtgcaagtgtagaaggcattgtaaaatcagcgatgctgtcaaaacctgtatcttttcttgcccacccattaccagagtgttcttgtagaacgccaaagtcacctggtgttcagtcgacgaaagatagccatggtaggctcctatttggaggtgaagaagagtgtcctgattggatggttcgcagcttggccatggtgtctaccaagaataatgagcctcaaaatgaggattacgacggcgacttgcctgaagatgattctagccaagacacacagcaggaatctgatagaagtgacatgaataaatcctcagaacaggatgaggagatggatccagatgattgaacacatgcggagcttggtactatggcgcaccttttatccgctatatcagctccaggtaaccttgagtgatatcagcacacattgcaatttgcagggatctactggacaaatcggatcagtttgcagcaacacatcctgagctaggagagcccaagaatgatatatgatatgtacacctcggatgctttgcttggactactatcttgagttatacgacctcgacacagggactaacacttaggttctttttcctccttttacgccttctttttgacctgaagaaattgcttgtgtacaaatgtctattaacagggaatacattgatttttttggggtg

SEQ ID NO: 2975 - DNA, 1858 bp, Oryza sativa
  ref <308>: DATABASE ACCESSION NUMBER: AK060755
  ref <309>: DATABASE ENTRY DATE: 2001-12-06
acacaaccattccaattctattctaacccatttataagctccttcattggaggttagcccaagggtcagtgttgcttgagaggtactcaccctgtgcaggtgccagtggactcaggccatttagctagctagccaaagccaattgccatgtggagtgctctcttctcccatctgagagaggttcacaagagaagcggagttaaggaggagaagttgataatgaagtcgccaccagcagcaggtgaggccggctgccacaagccacaggcgactgccaccaacaagatgacggtgctgcagtccccgctggggctcaggaccatcctcacctccctcgtcgccttcttcatcgtcgtcagctccgtctccctcctcttcgaccgcggccaggatgctcaggcgcaactcgccgtcgagcagcatcagcaccaagaagttctgctcaagcaaaagccggcatcagcagcagtgggcgagcagaaatcagtggtagtagatcagtcgtcgttgaggagccaggaggcgcaggtgcagtggacatctgagctgcaggacgtggccacggacagcggcgacggcggcttcgacggcgaggaggactgcaactggtcgttgggacggtgggtgtacgacaacgcgtcgcggccactctactccggcttgaagtgctccttcatcttcgacgaggtggcctgcgacaagtatggaaggaatgacaccaagtaccagcactggagatggcagcctcacggttgcaaccttccaagattcaatgccacaaagtttcttgaaaagcttaggaacaagagactggtttttgtgggcgattcagtaaacagaaatcaatgggtgtcgatggtgtgcatggtggagcacttcatccctgatggccgcaagatgcgcgtttacaacggctcccttatctccttcaaagcatttgagtacaatgcgacgatagatttctactggtcaccactgctattggaatcaaacagcgacaaccccataattcacagagtggagtaccggatcataagggcagacaggattgagaaacacgccaatgtctggaaggacgctgatttcatcgtcttcaactcctacctttggtggaggaagcagagggatggtatgatgatgaaagtcatgtatggttcatttgaggacggggatgcaaagttagatgaggtgcaaatggttgatggttatgagatagctctcaagaaactaactgaatatcttggagccaatatcaacaagaacaagactagaatcttctttgcaggctcatcacctgcccattcctgggctagcaactggggaggagatgacaacaacaagtgtctaaacgaaacagaaccaattcagatagaagattataggagtgcaaccacagactacggcatgatggacaaggcgaaggagatatttggaacactggaaccaaagggcatacatgttcagatactgaacatcacccagctttctgagtaccgcaaggacgcccatccaacgatattcaggagacagtacgttcctctgacgaaagagcagattgcaaacccgagcatctacgcagactgcacgcattggtgcctccctggagttcctgatgtttggaacgagttcttgtatgcatacattatgcacaaatgatatatgtataataatgtaatcttaatttggccaaatttcttctttgttaacttgtgggtgtctaagtaggtataagtgcacagtacttggcccccatcaatttttttttcttttttgacatttacatcattacattacatgtaaagagaaagggaagaacataagcgcagaaatgaaaaggaagaagataagttaatttgcc

SEQ ID NO: 2976 - DNA, 3611 bp, Oryza sativa
  ref <308>: DATABASE ACCESSION NUMBER: AK060756
  ref <309>: DATABASE ENTRY DATE: 2001-12-06
ttgagcaattagtccgttgtcagggttgtaacttgtaagcaacatggagggggcggttgctagcaatgtggagcttgattctgcagtcttccaagtatcctcagcccagaacagatacgaggcaattgcttgcagtaaagggaatacagaattgattgcatctggtccttttgatcaattagtcctgcacttggaagatgctaggaagttccaatcgtgttcaacagctggcacttttaagctgtcgttgtctgggaatgcaaaaggatcttcctggttcacaaaatccaccatagcacggttcctgaataccataaattcaccagatgcctcaaaatctgcaaatggaattttacatgaaatctcacaactggaggaaactagaaagtttcatcaatctctctattctaaggaacaacgaaatcctatgggtggtgctttatccggaggtgtctttggtaccattggcgtagaacaacagggaaatgttggcccaaactcatctgaagcaacaaagaatgaattgcttcgagctctggatttgaggttgactgtactgaaagaggagatctttgcgttgttgaatagagcagtcgtttccaatatgtcaactagagatgtatctgatttatcctcatttgttcagcacttcggtgcatcagagttcagctggttgatgcggtgcctactgttgatcccagactgccaaccctctgaggtctcccaacagcagtctttccctgccgagaaagatgacaagggagaaaatgcacttcatactcgtaatatcagctctcataccattatccagaggcctattaccaacaatgtttccccagcaaagcttgctcaaattgagcgtgaaagctcaactgaaagtgatgattcttctgagtccagtgctgaagatgaggctgtcgttgaaagaagccggccactcatgaggtctgcttcacctaggagatctgcttctccaatgcgaagggttcaaattggtagatcaggatctcgtaggtcaacagcgattgccatcaagagtctcagctatttcccccctagtcaaagaattcctttggataaagatgatgaaagtggcagttgcaatggtgaaactgaccagccttcaaggaaatctgacaataatgtaagaaggatgagtgtgcaggatgcaataaatctcttcgaaagcaagcagaaggatcagaatccggattcgcaaaataagaaagctggcttgtttgctacaaagtcagtactaagaaggtggagtgcaggaatgggtgattccttgaacaataattcagaagaaaaaaccatagattccacatcccaaagtaaatccaacaatacaggatccgattcagagaaggatggagctgaaacacaggctgagccaggttcagcttcagcttctaacactgttgttacgccttctgttgaaggttttcacactaatatgcaaggtgttgcaatgccagaaacagagacagcggtttcatcccatactgaaatttctgctgagcagacaaagtcagggcaagaggaaaacagtgatcgggcaatggcctctgctgagtggaaccgccagaaggaagctgagcttaatcagatgttaatgaaaatgatgcaagtcatgcctggaaagttttcgagtgctaatgtcaccactactggcatcacttccacaaatgagaagaaaggtggactgcaaggtcagcataaagagaagcgagactcgaaagttcgaaccgataaaggtggaaggcggccagcaaaggaggcaagcactaggcccttgaaggaaacagttgggcagaagaaggcagcaattacccccaaaactggcactgcagctgagaaacgcaattctccagttccacaaagggcacggagaaattcatcacctccggtcctaccaaaagaattgaccccaaaagcgcctgccagaaagagctcacccaaaccatcacctgcacctgtgacccgcagttcatggtcaggtggatctttgactaaagcaactactgcacagaaaactaaaagctctcctgggacagtttcagcaccgacagcaactagtcggagaaggactccagtagcaccctcatcttctcaaccaacttcaaaggtggaaagaagtgctcaaccggtgaagaacaaaaaggaaacagttgctgcttcaaagccagcaattaagggaattgaagaaaagaagactaaaacagcaacaaagacaagcaggctagctaaaagtacacctatttcagatgaaaaatcaagtgcagcaactaggccaaacttgtataacaaggttgcaaagaagagcagtgttgtaccgctagaatcaaaaccatcaaagaaagctactgggattagtcaaagtgctggtactgatgctgtgaagagtaagatgccacaacttgatgactcttccaatgacattggaaatattacccaagctgaagataaggagcactctgctgtgacaacccagccaaaaactactaaggtattggaggctgatcttgctcaaccagcacatgatgttgatgaaaatttagaaatttcgctcgataatgacttaaatattgaaaaaacagaaaattcggccccaagtttagctacaacagaaatggactccagtgaacaggttgaacctcacactgaggttcaaccacctcctgaagaggacatgggcatctcatcagctgcctgggtagaggtagagcatgaagaagttactgatgtgggtgaaaatgtagtgcctgaggatgtcacctcaccatcaattgagcccttgccatcttcaagccctagaatccgtcactcattgtcacaaatgctgcaagcagatagcaatgagccggaaattattgagtggggaaatgctgaaaacccacctgcaatagtttttcataaagattctccaaagggattaaagaggcttctaaagtttgcgcgtaaaaataaaggagacagcaacagtaatggttgggcgagcccatctgttgtttctgaaggagaagatgaacttgaagaaccacgaggtggtaatgaaggtgtaaattcgagcaggagaacatttgatggccccaagactaacagcatcttatcagctcaatcaaccaccggcagcttcaactcaacgaattcagacaggttacgggataggcctggagctgccccatcaactaaatcgtcaaggtcgttcttctccctatcaaacttccggagcagcagatcaaacgagtcgaagctcagatggcatgccatgttctccaggagatacatggataattggatagtcgatcccttccagtttggaggtcaactgatgtaaaaaaaaagagatggtttgagattgattgattgttcggacggagccagcttgttgtgtttggttctgggttttctgcaatttgatatagtctctgcgtctaatgtcatactcaacctctcacctttcttgtacatcttttcactttttaacagttgctggaactgcaagcttatttggatccggtcgatgttagggaaactggtgctaatgtaaagtgcatagcgtgagcctgaggtgctcacagccgattgcgatgcccgaacttgatctg

SEQ ID NO: 2977 - DNA, 1948 bp, Oryza sativa
  ref <308>: DATABASE ACCESSION NUMBER: AK060757
  ref <309>: DATABASE ENTRY DATE: 2001-12-06
agccaccgcctcccccaccccaccccgatcccctccccgccgtacgggcgcagaaggaacccgtcttctagaaggaggaggagggctacctctctctctctctcttctgccatggggagcttcgcgaggaaggagcaccagttcctcgccgagcttggcctcgcgccgcggaaccccgggtccttcgcctgcggcgcctggggcggctcgggccccgtcgtcacgtccaccaacccgacgaacaaccaggtcatcgcggaggtcgtggaggcgtccgcgcgtgagtacgaggagggcatgcgcgcctgctacgatgccgccaagacctggatggcgattccagctccaaagcgaggagaaattgttaggcaaattggtgatgcattgagagcaaagctccatcacctgggcaggcttgtgtcacttgagatggggaaaattcttcctgaagggattggagaggttcaggaaatcattgacatgtgtgattatgctgtgggcctaagtcgccagctaaatgggtccatcataccatctgaacgcccgaatcatatgatgatggaggtgtggaatcctcttggagttgttggtgttatcacagcattcaattttccttgtgctgtgctgggttggaatgcctgcatagctttggtatgtggaaactgtgttgtctggaaaggtgctccaactactccgttgatcactattgcaatgactaaaatagttgccagtgtattggagaggaacaacttgccaggctcaatttttacagcattctgtggtggtgctgacattggccaagcaatttctcttgacacaaggatacccttggtttcattcacaggaagcacaaaggttggtctaatggttcagcagcaagtgaatgcaagatttggcaaatgccttcttgaacttagtgggaacaatgccattattgtaatggatgatgcagacattcagctagctgtccgttcagtgttgtttgctgctgttggaacagcaggacaacgctgcactacatgtcgtaggctgcttcttcacgaaagcatataccgaacatttcttgatcaacttgttgaggtttataaacaagtccgaattggggatcctttggagaatggtacgttactggggccattgcacactcctgcttcaagagacgccttcttgaaaggcatccaaaccatcagatctcaggggggaaaaattctttatggaggatctgcaattgaatctgagggaaactttgttcagccaacaattgtggaaatttcaccctctgcaccggttgtgagagaagaactctttggtcctgttctttatgtgatgaaagttcagaatctgaaggaagcagttgaaatcaacaattctgttcctcaaggattgagcagttctatatttacaaagagaccagatattattttcaagtggattgggcctcatggtagtgactgtggcattgttaatgtaaatattcccacaaatggtgctgaaattggtggagcttttggtggagaaaaagctactggtggtggacgagaagcagggagtgattcgtggaagcagtacatgaggagggccacttgtacgatcaactatggaagcgagctgcctctagcacaaggaataaattttggctagttcggtggtcaagatcggctgatgaacatgttaagcttcatcgacagacttcaggaatttctactggcgtcaactgaaaaccgaaacttcaacgcagcagcattgctatgtgtgcatataataagagatgagtccaatattaatgcatgtactgctcttgctatgattagccgtcggagttcgagtccaataaacagggaaaaattgcgtattccctgatcggttgatatgtaccaacatttctgatgtaatctttagaacggtatcggttgaaaacttgaaatgaacgaaaacgcggtaagaatac

SEQ ID NO: 2978 - DNA, 1654 bp, Oryza sativa
  ref <308>: DATABASE ACCESSION NUMBER: AK104334
  ref <309>: DATABASE ENTRY DATE: 2002-08-28
ggtggtagcggcacgcttctcgctacgctatagaaaccgcctctcgagtagtcgagtctcgaagcacaaattcccctcgagccgagacgcctccttgctcccctctaaaccctccccctcgcgcggattcgcttccccgtgtctcccagaggggagttggtggtgttcctggagcttcttgggggtggtttttccaagctgcggcgggctcgccggagttggatccggcggaagagaggatttctgggaagggtgccgcgaagctgctcgacggcaggctcgtggtggccttgaggaaatcgcttcaatttcgaacgggctgttcagttggctggacgattcatttcaagagcagaagtgtttacaccaagccgtagcagaagagggaatccttgatttgtcgtgggaataaagaggtgctcacctttgagttggacaatgcatcccagggctcgaatccacgcagacccggctccggagttcgaccaattcgactgcctgccggatccagttgtcctcctgattctgaacaagctggaggacgtgcgttcgcttggccgctgcgctgccgtgtcgaagcggttcagcggacttgttcctctggtttccgatgtgtatgtcaagattgaccgtgtcgtggccacagatggtgatgctgatgatgctctcaacctgtcttcggcgaagccaaagaacatcttctcccatttctttaagcttatgctattcacaatcgtcaagccattccacagtatgcgcaacctgaatggcacgggcaggccgttgttcccgcttgcgcagcattcaccggtacatgtgcttaggaatttctctgatgtctggaatctccgggtggagcttccctcgggagatgttgggaccgaggagggtgttctgcttaagtggagggctgagtatggtagcacacttcggaattgtgtgattctgggaggtaccctggtcgatcgcaagcctataggcgcagagcatgagtcgtcggtagaggataatggaagcatgccagaatctttctataccaatggcgggcttaaacttcgtgtcgtgtggactatcagctctttgattgctgcatcaacaagacactatcttctccggtcaattatcaaggaccatccgacgttgaggagcttggttttagcagatgccgatgggcaagggacattgtacatggggatggagcagcttagagagtttagagaaaacaaactgtcagcctcagcatgttccaatagaactcaggtcccagcctgcaacatgaagctgaaatatgccccataccttgagctacctggtggcatgacattgcaaggtgccaccctggttgtgatcaaaccctccaatgatggaggcagtggtggtcacagcagtcggaaggaaactgaagcttttgtttcaagtgcattcgatgaacctttcagatttgctgtgaaggcgctgatgaagagacgaacatatctactggagatgaacggtttctagatagtctacttgagttgcagtggattgtctttctatcaactgcttcaaatatatcatttttgttttttctctcaagcagagcaacttcaatcctgtttagaatgatgaaatgtccaccgcaatgcaaccccattttctgttgtttgctctttgt

SEQ ID NO: 2979 - DNA, 2513 bp, Oryza sativa
  ref <308>: DATABASE ACCESSION NUMBER: AK060758
  ref <309>: DATABASE ENTRY DATE: 2001-12-06
acaaagcacaaaggccagagcgaaggccactccaatggatcactccacctccctgctccggctcatcttcctcgccctcggcgcagccctcgtcgtccttgtcgttcgctccgcgttccgccttcccggcgacatcgacacgactacgacctctctgttcgatgatggcaacggcggcagctgcaccaggttctcgccgtgggcgtgccggcaagggcggggcgacccgaggtcgaagccgtccaagccgcggcgaccgtcgcacgagtccgacgtgccgcggcacccgctcgacccactcacggtgagggaggtgaaccgcgtccgcgagctcctccgcgcgcacccgctgttcgcgtcggcgccgtcgtccctgttcgtgcactcgctggagctcgacgagccggaaaagtccgtcgtcaagagctggcggaagggcgccgacccgctcccgcctcgccgcgccgtggccgtcgtccggttccgcggcgagtcccacgtcctcggcgtcgacctcagcgagggcgacggcgcggtgactcctctgcctgtccctgcctccggttacccgatgatgaacatggacgagcagaccagcctctgcttcgcgccgttcaaggacgaggcgttcaacgccagcctcctccgccgtggcgtcagggcctccgacgtcgcctgcctgcccatctccctcggctggtacggcccagcggaggagaaccggcgactcatcaagagccagtgcttctccaccgagggcacggccaacttctacatgcgccccatcgagggcctcaccgtgctggtcgacatggacacggcggaggtcctccacgtctccgaccgcggcgccggcatccccatccccgccgccgcgaacaccgactaccggcacggacactcggcgccgactccggcggaggcgcaagcgcaggggcggcacgggtaccagaccgtccgcgtgccgtcgatggagccgccggcgggcgggccggggttcgagctggtcgacgggcacacggtgcggtggggcgggtgggagttccacctgaagcccgacgcgcgcgccggcatggtggtgtcgcgggcgcgggtgcaggacccggcgaccggcgagcaccgcgacgtgatgtacaagggcatggcgtcggagctgttcgtgccgtacatggacccgacggaggcgtggtacttcaagacgtacatggacgccggcgagtacggcttcgggctgcaggccatgccgctcgtcccgctcaacgactgcccgcgccacgcccgctacctcgacgccgtcttcgtcgccgccgacggccgcccctacgtgcgcgagaacatgatctgcgtcttcgagcgctacgccggcgacatcgcgtggcgacactccgagagccccatcaccggcatggacataagggagtcgcggccgaaggtgacgctggtggcgcgcatggcggcgtcggtggccaactacgactatatcgtcgactgggagttccagatggacggcctcgttcgcatcaaggttgggctaagtgggatcctcatggtgaagggcacccagtactcccacatgaaccaggtccatcaaaatgacaatatgtacggcacccttctgtctgagaacgttattggcgtcatccatgaccactttgtcactttccggctcgacatggacattgacggcgccgacgactccttcgtcaaggtggcgatggcacgacagaacaccggcgccggcgaatcccctcgtaagagctacctgaaggctacccgacatgtcgcaaggacggagaaagatgcccaggtccgcctgaagctatatgagccatccgagttccacattgtcaaccccatgaagaagacacgagttgggaaccctgttggttataaggttgtcccagccggtactgcagctagcctgttggatccagaggacccacctcagaagaggggtgcattcacaaataatcagatttgggtgacaccctacaacaaaacagaggaatgggctggtggtctatttgtctaccagagcaaaggggaggacacacttgcaacttggtccgaaagggaccgtccgatcgagaacaaggacctggtgctgtggtacacgctggggtttcaccatgtcccgtgccaggaggacttccccatcatgcccacggtgtcgtccagcttcgaccttaagccagtgaacttctttgagagcaaccccaccctagggcagcgtccgacccaggagaacgacctgccggtgtgtgccgccgctgccacgacctcttgagacgacagcggatcaccgacatgtgtgcgtgcatggtcgatgcttcggtgtgtcgatctactgatatggattgttcatagtgaaagaatgtatcggtacatctacggatttggagctagccatggctggctatctatgttgctctatatatgtatgagcggatgtatgtgcactgcagtggtatgaacataattgagaacctgaaaggagcaggcttcaaggctgc

SEQ ID NO: 2980 - DNA, 2909 bp, Oryza sativa
  ref <308>: DATABASE ACCESSION NUMBER: AK060759
  ref <309>: DATABASE ENTRY DATE: 2001-12-06
atgaaacaacataacttggtaatcttaacttctgcacacaaatagttagtgttaaaggtgagttctagctctctcaatactggagctctgtattcttgcttgatgaagctacacgttcaaatgaagcatacacacaacacaaaagcttatgaataaactatgtcttttttttctgaatttagagagatcgacatgattttttcctgtaaagatacattccatcagtttttcttctaatattatgtttagagaaaacaggtctataccaagcaaatgcctagttttgatatatactgttggaacctatcagttttctttagtgccacttaaagttgacttcatgcatatgctgctgcatcacaattactgaactgatatcatctcccccattgtgaaaaaaaaaaagaagatctgtgcgcagtatgcacactctgctcctttgctcctcttcaacttccaacaatcaagaaactgctattgttgtaaacgaggaatataactagcaggcttgcgaattgcttaatttcccttgcatgctttctgtctggtcaattggagagggggttctgatctgtgacagcgcctgaagagggagtggtggaagacttgtcggtggcggccacagtcattgctctgcagcagagtgacgtaggtgtccttggcaactggcaagggtggcaccatgagcaagcaagagaacagggaagagtgtaggcactcagtttgatcttgttgaggggaaacaacgattaggtcgagaaagtgatctggtgataattaagcgattttctttatgatctactccaagcatgtcttctcattagcaatcagaacacacctgtgagttttgtctgagagtattaaccacttaaattttaacttttaactctatcatgtatcaagaattaacacataaatgctgtttagacgggctttttttttttaaagattgtcctggttatgccgctggggtacgtgttggccgttctcttttaaggttcatctaatctttcacatcaaatgctttactaaacagcatgccagtctgtatacagggatcacatattatatcgaatttatctgtcttgtgaatcccggaatacttgaaccggaagaataatgttcccatgagaataaagatgaatatatggtgtggaacttgggtgtaaaatccgtactgatatgtgatatacaaacataagcacgagttggagaactacaactatatattgcggatcatactttagtcatgcatatcacggatatatacaatttattgactaggcatattagactgttcagaaaaaaaagattagaataagtggttttgcccatttagttatccagttttccattctcactgattttaagcaatataagctaccttggcaactgaaatctaaggaaaactattaaattcctgtaaacatctgtaatgagatgtgcattgctggggtgcaagttaaagacagctgctcatgcaattgctcaaaactatttcttccatcatgctttcctgcaacgatttgaagcaggccacaaaacattccttggaccccttactgttgaattaacatttattttattttgtttggtccaggatcaagacctgacacttctggttatccccaatccagtgagagacaattaactgcagtaagcagtttcagttctgcatcccccttctcagagtcaagtcagctggcatcttctagtaaaccaccatacttacatttaccacgcaatcatctgggaaggcgatctttcatgtcaaaaccagtgtacccgcttgtcttccgtaatccagtgtcggaagcagaagcctctgggatgcctgaagctagtaatattgggcgaacaacacctagtgatgattctcctgtgtggcggcgcagcttggcaagtcctgagctcaagttccacaatgcattgagtgagtttcggaaggtagaggcttcaccagagccaaacacaagctcaaggagggaaggattcagatggagcaatgctagtagctatgattttggatatgatggtgatgccattgacatttcagatcatattagtgtggagtcccaaagatccccgacaagttcagtgaggtttcttaagtgtggcttatgcgagagattcctgcggcagaaatcaccatggacctcaaaccggattgttcaaaattctgatatgccagtagcggcggtccttccatgtcgccatgtcttccacgcagattgtctcgaggaaagtactccaaagagtcaagtccatgaaccaccttgccctctatgcacacgaggcactgatgatgaagggtgtgtctcattctcggaaccattacatgttgccctcagatctgctcgtaggaatcaaggtaatagtttctctcttggtggttctggtggaagtaccagcgcaaatccttctcgtagtgatcatggcttgaagaggaatcagtctgcccttgtggcaagacgcagtggcacgatgttccgaaaccgttttaagaagcagttctccttcaaggggaggtttgggaaagatctcttcggtggtagagttttcaagaaggttggatcatcgtcttcttcaggtcaacaggacgatcgtcaacagccgaaagcctgactgaaaaaaaaaatacatgaagtagctagtatgaaatcgcgcgattataatgtgccctgctgctactctagcccctgtttaatcgagtgtgtcaagaagtcgtagtccatgtataatttatgatagaaggtgaaattctgtatgcatgcggccctgcgctagcacttattaggtggtggtgtttttgttttgttggactggagttcgccttgcatgtggcaccataattatgctctcggcatgaatgcttactgttaagtattgacaactatctcttcggcttt

SEQ ID NO: 2981 - DNA, 1447 bp, Oryza sativa
  ref <308>: DATABASE ACCESSION NUMBER: AK060760
  ref <309>: DATABASE ENTRY DATE: 2001-12-06
caactccacagacgagcaagggaatacggcattgcatctagccgcctttcgaggtcatttgcccgtggtcaaagccctcatcactgcatccccatcacttatatcagctacaaatgaagttggcgacacgttccttcatatggcgctgactggctttaggaccccaggattccgaaggcttgatcgtcagatggagcttatgaagcaattgattggtggagtgatcaaggatttaagcagcattatcaatatgcaaaacgacgatggaaggacagttcttcacttggctgtgattggcaatctgcactctagccttgttgagctcttgatgactgcaccgttgattgaccttatgtccgggacaatgatggcatgactcctctggatttacttaggaaacagccaccaacagcatcgtctgagatactcatcaagcagcttattttggctggtggaattgcaaattcaatggaccatgagaccagatcagccattgcttctcagctaaagatgcactgtatcgtaggcagcccgggaacatccttcaagatcccagatgccgagatcttcctccatgcaggtatcgatgcgtcagacatcagcgaaagaacgaactcattctctagcgttggacagagtgagccagaatttccggaatccagtcgtaagaagctgaactctatgcaaaatgcagcgaaacatctcaagatcctactcagatggcccctccgcaaggagaagaaatcatcatccggtgcccgaaatgaactggacgacgacgcatcctctgtggattcagtcaagagctggagccacggggagaccccgacaccgctgaggcagaagtactccaggatgagctccctgttcaacaacaagcggaccatggcagccaggatcggctcaccgagtccatcgatgaagaagagcttcgcagatggcctcgcacatggcgtgatgcagcccgaatcgccttcaggctcgggctcctggtcgtcgtcgtccttggtcgacaggattgaagccgtccatctggacaagaatggccaagcatctcctgataccagtgtggtgatcaggcgtacacccaagaagcacgggtctttgaacagcaggctcatgaaccaatacttctgcatcggagcgcaggggatagctgtcgaggactcaaccacggggcagcgatcaagtcggatgttcagaagttcacttctgtcagctgcctgaattcgtaatttagacatggtttgctttccttgacttcactgcttacaagttacagctgatctgttagtatgtgcgagtgcatgtgagaagactgtcatatgttgtgtttgtattactgatgcaaaatggtgagatctactaatgtaatgtagtgctgttggtagtgtgtaatgattttgttgggagagtgagtacaatggaaggcatggttttcaagttc

SEQ ID NO: 2982 - DNA, 1268 bp, Oryza sativa
  ref <308>: DATABASE ACCESSION NUMBER: AK104335
  ref <309>: DATABASE ENTRY DATE: 2002-08-28
gcgaagggccccccttcctcctctcctctcaccacacaccacccgaaaaacaccggaggaatattccccacctcgcctctctccagccaccgacatggccgccgccgccgccgccgccgcttccgcctcctcctcgtcgtcgtcctcctcctcggccgaatccgtccccctccccaccacgactctccccatcgacaaggcggcggctgtaggcggcggtggcgaccgggcggtggattgcggggtgtgcgcgatttgcctggataagatcgccctgcaggagacggccctcgtcaagggatgcgaccacgcctactgtgtgacgtgcattctgaggtgggcgccctacaaacagacgcctcaatgcccacagtgcaaacatccgtttgatttcctcagcgtgcaccgctctctcgatggctgtattcatgactacatgttcgaggaaagcgtttgccttctcctgagggccacttggtttgaacctctgatcgtagaggctcacgaagaggctctggatgaagaagagttataccacatctatcaatatgatgatggcgttgaagatgaccttgacgaggaagcttattacatgagcaggtctccgagcattcgaattggcaacaggaggtggggtgacaatggatatgtcagaggaggcaggaaagaggcaaggccagtgagtcgccagtccttgaatgacactgatgctggtccatccaggactcccaagaagaaagatgtatcagcatcgggatcaggttctgtgtctaaggaagttgcaggaagacgagcaaaacgagctctgaagcgtgaagctgctgataaggcagctgcagaaaagcacttgaagcacctccagaggttgggcctcaggaaggcacccgaagcaacagctgaagcaactccagaggttgaacctcagctgaacgagtgattttcaccaacttctgtagataatggtgctgtgaagaaaactgcagcccttgggtcacccgaataatcttccattgtgaaggactggagcgtggccttgtatcgttggcaaacttgccgatttgtacagtactttagtttcacaaattactcgtagcattgaactgcacatcagtctgcaccagatgcggcgatgcaatgcggtttacctcaatctgataatactttcagttaccgggattcctctgcatgatgcagaggaccctgaactaggagaatgtcagttgctagctctgctagtattctgtgccgcaatgtatcagtttagatag

SEQ ID NO: 2983 - DNA, 1712 bp, Oryza sativa
  ref <308>: DATABASE ACCESSION NUMBER: AK060761
  ref <309>: DATABASE ENTRY DATE: 2001-12-06
aagatagttcatcacattgttcaggaactcttggggtctggacctgataaaaaggcttgccctgaggaggaaaacgttgaggctatttgtcagttcttcaatacaattggtaaacagcttgacgagaacccaaaatctcgtcgaattaatgatacctacttcattcagatgaaggagttaacaacaaaccttcagttggcaccacgtctgaggtttatggttcgtgatgtggttgatcttcgttcaaacaattgggtgcctcgacgtgaagagattaaggccaagacaatcagtgaaattcatgatgaggctatgaagacacttggactacggccaggggcaacaggactcacgaggaatggccgtaatgcaccaggtggtcctctttcccctggtggattcccaatgaatcgaccaggaacaggagggatgatgcctgggatgcctggaacacctggtatgcctggatcaagaaagatgcctggaatgcctgggttagataatgataactgggaagttccacgttctaaatcaatgccaagaggcgactctcttcgtaaccagggtccgttgcttaataagccatcatctattaacaagccatcatctattaactccaggcttcttcctcatggaagtggagcactaattggtaagagtgctcttctgggcagtggtggtccaccatctcgcccttccagccttatggctagtctcactcatacaccagctcaaactgcaccatcaccaaaacctgtaagtgcagctccagctgttgtgcctgtcacagacaaagcagccggttcttcccatgagatgccagctgcagttcagaagaagacggtatcccttcttgaagagtattttggcatacgtattctggatgaagcacaacaatgtatcgaggagcttcagtgtcctgagtactactctgagattgtgaaagaagctatcaatcttgctttggataagggtcccaacttcattgatcctcttgttaggctgctggagcatctgcacgccaagaaaattttcaagactgaggacctgaaaactggatgcttactgtatgcagccctgctggaagatattggtattgaccttcctctagctccagccttgtttggtgaagttgttgcacgactgagtttgtcgtgtggcttgagctttgaagttgttgaggagattctaaaagcagtggaggatacatacttccgcaaaggaatttttgatgctgtcatgaaaaccatgggcggaaactcttcaggtcaggctatattgagctcgcatgctgtggtaatcgacgcctgcaacaaacttttgaaataatagccccttggcagccttggcatatcaaccttttggatgctgtgcctagccaaaacagcatcgtgtattctctatagcttaggtgtttcaccccagaggaactctcgtactggagatgtgagcaacagccagttttgtgctgtatatttttgcaaggtcagatgagtgttcattattgtttcgacaacgaaggaaagaaagaagccatggattttgctatcgggtgacagcttaattcgctggagcctgagatgaacaaggcttaatgtggtatttttgtgtccctttattagttcttttctgtgcgtacacattttgtaacaatgtactatggttttggagtattctgttggtttacaatatatcgtgtcattgtagcggtc

SEQ ID NO: 2984 - DNA, 1867 bp, Oryza sativa
  ref <308>: DATABASE ACCESSION NUMBER: AK060762
  ref <309>: DATABASE ENTRY DATE: 2001-12-06
actcccgatctccccgctccccgcgtcccgtctccgatccacccaaacacccgcaccgccgcgctacgcgagcacggcaccgcggcgcggcgcgactccgcaggcgacaagccgaggagaatcccgcgcccgcccgcccgcatcaccgccggatggccgccggccgtcgccggtagggcgataggcgggtagatccagatccggcggggcgggatcatatacaccccgcgccgatggcgggcgcggtgtcggcgctgttccttctggacatcaagggccgcgtcctcgtctggcgcgactaccgcggcgacgtctccgccctccaggctgagcgcttcttcaccaagctcctcgacaaggagggcgactcggaggcgcactcgccggtggtctacgacgatgccggggtcacctacatgttcatccagcacaacaacgtgttcctactaaccgcctcccgccagaactgcaacgccgccagcatcctcctcttcctccaccgcgtcgttgatgtgttcaagcactatttcgaagagttggaggaagagtcgctgagggataactttgtcgttgtgtatgagttgcttgatgaaatgatggattttgggtacccacaatacacggaggcgaaaatcttaagtgaattcattaagacggatgcgtacaggatggaggtatcacagaggccacctatggcagtgacaaatgccgtgtcatggcggagtgagggtattcggtacaagaagaatgaagtgttcttggatgttgtggagagtgttaacattcttgttaacagcaatgggcagattgtgagatcagatgttgttggggcactgaagatgcggacatatttgagtggaatgcctgggtgcaaacttggattgaacgatagggttcttttggaggctcaaggccgagctactaaaggaaaagcaatagatcttgatgatattaaatttcaccagtgcgtgaggttggctagatttgagaatgatagaactatatccttcatacctcctgacggatctttcgatctaatgacatacagacttagcacccaggtaaaaccacttatctgggtggaagcacaaattgagaaacattcaagaagccgaatagaacttatggtgaaagcaagaagtcagtttaaggaaaggagcacagcaacaaatgttgaaattgaagtgcctgttccttcagatgctacgaaccctaatataagaacttcaatgggctctgctgcatatgcacctgagagagatgcaatggtctggaaagtaaaatcatttcctggtggcaagagctgaatttagtcttccaagtataactgcagaagaagcagctcctgaaaagaaggcaccaatacgagtgaaatttgagataccatatttcactgtgtcgggtattcaggttcgctatctgaagatcattgaaaagagtgggtaccaggcgcttccttgggttagatacattacaatggctggtgaatacgaactgagacttatatgagttatctctgatatggctgctcaaagattttgatgctaaatttcaactcccaagatacatgtttgatgctcgatatacaacatatagttggcattgggacgttgccatggaagtctttgaaaagctcaaccatgcaaggtttttctgtctcgttgttcatcttgttagtgttactttaccatggttactgtaagttacccatcaagtatagctttgaaaaaaacttttttttgttcacttgtatcattattgatttatttttgtgggtgtcgaactttcccccttttgtactacacaaaaatcttgagctgaattggtataaatgaaatacctgggcggtgcttttgaagtccagatt

SEQ ID NO: 2985 - DNA, 1720 bp, Oryza sativa
  ref <308>: DATABASE ACCESSION NUMBER: AK060763
  ref <309>: DATABASE ENTRY DATE: 2001-12-06
cagcatgcttgctcgcggtatccgtctcttgtaccatgcagtaatgcatggactgctttgtccagaaaaatacaagcagcaaaacaagcagaagcaatccaaaaaggtacatccaaaaaaaaggtctttgtgatctttggtggtgacacttctgagcggcaagtctctcttatgagtggcacaaatgtctggcttaatttgcaaggttttgatgatcttgacgtgacaccttgtttgcttacatctggaaatggttattcttccttccacaaccaaaatatgaatggaatttcacgtgatgtatggacattgccatattcgttagtgctacgacataccattgaagaagttaatgccgcatgtattgaggcaattgatccagatcggatggaattaacatcccgtttacgtgaccaagtaatgaatgaacttggacagtcattaagcaaatatgattggtttgcgggctttgacattgccgataagcaacctatcaaatactctcttcaacaatggatcaatcatgttaaggaagctcaagccgtagtgtttatagcagtgcatggtggtattggagaagatggtactattcaatcgctgttgggatctgcaggagttccttacacagggcctggacaaatagcttctaggacatgcatggacaaagttgcaacttcacttgccgttagccatctggctagctatggagttcacaccataccaaaggatctgagagcaacagaagagatactagagtcgtctcctgacgatatctggaatgacctgaaagcaaaactacaaactgaaacggtttgtgtgaaacctgctcgtgatggatgctcaactggtgtggcaagattgtgttgtccgaaggacttggaggtatatgcaaacgcattggagagaaaattacagcgcatgcctgctaactgtttatctagggcacatggtgtcattgagatgccagtctctcctccagagtcactgatatttgaaccttttattgaaaccgatgaaattatcatttcaaccaaatcagtggatgatagcacccgacatctggtatggaagggggaaaataaatggcttgaagtgactgttggtgtagttggcaaacgtggagaaatgctgtcactaaatccaagtatcacagtcaaagaaagtggtgacattttatctcttgaggagaaatttcaaggtggaactggaatcaacttgacaccacctccttcaacaattatgagcgaggaagccctgcagaagtgcaaaagttgtatcgaaactttggcaaacactctcggattggaaggcttttcaagaatagacgcatttgttaatgtccagaatggggagatactgctgatagaggtaaacactgttcctgggatgactccatccactgtactgattcaccaggcactgacggagaaaccacccatctatccccacaagtttttccggacgcttcttgatctggcgtttgcaagggcgaactagctaagctactactgtaactatgtttgtgatgtattttcatttcagtgcaaataaggtgcctaccatgcatgtatcgatctgtattactgtatgcaatatgcaactgccgatgtgatgtgatcagtactgtaccgtgttgaaggattaatttttttttaaacctaaggcggaactttgttccacttttatatttagaagaagagaattgacccagtttataagg

SEQ ID NO: 2986 - DNA, 2305 bp, Oryza sativa
  ref <308>: DATABASE ACCESSION NUMBER: AK060764
  ref <309>: DATABASE ENTRY DATE: 2001-12-06
atcctcgcgttctccgtcgcttcgcctctctccccggctcccccaaaccccaaaccccagctcccgtctccgtctgcttccccggccgcccgagctcccccgtacggccgcaccccacccatccaccccgccgccgggatggagctgaagcccgggatgtcggccctcgtcacgggcggcggctccggcatcgggaaagcactttgcattgctcttgcgcagaagggtctatttgtgacagttgttgatttctctgaagaaaatggaagagaagccgcttcattagttcaaaatgaaaataaaaagtttcatggagatcttaaagttccaagtgctatgtttattaaatgtgatgttactaatgcaggtgatctttctgctgcctttggaaaacatgtggacacatatggtggactagatatttgcatcaattgtgctggaattgccatcaagacactagtttatgatgatagatctgatggaactagcacatggaggcatgctgtaaatgtgaaccttgttgctgttattgatggtactcgcattgcaagtcaaattatgcgatctgggaagaagcctggtgtcataataaatattggttcagccgcaggcctttatcctatgaactttgatcccatatatagtggaacaaaagctggcgttgttatgtttacaagatcacttgctccattgaaacgccatggtatacgtgtcaatgtactctgccccttgagtttgttcaaactaatatggcagagcaactaagtcgtcgaataatagatgtaactggtggatatataaagatggaagacattgttaatggtacatttgaacttataaaagatgaaagcaaggctggtgcttgcctttggataactaaacgaagagggatggagtactggccaacaccagaggaacaaagaaagtatatgctcaatcttcccaagtcaaaaaggatgttaacacaaaataccttttcgactgtccaaactcctgagttctatgagaagatagttgttcacacacttagccataattttcgcgatgctacaagacttgaacgtgtgcgcttgagattgccggttgaaccacacaatgctctggtcaaaataatatacgctggtgtaaatgctagtgatgttaacttcagtgctgggcgttatttcagtggtggtgctaaagaaactgctgcacgccttccgttggatgccggttttgaggctgtgggcatcgttgcatctgttggagattcagtgaaccatattaaagttggcagtcctgtagcccttatgatttttggggcctattctgaatttactcaggttccagccaagcatcttcttccggtgccaagaccagatccagaggtcgttgctatgctaacatcaggattgactgcttcaattgcccttgagaaggcaggccaaatggcatcagggcaagttgttctagttacagctgctgctggtggaacaggacaatttgctgtgcagctcgcaaaactagcaggcaacaaggttgttgccacatgtggtggcaaatgtaaagctgcacttctgtcttccttaggagttgatagagttatcaactaccaaaatgaaaagatcaaagatgttctgaaaaaagagtttccaagaggagcagatatcatatatgaatcggttggtggggaaatgtttgacttatgcttgaatgcacttgcagtccatggacgccttattgtaattggtatgatctcccagtatcaaggagagcatggatggaagccacggaactacactggactatgtgataagattcttgctaaaagtcaaactgtggctggttttttcctaatccagtatgctcacttgtggcaagatcatcttgacaaactttttgacctgtatgcctctggaaagctaaaggtttcccttgacccgaagaaattcgtgggtgtagcttctgcgcctgatgcggtagaatatcttcattctggcaagagtgttggcaaggttgttgtgtgcattgatccgtcatacagtcagacccttgctaagctatagtctgtggacatgagatacatcatatttcatcgtctagtcacgaggaagaacagtgcaaaaaagacaattacacaggctatcggcataccgtacaaccttgggcttcttgctccgttttgttgtctgtgtgcgtagctgaaacattcccatatttaccccagccgggagaaaccgaataactgcatatgttgtatagctcagttgtctgagtttgtgggaatagctcaattgaatgttatatataagatcgttccatgctc

SEQ ID NO: 2987 - DNA, 2830 bp, Oryza sativa
  ref <308>: DATABASE ACCESSION NUMBER: AK060765
  ref <309>: DATABASE ENTRY DATE: 2001-12-06
gctaagtaagtaagaattgtggttgccactcggcactcgccaccatgctcctcgtcggcgtcctcctgctgctcttcttcaacctacatctccccacggccgccattgacaccctcacgctaggccagtctctgctgtggaaccagacgctggtctccaatggcggcaacttcgagctcggcctcttctcgccgggaaagtccaacaagcactaccttggcatctggtacaagaagatctccaagaagacggttgtttgggttgccaaccgtgagcgcccgattcttgagccgtcgagctgccacctcgagctgagcgtccacggcgatctgcggctgttctcgacggcgccgtcgaacaccttgctgtggtcgtcgaacgcgtccgcgtcttcctcgccgtcgcccccgcgcaccaccgtcgccacgctccaggacgacggcaacctcgtggtgaacagcaacgcgacgcggtcgcggtcgcgatcgccgtcgtcgactacgacgacgcacgtggcgtggcagagctttgatcacccgaccgacacatggctccccggagccaggctcggctacgacaggggccgcggcgtccacagcttcctcacgtcgtggacggactccgagaacccggcgcccggcgcgttctccatggtgatcgacgcgcgcgggctggccaagttcgacctcctcgccggcggcgagcaccggtactggacgaccggcctctgggacggcgagatcttcgcgaacgtgccggagatgcggtccggctacttcaccggcgtcccctacgcgccgaacgccagcgtcaacttcttcagctaccgcgaccggctgccgggcgccgtcggcaacttcatgctggacgtgaacgggcagatgcggcggcggcagtggagcgagacggcggggaagtggatcctcttctgctcgttgccccacgacgcgtgcgacgtgtacggctcgtgcgggccctttggagtctgcagcaacgccaccaacccggagtgccggtgccccgccggtttcgagccgcggtcgtcggaggagtggaggctggagaacgccgccggaggctgcgtgaggcggcaccctctcgagtgtcacggagacgggttcctggcgctgccgtacaccgtgcggctcccgaatggctccgtggaggcgccggccggagctgggaacgacaaggcgtgcgcgcacacctgcctggtcgactgctcctgcacggcctacgttcacgacggagcgaagtgcctcgtgtggaacggcgagctcgtcaacatgaaagcctacgcggctaatgagaatggccaaggcgatcctggcctcgccggagcggtgcttcacctccgtgtcgcccactcggaggttccggcgtcgtcgacggagcactcgtggaagaaatcgatggtaatccttggaagcgtcgttgcggcggtggtgctgctcttggcgagcctcgtcaccgtggtggcggtggcggcggtgttgcggatgcggcgtaggaggggcaaggtgacggcggtgcaggggtcgctgctgctgctcgactaccatgccgtgaagaccgcgacgagggacttctcggagaagctcgggagcgggagcttcggcacggtgttcaaaggcgcgctgccggacgggacgcccgtggccgtcaagaagctcgacggtctccggcaaggcgagaagcaattcagaacggaggtggtgacgctcggcatgatccagcacgtcaacctcgtccgactccgtggcttctgctgcgagggaaacaagagggcgctcgtgtacgactacatggccaatggctcgctggactcgcacctgttcgtcatgagcggctccagctccggccccgactccaagcaggtgaccctgacttggagccaacggtacaacgtcgcggttggtgtggcacggggcttggcttacctgcacgagaagtgcagggagtgcatcatacactgcgacgtcaagccggagaacatcctcctcgatcaggagatggcggcgaggctcgcggacttcggcatggccaagctcgtcggccgcgacttcagcagcgtcctgaccaccatgcggggcacagtgggatacctcgcgccggagtggctagccggcacgccggtcaccgcaaaagccgacgtgtacagcttcgggctcctgctcttcgagctcgtctcgggccggcggaacagcaccgcgccgtcgtcgtcgtcggagggcggccctgggatttacttcccggttcatgccgtggtcaagctaaacgaaggcgacgtggccgggctggtcgacgagagggtggccaaggatgccgacccgaaggaggttgagagactctgcaaggtcgcgggctggtgcattcaagacgaggaaggcgaccggccgaccatggggctcgtcgtgcagcagctcgaaggcatcgccaacgtaatgttgccgccgatcccttctcggcttcatatcctggcgattgagaacgaatgggtcagaggtgttccagaggatgagcgctgctcaaagagcggtagtaaaccagaaacagaagcaatagaagaaatgtagaactgaaaagaatctgggagcaccctacagctgaagtgaagatgcagcgtcagatatgaaaatgtagttgtaatgtcagcatagttgatatttcccgtgtggatgtatagccagtactgtactgcaactgttctgtaaattccttaaattccggaaacaggatcagacaagtaccttctctcgttttgttcccatctaattctggtccatccttgctgacagctgcacctttattgaagaaatccattagtgct

SEQ ID NO: 2988 - DNA, 1609 bp, Oryza sativa
  ref <308>: DATABASE ACCESSION NUMBER: AK060766
  ref <309>: DATABASE ENTRY DATE: 2001-12-06
agcaaaccaaatacaacttttacacatctcaaccaatttggtaaggttgattttgagattgaagtgaacagccctgaaatggcattatgttctcaaaattatcacttgcattcaactttgaatacgactatagtctagaaactaggtgggattctatatgtagatgactatgatgagcgaggattatttcttgagcccattcattatagaaactgatataacaacaatgccactgttggttctctgttttagataccacatagaagtggttgaatcatcaacatagtgtccgagacttaatcagtctcattcattctggatcagattagtctcttagcgaaactcccctacttttttactataagttcaagaaatatttgcttggaaataccatgtcgcggccatgtctgttgacgattttcttccatttggccatgcttgatgggaatgactaagatatgattacatgcatgatgtctgcttcaagcatttatttaatattatcatatgttcattagcagaataaagttgatggacgattcaatcagaatctgaggtcactgtcgtttggacattcaagtcctccatcaccagcatcatatggtcaaaatggtcttgcaaactataacaaagaagcttttggtctggcaaacaatacatatagatcccactcagctgtactcgcagatgatatactttccccttcagctggtcgggaacatatttctctggatgctcctagggggaggtacaatacaactaatttgcctgtttctggtcttggttcaagcagaggctctcagttcatggcaagctcattcaatggcaatcatgacatagtctcaaacaacaccctgcaaaatatagctggagttcaaacaggacctgcttggcttgaagctgatactgcagcaaacatgtttttggaatcaaaggatgaagctcatgattttgcaagcctacggcatgcgcttctggaacaggataggcaggttcttttaactggtgccaatcctttagcaaaggaactaaacatcaaggagctttacaatttgcaaagcagactagctcaggaaaaggctagagatgtatatcgccaaagatttcaaatgccagaatttcaaggcctggttcaggagcaaaataccccaattgacctgtgtggtcttcacgtaagcgaggcgatacacgccctgaactatgagctcaacaaccggcggaagattgctcgatccacaggccgtcgtctccaggtgatcataatatcaagcacacgtactccggcgaggctgaccgccgccgtcgagcagtacctcctggagcacggcattcagtatacgcaggcacagccgggccttttccgtgtcctgttacagtgaagtaacaggatggtaggctcatcatgtttgtgtacacctttgaaagaagaagaaaaaaaagaggaggaacaaaaaagaattgacccctgtactactgtatatggcagagatgagtagtactagcagaatagaaatttgaaatagctgttgtaatattcgtatagcaaggcttttttttttgtcagcaaaaaacgttgtaaaatttgcggaattaggcgatatgttctttc

SEQ ID NO: 2989 - DNA, 2105 bp, Oryza sativa
  ref <308>: DATABASE ACCESSION NUMBER: AK060767
  ref <309>: DATABASE ENTRY DATE: 2001-12-06
ctacttcctcaagaatctctcctcttcttttctatccaagaaccgctcaaaagctcgaaccttgcgcaatctttttaaatcctcccgaccatttcctccgggtttgattctgggcagagattgcgaggggaaagatacgagcttttcttggcttctttcccctgcattgggaaagatacgagctgttgctgttcttgggaagaacagcttgggacattcttgggttggggtttgattcccaggggaagaaagcatgaggctatggtttctcatacctcttcttctctgtttccctacattgattcgatccgaggattactcggatgtgaccatcgtcgttcggggtgctgagacgatcgcttcgaccagcaacgagttcatttgcgccaccattgattggtggcctccagagaagtgcaattatgaccagtgtccatgggggcaagcttctatcttaaatttggacttgactaatcctttgctagctaaagctatccaagcctttagccctctacgtatcagacttggaggttccttacaagatcaggtggtgtatggcacgccgaatttaggatctccatgcaccccattttcaaagagttcaagtggcctgtttggattttctcaaggatgcataaccatggagagatgggatgctattaataagatctttatggatacaggtgcagttgttacattcggccttaacgcgcttcaagggcgacagcagatgggcagaggtgtttggggaggtgcttggaattccagtaatgctcgggagttcatggagtacactgtttcgatgaactaccctatagactcatgggaatttggtaatgagttgagtggaagtggaattggtgcaagtgttggagctgaacaatatggaaaagatataattgagctcaagaacatcatcagccagttatatggaaactctaggaaaccattggtggttgccccaggaggattctatgaccaaaaatggtatgctcagcttcttgatatctctggtccaaatgttctcgacacaatgactcatcatatttacaatcttggtgctggtaacgatccgcaagttgcaaataggatcttgaatccgcagtatttgagccagagctctgatacattcagagatctccaaatgacgatacagcggcatggaccatggtctgctccctgggttggggaagctggtggtgcatataacagtggcagccgaaaagtgtctaatactttcctgaatagcttctggtatcttgatcagcttggtcagtcagcaaagtatgacacaaaggtttactgcagacagactttgattggaggcaactatggccttcttgataccgaaacttttgttccaaaccctgattactacagtgccttgctgtggcatcggctcatggggaagggagttatttccttagacaccagcggttcttcgtacttgcgtgcctatgcgcattgcggaaagcaaaagggcggcgtcgcgctcctcatgctcaacctgaacaagaacatgggattcatggtctcagtcagaaatgacctcaacattaatttcagagaaatggcaggggtaaagagggacaactcctttgtccatggcctgaagaggacagtctcctgggttgggagcaaagcctcggatgggctggagaagagggaggagtaccatctgactccacaggatggcaacccttttgccaggacagtgctgctcaatggagctcctcttcagctcactggagatggtgacatcccttcactgccaccagtgatggtctcagtcaattccccaatctatgtcgccccgctgtcgatcgcgttcgtcgtcttcccagatttcgaggctgaaggttgcgaacgatgatttcgagtttagatagaaatatcatgaggtttttcttttctgatgtgatgatataggtgttctcagggttacatccactgtaaagatttttctgtgtttctagttttttccccaattgggctatatatagaataacttgattccagtgtttactgatcagtatgtagcaagcctgcagttccattcccttctatgtttggttgggtcacaatgaagcacatttgatgtagtg

SEQ ID NO: 2990 - DNA, 1322 bp, Oryza sativa
  ref <308>: DATABASE ACCESSION NUMBER: AK060768
  ref <309>: DATABASE ENTRY DATE: 2001-12-06
aatcagattcacgtgatatggaagcatgtggatgggatgaagtcttttgggaagaaataggcttgggagaccttgttgaaggaaatcatgcaaaaataggacgcagtgttgcatttcctggccatcctctgggttctgggttgacagctactgctgccaaggagttaggtttgcgtcctgggattcctgttggaacttcactaattgatgctcatgctggtggtgttggagtcatggaaagtgtgccagatgcagaatctaaagctgacacgtctgatgaatctgatgaacaagctatatgccaccgcatggtcttggtttgtgggacatctacatgccatatggctgtctcaaagaacaaactgtttatccctggtgtctgggggccattttggtctgcaatggttcctgagttttggctcacggaaggtggccaaagtgcaactggtgctctacttgattacattgttgaaaaccatgttgctgctcctcttcttgctaatcatgctgcttctcaaagaatatccatatatgagctactgaacaagatgctattttctatggcacatgagcaaaatatttcttttatttcttccctgactcaagacatccatgtcctcccagattttcatggaaataggtctcctttggctgatccaaaatccaaaggaatcatatgtggcttcacacttgatacaagtgagaagcacttggcgcttctttatctagcaacaattcaaggcattgcttatggtactcgtctattgtggagcattgcaatgctcatgggcacaagatcgatactcttcttgcttgtggcggacttgcgaagaattccttgtatatccaagagcacgcagatataactggatgtccaataatacttcctagagagaatgagtctgtgcttttaggagctgctgtcctgggtgctgttgctgcaaagaagtttccaggtgttcgcgacgcaatgaaggcactgaatgcggccgggaaggttgtatatccatcttcagatcctagggtaaagaaataccatgatgcaaaatatccgatattcagatccctgtatgagcaacaactctcccatcgctcagctatggcacaggcattgcagtaggggcttatgaccagttggccacttccagtgaccactgagctgcccattcatttatcttgtgaaaacaccgtattatgttgccatgttctcttgggtcattgacatctcatatgccgaattccatgttacgtgatcaaactgatgatacaatgtataaacagtagaaggcaataagatccttcagaaatgtgatgttggttag

SEQ ID NO: 2991 - DNA, 1898 bp, Oryza sativa
  ref <308>: DATABASE ACCESSION NUMBER: AK060769
  ref <309>: DATABASE ENTRY DATE: 2001-12-06
atccgcgcctcgccttgcttgatttgcctcgcctgccctttttctcgcgcggccgcctccgagatttctcctcctcctcctcctcctcgactcgactcgactcaccccccactgaaatcttcctcccaccaccgcgccgcgacgtcgcacgcccccgcggccgccgccgacgtcgctgtacccccaaaccctagccccgctagcgggagcggtcgagcacacacgcacgcgcgcgcgcgcgcgcggagttctctctctctcctgttgaccacctgcagatcgcccgcgcgatgggatccaaggacgggagtggagccgcctcgtcgggaggcggcgggggcttcttctcctcgatcgccgccggcgtgcgcagcttgggcaccgccgtccacaaatctgtcaacgggttggtcggctatgaaggacttgaagttattaacccagatggaggcacagaagatgcggaagctgaggctttgagagggcgatggaaacaagaggatcgtgatagttattggaagatgatgcacaagtacataggggcagatgttacatcacttgtgacacttccggtcatcatttttgagccaatgacaatgcttcagaaaatggcagagttgatggaatactgtgaacttttagacaaagcagatgaatgcgaagacccgtacatgcgtatggcatatgcctctgcatgggctgtatcggtctactttgcataccagcgtacctggaagcctttcaatcccatccttggggagacatatgagatggttaaccaccagggtatttcatttattgctgagcaggtaagccatcatcctccgatgggtgccgctcactgtgaaaatgcacattttacatatgacatcacctccaagttgaagaccaaattcttggggaactctctggaagtttatccacttggaaggactagagtgttacttaagaagtccggtgtcaagctggaattggtaccaccactcacgaaggtcaacaacttgatatttgggcgtacttgggttgattctcctggagagatggtattgacaaacctgacaactggagacaaagttgtgcttttattccagccatgtggctggtttggggctggtcggtacgaggtggatggctatgtgtatagtgcagctgaagaacccaaaataatgataactggaaagtggaaccagtccatgagttgtcagccatgcgatcaagaaggcgatcctcttccaggaactgagctaaaggagatatggagagttgctcctactccaccaaatgacaagtaccagtacacgcacttcgcgcacaaaataaacagcttcgatacggcgccgaagaagctattggcatcggactcccgattgaggcctgatagatatgccctcgagaagggtgacatgtcaaaatcaggttcagaaaagagcaggcttgaagagcaacaaagagctgagaaaagaacacgagaggccaagggggagcaatttactccaagatggtttaacaggaccgatgaaatcgcccctacaccctggggcgagctggaagtgtatgaatacaatggaaaatacaccgagcaccgcgctgccattgacagctcaagtgtggccgacgacgatacagacgtcacttcgatcgaattcaacccgtggcagtacagtagctcatcttcccaatgattttcgtagggtctgaaactgcacatccgtatttttattatccaatatgcttccaggccttgctttgcacgctgattcatctcagcagagttttcgtgcctttgtagtattatgaccttcactttttcccttcttcatgcttctactgttcaggaagtgatggtgtattcgatgtagtccatatactgtcgttgttaatctagcgaaaattacaac

SEQ ID NO: 2992 - DNA, 2978 bp, Oryza sativa
  ref <308>: DATABASE ACCESSION NUMBER: AK060770
  ref <309>: DATABASE ENTRY DATE: 2001-12-06
agaagaacatggctgacctggaagcaggcatggttgctgctgccacagaccagggcaattcaacaaggtcacaagatgacgcagccacactgatcccgaacagtggcaatctgggctcgagcaacaggagcaccaggacggccaggttcaaggacgacgacgagctggtcgagatcaccctcgacgtgcagcgcgattcggtggcaatccaagaagtgagaggggtggatgagggtggctccgggcacggtaccgggttcgacggcccgccactggtgtcaccctcgtcgaagagcggaaagctgacgtcaaagctcaggcaggtgaccaatgggctcaagatgaagagctccagcaggaaggcgccatccccgcaggcgcggcagtctgcgaagagggtgaggaagaggctggacaggaccaagagcagcgccgccgtggcgctcaaaggattgcagtttgtgactgcaaaggttggcaatgacggctgggccgcggtggagaagcggttcaatcagctgcaggtggatggtgtgctgctccgttcaagatttgggaaatgcattggaatggatgggtccgacgagtttgcggtgcaaatgttcgattctctggcgaggaagagagggatagtgaagcaggtgctcactaaggacgagctcaaagatttctatgagcaattgactgatcaggggtttgacaatcgtcttcggacattctttgacatggttgacaagaacgctgatggaaggctcacagcagaagaggttaaggagattattgcccttagtgcatcagcaaacaaactttccaagatcaaggagcgagctgatgagtacacagcactcattatggaagagcttgaccctacaaacttgggatacatcgagatggaggacttggaagcactattgcttcagtcaccatctgaagctgctgcaagatcaacaacgacgcacagctccaaacttagcaaagctcttagcatgaagcttgcgtctaacaaagaaatgagcccagttcgtcattactggcagcagttcatgtacttccttgaagagaattggaagcgcagttgggttatgactctgtggatctcaatctgcattgcccttttcatttggaagttcattcagtaccgtaatcgagccgtattcggcatcatgggttattgtgtgaccactgcaaagggtgctgcagagaccctcaaattcaacatggctttggtcctacttcctgtctgcagaaatacaatcacatggattcggtcaaagacacaggttggagctgtcgtacccttcaacgacaatataaaccttcataaggtcatagccgcaggtgttgcagttggtgttgctttgcatgcaggtgctcatctgacatgtgattttccccggctgctccatgcgagtgatgcacaatatgaactaatgaagcccttctttggggagaagaggccaccaaattactggtggtttgtaaagggaactgaaggctggacaggtgtggtcatggtggtgctcatggcaatagcatttacattagcccaaccatggttccgacgtaacaagctcaaggactccaatcccctcaaaaaaatgactggcttcaatgccttctggtttacccaccacctgtttgtcattgtgtacactttgctctttgtccatggaacgtgcttgtatctaagcaggaaatggtacaagaagacgacatggatgtacctcgctgttcctgttgtcctgtatgtaagtgagcgtattcttcggttgtttaggagccatgatgcagttgggattcagaaggttgcagtgtatcccgggaatgtattggctctttatatgtcgaagccacctggtttcagataccgtagtgggcagtacatcttcataaaatgcactgctgtgtctccatatgaatggcatccattttccataacatcagcacctggagatgattatcttagtgttcatattcgcacaaggggtgattggacttcacggcttagaactgttttctctgaggcatgccgaccccccactgagggagaaagtggactacttagagctgacctttccaagggaataacggacgaaaaagcaagattcccaaaacttttggtcgatggaccgtatggtgcaccggcacaagattaccgtgaatacgatgtgctacttctcatcgggctgggcatcggagccacccctttgattagcattgtgaaggacgtgcttaaccacattcaaggtgaggggtcagttggaaccacggagccggagggcagcagcaaggcgaagaagaaacctttcatgacgaagagagcctacttctactgggtgacgagagaggagggctcgtttgagtggttcagaggcgtcatgaacgaggtgtctgagaaggacaaggatggagtcattgagctccataaccactgctcaagcgtgtaccaggaaggcgatgctcgttctgctctcattgtcatgctccaagaacttcagcatgcgaagaagggcgtcgatatcttgtcgggaactagtgtgaagacccatttcgcacgacctaattggcgaagcgtcttcaagaaggttgcggtcagccatgagaaccagcgcgtcggtgtgttctactgtggtgagcctgtgctggttccccaactaaggcagttgtcagcagatttcacccacaagacaaacacaagatttgatttccacaaggagaacttctaatggtacaaattgagaaatacccgtgtatggttttgtatgtagttctttatcatgtgaattatatggtttctaatatatataaagttggacaaaataaatgaaatgatggaagctattttgttttttaagatgtcaaaagtctgcaatatctttttacaagagtgctgtctattcatgtatacacctagtggaagaagctgtgcttcatgttgtagcttacatagatgaagggaagttctctttgttgtgacc

SEQ ID NO: 2993 - DNA, 2541 bp, Oryza sativa
  ref <308>: DATABASE ACCESSION NUMBER: AK060771
  ref <309>: DATABASE ENTRY DATE: 2001-12-06
tgcaaagacagctgaaaatgctaatgatcttgtgggtgctgagacgactgaacttgcattgacaaagcctgtgcaaattgaatcttctggtgctgtacaggagattgattccttgagtcaacaatgtgcaactgaggaattgccaccccaagctgaaacctcaaacttggaagctaccatggacaagtcaatgataaatactgatggtgtagctgcatcaggtgaagctacagctgctaaagaaaccactgaagtgtcattggttgaaaattctttagagctatgcgctgatggtcctactgaacctgtgattgagaaccaaacacagtttaatgatggatcagttgatgtgcaagggggcggtcagcatgcacctcatgctatcttagcaactgcagattcccaagtgaatgtagaagcatcaacacaagaaatggcatctaacgatataccaagtgacctaccaaccttggaatttccagaacgtgagaaaatgctgtcagctccagacgttgaattgtaccaggcaaatgacttgggccaggtaactgcagaaaagggaaccactgaatctgatggaagtaacaaagtaggtagtctcactagcagaaaaagacacttggaggacagtttgccagctctcgaaagtgcaactactgaaaaattgtctagcagaccacgtggtaaaagaaccattgatggtattcctgatgatgatgatttactggcgtctatattagttggtagaaggacccctggactgaggcttgattcaacaccaataccacctaagacgtcatctttgaaacgtccaaggttgacgtcaaagagtaccacaccgaagagaaaagtgcaaatggatgatgccatggttatacatgctgataccatacggcagcagttgatcagcactgaggatataaggcgcattcgtaaaaaggctccatgtacccgttccgaaatatggatgatcgagaaaggttccttagaagatgatatattccatgagcccatcttttcctgcatgtgcaaggagctaaacgatttgcaatatcggacctatgagattgttgctcatcccaccattcataatatggaaatacatgtacggctagacatgtcccaaactatggcagatggcagcaatgatgttggcacctctggcgcaaaggacagtggaaatcaccaagatcatgtagtgctaccagatggagctgagtcagatgcgatgcatcctgaagcaactgatgcagcagatactagaactgattttgattcacacatgccatctgacaaacaggttaacaatgttgaaggagtaactgaacaattaactgataatgagaaagaaactgcagttgttgagaaagcaaccactaatatgggtgacagtgctcaagttgattcacttgataaggaatatcttcaagatgttccagctgatctgcagaggagcacaaatacaaatacacctctgtttgtgctagatgacatgcctggtccagatgtggttctggatagctctgatccagtttctgcacaagcagtggatgatatgaaaggggagttgagtgacattgtccatgacaatgtcaatgcatttgacaataaggatatgccgacttctgagattaccgtactggaatttactcaaaacgcttctggttttcctcagccaacagaggatgaaaatgttctgtccgcaatgggtgaaaattctggattgcaagaaaatcatgtaggatctgttatggatctggacaatatggggcatgacttttcactaaaggaatgcagtgattttggcagtgcgattcagggtgttgacacagattttctgatgtatgatgatgaggtggactgtgatgaggctaatgatgatgagcctaatcctgaggaattccagtctcttgataacagtggatggtcttcacgtactaggggtgttgcaagatatctcaaaactttatttgatgaggaatctggtctgggaagaaagagtgtggccattgatcatctgttaagtggaaagactaggaaagaagcatcaaggatgttttttgagacattggttctgacaacaaaggacttcataagtgtggatcaaccaaactcctttgattttgtcagcgttaagccagggccaaagctcctgaagtcagatttctagatcaaaaaccagctagcgtggcgcgatacatacaatcttaccatatctgtcacattaccaacaacatacagatctcgcatcgccgtgaccgtcatttttgttttgttctttttaatttatcctccctctgtagtatccccgcactaatctgtgtttactaggcttcttgggtaggattctgttgtacccccctccgtgttggctattcagtgtatatatgattagctcttgtaaagttgcttgtgtaatgtgatagcatcagctcctaagtccccgtctattgttgctttgaataaaccttcaaacctgtatacttctctgactttgagcaacctgtcgattaatttcaaatttattcagattcgtaggtc

SEQ ID NO: 2994 - DNA, 1383 bp, Oryza sativa
  ref <308>: DATABASE ACCESSION NUMBER: AK060772
  ref <309>: DATABASE ENTRY DATE: 2001-12-06
ggtgctatggacagttcatatttgctgtccatgaggcttagtgctgtttctctgaacccgcctgtggatttcaaagcctttctgaaccttaaaaggctcaagttagaacacacaaatattactgatgaaaacatgcagattttgatctccaactgcaatgccttggagtttcttggtatcgttgattgtgggaagctcacaagattgtcgacatcgcacctttggaaccagcttaaacatttgcatgtcgagagctgccatctgcttaaagagatagagttgaatcttggcctgacgaaacttgggtacaagggcacactgataccgttgtcacctcctgggccattgctgctaacgaatgtctgcatgaagctgcaacacgctcgttcctctcttggatatatcttcaccaatcttccaagcacgctgctccatctcgagacgctgagtttgcaatgttcagaactcgagagggctattttgccagaaaatcatatcaaatttatgtatctaaagcatttgaggttgcaattgagacaccctgtgacggaaaagaagattgatcttcttgactttgcctgcctactggaagctgctcctttactgcaaaagtttgaattacatatgtggatgccccttcaccatcaacggtatcgcgaagaagctcatggcgagctacggagtcttccaccgcagcctcatgcccatctcaggcttgtacacataagtggattcatcggcatgaaagaccaattggagctgtcactgcacattctcagaaattccgccatgatcagggcgatgaaggtcgaccccaagccgctcttcgcccttccttgtatatcgatgctgtcacccttggaagggtttcagtatcttgatgggtatgaggtcgccatcatatctctgcagagaagaccacaacaatgttgtcgatgtttctgaaattcgtcgcgaggaggtcgaaacgctctcggtttgtgagctggtttatccagattgtgttcgccttacccgtaaggccaattcctcttcctgattaagatttgagccactctgaaggtattgttcatgccagtcaagctctacacaatttggacgactttggagtttggagcagctaagtcagccctgattagtttggttttggtttttggacaacttaggattgtgaatttgaagaacaactcgtatgtgttttagttccttgacggtaacttatttaacttccttttctgtatgatggttgcttcagaaaatttcatcactggaaagtgtttttgtgattggaaatggtggtcgttcaggttaacgtcctggttttttcagttcagacttcagaatgattttcttcctggagctgcttaatgcatcatttataag

SEQ ID NO: 2995 - DNA, 1248 bp, Oryza sativa
  ref <308>: DATABASE ACCESSION NUMBER: AK060773
  ref <309>: DATABASE ENTRY DATE: 2001-12-06
cttaacaaactgaatggactgctaaatgttgctgttgttaaatgtcctggtttgggagatgaaaagaaggctattctccaagatattgctattatgacaggtgcagatttctttgctagtgaccttggctggtgtcttcaaggtgctacttctgatcagctaggtatggctcagaagatcactataacaagtgatactactactatcattgcacatccttcgatgagaccagaaattgaggccagaattcagcaacttaagaaagatctagaggagacaacaagtgcctatctaaaagaaaggttttcatctcgtatcgctaaactctcaagaggtattgcagttatcaaggttggtgcagctactgaagctgaactcgaggataggaaactgagagcggaggatgcaaaaaatgcaacctttgcagccattagcgaaggcataactcctggaggtggtgtgacgtatgttcaattatcaaagtatattcccagtatcatggatcttgtagatgactctgaagagaagattggtgtaaatatagttgggaaggcacttctcgtccctgctatgacgatagctcgcaatgctggggcagatggtccagctgttgtagagaagcttcttgcgagtgaatggcgagttggatacaatgcaatgactgacaaatttgaagaccttgttgatgctggtgtggtagacccatgcagggttgcaagatgtgtgcttcaaaactctgcctctattgcaggacttattttaatgacgcaagctatgatgttcgacaaaataaagaagaaaaagtccaccattcctcaaattcctggcatcccaccattgcagataaatcaaaatgcttagatttgaactagtaacttactgtcattgaagaaaggtccatgatgcaaggcctttgtttgatcggttagatgagttgaaccaagaattggaagtggagcctctgagcagatcatcagctggagccactgggtacgataacggaggaaaagatctacttctatggttcagatatcagtaacttaaaactaactgtatactagtcagcaaaatgtctccatatccctcttctctcttttcccttggaggtgcaaggagcattttttttccttcacaattttgtaacgtagaagataggattactaatccattgcagatcccaaaatgttgaacgtgctagttttattgtacttttatatcttcatgaatgtgcatgatgatttgcttgat

SEQ ID NO: 2996 - DNA, 1545 bp, Oryza sativa
  ref <308>: DATABASE ACCESSION NUMBER: AK060774
  ref <309>: DATABASE ENTRY DATE: 2001-12-06
tgatgattaccgtgagaggaacggcaacaacaacactgatgacaagaagccgccgaccccagtgagagacatgaagccagaacgggtccttgcccgtatgcaccacctgcaacagctgctcgacaggttccttgcttgccgccccacaggtggtgccaagcacagcaggatggtgctggtcgcgctgtatcagattgtgagagagagcttccagctctatgctgatatatgtgaggtgctcgcagtgctgctggataggttctttgacatggagtatgccgagtgcgtgaaggcatttgaggcatatgccagcgccgcaaagcagattgacgagctttgtgcattctatggctggtgtaaggaaactggggtcgctaggtcatcagagtacccagaggtgcagcgtgttaccgataagttgctggagacattggaggaatttatgagggaccgagcaaagcggcccaagagcccacctcgggagcctgagcctgaacctgtaaaggaggaagagcctgagccagatatgaatgaaatcaaggcactgccagcaccagaagactacaaggagcctgaacctgagaaggtggaggaggaagtaaagccagagcccccaccgcaaccccagggtgatttagtggatcttagagaagaaactgtgactgcagatgagcaaggtaaccggcttgctctggccctcttccaagggccacctgcagctggtggaagcaatggctcatgggaggccttcccctcaaatggtggcaatgaggtgacttctgcatggcagaatcctgcagctgagcctgggaaggctgactgggaacttgcccttgtggagacagcgagcaatctgtccaagcagaaggccacaatgacaggtggtatggatccattgctactgaatggtatgtatgatcagggtgccgtgcgccagcatgtcaatgcacaagtgacaactgggagtgccagcagcgttgctctacctccggctggacagaaaacacaagtgctggctctgccagcaccagatggttcaatgcagaatgttggtggagacccgtttgcggcgtcccttagcttcccaccaccgtcctatgttcagatggcagagatggagaagaagcagcagttcttgactcaggaacagatgatgtggcagcagtaccagagggatggcatgcagggccagtcaagcttggccaagctcgatcgggcttacaacaatggcttcgcccccaacccagccatgccttatgggatgcctgcagcatataacacgaaccccatgccaatggcttacactgcaaatactgggtactactaccccacttactgagttattctttgttcatccttacagttgctgtgaattttgttctgtatcgtgatctcatagccttggggttgtccagtatcagttgttgttcccctgcctctggatcaaaccttttggtctcttatatgtaattctatttgtttggaaccaattgcggcatctaagggtggctatagttgattacataatcttatgttcttgttctt

SEQ ID NO: 2997 - DNA, 960 bp, Oryza sativa
  ref <308>: DATABASE ACCESSION NUMBER: AK060775
  ref <309>: DATABASE ENTRY DATE: 2001-12-06
ataatattaacagatctcgaaagagaatgggtgtttctgccttggacatgctgcagttccattggtgggattatgcaaaccctggatatctggatgcactaaaacacatcacagacctaaaggaggaaggtaagataaagacagtagctctgacaaacttcgatacagacaggctgcagataattctagaaaatggtatcccaattgtcagcaaccaggttcaacattctattgttgacatgcgtccgcagcgaagaatggcagaactttgccagcttactggagtaaaacttataacgtatggcacagttatgggtggtctgctgtctgagaagtttcttgacaccaatgtatctataccttttgctggacctcctctgaataccccatctttgcagaagtataagcggatggtggatgcctggggtggctggagcctgttccaggctttgcttcagacgttgaagaaagtatcattgaagcatggtgtttctatatcaactgctgctgtgagatacatactgaaccagacatctgttgcgggttcaatggtgggtgtgagactgggactctctgaacacataaaagacaccaacgccatcttctcgcttgaattagatgaagaggacatgaacagcatcactgaagcatcgaataagggaagaaatcttatggatataataggcgattgtggagacgaatacagagcataattgtgcagagagatagagagagagagaggcagagggggtagaccaatgaggcgtgtgcctgccagttttctggagttctgaaatctgatctgttttgtcatgaacgtagtgtgcagcagctatctgatcttccagtatactactactccggatcagtgtgtaaaccaacctcccaaaagaaagtggcattttataagaactgtacatacacaagacagattataatttgatatgcccattaatacgg

SEQ ID NO: 2998 - DNA, 1065 bp, Oryza sativa
  ref <308>: DATABASE ACCESSION NUMBER: AK060776
  ref <309>: DATABASE ENTRY DATE: 2001-12-06
gaacatgctatgcggtttcctttggtgggaagtgctatgcttttgtccctcttccttctattcaagtttctctcaaaagatttggtcaatactgttctcactgcctactttttcattcttggcatcgctgctctctgtgcaacattgctgccttccataaaacgatttcttccaaaagaatggaacgataatgccattgtttggcgtgctccacttttccactcgctctcggtggagtttaccagatctcaagtcgttgcatcgatcccaggatttttcttttgcatatggtatgctgcgaagaagcattggctagcaaacaacgttctggggatttctttctgcattcagggaatcgagatgctatcacttggatcattcaaaactggtgctattctcttgagcggactctttttctatgatattttctgggtcttcttcactccagttatggtcagtgttgccaagtcatttgatgctccaataaagcttctatttcctacaggtgatgctgcacgcccgttctctatgcttggccttggtgacattgtaatacctggtatatttgtggcacttgcgctgcgttttgatgtctcaagaggaattaagaaccgctattttaatagtgcatttttgggttataccgtgggtctgactgtgacaataatagtggtgaactggttccaagctgcacagcctgctctgttgtacattgttcctggtgtgattggttttgttgctgttcactgtttgtggaatggtgaagtaaagccgctccttgagtacaacgagtccaaagcggaagaggaggaagcttgtgaagaagatacagatagcaagcagaacaaaaagaaagagtagggctctaacaagtaacaatcataccttgaggactagaatattcagaaactttatgtaaggtcttcggcatctaagtaggctggatgacctttgggatacaagctcacttagaacttagaaatgattcacatgatagaatctttctggttttgagaattgtttggtctggtgagtagatgaggaatgcatcctaagtggtttagc

SEQ ID NO: 2999 - DNA, 1521 bp, Oryza sativa
  ref <308>: DATABASE ACCESSION NUMBER: AK060777
  ref <309>: DATABASE ENTRY DATE: 2001-12-06
acaaatgcccgagaccccgaccacgacgaccaccacccgcgcgagcaccgggacatcctcacatggctcctagtctgctccgccccgcctccccgtgcctcaacctcgcgccccccaccgccgacggccccggccggagccgctccgctgtgacgatcggtggttcgaggccgctcagcgtttccctgcgtgtgggaggatctagccggagggactttccgtgtaccacaatggcctcaagagatcattctggtttgactcgacagcttttagattttcaacatggtacagtagatgagatagatggggaacatgatccattcatggagttgaaagcaaggttcatggacttcaagcacaggaattgtgtggataatatttctaactatcaaaattttgctcagcagcaaacaccaaagttcatggtggttgcttgtgctgattctagggtatgtccttcaagtgttttggggtttcagcccggggaagcatttactgtccgtaatatagcaaatttggtaccaccatatcagcatggtgcttcagagactagcgctgcactggagttcgctgtcaacacactagaggtagagaatgtattagtggtaggtcacagccgttgtggtggtatccaagcactaatgagtatgaaaagtaagcaagatgattcgcaatctagaagctttatcagagattgggtgtcaattgcaaagaatgcaaggttaagtacggaagcagcagctggaaatttgaattttgaattacagtgcaaacattgtgaaaaggaatcaattaatagctcactgttgaacttgttaacatacccttggatagagaaaagggtgaatgaaggaactttgagccttcatgggggctattacaattttattgattgcacattcgagaagtggaaattagtataccgccaagggttggaaggtggaagcaagtatgccataaagaataggactacctggtcttgatcaagaggcattgcttacctgggtaaatttcactctgccccctgcagtttagcatggttttgctttgccactgtgctgtccattttcattgcactttgctccattgtggtattgacattctgcaagaacgagtcccagtatcaagtcactgttacggtgttgttggtaccattgattaacataacacttgacggccatacttggtcatgttgtatgttatcagcttcacagaggtacatgtggcactttaacagttatttgatacagtgactaggctgcagttgagcgaaaccacaatggagtgaagtgcaacagaaatgaacattatggcagcaaagtgaaagtttgtcaaactgccggggacaaagtgaattttgtccaaatatccctgtattattttctgcttagaagcatcatattaattcaataagctgcaaactcatattcataccaaaaacatgtacgatcttgccacatttggcaaattattgtgttgtatcatttatcgtgtaattgcaaaaataagatagagctttgt

SEQ ID NO: 3000 - DNA, 1289 bp, Oryza sativa
  ref <308>: DATABASE ACCESSION NUMBER: AK060778
  ref <309>: DATABASE ENTRY DATE: 2001-12-06
acccgcgatagcatagcaacaccgtaattccgttccgttccgttccgttccgtcgccccccccggccggcgagggcgagggcgatgtccttcttcttccgcatggcgtcgcggctgcggccgtcgacgccggaggaggtggtccgctccatcaaggactccttccaggccctccacaccaagaacggcgccagggctctagaagaggttgagaaaaacctctcgtcattgaggcaaatgctgtctggtgatggagaagcagaaccaaatcaagaacaagtcttgcaaataacccttgagatttgcaaggaggatgtcctttccctctttgttcagaatctgccttcgcttggttggggagtacgaaaagatctggttcactgctggtgcattttgctcaggcagaagtttgatgagagctactgctgtgtgaagtacattgagaaccatctggagcttttagatttcctagttggctgctacaagaacttggacgttgcactgaattgcgggaacatgttgagagaatgcataaaatacccaacacttacaaaatacatattggattccagtagcttcgaactgttttttgagtatgtggagctgccaaacttcgatattgcttctgatgctctgaacaccttcaaggatctgcttaccaaacatgaaacagttgttgctgagttcttgagttcccactacgagcagttctttgaactctacacaaggctcttaacatcacctaattatgtaacaagaagacaatcagtgaagttcctttcggaatttctgttggaggctccaaacgctcgaataatgaagcgttatattacggaagttcgtttcttaaatattatgattactctactgaaggattcaagcaaaaatatcagaatatgcgccttccatgtttttaaggtttttgttgccaatccgaacaagcctcgcagtatcatcgaggctttgatcgaaaatcgcagagaactgctgaagctactccaaaatcttcctacaagtaaaggcgaagatgaacttgatgaggagaggaatctaatcattcaggggattcagaagctggcctgctcatcagcatagacacttgaattaatggaatagctggtttagggaaactgcctttactgaaaatacatgacagggtgtgcctataagaattgcgtctttttggagtttgaaatgaaatagttgcaaatagatgcacaatacaaaatgagtgcaacgaattttgttctttagggacagtactaatgttgatatgtttttttctctgtt

SEQ ID NO: 3001 - DNA, 1998 bp, Oryza sativa
  ref <308>: DATABASE ACCESSION NUMBER: AK060779
  ref <309>: DATABASE ENTRY DATE: 2001-12-06
tagtagaggattgaatgttggtggaggtccagcatttagtagtagcctgaatattggtggtaccattcaaggcttatcctcaaacctgggtgctggtggtagtcgtaattctgttcctgggatgtcagtatctccatctttgggaaatttgggtcctaggatcactggttctgtaggaaatattgtgggtggaagtaacattggaaggaatataagctctggtggattatctgtgccaagcatagcatcacgcatgaatttgagtggcaatgttggcagtggcggtctgaatgtccaaggatccagcaggatgatgaatggcattcttcagcaaggatcacctcaaatgctgaacatgatggggagtttatatccaacatctggaggttctttatctcagaaccaaatacaaggaggaaataattcccttggttctatggggatgctgcatgatgccagtgacggtgctccatttgacatgagtgattttccccagctgactggtcgacctagttctgcgggtggtccacaaggacaatatggctccctacggaagcaaggagttggtgttaacaccattgttcagcaaaaccaggaattcagcattcaaaatgaagacttcccggctttacctggatacaaaggcaacactacagattatgctatggagttgcatcacaaggaacaacttcatgataatgtacctgttatgcaagcgcaacaatatccgatgtcaagatcagttggctttaacttaggaagtaactacccaccaaatcgtcagcaacaccagcaaggtgctaattcagttcagaatgctggtcccccaaatatcggactaagacccctaaattctccaaatcaaacttctagtttgggatcatatgagcaacttatccagcaataccagcaacctcaggctcaaaatcctttcagattgcagcaggtgtcttcagctacccagtcatatagggatcagagtctaaagtccatccaggggggccaaacaccatctgatccatatggcttgatgggattgctaggagttatcaggatgaatgatgttgacttatcatctcttgctttaggaatagatttgacaacattgggtttaaacttgaactcaccagacaatctgtacaagacatttggctctccatggtcaaacgagccagcaaaaggagaacctgagtttcatactccagcttgctactccgctgagcaacctccaccactacaacctatacattttcagaaattccagacgccaacactgttttacatcttctatagcatgccaagggatgaagctcagctatgtgctgctagtgagctgtatactcgaggatggttctaccataaagaagtgcgtgtgtggctcaccagaattccaaatgttgagcctctggtcaaaacacctcattatgaacgaggatcttatggttgctttgatccaaacaactgggagacaatccgcaaggacaactttgttctccattatgatcaaatagagaagaagccagctatcccttcatcccaaaacgttaggtgaaacatttcttatacctcctggctcaagttttatccttttttctcaaggggaggaagaaatttgtgcttacgctaagagcagtgtcatgacctaactctgagtgagaacgcagggccatgccgatctgcagaggggaggctgcaaaacaaaagcgggaatgcctgcttaacccttgtaattagattatagtggtgaagttttcctttaatcgtttgtagattgcactctcagcaacatctccaggtgaccaacttttaggaatagcaagtcttaaacatgcttttttaccgttaaagctttcggtgtcgaaacgtagttggcaaatgcacatatcggcgttggtgtttgcccttttaccttaaaacaaagtacaatgtgggcattaggcgccagattgatttgcttaattttggcagtcttaaaacctaggcatgcttaatttgctt

SEQ ID NO: 3002 - DNA, 1691 bp, Oryza sativa
  ref <308>: DATABASE ACCESSION NUMBER: AK060780
  ref <309>: DATABASE ENTRY DATE: 2001-12-06
acgctgtcgacacagcttccgccgcatccctcccctcgccgtcgcaaaatcccccccgccgctcgcgccgccgccgccgagagcgagacccgcacgaggagccaagcatctctgcgttctacagctccgggccaccggcgatgaagctcgtctaccgcaacctcgcccgcaacggccccggctccgtcaagatcgatttattgtgaaagcgcagctggtgccggaggaggaggacgacctgtggcatgcctacaaccttattgttccgggggataccctccagtccgtcactgtgaggaaagttctgagagagatggcatctggaggacgtgatgctgagcgtgtgaggttaaagttggaaattgtagtcgagtctgtagattatgataaggagggatctgtcttgcgtgtacgtggaaaaaatataactgagaacgatcatgtgaagattggacagtttcatactgtggagcttgagctgaagagacaatttactttgacgaaggaactttgggattggttagctcttgataccatccaacaagcatgtgacccaactgcaagtgctgatctagcagttattctcatgcaagaaggacttgcacatttgttcctcattggtagaagcataacagtaaccagagcacgtattgaaacatctattcctcggaagcatggccctgcgattgctggttatgagtcggtatggaaactggttctgatattgtgtaatctaattgttctatctattcccaactgactttgttttgctcttttgtaggccctcaagaagttctttgaacatgttttgcaagtaaatgaaaaatgtttcctcaaggaaatgataatattaatgaaaccaatttggactgatgcattacttaatttgcctacaggctttcctgaagcatattgattttgaagtagtccaatgtgctgtaattgcaagcccaggttttactaaggatcagttccgcgattatatgcatcttgaagctgcacggcgagacttaagattaataattgagaacaaacagcgcattgttcttgcacatgcaccttcaggttacaagcatagcctgaaggaagttttggatagcccaagtgtgatgacactaataaaagatacaaaggcggcgcaggaggtccaagctttgaaggacttcttcaacatgcttacaaatgtaaagctccttgaagaaaaactaccttctaacagttggattgaaatatcctactccatccgtttcatattgattcagctcgagcttgttatggacctaagcatgttgagattgcaaatgaacgtcttgctatccaaactcttttaataacagataatttgtttcggaactctgacattgcaacgaggcaaaattatgtgcgcttggttgaatcggtaaaaaaattcggtggcacagtgcacatcttttcttcaatgcatgtctctggtgaacagttggcgcagttgacaggaatcgcagctatacttcgatttcccttgccagatttagaggacattgagatgtgataattccaccgttcagaattggcaatatgctaacttgtaattcatgtgtaatcctattcagttgatttgatataggtaactcttaagaaatctgaaccacagtatatcctagctgtaaatggtttgcatgccatatttgttgattgtttttttacttaac

SEQ ID NO: 3003 - DNA, 1318 bp, Oryza sativa
  ref <308>: DATABASE ACCESSION NUMBER: AK060781
  ref <309>: DATABASE ENTRY DATE: 2001-12-06
agaacgagcttcagcgaaagtttcctcgcatattgggtcatgaggcagcaggggtggtggagagcgtgggagagggtgtggaggatcttgcccctggagatcatgttgtccccatcttcaccggcgagtgtggtgcgtgcacctactgcgagtccagcaagagcaacctatgcaaaacctaccgtgtcaacccattcaagagcaccatggtcaccgatggtggcacgaggttcaccatgatcgaccgctcctccggtgcacgcaacccggtctaccattttctcaacacttccacctttgctgagtacactgtgattgactccgcttgcgctgtcaagatcaaccctaaggctcccttggagaagatgagtctcctcagctgtggggtctccacaggagtgggagctgcatggaacactgcaaacgtctccaaggggtccacagtggcaatatttgggcttggtgccattggtcttgcggttgccgaaggtgccagattaagaggagcatctcgaatcatcggagttgacataaaccctgaaaaattctccaaaggcaaagagatgggcatcactgacttcatcaactcgaaggcatctggcaagcctgtccacgaggttatcatggagatgacagatggcggtgtcgactacagcttcgagtgcaccggcatcaccgatgttctacgggaggccttcgtttccacacatgatggatggggcctgaccgttgtgctggggatccatgcaacgcccaggatgctgccgctgcatccaatggagttatttgacggccgtcggatcactggctgcgtttttggtgacttcaagggaaagtcccagctgcctgaaatcgtggagaagtgcatgcagggtgagattaacataaattttgatgggttcataacacaagagttgcccttcgccgacatcaacaaagctttccagctgctggaagaggggaagtcactcagatgtctgctccatgtctgatgaaacttgtggattgtaaatttgaatacacaataaatgaatcataaatgttttcgcggtttcaaggtgtataattttcatatgcatgtatgttttgtacataaaatgggttgaacttcgttaaagaaaagacaaattgttaattagtagaatgcagtattaatatttgtaacaggtgagtgtgggtgtgcagtcgcgagaattgagcacacgattggttacatacatgctcgagttgctagtcagtagggccacacaccatttttatctattacatacgagttacagtctaattttattatagttacatataaatgttctctacc

SEQ ID NO: 3004 - DNA, 1739 bp, Oryza sativa
  ref <308>: DATABASE ACCESSION NUMBER: AK060782
  ref <309>: DATABASE ENTRY DATE: 2001-12-06
gtgagtgagatactgaagttttgtgatctgcagtcagcagggctcaaggctactaacagtttcgatgcgttccatattgcggcgaagcagggccatctggatgttttgaaggagctcttacaagcatttccagcattagctatgacaacaaattccgtaaatgccactgctttggatactgctgccactcagggccatattgatattgtcaatcttctgctggaaacagatgcaagcctagccagaatagctagaaataatggcaaaacagttttgcattcagcagcaagaatgggtcatgtggaggtggtaacagcattgttaaataaagatccagggattggttttagaacagataagaaaggacaaacagcactgcacatggcttcgaaaagccaaaatgctgaaattctgcttgaattgttgaagcctgatctctcagttatccatgtggaagataacaaagggaacagagcattgcatgttgcaactcggaagggcaacaccgttatagtccagactctaatatcagtcaaagagatcgtaatcaatgcagttaatagagcaggagagactgcttttgctattgcagagaaactaggtaatgaagaactttctaacatcctgagagaggttggtggtgaaactgcaaaagagcaagtaaaccctccgaattcagcaaagcagcttaagaagacagttagcgacattaggcatgacgtccaatctgggatcaagcaaacacgtcagaccaagatgcaattccaaaaaatcaagaagaggattcaaaagcttcacattggtgggctaaacaatgccatcaactccaatactgttgttgcggtgcttattgccacagttgcctttgcagccatatttactatccctggtaattttctggaagatatgaaagatccacatgatcccaacatgaccttagggcaagcatttgtagcaagcaatccggcatttataatcttcttggtatttgatgccttggctctttttatctcgcttgccgtcgtcgttgtccagacctctctaattgttgttgagcagaaagccaagaagaagatggtctttgtgatgaacaagctgatgtggatggcatgcctttgcatctcagcagccttcatagcactaacatatgtcgtcgtgggccgtgatgatcggtggctagcttggtgtacaatggcaatcggcaccgcgatcatgctggccacccttgggtccatgtgctactgcattatcgctcacaggatggaggagaagaacatgaagaagatcaggaggtcatccaccagccagtcgtggtccatatcagtcgattcggatacagagctactgaacaacgaatacaagaagatctatgcactttaggataacaatataacctgtggtcgagtcttgtatatatcgaagcccgtttgcctgatgaaactccatggcattcagcggagtttgactcacaaagtatatttaggcctagaacatggcagctttgtgcaactgaagcctccttttgtgtagagaaaggaggccatccatctcactgcatttgctactatatagattccaggtgatactttgaagcagccacttttttgtaggcatcataggagtattggtaaagcagaatgtactcttaatgctcaccaatgtgtatctgtggatgatgataatgaaaaaccatgcaattatactagtatagatagtggaataaactgccattttctgtc

SEQ ID NO: 3005 - DNA, 2104 bp, Oryza sativa
  ref <308>: DATABASE ACCESSION NUMBER: AK104336
  ref <309>: DATABASE ENTRY DATE: 2002-08-28
atggccagatggacacgaccaccagtccaccacctcctcctctacttcttcttctcacgtctctctctctgaatccagatttttttttgttggttccatcctctctcctgcttcagatcagggtggccatctcgcttgaatctgcagggtgagctgaggaggatccactgaggtggcggcggtcgagatggggctggatttgggagctctcgttctcaaatccggcgggctgttggtgtcggactacgactcgatcgtcgcgatcaacatcttcgtggcgctgctgtgcagctgcattgtgatcgggcacctgctggaagggaaccggtgggtcaatgaatccatcaccgcgcttgtcatggggctgatcactggaggtgtgattctgctcgtcagtggtgggaagaactcgcacattcttgtgttcagtgaggacctcttcttcatttatttgcttccaccgatcatctttaatgctgggtttcaagtaaagaaaaaacaattcttccgcaattttatgacaattattttatttggtgctgtggggacattgatatcctttgtgataatctctctaggtgccatgacattgttcaaaaaacttgatgttggtccactccagcttggggactatcttgcaattggggctatcttctcagcaacagattctgtttgcaccttacaggtgcttaaccaagacgaaacacccctactctatagtctggtttttggtgaaggggttgtcaatgatgctacatctgttgtgctctttaatgcaattgaagacattgatattgctaattttgatagccttgttctactagcgttcataggaaattttctctacctattcttcaccagtacccttcttggagtagttgctgggttgcttagtgcctatattattaagaaactatgttttgccagacactcaactgacagagaagttgctatcatgatactcatggcgtacctttcatatatgctgtcgatgctgctagatctgagtggcattctcactgtgttcttctctggaatagtaatgtcacattacacttggcataatgtgacagaaagctctaggattactaccaagcacacttttgctactttatctttcattgctgaaatttttctatttctctatgttgggatagatgcactggacattgaaaaatggaaattagctagcagcagtcctaaaaaaccaattgctttaagtgcaactatattgggcttggttatggttggaagagcagcatttgtattccctttgtctttcttatccaatctaagtaaaagagagacacgcccaaagatctccttcaagcagcaagtaatcatatggtgggcaggtctcatgagaggagcagtatcaatagcacttgcctatcacaagttcaccgcatctggtcatactgaattgcgaatcaatgctatcatgatcaccagcacagtcattgttgttctgttcagcacaatggtttttggtttttttaccaagcctctcctcaatctcctcatcccaccaaggcctgacatagcagctgatctctcaagccagtcaatcatagacccacttcttggaagcctgctggggtctgacttcgatgtaggccagccctcccctcagaacaaccttcagcttcttctcaccattcagactcgctccgttcatcgcgtgtggcgcaagtttgatgatagattcatgcgcccgatgttcgggggccgaggcttcgttcctttcgtgcctggttcgccagtggagcggagcatccatggatctcaactgggcactgtgactgaggctgaacatagctgagtttgaggttcagaaggtgcaagcatttctgtaaattttcagagaccactcaattttgttccaggatacatttgtgtactgttgtcatatcttgtgcagatagtttgtgtagaacgacgtatttaagctggtataggttcatattggaagccattattccaagtgtataattcatctgtaaatttacatgttgtttgtagaggataaacaaatgcattgtattggatttgtagaaagtactccctctttgttaaatttaaatgaaggtgccacagttttcat

SEQ ID NO: 3006 - DNA, 1667 bp, Oryza sativa
  ref <308>: DATABASE ACCESSION NUMBER: AK060783
  ref <309>: DATABASE ENTRY DATE: 2001-12-06
gacgaccgcgcgcactctgccgccgccgattcattcttgattgccctgtgaggctgcataaaggctccatcataatccaagaacttgttggaggctcctaaagaataaccaagttggtcttgctcaggtggttagctggtccggtagggctggcttgaaaagagcaaccacggctccaaagaaaggatcccgtgttgcactaagaaggggaacacaatgtgcccatcgctttcctaagtttcttcttgcgtccccttctttccacggtggtcgcggtgccctcccatctgcaggggggcatccttctgatttgacctaccttgccggtggtggtgctgttcaagtctgaattaggctttagcattgtagatatttttttagtagtagtacagatattaagcattgtaagtatggtatcaaccacggagttcaaaggtgaatattcgttgccaagcaagaaatctcctcttgatcaatttgaaggtgtgaagacacatctttaccgtctcggtgcagaacatgaaaatggtaccctcaaaagctttgcatatactgatcagggcagcccaagtttgcttgatacaatcattctttctcagtgggaggattatgcttggaagggccattttggatatgacgtaactgcttgcaatctcaaggttgttgaaggtggatggagttttgttgttcagctgaatgataagtggaattcatgtgtcctcaaggaacatgacaagttccttgaacctgttggatgcctgaagccaaactgtatgaatagttatgatgaattgcttctgtgcattgctcaaggtgacaaggatatacctgaagttgttccttcaacaaaaccaccaaaggatggactactgctgattgcaaatgcatatcctgttgaatatggtcatatcttcttggtcccaagcgcaaccaatcagctatccttcttctgggacaaaaggatgtttagtctgattgcaaggattgcctctgaagtaaatagtgcagcattccgggttttctttgatagttgcacatccacgatgccagaccacatgttttttcaggcttgttacttcgcaaacccgttgccagtggagtctgcatcaactgttgcaatttaccacggcaaagccacatcagccgttcacctgtatgaaatagttgattatcctatgaaggctcttgtgttaactggcaaggacgtaaacacgcttgccaattttgtcagtgaagtatctttaactctgcatgacaataatactgcgtacagcctgctgatctccaacaatggcacaaaggttttcttgtttccacaggtgaagaatctggctactggatgttgtctttctgcctgggagtgcagtggctacttcatttatcgcgccaagtacgattttgacagagcttctgagaatgaaatttccaacagaatggcgtcagtcacactccaagatggcgcattcgagaacctgaagaatctttgctgcgctgttgctgatgatcttgttatgtaaaagcttgtgaaagaatcaaaaccacaataataaaaccgtgtgagggtggtccacttgttatgtctatagcattttaatgcatggatgatggtaattgaacctatgtctgaacatttggattgatcaatggagcatgctgttctcatggtg

SEQ ID NO: 3007 - DNA, 1680 bp, Oryza sativa
  ref <308>: DATABASE ACCESSION NUMBER: AK060784
  ref <309>: DATABASE ENTRY DATE: 2001-12-06
ttacgatgcaaaggcagacttgtggagtgttggtgttattctttttcagctagtcacagggaaattgcctttttatggggctaatctattcaagctgaggcaaaacatccatgaatctaacggcgttaagttccctaaagaaatcaaggatgatttacatcctgatttcattgacctgtgccgagggctcctacgtcttgatccaaagaagagaatttcttttgaggaattcttcaatcacaagtttttgtcaacaactgggtcgaccctttactctggtggaagcattcaaaggaaaagagagattagcagtgagcccaatcatcctgctgatttattaagggatacatgccagatcatttcttcggatgtcctgaaagataagtctgaaagcgtggattctagaaatttgcaagcatttgattcatgggaatggattgaacgagaatatgtacttgttcaggcgaactctacttccacggaaattttgtcttcacttgaaaagtcaatgaaggatggtacaggtgcaaaacctgccagctatgataggtccactgttaaacggtctgcttggaaccaaaacagaaattcagtcagtagaggggttgctataaaaagcaatggatgcaccccattgtctacttcccatgaatcaacagctgcagaaaatctgctaaatccaccttattgttacacaaggcttcaactccttaaccagtatattgttgttcttacagaacttgcagaggagaagctttttaaagggctggacttggaggcactatctgttgaacttataatattagctatttggaacgaggcccttaatgcatgtagtttatccacggatgctacacatgatggattttttttgacccaagctcatgtcaatttcctgcctaagaatgaccatcgtccatctcgaaatgtagtacaaggattggatttcaccaggctcgtttctgtctgttcctgggctgaaagtggctttatcaaggcatatgaccgtgcagagaagatatcacataggttgcgggacaacaatgataacaccgagatgccagatgcagtggagatcatattccagacagctttaatatatggaacaactggtgctgcaaaggaagttttgggataccaaaatagatcggtggcgctatactcaaaagcaatcatcttgctcacatttgtattgcaagaagcaactaatttgccactgaatccgccgttttccctttcatcatctgatcagcaacgtatccataggtacatagctaatttgaggagccatctatgcagtgcccagctgaccggacaacaggagagatatgtccagaactaacttttacatgggaaatattggtgcacaaagaagtgaaagttaaattgattccgtggtaaacttcaagcaagctttgttttgttccccacgagtattagtctttgcctccaactttttttttgtctaggagatgcttacttgggggaacttttgtaatgttttgtttgcatgatcatagtccatgtgttctttttgtatataatatataataacacttctaagttgtacagttatttgccatagaactgaaatgacctcttggctctgtatataagtagcatgtaaaaagagcaaatagttttttatttttccaagtcttaaaactgctttgcctactt

SEQ ID NO: 3008 - DNA, 1090 bp, Oryza sativa
  ref <308>: DATABASE ACCESSION NUMBER: AK060785
  ref <309>: DATABASE ENTRY DATE: 2001-12-06
ttaatgttactggaggtggcttccagtgcttcccgaagttagatgggcagatgctctcgcttgcattccgtttcttaagggcaagaactccagaagaaagagctctggtagatttggaaacccattatacaaaggaatatcttgatgagaaagttggatcatgcacgaggagaacaatcctctatcaagaatatgtgaagggcatatcatcgacagggatgcagtctaactgtgggtttgaaggtcaagttaatgcatgctggactcacaatatgacaactaaagaactagatacaattcggtctgccggttttctagtttcagttattcatgggaggtctgacattattgcgcaattatgtcatgcgagacgacttgcagaaaggcttattcctgttgctagaatggtcgaacttcatggtgcgcatctagtaagccatgaaagaccagaggaggtcaacaatgcactaatggaattaataaaagccacaaaatctatgatgaaacctgaggaatggtcatcccagccagagaattcatcagaaaccggggctcttatttctgcaagacctgtttccgtcacaatacgaacagatgatgggggaaatgccgcaatagcagtctataacttacttgccaagctgcaactaagctttctttatgtcataggagtgatactgatggggtttgagcatatgaggaacattgtaaaagtaatgaagccagtaagggtcgcagcaatcgaatcataagaaacaaaactcatgtaaattactctcagagccgtcgaggagacctggtattttcatgtctcctcagtactgtggagatgatggttttagaatagcatctccgaagacttcctgagaaaacttctgctctaagcagaataagtgaacaatacggaagaaaattgatgaggtatttggtgcgcgccttggacagaagcgtcccagggcagaaatgcacaaactgatgtacccgtatgagtgtaaatgttgttaccgtatcacggccttatgctgtcgccattcttttgtatcagcatgaaatgtgattattcccatcaataataaacctggttccctgc

SEQ ID NO: 3009 - DNA, 2366 bp, Oryza sativa
  ref <308>: DATABASE ACCESSION NUMBER: AK060786
  ref <309>: DATABASE ENTRY DATE: 2001-12-06
accagccgcgttgggtgcaaaaccacaaccgccaacatcttctaactcccctcacggctctccctctccccgcacgcacaacaccggtgaacccctacgtactactgagctgagctgagaggacgaagaagaagatcaagctcgaggggcttgcgatcatgggtgccgcattcttgtcgtcgtggccatgggataacctcggcgcgtacaagtatgtgttgtacgcgccgctggtggggaaggcggtggcggggcgggcgtgggagcgggcgagccccgaccactggctgctgctgctgctcgtcctcttcggcgtcagggccttgacctaccagctctggagctcgttcagcaacatgctcttcgccacccgccgccgccgcatcgtccgcgacggcgtcgacttcggccagatcgacagggagtgggactgggacaacttcttgatactgcaggtgcacatggcggcggcggcgttctacgcgttcccgtcgctgcggcacctcccgctgtgggacgccaggggcctcgccgtcgccgcgctcctccacgtcgccgccaccgagcccctgttctacgccgcgcacagggcgttccaccgcggccacctcttctcctgctaccacttgcaacaccactccgccaaggtgccccagccattcacagcggggttcgcgacgccgctggagcagctggtgctgggggcgctcatggcggtgccgctggcggcggcgtgcgcggcggggcacggctccgtcgcgctggccttcgcctacgtgctgggtttcgacaacctccgcgccatgggccactgcaacgtcgaggtgttccccggcggcctcttccagtcgctccccgtcctcaaataccttatctacaccccaacgtaccacacgatccatcacaccaaggaggatgccaacttctgcctgttcatgccgctgttcgacctcatcggtggcaccctcgacgcccagtcctgggagatgcagaagaaaaccagcgcaggggtggacgaggtgccggagttcgtgttcctggcgcacgtggtggacgtgatgcagtcgctgcacgtgccgttcgtgctgcggacgttcgcgtcgacgcccttctcggtgcagccgttcctgctgcccatgtggccgttcgcgttcctcgtcatgctcatgatgtgggcgtggtccaagaccttcgtcatctcctgctaccgcctccgcggccgcctccaccagatgtgggccgtcccccgctacggcttccactacttcctgccgttcgccaaggacggcatcaacaaccagatcgagctcgccatcctcagggcggacaagatgggcgccaaggtggtcagcctcgccgctctcaacaagaatgaggcgctgaacggtggcgggacgctgttcgtgaacaagcacccggggctccgggtgcgcgtcgtccacggcaacacgctgacggcggcggtgatcctcaacgagatcccgcagggcaccaccgaggtgttcatgaccggcgccacgtccaagctcggccgcgccatcgccctctacctctgcaggaagaaagtccgcgtcatgatgatgacgctgtcgacggagagattccagaagatacagagggaggcgacgccggagcgccagcagtacctggtgcaggtgaccaagtacaggtcggcgcagcactgcaagacgtggatcgtcggcaagtggctgtcgccgagggagcagcgttgggcgccgccggggacgcacttccaccagttcgtcgtccccccaatcatcggcttccgccgcgactgcacctacggcaagctcgccgccatgcgcctccccaaggacgtccagggcctcggcgcctgcgagtactcgctggagcgcggggtggtgcacgcgtgccacgccggaggcgtggtgcacttcctggaggggtacacgcaccacgaggtgggcgccatcgacgtggaccgcatcgacgtcgtgtgggaggcggcgctcaggcacggcctccggcctgtctgatcggaacccgcgccgttcgtctcgtcgatccaacggccgcggcgcgttctgggcccccaccaaaccgggcccaagccctcgtcgtcgtcgtcatcgtcgtcgttcttctctttctcctttcccttttcacaggttaatttaaaaacgtcgtcgtcgtcgtcgtcatggtcatcgatcaccatcaaattaaatcattctcgtgtggctcctgactgttcaatttgctgccacaccggcaaatcctccccccgcaccgtgttttgatttgtctgcacgtatatgtataagtatatatactttgatttggcgttggatacataaagagatgagctgtatgaacgtgtagat

SEQ ID NO: 3010 - DNA, 2349 bp, Oryza sativa
  ref <308>: DATABASE ACCESSION NUMBER: AK104337
  ref <309>: DATABASE ENTRY DATE: 2002-08-28
ccaatacatatcttggcttcttggctggactccagtaaccgaggtcgcgtgcctccgctcgctcgctcgctcatcgtcgtcgtcttcctcggggcctctctcgtcgtggagcggaggcgtgccgcgtagcagggggaattcaactgaggtgagaaatgggggcaaaggactccaagccctcatacagctattcttcttcatatgatcatgggaattcatcatcgggatataactcgagataccctgcataccctgcaaatgcatcttccagtcagaacacaaggtatgctccttctatggagaactatgtgcagccagaaacgcatgccaggttgcagaggaagtactcgaggattggtgatgactaccgctctctgaatcaagtgactgaggctttggcacaagcaggtcttgaatcatcaaatcttattgtaggcattgattttacaaagagcaatgaatggacaggtaaactttccttcaatcgccgatgtctgcatgatattggaaacactccaaatccatatgagcaagcaatatctattattggaaggacactttcagcttttgatgaagataatttgattccttgctttggatttggtgacgcatcaactcatgatcaggaggtattcagcttttatccagagaaccgcccatgcaacggatttgaagaggcattagaaagatacagagaaattgttccgactcttcgattagctggaccaacatcttttgccccgatgattgaaacagcaattggtattgtagacagcactggtggtcagtatcatgttcttctgataatagccgatggacaggttactcgaagtgttgatacacagtctgggcagttaagcccgcaggagcgtgatacgattgatgctatagtaaaagctagccagttccccttgtctattgttcttgttggggtgggtgatggaccatgggacatgatgcatcagtttgatgacaatatacctgctcgctcatttgacaatttccagtttgtgaatttcacggacatcatgtcaaagagcatagcagctgacaggaaggaggcagaatttgcactatccgccttgatggaaatcccaacacaatacaaggcaacacttgatctccaacttctaggccgtcgccaaagaatacagccaagaattcctctgccgccacctatgaggaatgcttattcgaggtctactagctttgaccaacattctggtgtttattcacgatctagtagcttcggcccacaaacaagtggctttcagcaatctgaaagcttcaaacagagacagcctgtggctaccactgcacctgacacttatacctcggaaagttctttagaaggaagacttgtaagtatttttgtttatattcacaccatgttgaatagataaagtttaagatatatactgcaacactgtagcattggtaaaataaagtttaagctatatactgcaagactacattggtgtcactatcgtacaccaccaacaaatagtctcccttttattttgttcgtactgtggcatttcgggaggctaattgaaacaggggaagttgcattgcattgctctatctgttctgaccaccctgcctgcgttcatttggcttattacttatttcacggatgccctttatgaaaaaaaaaatatcgtgccttcaaatggcccatttgatcttgatctgataactacattatgctgaatattgctattgcatttcacattcttatgtcatttgggcatactgttaatccgcagatcatggaaagttcctacacctctagtgttaagtttttatgtaccatcaaatttcgtgctaaaccctgagaatcttactggattacaaactaaatgcagctttttttttttgtgtgtggtttcagttgtgcgctatctgtatggataaatcaaaggatcttgcatttggatgtggacatcagacctgttatgaatgcgggaagaatttggtgcgctgccctatgtgccagcagcatataaccacaaggatcaggctgtactgagaaaacaaaaatggatatcctgaagtttctgaagcctgcagaaacagaatctccaacatcagaagaaactcctgtgcaaaatttatgaaccagcctaaattgtactgttctttcgtcttgtaattggtggtttactattattattgcagtgagaaatgtttaggcagatagtgatccatataaaaagctaaggcacacactgtagtattaactacagtagttatgtgaagaagaggtacactaaataatgtacagtaattagcttctctattatacattctcctttctttcccttggtaaataagataaaaggttgc

SEQ ID NO: 3011 - DNA, 1741 bp, Oryza sativa
  ref <308>: DATABASE ACCESSION NUMBER: AK060787
  ref <309>: DATABASE ENTRY DATE: 2001-12-06
ttgcaagtgatcttcagcgtgagtatggactatgcctaaattactctcaggcttggcgtggaagatcaattgctcaaaaggaacttcatagcacacacgatgaggtaaccagtcagctaccttggttttgtggacggatcatgcagacaaaccctcaaagtgtggccactgtagtacctatggaagattcaaaatttcgtttgtttgttgcattccatgcatcgcttcatggttttgagcatgggtgcagaccattactttttcttgatgtaatatctgcaaaaccaaataagcagtggaagctacttactgccacttctgttgatagtgaaggtgatgtgttcccagttgcatttgctgtagtggatgatgagagcagtgaacactggcattggtttcttgagcaacttaaatcttctgtgtcagcttcccgtgccataacattcatatcgaatggagaaaatggactatgggatgaagtgcctttggttttccctgacagtcaccacggatactgtgtggactatcttattgaagaatttaagacacaattggatgatgcatggaccgaagaagcaagagatgtcatggttgagcatcttaagaaggccatatatgcatgcacagttgacgagttcaatcagtatattgaactaatcaaaggtgaatctgacaagcttgctgaatggcttctggagattaaacccgagcgatggtcagatgcctttttcaaagggtcaaggcatgggcagtattcatgcaattttcctagcactattgttgagtggatccccaccagatacgagctttcaattgtccagttagttgacatgataagatgcaagctcatggagatgatgtacacacgcagggagtcttctaatgcgtgggctgagttattaacacctgcagctaatcagaaattgcaggaagaagtgagcaaagcccacaccctgaacgtcatcccttctgaaagtaatgaaaatggcaatgtgttcaaggtgtgtgatgattctgttaatgttgtcaatattgatgcatgggagtgtacctgccgaaagtggcatatttctgggttgccatgcatgcatgcaattgcagtaatagagcggattggacactgcccttacgattactgtgtgaagtatttcagaacagaatgctaccgcttgacctactccatgtcgataaatccaatacccgatgttatgctgcctcctgctatattaagtgatcaatctcaaagtccagtaacacatgcaaccccaataagaacccgacgacgggttggcaggccaaaggagaagccggcagacccacgcatcgcaattaaaagggcagtgcggtgcagcaggtgccagggttatggccacaataaagcaacctgcaaagttcctctgagcacatagtctacccatgggttcagttctcctatgtacatttaggtggagagttgctcttgtttgctgtaatacgagtgatgctatttctttataactcggtacatgcatcagtcattgattctagctctaaattgctttgtatttgcttgctttgttaggctaacatatttggtcgtaaaatcgcacattgtaatggacgcaatagagagacttgggaggtttgctgttatgtaatgctgtccaatttgatctggtttcccgttctagctattgtgtgccaatctgatcatctcaactctcaggcaaggaaaggaatatatatagactgtagttacttg

SEQ ID NO: 3012 - DNA, 1325 bp, Oryza sativa
  ref <308>: DATABASE ACCESSION NUMBER: AK060788
  ref <309>: DATABASE ENTRY DATE: 2001-12-06
aatcagacaatcgcaaagacttaacatccatccgtgaggaaatccccgttgcacttaggggagcaactgatccatatggcttggtgttagcttctctagaagacttctattttggagacaatcttatattggatggcaaaaaggatggaaaccttctgggtgtacggaggacgtgcctcatgttgatggaatcacttgctcagctgcaaactgatgctactactggtttcatatcggaaggtcaagtgcttactgcaagtatcaaggagcgtgcaaaaaagattgctcttgagtggaaatccaagttggatagccttgactttgatgctagcaatgggaactgcctggaagcacatgcgtttcttcaactcctggctacctttggtatatttgctgaatttgcacaagatgagctgtgtaagctacttccctcagtcagtcgtcgtcgtcagacacctgagctttgtagaatacttggattgtcccagaacatgccaggtgtcattggagttctggttgaaaatgggagaactattgatgcaattaatttggcttatgcatttgagctgactaatcagtttgaaccggtggaattactgaaagcctatctacaggaggtcaagagtgtgccacatttcaagactggaaagatatctctgcaagtacagaatgaaatgaatgaacgagagctgtctgccttgaaagctgctattaagtgtatcgaggagcacaaacttgatgagaaatatccgattgacctgcttcagaaaagagttatccagctagagaaagctaaggcagacaagaggagggctgttgaagctgcaaagccacagtctaagaggcctcgtgccaatggatccgtatatgcgccacatactagctttcctgacaaaagcttctaccaggctgctccgccgcagaggcattcctacccttacgagaggcagtatgtgtatggtgctgaggcccatcaccatcccacaatgataagctcagctccctatggcatctcacctgcccacacaacatattatggtaatggctatcaggttcagtaccaggtaccatatatccactgatggagagagcgtaatgtgctctttcctaactatgtactagcttttaacctgctgctactatgtgctgtagttgtatcaatccactagctagactgcctagcttaaattagttcgaccactcttgtgtgtgctgagtggccagtgtgaaaatctgttaatttccctcacgacttatgacataatttacttctaatgtctagttaaaataatttgcttttgtttaatatatagcctatggcatat

SEQ ID NO: 3013 - DNA, 1349 bp, Oryza sativa
  ref <308>: DATABASE ACCESSION NUMBER: AK060789
  ref <309>: DATABASE ENTRY DATE: 2001-12-06
gcaggaggcagaggtcgagctgagagtgatcgatctttgttagctagagtgttgagcaatggcgtccaagctgggtatggttgtgctactgatctcgggcctctttgctgcccgttgcgcggccgtggtgaccaccggcgaacccgtcgtcgccggcctctcctgggggttctatgacacgtcgtgcccgtcggtggagggcatcgtgaggtggcacgtcaccgaggccctccgccgcgacatcggcatcgccgccggcctcgtccgcatcttcttccacgactgcttcccgcaggggtgcgacgcgtcggtcctcctgacgggttcccaaagcgagctgggtgagatacccaaccagacgctgcggccgtcggcgctgaagctcatcgaggacatccgcgccgccgtacactccgcctgcggcgccaaggtgtcctgcgccgacatcaccacgctcgccacgcgtgacgccatcgtcgcctccggcgggccctacttcgacgtgcctctggggcggcgcgacgggctggcaccggcgtcgagcgacaaggtgggcctcctgccggcgcccttcttcgacgtgcccacgctcatccaggcgttcaaggaccgaaacctggacaagacggacctggtggcgctgtccagcgcgcacaccatcggactaggccactgcggcagcttcaacgaccgcttcgatggctccaagcccatcatggaccctgtgctggtgaagaagctgcaggccaagtgcgccaaggacgtgccggtgaactcggtcacgcaggagctggacgtccgcacgcccaacgccttcgacaacaagtactacttcgacctcatcgccaagcaggggatcttcaagtccgaccagggcctcatcgaggacgcgcagaccaaccgcaccgccgtccgcttcgccctcaaccaggccgccttcttcgaccagttcgcacgctccatggtcaagatgagccagatggacgtcctcaccggcaacgccggcgagatccgcaacaactgcgccgctcccaaccgccgctcctccgacctcctcaacgctgccgacgacgaccaaggcttcgccgccgacgcctaattaacttatggagtaattagtgatcgttttatgtttatgttttgtgctagtaataataattaagaggatgccatctgcgcgtggtgtttggtttccatgcattctctgcttagttagaatggttttgcttcataaaaagtaaagttactactcgattcctcggtcgggacagagtaactgcatgtcaaatgtatcatcatcatcagttagtgctacatcatcacaactgtctttgtcacagcataaaccc

SEQ ID NO: 3014 - DNA, 1809 bp, Oryza sativa
  ref <308>: DATABASE ACCESSION NUMBER: AK060790
  ref <309>: DATABASE ENTRY DATE: 2001-12-06
gagcgcagctcaatcatcaggacgctaaacttggttcaaggtgatattctagtctctctagactacatgcatgacgggaggacatcaggaaggtagcagcagccgtactagagatgtcccccgaggaagtggtggaatcacctacttcatcggaaattaagagcgaatggatgaacgagctgagtagatacgtggataattcacccgagtgctactacgacttcaactctttaaataaaaacgaaaagcatatgacaacggaggatttcttgagcatgctgctcgaggacggctgctacatccttcacaagttcgtagttcgacaggataggacagcagcggtaggaggaggaggaggtagcggacgatacagggaagacatcgacgttaacgtacaacgcgacatcatctacctcgctgagaatcagataccgttcttcatcctagacaagatcaacggaataataggttggagcgtgactggtaaacctctggtagaggtgttctgctcgtacatcgaacgagaggtgctcaactggtacgggtacgccatcggacagcggtggaacgtgacaccggaacccattcatctcctgcacctgctgcacatactcctgataggatgccagaagccgcgggcgctgacacacacacaccaggtggctaccggcgcagcagttccgacggagccgcacgctgctcgttcccgcatcgaggcgtcatcggcgaacatcacccggcagaacgaaacagcgatcgagatggtgccagtcatcacggatgcctcgactacccagcacgagcagacagcagcagggacgcgcgccgcccattcccacggcgaggcgtcatcggggaaccacccccagcaggacgaaacagcgatcgacgtcatcacgggcgcctcggcgaccgagcacaggaatgagaagccaccagagaagaagggggtgcgccgtttccttcgttggcgccgggccaagcaatatgaaaaggcccgcgtcgatctcacaggcgtcgacctgatttccatcgccgagggccccggcggcgaggcatgcggtgctctctcaatcctggatgtgaagctgatcgggcggtgtggcggaatacgactcgaatttcccagcctgtacgtcgatggcgagacatggtgcatgctaggcaacctaatcgggctggagcagagcaaccctgacatgatcccgcagcgtgtcacggcgtactgcgtgctcatgtcccagctggcgtgcaccaaggaagacgtcgagctgctggcccggagacgcgtcaccgatcaccttatgcgcaacgacgaagattgtgccacaaaattcgccgctctctgcgacggggtcaacttcaacctggacgaccctagccgcaactacctgcagaaagagtgtgtggcgctggaccaacgctaccggagtcggccatcccaatggacagcgtggatgctgcgcgagcactgccgcaacccctgcgtcgccgtcgcttctgtgcttgccatcatcgccatcgcgttcggcgtgctgcaggctgtctatacggtcctaaagctcgtgcgaaaggtaaaataacaatctgattgagcctgcagtttgtgtgtggaaagcgctcgtataggcatatatgtgtttgtttcaagtctatttcttatcttttccctatcttttcttcttaaattacttattccactttgagtggtctgtttataaactcataataagagctttgtccatcgccagacataaagcgtctacaattatataaaaaatataaacatgtatctgtcatctacttgcc

SEQ ID NO: 3015 - DNA, 2579 bp, Oryza sativa
  ref <308>: DATABASE ACCESSION NUMBER: AK104338
  ref <309>: DATABASE ENTRY DATE: 2002-08-28
gctgctgctagtgccaacagctgcatcctcccgtaggcgtaggcagctagctagctagctcgatcgaggccatctccatttccggcctatccctctccttcttcctcctcctcttcctccgcctgtccggttcttgttctggtgctgctttgctcgacaccatccgattttttggaggcgattgccgtgctgtcaccggaaaaaggaaagagaagaaaagaaaaggctttccttcctcctgtgctgccccgccaacatcgtgttgaatctcgtcgatatatattttgctccgattggtgcctttttctcctggaattttgtgtcctgtctctctgtgtgggtggaaggcctcgcctttcaatccttccatcatcttgctgtccccccctcgattctttgcttcttcttcttcttcgaaagaaagaaattaaatattattacttgtttgatcttttccttttagcaatttctgccaatccccaggttcagtatttagtttccatccgagcagatttcttgttcttcgcttcaaaaatctgcgtatcgaattccatccatttttttgctttgtccaattcgtggataaagaaagagagggggagctacgaatccggcgagatggggaaggtaggggagaaggtgagggcgttcgcgacgaacaggtggctggtgttcgtggcggcaatgtggctgcagtccatggccggcatcgggtacctcttcggggccatctcgccggttgtcaaggccgcgctggggtacaaccagcgccaggtggcggcgctcggcgtcgccaaggacctcggcgactgcgtcggcttcctcgccgggacgctctccgccacgctgcccgcctgggcgatgctgctcgtcggcgccgcccagaacttcctcggctacggctggctctggctcatcgtcaccaggcagctccctgcgctgccccgctccatgatgtgccttcttatctttgttggaaccaatggcgagacatacttcaacacagcttcacttgtgacatgcattcagaacttcccaaagagcaggggcccaacagtgggtatccttaaaggatttgctggcctaagcagtgctattctgactcaactgtttgcagtattgcacacacctgaccatgccacacttgtcttcatggttgcggttggaccgtcattggttgccattggcctgatgtttgtaattaggcctgttggaggtcaccgtcaggtgcgaccatccgacaataacagcttcatgttcatctacaccatttgtttgctccttgcttcatatctggtcggtgtcatgctcgttcaagattttgtgcagctgagtgacaatatgctagtttttatcacggtggttcttttcatcctgcttattttaccaattgcaattcctgtgaccttgacattttcgtcaaaaactgaacatccgatggaggaggctctcctggctgaaccatcaaaaggacaggcaagtacttcacaagaaaaagagccagatgtatttttaagtgaggtggaagacgagaagcctaaagaaattgattcattgcccccatctgaaagaaggaagaggattgcagaattgcaggccaggctagtgcaagctgcagcacgaggtggtgttagaatcaggaggcgaccgcaccgaggagagaacttcaccctgatgcaggcattggtcaaggctgatttttggctaatttggttatcgcttctgcttggctcgggatcagggttgacagtgatcgacaacctgggtcagatgagccaggctgttgggtacaaagacgcccatatctttgtttcattgacgagcatatggaatttccttggtcgtgtcggaggtggctacttctctgagaatattgtcagggaacgtacatacccaaggcacatagcactggcttttgctcagatcctgatggctgctgggcatttcctctttgcaatggcttggcctggaaccatatatgtggcaaccttcctggttgggcttggatatggagctcattgggctattgtgccagctgctgtctctgaacttttcggtgtaaaacacttcggcgcaatgtacaattttctcacagtagcaaaccccacagggtcactgatcttctcaggtgtcatcgctagtaacttgtatgactatgaagctgagaagcaagcgcaccaccagagttctttgtctggacgatctcttttcgacatgagcttcctcgcagagggtcctctgaagtgtgaaggagctgtttgcttctttgtcagctcattgatcatgtcagcattctgcattgttggagctggccttagcctcatcgtcgttcacaggaccaagcgagtgtatgctaacctctatcgagctgtccgctgacttgaaatttccatggatagaagatggtgaatcccccttttgttgttccatgttacctgtattattgtgtacatgattcaagatacacaaagtctacctgtaaagtttcagatcatttcagagattgcattgtaagaatagctattcccaagtggaaatttacatgcactataaagtaatgatcatggggcattctttat

SEQ ID NO: 3016 - DNA, 2282 bp, Oryza sativa
  ref <308>: DATABASE ACCESSION NUMBER: AK060791
  ref <309>: DATABASE ENTRY DATE: 2001-12-06
atcaacacgagctacctgccagataagacgccagaggcgctgcggctgttacgggaggaggagctcagaagcctgagagggaatgggcgcggggagaggaaggactgggagcgcatctatgacttcgactactataacgacctcggcaaccctgacaacgatgaccatgtccgccccgtcctcggtggcaccaagacccacccctaccctcgccgctgccgcaccggccgccccctcagcaagaccgacggggtgacggagacgcggaagcacaagctgataaacctggactactacatcccgccggacgagcggttcagcccggggaagctggcggaggtgctggcgatgggggtgcaggcggtgacccacttcgtcatcccggaggcccgctccatcttccacggcgacgtcgtcaacttcaagtccacggagcagctgcgcgccgacctctacggcaagccgccgcagccggcggcggacgccagggtcatggacgagcaagtcctccgtgccgtcgcacaagacgtacaagcaggtttccaggattgtcaaggacaaccccgccaagttccccacccctcaagtcatccactatgacactgaggcgtggaggagcgacgaggagttcgcgagggagatgctggcagggctcaacccggtggtgatcaagcggctggaggtgtttcctccaaacaagagcaagataaccacggacgatatcatgacccagattggaggtctgaccattcaacaggcgatggagcagaaacggatgtacatcctggaccaccacgactacctgatgccatacctccggcggataaacacggagggggtgtgcgtgtacgcgtcgcgcacgctgctcttcctcagggacgacggcgccctccggcccgtcgccatcgagctcagcttgcccgacggcggcgtcggcggcagcgagatcagcagggtgttcctcccggcgagccagggcaccgatgcgcacctttggcacctcgccaagactcatgtcgccgtcaacgattctgggtaccatcagctcatcagccactggctgttcacgcacgcgacagtggagccgttcatcatcgcggcgaggaggcagctgagcgcgatgcacccgatccacaagctcctggacccgcacttcaaggacaacatgcagatcaacaccttggccaggagcatactgctcaacgccggtggcctcctggagaagaccatgtacccggggaagtactccatggagatgtcctccgatatctatgcccattggaggttcaccgagcagtccctgcctaatgatctcatcaagagggggatggcgtccagggaccccaaggcgcgcggcggcgtgtccctccacatcgaggactacccgtacgccgtcgacggcatcgacgtgtggctcgccatcgagggctgggtgcgcagctactgcgaccacttctaccacgccgacgcggcggtggccggcgacgccgagctgcaggcgtggtgggacgacgtccgccgcgtgggccacggcgaccggcagggcgacgccgcgtgctggctggacctcgacaccgtcgcgggcctcgtcgagacgctgtcgacgctcatctggaccgcgtcggcgctgcacgccgccgtcaacttcggccagtacggctacgccgggtacccgccgaaccggccgacgcggtgccggcggttcgtgccgctcccggggtcgccggagatggcgcagctggaggccgacccgggccggttcttcctggagacggtgcccgaccggttcacggcgacgctggggatcgcgctgatcgaggtgctgtccaaccacacctccgacgaggtgtacctcgggcagcgcgcgacgtcgacgtggacggacgacggcgaggtgctgctgctgctggacaggttccgcgacgagctccggcgggtggagaagagggtggaggagaggaacaaggaccccaggctcgtcaaccggaggggccccgtgagggtgccgtacacgctgctctacccggacgccggcgacgtcgccggcaaggagaaggggatcaccgggagagggatacccaacagcgtctccatctgacacgattcatcatccttcttctcttatacttcatctatccgactcgactcgacgcgtgtggaatgtaaagttctctgcttttctttttctttcttttcgtttgagagttttggtgttggggatgtgaaattgagattgattggttggtttggattggagaattgatgagcaaactgtgatgcag

SEQ ID NO: 3017 - DNA, 2067 bp, Oryza sativa
  ref <308>: DATABASE ACCESSION NUMBER: AK060792
  ref <309>: DATABASE ENTRY DATE: 2001-12-06
accaattcgtggggtggttggagtatttcaggaggaactgtaacgaatccgggtatttggagttatgaaggcgtggcaggggcgcatattgtgttttctggcttgtgtttcttggcagctatctggcattgggtatattgggacctcgaaatattctgtgatgagcggacgggaaaaccttctttggatttgcccaagatctttggaattcatttatttcttgcaggggtggcttgctttggctttggcgcatttcatgtaacgggtttgtatggtcctgggatatgggtgtctgatccttatggactaactggaaaagtacaagctgtaaatccggcgtggggtgcagaaggttttgatccttttgttccggggggaatagcttctcatcatattgctgcgggtacattgggcatattagcgggcctattccatcttagtgtccgtccacctcaacgtctatacaaaggattacgtatgggcaatattgaaactgtactttccagtagtatcgctgctgttttttttgcagctttcgtagttgccggaactatgtggtatgggtcagcaactaccccaattgaattgtttgggcctactcgttatcagtgggatcagggatactttcagcaagaaatatatcgaagagttagtgatgggttagccgaaaatctcagtttatcagaagcttggtctaaaattcccgaaaaattagccttttatgattatattggtaataatccggcaaaggggggattattcagagcaggctcaatggacaatggggatggaatagctgttggatggttaggacttcctatctttagagataaagaagggcgcgaactttttgtacgccgtatgcctactttttttgaaacatttccggttgttttggtagatgaagagggaattgtgagagcggacgttccttttagaagagcagaatccaaatatagtgttgaacaagtaggcgtaacggtggagttctatggtggcgaacttaatggagtaagttattctgatcctgctactgtaaaaaaatatgcgagcgaggcatccaccaccatcagccaaagtgccaaacgatcgatcgatctctgcagtctgcagattagcccaccacctccagcatcgggtccacgaatgcacaccctgtcaactccactccacccgcttttctttccctctccccgccaccttcacatctcaacctttcctctccctctctctctctctctctgatctcgtcgttcccatggcctccaaacccgcggacgttacggctacaggtggcggcggcgtcgccgtcgtccgtgacgacaacaacaacgccggcggcggcgaggcggaggtgtaccgctccgagctgacgccgctgcagaagcacgtcgccttcttcgaccgcaacaaggacggcatcatctacccctccgagacctaccaagggttccgcgcaatcggggcaggagtcgtgctgtccgccgtcggcgccgtgttcatcaatggcggacttgggcccaagacgataccggagaacaccaagactggtctcaagttacccatatacgtcaagaacatccacaaaggcaagcatggaagcgattcaggcgtgtatgatgcgaatggaaggtttgtcccagaaaagttcgaggaaatattcaagaagcatgctcacaccaggcctgatgccctaacagacaaagagctgaaggagttgctccaatcaaacagggagcctaaagatttcaaaggatggttgggtggcttcacagagtggaaagtattgtactacctctgcaaagacaaggatggatttcttcacaaggatactgtcagggcagtctatgatggaagcctatttgcaaagatggagcaagagaagcagtctgctaagaagaaatgataagaccatactgggtgctgtaattatctgttattgttgcaggtgattgtaaattacggtgtgggtgtgaatccaaaattattgctgtagtttgattgcgcgtgtttgttgacccgttcctgtaacaagaagctatttgtgaagttattggaagtgtttgt

SEQ ID NO: 3018 - DNA, 1898 bp, Oryza sativa
  ref <308>: DATABASE ACCESSION NUMBER: AK060793
  ref <309>: DATABASE ENTRY DATE: 2001-12-06
agaaaaaaggcgcccaccactcgctcctctcttttcctctccttcccctcctctcgccggagactacctcgccgtcgccggagtccccccgccgatccgatcccgacaagccggagatgcatccctccggtgagtactccccttactaccagccctacccctcgcccacctccgcgccgctcgccacctacccctccgcctccgcgccgccctacacgccgtaccccgccaccgactacgccgcccccgccgcgtaccccacctacccgccgccgcccgccgatcccccccagtacgcgcctcccccggccgcgccgcagccgcagccgtactacccctacgagccgcccccgcacaacccggctccctcgccttacccgtcgctagatcgggcaggaagctacggctacggatccggatcccaggagctgtacccgcccaagcctgccgggggcgggtggtcggatgacggggtgtacgcgtacagcggcggcggcggcgacgcgccggagccgtacggcgcgaggggcaccgcgccgaggtcgaattccccgctgtttgatgactacgggaggtcgattggttcgaccaaggagagaggtggcggtggtggtggcggtggaggcagttcggcgagccccaaggtggtgcgggcagtgcccaaggtggagacgtcggaggacacgagtggtggtgtgcagaagttccgggtgaagctgctgccggagggcgcgggcagccccatggatgtgctctgccaggttggtttggatgggattcggatgcttgatcccaatactagtaggacattgagaatatacccccttgaaactgtaactagatgggatgtattagattcttctatctttgccttttggtctaagagctcagttgattttgaagcaagaagaataaggctgaagtcaaacagctatacaaccaacaccattcttgacactgtgacagccgcgagtgtgcagttcaaggaaatgggcggaagtagcatttcgagaagtagagcaattgctgatgctgccaaacctcctgaacaacaaaatgataggaggaaaaatttccttgattggaggaacttaatgaagcccatgaacgaggagaaagaccactgggtcccagatgaagccgtcactaaatgcacagcatgtacagcagatttcagtgctttcaatcgcaggcatcactgtcgaaattgtggtgatattttctgcgacaagtgcacccagggaagaactcctttaactactgatgctgatgctcaaccagtgcgagtttgtgacagatgcatggctgaagtttctcaaagactgaacaatgcaagggaagcggcaaatcggcctattgttcacagccatgaggatcttgccaaaaaacttaaggatgcaatggatataaataagaagtcatcttcagcctcgtcaaggtctacggatggttctagcaggcgaatgagggaggttgcatgccccacctgcacagtccaccttcaggtgcaagtcccaacatctggttcagagaccatagaatgtggtgtctgccagcaacctttcctcgtcagtgctcgatgaattccatcatcacgcaggctctacattgatccacaaagaaaaagattctgttgctgtcaaggttgctgcttcggtcattcattgtcttgatggggtccgttgctcctctgtatatgatgatgatctaatttagtacaatcatattcagaagtaaggaagaggcgaataaagaagagtgttagtgtttgtttaccatgtttgacgtttagcctgttcttgtctgaacttttccttgtgtacattgcggatatattgcttcgagttccatgtgacatggtgtaatttactgctggtatactgcattttgatccatcg

SEQ ID NO: 3019 - DNA, 2284 bp, Oryza sativa
  ref <308>: DATABASE ACCESSION NUMBER: AK060794
  ref <309>: DATABASE ENTRY DATE: 2001-12-06
tattggtgtcactgattgtgtttctcgtgggaaaggcgcggttttaggggtcgtctcgatcgcggatttggctccggaggcgtcgatttgatcctagcaagattgaggaatgatggattcgtgaattttgatcgagttgcttgtttggacgatccgttatgattaagcaaatcctgggccggcttcccaagaaggagaagccgggcaagtccggggagaaggatttggccggagtcggctcgtcgctgcctgatgcaagaaccaccacggatttgaccatgtctagtaggatcgccaatcctaacaattatacagccgcggtcacaaatcccggccagaattacaccgtcaagaacgcccatcatggtggtgctggtgtcagcaatggtttcttggcgccgcccgtgtttgaggcgcttccgagcttacgggatgcgccggcgccagagaagcccagcttgtttctccggaaggtggtcatgtgctatgtggttttcgacttcacggacccgaccaaggatgtcaaggagaaggagatcaagaggcaaacattgctggagctcgtggattatgtcacctcagctacggggaaattcccggagcccgctgtgcaggaggtcatcaaaatggtgtccaccaacttgttcagggtaccgaaccccgcgccaagagagaacaagccgcttgagtcatttgatatggaggaggaagaacctgtcatggacccggcttggccgcacttgcagattgtgtatgaactattcttaaggtttgtccagtctcctgagaccgatgctaagctggccaagagatacgtcgatcatggtttcattatcaagctgcttgatctctttgactcggaggatcctagggaaagggagtatttgaagacaatacttcataggatatatgggaagttcatggtgcaccgtccattcattaggaaggcgattaataatatcttctacaggttcatatttgagacagaaaagcataacgggattgctgagctattagagattttggggagtataatcaatggttttgctttgccactcaaggaagagcacaaattgtttcttgtgcgagcattgattccactccacaaaccaaaatgtgttagcatgtatcatcaacaactgtcatattgtgttactcagtttgttgagaaggactgcaagcttgcggatactgttataaggggtttacttaaatactggcccatcacgaatagtgctaaggaggtgatgtttttgggcgagttagaagaggttttggaagccactcagccagcagaatttcagagatgtatggtgtcacttttctgtcagatcgcccgctgtctgaatagttctcactttcaggtggcagagcgagctctgtttctgtggaacaacgaccatattgaggtcttgatcaagcagaacagcaaggtgatgctgcccataatccttcctgcaatagaacgaaatacaaaagaacactggaaccaggcagttcaaagcttgagtcttaatgttcgcaagatattcatggatcatgaccctgtactgtttgaggagtgcctcaagaagtttgaggaagatgaagcaaaagaaaccgcgttgagatcaaaacgtgaggccacatggaagcgcctagaagagattgcctcgtcaaaaactatcagcagtgagccagcagttcctccagaggctacagttcattagcagcgctcctcagcgttgcttgctgaatgctgacgtcgtatgagcagctcgtttgccagatctagttagatcactgatgtgaatgctcatggattcctgcatgcctcatgttacttgctcctgaacattttcgcaggctgacttgtatatacaaggtagatgatggacttcgaatcttcaacagggctcagagctgtgtctgttccgagatcgtagcacctgttcttcgccgtgggacaaaggaaaggaggcagattatgtccttgcttttctgagatgtatgtgctagcctgctaggggtcaaggtgcagactggagctcagtgccctgatgttgaggacggttagcagcacatgagagagtagcaagtaggaacagagtttgcttgttgatcatggttttgcagaaatacaatgtttttatgtacgaataacttcgagtcttatcatgataatatgtaccccgggtgtacatgtgtttgctttttctagatgtatacagaaatttgtaacgaggaatgcttcctgcttgcatcaatcgatgcagagttgctgactggtggtcaatttggaatt

SEQ ID NO: 3020 - DNA, 1969 bp, Oryza sativa
  ref <308>: DATABASE ACCESSION NUMBER: AK060795
  ref <309>: DATABASE ENTRY DATE: 2001-12-06
tgttctcgaaggttaaagcaatacttataccataagcgtcaccgaccagagaataatccaataacatactggaggaagcttattgatgaatattttgcaccacgagcaagagaaagatggtgtgtatcctcgtatgagaaaagaggaaatccttcaggtgctgttccacacacagctccggattcatggcgctgtgacatttgtaatacacatgggggcaaaggatatgaggctacctatgaaatacttcctagactctgtcaaattagatttgaccatggtgttatagatgaatacttattccttgacatggccaatgaattccggttgcccaatggactaatgctgctggaacatactaaagttgttcagaaaagcatttatgaacatatgcatgtgatacacgaggggcagttgagaatcatattcacaccagaactgaagataatgtcctgggagttctgttcacggcgacatgatgagtatatcactcgcaggtttctttcaccccaggttgctcatctgctgcaagttgcccagaaatatcaaactgttgccactgaaagtggtccagctggggtctcaaacagtgatgcacagaacatttgcaacatgtttgtgacggcgtcacgacagctagcgtaaaatatagaccaccacaccttaaatgagcatggtctatctaaaagatatgttcgctgcttgcagatatcagaggtggtgaatcacatgaaagacctgattgaattcagccacaagaacaagcttggtcctatagagggtctgaagagctatcccaagcaaactgcagcaaaacttccagtacaaaacatgcacgagccaaagcaactaatggcagctgctggccttcctaatgaccagactaacctcaaagccatgggtgtcaaaacagaaatgaacacccatgcgaatgagacgcacggtattggaccaattggaaatggtccgcagaatgctgctgcacttaacaattaccagaatcccattggaaatggtctgcagaatgctgctgcacttaacaattaccagaatatccttagaagttcagtcgcaaaccagagtttgcttcagcaggaggcatcaagcatgtttaaaggtcccacagcaatgcacaatggcattcagctggaagcatctagatccttccgtggaccaaaccaggtgcatctcgcgcagttccaacatccggcctcatttcagcagcctatgcctcagcagagcagcctccagggcttgggtgtgagcccacaatatcagcagcatgtgctccatcagttgctgcaagaggccaagaacactaacaaccgtgtcttggcgcagcagcagcagcaacaacaacttcaacatgctcctgctaacagtggtcttgcatcaggaggaacggctatcaccggcagcgccgctagcggggatcatatgaataacaacggcgcggtgaagggtgggactccaatggttacaacaggtcctagcagtgtgatcaacaatacagccagcatcctccccagcagaagtaacagcttcaagtcagtgggcagcaacccccaagttgcagctgctgcgggcggcggcattggcagcggcggccatgcggctacccccaaggctgatgctctgcatgagttggatgatcttgacaatcttgggaatctgatcagtactgaactggaggagagtgggctgttcctgggtgaccaggcaggtggtggctactcatggaacatgtgacaaatgcttgcctgcttggcttcttggtgatgatggaaactgccgtagattctagcttctcgtcttgttcttttttgttttgggtatgtggagtttttgtttggggtgtctgaaacagtttctgatgatgatgatacactgatgtaatttaagcgttatgtgcgctggtaagtgttggcttggaatgctgagatcgaaccagagctgcttctgctagcac

SEQ ID NO: 3021 - DNA, 1560 bp, Oryza sativa
  ref <308>: DATABASE ACCESSION NUMBER: AK060796
  ref <309>: DATABASE ENTRY DATE: 2001-12-06
ataatgtttctgtccagagggagctaggttcacagagttggatgcagatgagaaggcctgatggttcctctgagatattatctggatttcaaccactgaaagatacgcggaaccctctgagttcatttcctagtcagatatctggaaaccgttcaaatacgtggaacacaatcaatgttcattatcccgaccaaaatgccaatcataatatgtaccctggcacatggtctcttatgcctccaaacactggttttggtgtgaatcagcagaactacctaatgacgcctgacatcacactccctcaaaggtctcttaatgccaagtttggtgggaatggagcattcacttcgcttcgggcccatggcatagatcagcgctcctctggttggcttgggcatattgagccaagttctcacattgatgatgcctcatcgagtcttatcaagccacagcctttggttattgatcacaatgttcagaaagctaaaggctcttcatgcatgctatttgggatttctcttgacagccctgcaaaacctgaactattgatatccccaccaagtgttgcatttgatgggaagctccaacaggatgcacttgaagaggatgaatgctctgatccttccaagactgtgaagccacttgatggagctcagcacgattctgctagagagaaacatcagtcatgtccagatggtaccaaaaacattcagagtaaacagcaaaatggttcctcccgaagttgcaagaaggtccacaagcaaggaatcgcactcgggaggtcaatagatcttacaaagttcacttgctatgatgagttgattgctgaactggaccagatgtttgacttcaatggtgagctgaacagttcaagcaagaactggatggtcgtttacactgataatgagggtgacatgatgttggttggtgatgatccttggaatgaattctgcaacatggttcataaaatcttcatctacacgagggaggaggtccagaagatgaatccgggtgccctaaactcaaggtcagaggatagccggtctacttccgtggaacgagggctagttggcgaagggctccaaggtggtctatccgccccatcactgaattctgagaactgctaattcgttcggtcactgaggtcttttgtggtttgcaagaacagaagacgacatatccatggtaggaaggaatcttttcgtggtgtagtagtagtagctggtgctttatatgtatcgggtaagccccgcagtaccccatttgtagatggtgcttgtcctggtatcagttgcccgctcttcgttttcgacaagttttgggtgtgctttgttgaggttttaagttattgtatgatatgccccgtagtagtgaaaggtgctgaggccaagctgccgcgcccggtgcgcttgcttgcttgcgctcttcctccctcctaagccttgtaaatagctttgcttccccccctttcttcagtcagttctaatatgttgcgaactgcggtaatcggtgtacccctcaagaaggcaaggcaatttgaccctaaaatgttgccatttt

SEQ ID NO: 3022 - DNA, 1082 bp, Oryza sativa
  ref <308>: DATABASE ACCESSION NUMBER: AK060797
  ref <309>: DATABASE ENTRY DATE: 2001-12-06
actttccgtacactgaaaaggccaagcggctcacttcgcttcatggttcacttgaaaacttgatttctgacccagagcaaaatgacgaacatattggacacctggatgacagatcaaaacccattctcttttccatggcaagacttgaccgagttaagaacataacagggttggttgaagcttatgctaaaaacgctaggctgagggagctggtaaaccttgtcgtggttgctggctataacgatgtcaagaaatccaaggacagagaagaaatcgcagagattgagaagatgcatgaacttattaagacctataacttgtttgggcagttccgttggatctcggctcagacgaacagggctcgcaatggtgagctctatcgctacatagctgatactcatggtgccttcgtgcagccagctttctacgaagcattcggtctcactgttgtggaggccatgacatgtggactccctacttttgcaacagtccatggtggacctgccgagattatagagcacgggatctcagggttccacatagatcctcatcatccggatcaagctgcaaatctgatagctgacttcttcgaacaatgtaaacaagaccccaaccattgggttgaagtttctaatagaggcctacaacgtatatatgagaaatatacatggaagatctactctgagaggttgatgacattggctggggtttatggcttctggaagtatgtctcgaagcttgagaggcgggagaccaggcgctatcttgagatgttctacatattgaagttccgtgaactggcgaagactgtacctcttgcagtagatgaggcacactgactgtaggtcctcgacgtgatgagatctgagggaaatcttcctgctgtcagtgggaatggtataggcaataatgtgcagcagatggccgcttggccgataataaaatggaatgtaacttgtgtgttcagcaagtgacgaacttgggagttgggactctgtaaaactagatttgtcaaacatcttgtctatgtacattaaaatagtttgatactcagtgcttcattgccattgtgttaatttgat

SEQ ID NO: 3023 - DNA, 1311 bp, Oryza sativa
  ref <308>: DATABASE ACCESSION NUMBER: AK060798
  ref <309>: DATABASE ENTRY DATE: 2001-12-06
gaattctaccagacttgttataagtgcagtagcaacagtaggagctcttctgttggtcgctttgatgtgtttctggggttgctttctgtacaaaaattttggaaagaaagatattcatggtttcagggtggagctatgtggaggctcttccattgtgatgttccacggggacctcccttactccactaaagaaatcctcaagaaactagagaccatggatgatgagaatatcattggagtagggggcttcgggacggtttataaacttgcaatggatgacggtaatgtttctgcattgaaaaggataatgaaaacaaatgaagggcttggtcagttctttgatagagaacttgagatactgggaagtgttaagcatcgttatttggtcaatctccgtggctattgcaattctccctcatcaaagctattgatatatgactatcttccaggtggaaacctagatgaggtgctacatgaaaaatctgaacagttggactgggatgcacgtattaacataatacttggagctgcaaaaggcctggcttatttgcatcatgattgttcacctcgaataatacatcgtgatattaaatcgagcaacatcttactagacggcaattttgaggctcgtgtatcagactttggactcgcaaagctattagaggacgacaaatcccatattactacaatagttgcaggaacatttggctatcttgcaccagagtatatgcaaagtggcagagccaccgaaaagactgacgtctacagttttggagttttgctacttgaaatactaagcggaaaacgacctactgattcatcatttattgaaaagggattgaacattgttggatggttgaatttcctggtcggtgagaatcgggagagggaaattgtcgatccatattgtgagggagtgcagattgagaccttggatgctctactttctcttgctaaacaatgtgtaagttctttgccagaggagcggcctacaatgcacagggtggtacagatgttggagtcggatgtaattacaccatgccccagtgatttctacgattcagaataggcttcgacttacggctgctcttgaaaacgccacactgccgctggttttcctgtggaggcacattccatttattctttgcagattatgtaaattcattcctgcggtgttcggctccaatcggctagctcaatggggaggacatttttgtgtctatgtatctatgctacgtacaaattattactactacatgtcaagttaataagaaacttaccaggagattactgtacttgtattgaactgtc

SEQ ID NO: 3024 - DNA, 1769 bp, Oryza sativa
  ref <308>: DATABASE ACCESSION NUMBER: AK060799
  ref <309>: DATABASE ENTRY DATE: 2001-12-06
aactaccaagctggagtacggtaggggcagagggaatttccggtggagcggtgaaatgcattgagatcggaaagaacaccaacggcggaagcactctgctgggccgacactgacactgagagacgaaagctaggggagcaaatgggattagagaccccagtagtcctagccgtaaacgatggatactaggtgctgtgcgaagtacaatgctcctcaaccaggcgctgatcaattccaaatgaaaatagctaacaataaggttggtctggttattggaaagggtggtgagactataaaatccatgcaagccaaatctggtgctcgtatacaggttgtccctttgcatttaccccctggtgatcctgcaaccgaaagaacagtgtatattgatggtacacaagagcaaattgaaactgcaaagcaattggtgattgaggttaccagtgagaatcgtgctagaaacccaatgtcaggtggctattctcagcagggctatcgccctcctcgtcctcagtcaaattggggtccgcatgggggggcaccgatgcaacagcctggttatggttacatgcagcctggagcctatcctggggcacccccacaatatggcgctcctcagcaaccttatggtagctaccctccagcatctgggggttatcagactgggtgggatcaatcatcaaatcagcaatctcagcaggccccccctggcacgggctatgattattacaatcaacagcagcaacctcaacagcaacaatctgcccctgggactgctgcacctggtgatgctactagctataattccagccagcctcctgcatatgcttcccaagggtatgattcgtcctacgctcagcagagtggtgggcagcagcaggcatatgattattctagttattatcagacccaagggcagcagcagggctactctcagcagactggatatgatcagcagggctatggaacttctggctatgggtccgccgctaattcaactcaggatgggtccgcaccaagctatggtgctcaaggtgtagctggtcaagcatctcctgggcagcaaacttcaactcctgctgctggaagccaccctggctattcaagccaaccacctactagcgctgcttcaagctacccggtgcaagggtctgctcctcagtctggatatggggcgccaccaccacagactggctatggtacccagccccaaccacagggagggtatagtcagggcagctatggcgcacctccgcagggacagaaggctcctcctaacacttctccttacggacaggcgccgcctcctggatctgctcctggtgggtatggccagtatggttactctcagaaccagcaaggctatggcgcacctccaccttaccctggtgcacctgctgcaagccacccaggctatggtcagcagcagtcctatggtgatccttatggcagtggaagctacgggcagcctgccgcatattctactgaagctacaactgctgctgcctcccaggaccaatctgcttccgcccctgcgactggtgctgcgcctgcgacaaccgctgctccggcacctactgctcctgagaacagtggagcccaaagccctgctagttaaacctgcaactcaagctttaagcttcttttagagaggggtttccggatttatgtgttgaaattgttttttgttgctccttaatgttgacttgttttaaatatagactgttattattgtttagtattgcgttatgttatgttacttttgatac

SEQ ID NO: 3025 - DNA, 1958 bp, Oryza sativa
  ref <308>: DATABASE ACCESSION NUMBER: AK060800
  ref <309>: DATABASE ENTRY DATE: 2001-12-06
accggccacctcttcttcctacttcgtcttcttgctggtgtgttcgaggaggaggaggaggaggagaagctagcggcggcggcggcaatggcgacgagcgggctgaggagctgcagcgcggtgggcgtgccgagcctgctggcgccgtcgtcgaacaggagccgcctgccggtctgcgcctacgccaccacctccgggcgcgtcaccatgtccgccgagtggatgccgggccagccacgccccgcccacctcgacggctcctctcccggtgacttcgggttcgacccgctgggcctcgccaccgtgccggagaacttcgagcggttcaaggagtcggaggtgtaccactgccggtgggccatgctcgctgtgcctggggtgttggtgccggaggcgctggggctgggcaactgggtgcaggcgcaggagtgggcggcggagcccggcggccaggccacgtacctcggcaacccggtgccatggggcacgctgccgacgatcctggtcatcgagttcgtcgccatcgccttcgccgagcaccagcgcaccatggagaaggaccccgagaagaagaagtaccccggcggcgccttcgaccccctcggcttctccaaggaccccgtcaagttcgaggagtacaagctcaaggagatcaagaacgggcgattggccatgctggcttttgtgggtttctgcgtccaacagtcggcgtacccgggcaccggcccactggagaacctggccagccacctctcggacccgtggcacaacaacatcggcgacatcatcatcccgagaaccatctacccttgagcttggcacgaaccggtgcgtgcgtccgggcgtacgtgaaggctatgggtggtttttatgtgcgtgcgtactgtgtgtgattggttgattattgcgcgcgcgtgcgcacgcagtggtcggccggcaggcagctgctggttggccttgtaatgtaaagcttaagtagagggtgctctcttgtgaatccgtccatcttaatttttgtatcaaacacgaaatcaaactggtcttagttaaaaaaaaaaaaaaaaaaaaaaaatgaccaaaccacgcctaaacctagctagctaataagctccaaggctccaagcaaagtaattaagatgaccatgaaagtgaagagcaccatgatggctgcttccatgctgctcttcctcctcgtcctcgccggcatcgtcaccgccaccaccaccaccaccgacagcaacattcgcctccccagcaacggcgccgccggcgaaaccgatggaaacaaacaggcgaaatccagaccgtgggagtgctgcgacaacatcgagatgtccgtgctcaagatctacccgccgcggtggcgttgcaacgacgaggtgaagcagtgcgccgccgcctgcgagaactgcctgcagctggtgcccggggccggcggcgaagatgtcgtcttcgtctgcgacgactggtacccgaccaccaaccctggccccgtctgcacgccgcggccgtggggcgattgctgcgacaaggccttctgcaccaggtctctcccaccgatctgccactgcgccgacgaggtggcgtcgtgcgccgccgcctgcaaggagtgcgacatggtgaattcgtcgtcggagccgcctcgctatatctgccgcgaccacttcaccggcgagcccgggcccatgtgcgcatgaactgattaactatagctagctatatcaagctagctgattatattgatcctttcaccaataaatatatgttcgcgtcgttcgcgatcgatcgaacgatcagtctgcgtgtgttctagcttgttcgtattcgtacatacgtacgtgtgtacaatttgtctgtgtgttgtgtctatcgtgtggtttgatgttggtatgcgtgttatgtcatgtgttacgaagttatcatgataaataaaagacgaatgagagatctattcgtct

SEQ ID NO: 3026 - DNA, 1530 bp, Oryza sativa
  ref <308>: DATABASE ACCESSION NUMBER: AK060801
  ref <309>: DATABASE ENTRY DATE: 2001-12-06
ccgcacctccgccatcagcgctccgctccgtatcagccgccgcgccgtcctctgcatcgcctgtctgccaccgatccccgccgccagctcgctctccacgatcctccgcctccccgatgcacgaggtcctcccgtcaccaggtcgtcgccgccgttctgctccaccgatccccgccgcacgaggtgctcccgtcgctaggtagccaccgcgccgtcctctgcatcgccttctccaccgatcccctctgcatcgcaggggtgagctgcagctatggagttcctcgccggtgggggagcagcaggtgaatcccgtgagaggtgagcagttgaacaaaactcatcatgcagttcatcagcaggtgactagtccgaaacttggcatcgtggaggttcatccggattcatcatgcattctgaaacaaaacccatcacccagcgcttgccgcttttcctcagagtacaatgaacgcggggtgctcggcgaaatgtcccgtccggctcctcacctgcaatgcatgtgttctggagagtgtttatggattctggatcttagatcccctcaacgacttggatcgtcagtaaagcttcatcttgaaggtgcacatctgccgttgtttcgtcaaaatactatgcatgatctttaggtgataaaatattgattgaattgtctactgctatcgctcagaatccatactccatcaatcttacatatacacatatttgttgcgtcaaacacaagcttgctttccatacatccctgaacaattcagcctcacaactgctcttgacatatctcattcagaattttttttttctcaaattagttggactgatagaaaaatattgcttttcaagattgtaaaataaccaactgactgggaagttgatgtcatatgttggaagcaatctgctaaaatgttaaagaagtgcatctaacttttgtacccagtgaattgcaaatctctatctcgtttttttttgtttacagtttctttggttttaaagtaaaataggttgacatgggaactttactagcagaggaataggcttatattcttggaaaaaatacatttctccatgcagaatgtgattacaatagtgatacttgctgccatgatttctatcactcatgcacgcattgcccttgatgattgtatgcagttgggatatattgtcatcaagcaagaaaatccttggcggttctgcttcctggaagcagtaggaacaacaagagttactgaaccagaaattgaacttgccttcttcatgcatcagatgaaccataaagggaacaacactactaccctctccaaaattgagctgctcaggacttcgtagaaatttacagcttcaggacatgtgatttatccattctcttttactgtttattctaaaatgcaaaaaaaaaaaagaaattttgttgtagcttagattaaggcagcctcagctttgtggtttgccaagccatgtaatgatatatgaatgtgatactttaattaagttgaaacgcatgattatgtatttgaactt

SEQ ID NO: 3027 - DNA, 1103 bp, Oryza sativa
  ref <308>: DATABASE ACCESSION NUMBER: AK060802
  ref <309>: DATABASE ENTRY DATE: 2001-12-06
gcatcgatctgcatgcgaagtcctgcagcctccgtagcagacacgtacaacgtaccgagcaaccttagctagtggcgcctgaaaattattaagcgcttcaagatggcaaagcatggcgttgcttccgttttaacactggcattggtccttggagttgcggccattcctacagtggtgcaatctatcggcgtgtgctacggcgtgatcgggaacaacctgccgtcgccgagcgacgtcgtgcagctctacaagtccaacggcatcgactccatgcgcatctacttcccaagaagcgacatcctccaggccctcagcggctcaagcatcgccctcaccatggacgtcggcaacgatcagctcggcaacatcaaggtgtcgacgtcggtgtcccagggcgtgaccgccggcttcccgccgtccgccggcacgttctccgcctcgcacatggggcccatagctcagtacctggcgagcaccggcgcgccgctgctcgccaacgtctacccctacttcgcctacgtgggcaaccaggcccagatcgacatcaactacgcgctcttcacgtcgccgggcacggtggtgcaggacggcggcaacgcgtaccagaacctgttcgacgccatcgtcgacacgttctactccgcgctggagagcgccggcgccgggagcgtcccgatcgtggtgtcggagagcgggtggccgtcggccggcggcacggcggcgagcgccggcaacgcgcagacgtacaaccagaacctgatcaaccacgtcgggcaggggacgcccaagaggcccgggagcatcgagacctacattttcgccatgttcaacgagaaccagaagggaggcgacgagacggagaggcacttcggcctcttcaacccggaccagtcgccggcatactccatcaatttctaagaagattgttctgagaagagatcgatcgatgatgaattaaacgtcgatcgatatagatatatacatacacgcgttccatatatagtttgggtttgaataagctttctgcctgcatattgcaaagctcaatgcatgcatgtaacggtgcagagacaaataatatgaacttgaataaagtttaccag

SEQ ID NO: 3028 - DNA, 2240 bp, Oryza sativa
  ref <308>: DATABASE ACCESSION NUMBER: AK060803
  ref <309>: DATABASE ENTRY DATE: 2001-12-06
gggccgtttcctctccacttccgcccccatctccgcgtgcggaagtcaacgaagcggagcgcctctgccgcctctccttcccacccacctctgctctgctcctcatcgtcgtcgcgcggccagctcagccggccggagaatccaccgaatccggcgcgaatcccgcagccatgttcggcgactccgacggatccaaggacgccaaccccggggcgccgccctccaccatcgacccgcccttccccaaccgcgagctcaccctcagcagctacctctgcgagaagccgacgctcgcctccgccgccgccggtggcggtggcggtgccggcccgtcctcgccgccgaaccctgctgcagccgcggctggcgacgacggcaagcactgcgtcgagcgcgacttcctccacctctccgcgcccaagcgcggggatccacccggcgacgactcatccgtcgtcggcggtaagaagccccgcctcgactccctccagctctcgctgtcccttaactccgacggccccgctgctccgccgtcgtcccagccgccgctcgcctcgctcctccagcccgtccccgcgaccgatggagatctacggggagcggcggcggcggcggccgtgcccgcggcccccgccaggaggacctacagcgcgacgacggcgcgcacccgcagcatcaactccgacgacatgtcctactcctactccatcttctcgcacaaccctagctgttccctcacgcacaactccaccgacatctacgccgccggtgaaggtaccaacggctccgttcacagccgattcaatttccgccccatgggggacggcagcgtcgccttcgccacgccgccgctgaaggagggcacgtcgtcgttcttccccacggagctccctgcgaggatggcggcggcggccgcggcggctgctgccagcgcgggtggcagcttcgacggcggtcgcggtgggcttcacgcgtcgcgccctgacaagatcctgcgggatattgtgtccgactctgtgacggctatggcgcaggtgctgcaggatttcccaagcgaacgactggagttgctgcgagaggcagtgcggggcatgattgactctcatgagaagagggatgagctggccagcctgcagcggaagcttgagcgccggtcagacctgaccaccgagacattggggagggcgaacaggacgcagcttgagatcctggtggccatcaagactggaatcgcgacgtttgtcaccggtaaaggccgggtaccaagcagtgagcttgtagaaatgttcctcatgacacggtgccgcaacctgaactgtaagagcacgctgccagtggatgactgcgattgcaagatttgctccaccaagaaagggttctgcagcgcatgcacgtgttcagtatgccacaagtttgactgtgctgcaaatacctgcacctgggttgggtgtgatgtctgcggacactggtgtcatgttgcatgcgcgctggagaggaatttaatcaggccagggccgacgctgaaggggccaattgggacgactgagatgcagttccaatgccttgcttgcaatcattcaacttcaagaccactacttccattcttgacaccgatgcacttaagcccagcccaaagccactctctattgaaccccatttcagcaccgcttctaaggaggatgactctagcctcgaaaccatcgtgaaatgcaaggaagctgaagcaaaactcttccaaaagttggccgatgatgccaggaaggaagtagatagctaccgccagattgtccgctccaggactcagaagctagaggaggagtatgctgcgaagctggcaaaagtatgcttccaagaaacagaggagaagaggaggaagaagctggaggagctcaagatgctggagaattcgcactacgactacctcaagatgaaaatgcggatgcagaccgatatccagggcttgctcgagcggatggaagccacaaagaagatgtgggtataggctggtaaaaattcatctgacgccgctgaatgtgtgaaaaatctgttgtacaccattaggatgttttccgagttgttgtattcatcctgtgatttgtgttaccagttaaaactgttataagcagagggccgcctaacctcgtgctggcagataacataactagacaccatctcatttaattgctttccgtttgcaaacatatggtgtgtcccttgcaagtatgcatatcattatctct

SEQ ID NO: 3029 - DNA, 957 bp, Oryza sativa
  ref <308>: DATABASE ACCESSION NUMBER: AK060804
  ref <309>: DATABASE ENTRY DATE: 2001-12-06
agcaagcaaagcaaagaacttcccttgcaccaccacctgatcggagaagtagctagctgcaggagagaaaccgaccaacaatgacggagtactactccagcaccgtggacgagtgctacgagaccaccggcaggcagcacggccacgggcacggccacggtcacgggcacgggcacgggcatggtggcatgagggtggagtcccacaccgacgactactacagcgagggcggcgagatcgaccgtgggaggaggaacaactccatgcactcgcaggagtacctgatgaggcagcagagcggccatggcggctacggctacggcggcggccagcagcaggagtactacaagcgggaggagcgcgagcacaagcagcgcgagcgcgtcggcgagatcggcgccctcgccagcggcgccttcgctctctatgaggggcaccaggcgaagaaggacccggcgaacgcgcagaggcacaggatcgagcagggcgtggcggcggtggcggcggtgggcgccggcggctacgcctaccacgagcaccgcgagcagaagcaggccagctacggcgccaaggagcagcagtacggctacgccaggatgccgcagcagcagggctactactgcaactgattaattattaatcacccccaaattattaataatccatgcgtacgtacgtaccactaaataaatactggctactacgtacgtatatatacggtacaataagatgagcaaggatgtacgtacgtacacgtatatacgttgctcacccacaatttcgccgccgcggccgcgcgccttattccaaaccagtgtatgtgtgtacgtacatctatatatgtactgtgatttctgtaaacgtgtggccatcggatcgatgaattctaccgtgatgatagaaactgcttcctcgtactccctccatccctaaatatttgacgccgttgactctttt

SEQ ID NO: 3030 - DNA, 1303 bp, Oryza sativa
  ref <308>: DATABASE ACCESSION NUMBER: AK104339
  ref <309>: DATABASE ENTRY DATE: 2002-08-28
gtgcaacgttgcaagtgaaatcatcaatcgtgtgtgcgctgcgcccgaccatggagctcgcggtcagagcagccgccgcggcctcctgctcctccggcgcctcgctccagctcccgcgggcccgagccccgctccgcctccttggccaccgccgcctccccgctcgccgggtggctgtcgaggccgccgcgatcgccgtcgagccggaaaacaaagtaccgcagagtaacaattcagaagccgaggtgtttgcatgccctgtttgctatgagccattgataaggaaaggcccatcgggcataaacttgccatcaatttataggtctgggttcaaatgttcaaagtgcaacaagtcattcaccagcaaagatatcttcttggatctcactgtcacttctggaacaaaagaatatagtgaattgaagccagctagaactgagctgttcaggagcccactcgtctcatttctttatgaaagagggtggcgtcaaaatttcaatcgaagtggattccctggacttgacgaagagcttcaaatggctcaagattatttccaatcagttgctggtggtgtacttcttgatgtaagctgtggcagtggcttgttcacaagaaaatttgcaaaatctggatcgtactcagctgtgattgctttggacttctccgagaatatgctttgccagtgttatgaatttattcagcaagatgatactcttgtaaacacaaatcttgctcttgtaagggcagatatttcgagactcccttttgcttcatcttcaattgatgccattcatgctggagctgctatccactgctggccctccccttcgaatgcggtggctgaaataagtcgagtcctgaggcctggtggtgtctttgtagcaacaaccttcttatcttctcccaggaacaatcccttctctgttgaagcgttgcggccactgagacagattgttggaccagttaacaccagctacaattacttcaccgaaggagagctcgaagacttgtgcaaatcctgcggtcttgttaattacagcagcaaggtccagaggtcgttcatcatgttttctgggcagaagccgtagcctaaaattacatcaaaacctttgtagccaaagtatagctgtcaattctacaaaagtctttgtaaaatgccattcaccgatacctgcatagattagacccagcagaagtttttgcttggaattcctctccctgttatgaagatatagttgtcacatgtatactgtgcttcagtacagtgatgtaccacagccagggtgtatttcacacctggaag

SEQ ID NO: 3031 - DNA, 2276 bp, Oryza sativa
  ref <308>: DATABASE ACCESSION NUMBER: AK060805
  ref <309>: DATABASE ENTRY DATE: 2001-12-06
ctagttcggcccaccccccccccctctcccctccacgccccgctccgatccactcagtgagcgaagatggctccaacatccatgagccttgctgcaaagacgccgcttcccttctcgacacttccttcgagtggcgttgcacagaggccagtttctgtgactgcctccctcgagcacaagactaatgatgccagaaggaagttcctaaagctcgcgcttgggaacctcggggtcgggcttcccaccttgttgggtgctaagagagctcttgctgaagagcaaggtgtcccgtcgtcgagaatgtcttactcgaggttccttgagtatctagacaaggacagagtgaagaaggttgatttgtttgagaatggcacgattgccattgtagaggctatttctcctgagctcggcaaccgtgtgcagagagttcgtgtgcagcttcctggtctaagccaggagcttctccagaagttgagggaaaagaatatcgattttgctgcacacagcaaccaggaggactctggttctcttctgttcaacctgatcggaaacttggctttcccacttatccttattggtggtctatttttgctgtcaagaagagcacaaggtggccttggtggacctaacggtcctggctttccccttggttttggtcaatctagggccaagtttcagatggaacccaacactggtgttacatttgatgatgttgctggtgtcgatgaagcaaagcaagacttcatggaagtggttgagttcttgaagaaaccagaaaggttcaccgctgttggtgctcgcatccctaagggtgttctgcttgttggtcctcctggaactggtaagactttgcttgccaaggctattgcaggggaagctggtgtgccgtttttctcgatatcaggatctgagtttgtggagatgtttgtcggagttggtgcctcccgggttcgtgatctcttcaagaaggcaaaggagaatgctccttgcatagtatttgttgatgaaattgatgctgttgggaggcaaagagggacaggtattggtggtggaaatgatgaaagggagcagactttgaatcagttgctgactgagatggatggttttgaggggaacactggaatcattgttattgctgccaccaacagggctgatatcctggattctgctttactcagacctggacgttttgacagacaggtaagtgttgatgttcctgatgtacgcggaaggacagagattcttaaggtgcacggtagcaacaagaagttcgatactgatgtctctcttgaagtcatagcaatgagaacacctggctttagtggagcagacttggcaaatcttctaaatgaagcagccatattagcgggccgacgtggtcggacagcaatttcctcaaaggagattgatgattcaattgacagaatagtggctggtatggaaggaactgtgatgacagatgggaagagcaaaagtcttgtcgcttaccatgaagttgggcatgcaatttgtggaactttgacgcctggccacgaccctgtccaaaaggttactttgatcccgaggggtcaagctcgtggtctcacatggttcattccaatggacgacccaacgctcatctccaggcaacaactgttcgccagaattgttggtggccttggcggtcgtgctgctgaggagatcatttttggggagcctgaggtgaccacaggagctgctggtgacttgcagcaaattactggcctagccaagcagatggtggttacattcggtatgtcggacattggtccgtggtcgctaatggactcaggagctcagagcggcgatgtcatcatgaggatgatggcaaggaactccatgtcggagaagctcgcggaggacatcgataccgctgtgaagcggttgtccgatgaggcctacgagatcgctttgagccagatcaggagcaaccgggaggccatggacaagatcgtggaggtgctccttgagaaggagacattgagtggtgacgagttcagggcgattctctccgagtccacggagatccctgtcgagaaccgggttcccccagccacgccggcagctctccctgcctaaatcccactagttttgtaggaatggaacatgctgtaagatgttcatattttcgattcttggtgtacactaactttactttgccggccggattttttggcatactacatgtaacttactcttggttaattataaaatgtaattagctgaaaaaggtttcttgcagtcacttcttaaccggg

SEQ ID NO: 3032 - DNA, 2103 bp, Oryza sativa
  ref <308>: DATABASE ACCESSION NUMBER: AK060806
  ref <309>: DATABASE ENTRY DATE: 2001-12-06
ctagctgagtgccaagcttatggaaagagtggtagagtaatcagaaggagatagataagggcatagagagagtcagagagaggtggatctatagatagctactgctctgctgctgctattaagtcagtctgtgctacgatcgaggagatgatgggagcagcggtgaccatggtggatcggcgcatggcgttcgcggcggaggccgacgttgatagcaaggccgcctttggattcttcggaggcgagtgcttcgtcggcgagggcgacctggtcaacccggcgccgccgccgccgcagcagcagcaggtgcacgagggcggattcgccgccgaggacgagagcgacggcgacgacgacgacgacgacgacgacgacgtggacgacatcgaggagctggagcgccgcatgtggcgcgaccgcgtccggcacaagcggctcaaggagcttcagcagagccgcgccgggagggagagccgggcgggcgacgccggcggcggaggcaggcagcagcggcagtcgcaggagcaggcgcggcggaagaagatgtcgcgggcgcaggacgggatcctcaagtacatgctcaagatgatggaggtgtgcaacgcgcaggggttcgtgtacggcatcatcccggagaaggggaagccggtgagcggcgcctccgacaacctccgctcatggtggaaggagaaggtccgcttcgaccgcaatggcccggccgccatcgccaagtaccaggccgacaacgccgtgccggggtgcgacggcgacgccggcggcgccgcgccggcggggccgcactccctgcacgagctgcaggacaccacgctgggatcgctgctctcggcgctcatgcagcactgcgacccgccgcagcgccgcttcccgctggagaagggcgtgccgccgccgtggtggccggaggggagcgaggcgtggtggcccgaggccggcgtgcccaaggagctcggcccgccgccgtacaagaagccgcacgacctcaagaaggcgtggaaggtcgccgtgctcaccgccgtcatcaagcacatgtcccccgacgtcgacaaggtccgccgcctcgtgcgtcagtccaagtgcctccaggacaagatgaccgccaaggagatcgtcacctggctcgccgtcctcaagcaggaggaggacctctatctcaagctccatcccggcgccctccccccgccgctctccgccgcgtccttcaacgccagcgtctccggcgagtacgacgtcgaaggagtcgacggcgacgaggccgggaacaacaacctgcagaaggcgcagaacgacgcgaccgcgttcatggacctcaccaccaccatggatgctgctctgagcaacaacaagttcctgatcatgccgctgatgaaggaagaggccatcgacgtcgacttcatccagaagaggagcgagccggagctgatgctgagcagcgacagccatgcccgcgtctacacctgcggcaacgtgcagtgcccgcacagcaactacgcgctcggcttcctcgaccgcaacgaacgcaacgcccatcagtacgcctgcaagcacaacgccgccgccgccgccgccgagagcaagccgccgccgccgcacatcttcgagccactcggcagcttcgacttcgacctccccgtcgacggccagagatgcctcgccgggctgatgaccatgtacgacaacgacgtcgccgccgccacgcagatgcaccaccaccaccatcagcagcagcaggctaatttcttcatccgcgacgacgcgccgttcggaggcgacgtcgccgccacggcggcggcggcgccggagttcaggttcagttcaaatttcaacgtgacaggagggggcgccgtggactacggcggcgccatgcagcagccgccggcgaagtacgccggatccaactggttctactgaaacgaattcgaatcgaatgggaaccaaaagaatcaccacccctagttcgattcgatcagtagcttgtagctgtaggggattagaggagctcataagcctgattaattttcagtgtgcttgtaagaattattggttaataatttttcagtgtagatccatgctatgcaagcttgc

SEQ ID NO: 3033 - DNA, 2950 bp, Oryza sativa
  ref <308>: DATABASE ACCESSION NUMBER: AK104340
  ref <309>: DATABASE ENTRY DATE: 2002-08-28
agggaacccaccgacctcgttcccctccccccacgtacacgacagcgaagagccccccccaagctagggctccccggcggatcctcggcggggtgggtctcgcgccgcccttcccccgattcggcggcggcgccggccgcgatggcgacccacgagcggaagacgatcgatctggagcaggggtgggagttcatgcagaagggcatcaccaagctgaagaacatcctcgaggggaagcccgaaccccagttcagctccgaggactacatgatgctctacacgacgatttacaacatgtgcacgcagaagccgccgcacgactactcgcagcagctctacgagaagtaccgcgagtccttcgaggagtacatcacgtccatggtcttaccttcattaagagagaaacatgatgagtttatgctgagagagctagtaaaacggtggtcaaaccataaagtgatggttcggtggctatcacgcttcttccattatcttgatcggtactttatttcaaggaggtccctaccacaactaagtgaagttgggcttagctgtttccgggatctggtatatcaagagatcaaaggaaaagtaaaaagtgcggtgatatccttgatagatcaagaacgtgagggtgaacaaattgatagggccctgttaaagaatgttctggatatatttgttgagattggcttgactagcatggactactacgaaaatgattttgaagatttcttgctcaaagatactgcagactattactctataaaagcccagacctggattcttgaggactcttgtccagattacatgttaaaggcagaggagtgtctgaaaagggagaaagagcgagttgctcattatttgcactccagtagtgaacagaagttgttggagaaagtgcaacatgagttgctaactcaatacgcaagtcagctcctggagaaggagcattctggatgccatgcattgcttcgtgatgacaaggttgatgatctctctagaatgtacaggctcttttccagaataactcgtggtttagaacctgtttctcaaatatttaagcagcatgttactaatgagggcactgccttagtgaagcaagccgaagatgctgctagtaataagaagccagagaagaaggagatagttggtttacaggaacaggtttttgtccggaaaatcattgagcttcatgacaagtatgtagcttatgttacggattgttttcaggggcacactctcttccataaggcacttaaggaggcttttgaagttttttgcaacaaaggtgtttctggcagttcaagtgctgaattactagctaccttctgtgacaatatcttaaagaaaggcggtagtgaaaagcttagtgatgaagcaattgaagatacccttgagaaggttgtaaggttacttgcctacattagtgacaaggacttgtttgctgagttctatagaaagaagcttgcaaggagattgctttttgacaagagtgctaatgatgaacatgagagaagcatccttaccaagctaaagcaacaatgtggagggcagttcacttccaaaatggagggcatggttactgatctcactgtggcaagagatcaccaggctaaatttgaagagttcataagcacacactcagagttgaatcctggaatagccttagctgttactgtcctcacaacaggattttggccaagttacaaatcttttgatataaatctacctgcagaaatggtgaaatgtgtagaggttttcaaggagttttaccaaacaagaacaaaacacaggaaacttacctggatttattcactgggaacctgtaatattaatgctaaatttgaggccaaaactattgagctcattgttacaacttatcaggctgcattgctgctgctgtttaatggagttgatagactcagctattctgagattgtgacacagttaaatctctcagatgatgatgttgttcgattgctccattctctatcttgtgcaaaatacaagattcttagcaaagaaccaaataatagatctatttcaccaaatgatgtcttcgagttcaactcaaagtttactgacaagctgcgaagattaaagatacctcttcctccagttgatgagaagaagaaagtagttgaagatgttgataaggatcgcagatacgcaattgatgcatcaattgtgcgtattatgaagagtcgcaaagtattgggtcatcagcaacttgtgatggaatgtgtggagcagcttggacgcatgtttaagcctgacttcaaggcaataaagaagcgaattgaggatcttatcacaagggattacttggagagggataaagacaacccaaatgtgtacagatacttggcttgatgggttttctgctggtggacggatacttgccggagcctgacttctgtgccctgcggtgctgcatttacgaatgggaaaatgataaaagtcgtcttgtggtacaacaccactggctgctttgagttttcaggcaatggttggtctgtcaaaaactcagcagagtccgccaggacaaagatttgctgctgggacttcgcaaggttctcctaaatgttgtaatcttatactaggtgatgccttatttgttacttttctgcatatcatatagttttgttgattttcaatatgttgtctagaatctagataaatggagggatactatgagttagcgatccaaccgtgccctactctcaagtcacaaagcagtaagatggccatctctgctgtaatatttattgtgtatgatgtcgtagatatgctggaagcactaatgataatggtgcattgcttcgccccacatcgtggtttattgtacaagttgagctactttgttaagtactatttgtgcttgtaattttgcaagtttgcggtacttttttttttggcataaaatgttgattaagccgtgaccccc

SEQ ID NO: 3034 - DNA, 1466 bp, Oryza sativa
  ref <308>: DATABASE ACCESSION NUMBER: AK060807
  ref <309>: DATABASE ENTRY DATE: 2001-12-06
ggctgctatggatgatctgatggcccaaggaatgagatatgctaaccaggcacttctttctggatgctctgctggtggtgtttcaaccatacttcactgtgacgagttccgtggattgtttagcggcagtacaaacgtgaagtgccttgctgatgctggaatgtttctggactttgttgatgtctctgggcaacgagaaatgagggacttcttcaatggtattgtgagattgcaggtatctgccactgtccaccatgttatgatacttctgttcgtcatgactgtaacacttcttctacatgttatgctactattaatttatgtcagaatatacgatacctttgaaaaaaaatattttctcaatatctttttttcgcttatgttctcatgaaaattcgaccaaaaacagggttccggaagaagcctgcctaggtcttgtacctcccgcatggataaaacttcggtaaggaaaacatcaagaagtatctaacaaagatatacacagttagtttttcacaatttctttttctaattggtgctctctacagtgctttttcccccagaatgtggtgccaaacattcaaactccaacttttattttgaacactgcttatgatgtgtggcaggtatttgtcagttgttttgcatgttaacggtatgataaagttggtccacaaatataaactataaaatgttcaaggacatggttttattttatattttccagcttcaacaaagtgtggcccccaaaagggctgatccgcaaggtctatggcgaggatgtaggatgaatcatgcctcctgtaatagcaaccaactgcaatttttacaaggtttcaggaatcaaatgctcgatgcggtgaggggtttctccggcgcaaggcagaacggtctttttatcaactcctgtttcgcacattgccaaagtgagagacaggacacacggtacgcaggggattctcctcgtctcggtaacaagagaattgctgaagcagtaggcgactggtttttcgatagggcagacgcgaagtacacagactgtgcatacccttgtgatggtacctgccatcatcttacattcaggggagattactaagattcattcttagaccaccaccaaatgtaggtggcaaaaagaggggaaaaaagggacacccaatgggaatatatacagaataagaggaaggtatagatagaggatgcaaagctagtgacttgcatggacatgttcatcattactcagatatgatcttagggcagggcctggtgtgcttgctaatgtggcatgatcaggcctctgcatttagctccacacaccgattgattcttttccattgcctgaattccctggatgatgtatctctgaacatttggaccccaatggtgtatctgtatcataaatttacatatccatgtactaaacgtgataatatgaatgaaataagtaatgtgcctgcaagaaaccc

SEQ ID NO: 3035 - DNA, 1602 bp, Oryza sativa
  ref <308>: DATABASE ACCESSION NUMBER: AK060808
  ref <309>: DATABASE ENTRY DATE: 2001-12-06
tgaataattcaaggggtactgaagtcatgaaggactacctagacaaaatggagaaagaggttggcaaaaagattgctgtaaggtctccacacacaaactcagcattccagaagatcttttctttgccaccagaagaatttctaatcaatgattttacctgtcatctaaagcgcaaaatgctcacacagggccgcctgtttttatctccaagaattattgggttctacactaatctttttggccacaaaacaaaattcttctttctttgggaagatatcgaggacatccaagtgatgcctgcaacactatattcaatgggaagtccatctctgcttattattcttcacaagggcagaggaatggatgcaaggcatggagcaaagcaacttgataatgaaggccgactcaagtttcatttccagtcttttgtatcgttcaatgtggcacataaaacaataatggcgctctggaaggcaaggtccttgacccctgaacaaaaagtacagctggtagaagaagaatcagaaatgaaagacctccagaataatgaaagtgattctttcttaggaatagaggatgcaaaaatgtcagaagtattttcatctacaaaaccttttgatgtatcaacactcatgagcatatttgagggtggtcctttggagcatcaagtgatggagaaaattggctgtatggagtactcagtttcaccatgggagtccgtcagagctgatgcttaccagaggcaaattcattacaagttcgacaagagattggcacgccatgaaggggaagtaatgagcacccaacagaaatcccctttgcctgataaaaatggatggcttgttgaagaagtgatgacgcttgaaggtattccagttggtgaatacttcaacctgcatatgcgataccaattggagcagatctcatccaagcccaaggcatgcaatgtccaagtgtctattgggatcgcatggttaaagagctgcaagaacagaaagaagattgctcaagaggtactatccagtgcatcttctcgcctcaagaagatgtttggcctactcgagaaggaattgttaccagccaagtaggggccctttttcataccctgcgttttctggtgcacccatgtatagcccgaaatcgtcgtctggtgtctcttggttttgacaacatcttgttcctgatgctgagcaagaatcagtacataatgcgaaaggttctaacttcgcaggcaaggcagtgtaccataccctgatgaacatctccccatgcaagattcagactggagaactgacagcagagctaggaagttgttctagtcatgaaaacgttactgttcaaatgcagttcttgaacaagaggtttggtatcttgcctatactcttcaagatagatcattcgaaactttggtctgtcattgtagttatcagttgtcagtccctttagcaacagaaaacaatgcagcttccgtagccattctttttttagatttttactccagcaaagattacatgatctgttgttacggacaaaagaaatgggaaaatttaccagaaaaactgagccactgtttaaccaatggaccaagccattctttttttt

SEQ ID NO: 3036 - DNA, 2169 bp, Oryza sativa
  ref <308>: DATABASE ACCESSION NUMBER: AK060809
  ref <309>: DATABASE ENTRY DATE: 2001-12-06
agcatctccttgtcgcctcgcggtaggcggcgatctgtttctcctaggaggcgttctccatctccttccagaaattccatttcttttgggagacagcaacgatcttcaaggcgctcagtttcacctaggcgttctttttctccacgaaagcgttctccaagaagtaccccttcgatgtcgaggcggagatcaccgtattccagaagatcaccttcagtaccaagacatcgatctccgtcacctcatcgtagatctcatattcgcaggaaatctccaccttttgtgcgtcagagatcaccatctccacaccatcgccggtctccaggtcgtgcaccaagatcaccatctcctgcacgtcatagatctcctcggcgcaggtcatctctagacaggcattggtctccatctccaggaagacgtaggcctcggtccccttcacccggacgacgtaggccacggtccccttcacccggacgacgtaggccacggtccccttcaccaggaagacgtaggccacggtccccttcaccaggaagacgtaggccacggtctccatctccgggtagacgcaggccaaggtcacgatctccaggaagacgaagatccccctctcctcgaggctctccgcggttgaggtcaccaaaacgccctaggagatcgccaatttcacccagaagtcgttctgcaaaccgtcggccctctccacaacgaaggaggagtaccagtccacacgataggagcccaatccattctcgcaggagcttgagtagagacattgaaaaaggaacaaacggcattccctccagtaacgatgtagatgtgcttcaaaggaacaaagaaagatcacacgatgacaataggaatgatacagaagtgagtggccatctttcatcggattctgagcatcgtaagctgacaaaatccttgaattctccaaacaagccagaaaggaactcgacacgcgatagttctttgaagggcactgataagcacttgcccagtcaggtcagaacagatagcagtggagaagaggagggcagtcgtgcaagagagaatgcacgaaaagcaaattcatcacgcagaaaaattaaggatttctcagcagatctggaactaaagaaagcacatgatgatttgagccctggagaaaaatctccatcacaacatagtggcaaggagacaaggaggaaacagaacaatcaactgtcagagtcatcagaagatgagcgtgatggtagaagaacgaaacacacggttgattctcctgatgattcccaacagaaacagcacactcctagtagagttggaatgcacaactcttattcaaaggatggcatgaacagtgaggatgcaataaagggtttacgtgacggtatggcttctaagaagtatcctgctaaaatcgatgatgattctgagtcagaagatggaagtccttttcgaaaagataagagaaaagcacacggtaataacaacattgattctggcagttcaggttcagaagaatcagggaaacatagatcccattctgagaagcgaaagcataaaaagagccgtaagcataagagacgttatgatgacagttctgatgaatctaattcggagtcagatgacaaagagtccaagaggaggagaaaggaagagaagaggttgcgaaaagaggaaagacggcgcagacgtgaagagcggcaccgtagaaaggcagaccgtcaggccagcaaactaaaactgaagcatgctgaaactgttgatatggcttcagatcttgagaaggatcgtgaatctgactcagatgctgatgctaggaagaaaggttcatataatggaagagacgaatcggatcagcagaaacttgaaattgagcttcgcgagaaggctctggaatctcttagagcaaagaaagccatcaaccactaggctgaggaatctcttgctatgcatttacatcttttaaaaacttttcttttgcttatatcatgttctggaagtgtgcttatatgactcctatttaatgttctgtatgtttacgtggcagttgacctgagtaattgaggattcctgagctgtttgcttgatgcagctgtattcaggcttagctgctagttatctggtaatgtttgcttttataagtctgtacaaccataatactgagaaggaaatatttatgtt

SEQ ID NO: 3037 - DNA, 2038 bp, Oryza sativa
  ref <308>: DATABASE ACCESSION NUMBER: AK060810
  ref <309>: DATABASE ENTRY DATE: 2001-12-06
ctactgtaaattatcgcttcattgagaaggccctcccttcacttgttccgatgctgctagaaactctgttaaagcaagaggaagatcaagatcaggatgataatgtatggaacatttccatgagtggtgggacatgccttgggctcattgctagaactgttggtgatgcgattgtgcctcttgtgatgccttttgttgagggtaacatcacaaaaccagattggcattgtcgtgaggcagctacttttgcatttggttctatccttgaaggtccatctgtggagaaacttgctcccctggtacaggctgggtttgacttcctgctgaacacaacaaaagacccgaatagtcaggtaagggacaccactgcatggactcttgggagggtatttgagctcctgcattctccagccagtgcaaatccaattataacaagcgcaaaccttactcgtatcatgactgtcttgctggaaagtagtaaggatgttccaaatgtggctgagaaagtctgtggagccatatattttcttgcccaaggttatgaagacgcagagtcgatttcatctgtgcttacaccttttcttcctaatctcattgctgctctcctttctgcggcggatcgtgctgataccacccacttcaggcttcgtgcatcagcttatgaagcattgaatgagattgtgagagtcagcaacatatctgaaacgtcaggcattataggtcagttactgcaggagatcatgaggagattgaatctgacgtttgatctccatatactttcatctggtgacaaggaaaagcaaagtgatcttcaggcattactgtgtggtgtactgcaggtcatcattcagaaattgagcagctcggatgctaagtcaataattgcccagactgctgatcagttgatgtttctgtttctgcatgtttttgcttgccacagctctactgtacacgaagaagcgatgcttgccatcggtgctcttgcttatgccactggtacagattttgtgaaatacatgcctgagtttttcaagtatctggaagctggcttgcagaattatgaagagtaccaagtctgttccatctctgttggagtggtgggtgatatttgccgtgccttggaagataaaattttgcccttctgtgatgggattatgactgttcttctcaaggacctgtcaaactcgatgcttaatcgttctgtgaagcctccgattttctcatgctttggagacattgctcttgctattggtgataattttgagaaataccttccttatgctatgccaatgcttcaaggagctgccgaacttcttgctgttttggaccatacagatgaggatatggttgattatggtaaccagctcagacggggaatctttgaagcttactctggcatactccagggtataaagggtgcaaaagctcagttgatgataccctatgcaagccatctattgcagttcactgaagctgtctacaaggaccgcagcaggttaatgtcatgcacattgcaatttatgttgtattatattggtaagtttttacctgcttagcgcttacatacattacatttgtgtttatactttcagggatgagagcgtgacaaaggctgcagttgctgtcctgggggatcttgcggacacactcggctcaagctcaaaggatctgttcaaaagcaacctcttccatgttgagttcctgagggagtgccacgatttggatgatgaagttagggacaccgcgtcatgggcccagggaatgataaaccaagcactggtttcttaagaggggattattttgttttgtcagttattggggaggtttcttttgtggctgtgccaagaccatttgccacagattgaacgaaaggataccaacatatatgtagcgtcagtcgtaggctgcttctgtgcttttgtcgtcagtctgtcaagtcagtttatgcgtcgcatttggcgtgggtggattctggcattgaatgtcttgaacagctaaacctgttaatgttaatgtattctacctgtggtgtttatcc

SEQ ID NO: 3038 - DNA, 1583 bp, Oryza sativa
  ref <308>: DATABASE ACCESSION NUMBER: AK060811
  ref <309>: DATABASE ENTRY DATE: 2001-12-06
gtatatgcaaaagaaattgatgaacacaagaggacaatgattcttgtcaacaaggctgatctgttaccaatgaatatcaggaaaaatgggcagactattttaaggcacatgatattctctatgttttctggtccgctaaagctgctactgccacattagaaggcaaaatattaagtggatactctgaacaagattctgcttcacttgatttggacaccaagatatatggcagggatgaactcttaaagaaattgcaaactgaagcagaattcattgtagcacaaaggagggccgcagccatcaaagaggacagcagagccacttcctctgattctgtttcatcagtggctaagcatgttgttgttggatttgttggttatccaaatgttggaaagagttcaacaatcaatgctttagttggtgagaagaagactggtgttactcacacacctggcaaaacaaagcatttccagacgctgataatctcagaggagctcactctatgtgattgtcctggtctggtcttcccttccttctcaagctcaaggcatgagatggtgtcatgtggtgtcttgccaatcgataggatgactaagcaccgggaagctattcaggtggtggcagatcgtgtcccaagaagtgtccttgaacagatttacaagataactctgccaaagccaaagccatatgaatcgcagtcgagaccaccaactgctgctgagctgttgcgagcctactgtgcatccagggggcatgttagccatgctggacttcctgacgagactagggctgctcgacagatactgaaagattatatcgatggtaaaattccacacttcgaacttcctcctggcatggtagatactgaaaatgaacacgaagaaacctccggattagaaggtccaactacctcagcatacaatgaatcaggtggttccgattccgatgaacgggatgatacagttgatccagcacaaccagatatgaggcatgtccttagcgacctcgaatcgtttgacctggccactgaagggtctaaacctgctgggaagaagaagaaagaggcatcccacaagcagcacaagaagccccagaggaagaaggaccggtcatggagggtcggcaacgatggcggcgatggaactgcggtcttaagggtgtaccagaaaccagctgttaacctctctgccgtcagtgcaagcgacaagacctagtaccctgatggcatattgtgttttcaactacacttggcacacatgggcaataaggtctttgctcccttgagttttctggagaccctgacctttgcatatgcaaaatcaagaaatctggtttacgcctgccgtgttgagtggtaggggaaattttgccgcctgtgaacaaaattgccgaggcttgcttgctctggtggatgcgagatcggagacgaaagctatatagaagaagaaaattttctgttttatttcagcttttgttcccctggcattatatacagccagtgtgaattgtgtgtgatatgtgtactgtttgttcctccatgaatgatcaagaaattaacatagaaattgtaataacttttcacc

SEQ ID NO: 3039 - DNA, 2780 bp, Oryza sativa
  ref <308>: DATABASE ACCESSION NUMBER: AK060812
  ref <309>: DATABASE ENTRY DATE: 2001-12-06
agcagccgcccagattgcacactctctactcctcgtaccaaccatccaaatggacacaagaatatagagtgccatggctcgttagcgagcgttgcgagctaattaaccgtacgtgcgattgccgggagagaagccagccgctggccttcgctgcggcgcgcgcggtgtggcaacgacgagcaagcaagggggcaggtcatggctttgtccttgaactgagaagaaggtgcatgataacgcgccacacgtgaaactatattcatgagggatgactgaaatggaggattccttaagatcccgcacagagcagctactccgtgttagagaagagaaagaacgccttatcatcgaagcagctgataagatctctttggagcagaagaaagtgtggagtctgcagcagaagttagaagatgcaaataagcggtttgcaaaggtcaccactgaaaactacaatcttcgcaatattgtcaactccaaggataaggtgatcactgagctgagtgagtctgcagcactcctgaaccaaaagttaattgatgccacagccagacttgaattcacacacaaacagtgtggctctcttcagtatgaggtgcgcatccttcagaaggaactcgagattcggaacaaagagcgggagtttgacctcaaatcaattgatgctgcccagaagcatcagcaggaaagtaccaagaagattactgcattggaaactgaatgccagaggctgcggaccatggtccagaagcgtcttcctgggcctgcggctttggcgaaaatgaaagatgaggttgagcgacggggcagtaattgtgttgagaacagaaggagaaagccacgttcatctgcacagtcatcaccgcaggtggtgactccaaggcatcctgtttctgaaggttaccttgtcaagatgcaggaattggatgatgaaaacagacacctcaggcaattgttggccaagaaggagaatgacctccagtttgtgcagttgcagtatgcagatgaagcatcgaagctgtcagtagtgcaagggcagctcaaggagttggttggtagccatgaactggatgacgacaaccgtcctgaaccatgggcaaatagttctttagtttccaaaggagagcattttagagttgggaagcaacatgcatctcacagtaggggaagaagaatagcaggatctgacatgcagttgcttgtagatatatcggagatagagaagcttgaaatgatttcaaggccttcaagtgcgccacatcaatgcgtgccagatgcttctgatacagagtccaaaactgccctgacagaaacagtttgccaagatcgaatccttgaagatggtctatctgacaagtatcccgagtggattcaagatgttttggaacttatcataaagaagcatcaagtccttaaaataagcgtcgatatcattattgatgaaataagatctgcattgaggactgagatttcagacaaaggaaatgatgctgcaaatgtgacatatgaccaggcagtaatagacagcatggtggctactcttgttgaaagagtgagttgcatgatcgaaagatcttctggaaacaatgttctgagttctcaatcatttttgcatgagaaatctgaactcacttgtcatcttgagcaccttatctgtgtatgtagtgatgtactggatggaaaggccaatcttcgaaagttcatcgaagaagtttgcttaaccctcgagtggacagtgaaccaatatatttattgtgtcgatgctctcgaaactgtggattgcatcacaaatgatttcgatggaaatgtatctcttagaacattaaacatgcaggaaaaacaacaaatgcaaagcacaaatccgaaagtggctgtaggagttcaacaagaggtacagaaagaaccgtttctgatccctggtgaccccgtagaaaatcattctcaggttcagtttgtcacttgtaagcttgataaggaactgctggctgttaggcaagatcatggtgataattgtcaagaaaagcagtcagtacattataaagaagaaagtgctacggctgatgggagcatgcaattgttaccagaagaagaggggaaacaactaacaaattcggcaatatccgcagcagctgataaacttgcagagtgccaagaaacaattacaagcctaagcaagaaactgcaggcgctaaaatgtccagcaaatgcggatgctgtagacaaaagaaagtctgataacttgcacctgttagttgcaaatcagaattttagttctcccccatccatagaagcagcatgcaagaaagagaacgatgaacgtgttacaactgaaaagaaccttctacaggagcaagatgttggcactggccataaagttgataacaatggttcaacacaaatcgctcctcgtcccgtgatccccaagtcgccactaaccactgtttctgttgatatgaagaggaggaagaaaaagaagcagggtgggagcttgctgagtagactcatctttgggaagaaggcataaaacagctccttggctgctagcctgctacgctcctctgattaagttgttagtgcatccagcagtgctggagcttgttcttctaagttattccgatcccatgtccaataagagggggcaatgctacgtagctaaaatataatttatcggttatgtcatatgtgttgcgacgtgatcaacactatatgtttgtaaaatcctgttccagacatatgcatatggtcttatgattggtggatttattatggtacggggtact

SEQ ID NO: 3040 - DNA, 1790 bp, Oryza sativa
  ref <308>: DATABASE ACCESSION NUMBER: AK104341
  ref <309>: DATABASE ENTRY DATE: 2002-08-28
tgagagggcttgttgagtttgatcctaataagcggtggtcaccattgcaggcttcatatcatcccttcataactggtgaagcgtttactggtccatatgagcctatccaggagactccaagaattcctgttggtcgtgttgcagcagttgatcataatcctggaggaggtcactggttagctgctggtctttcccctcaggttgttggaagcattaacagaggcctaccatttaataacgcttttgcaccaaagattcccttttcatatggaagcagctgtggcagcttcggtagccatggtagctttaatgacaatgtaggtcttgcaagcagctatggaagctatgatgtcaacagtgtgaacatgtatcattcaccactaggcccttctggattcaatttacattcacaagccggaggaacatttttgggatctagtccagatattagacgacgatcttatctctatcatggtggtggcattcgattaagccctgggtgtccagggcctatgtctcttggggcaagtccatcacaatttactccaccaaattctcagatgcaaatcccaagtactgctacaggaaagtatggttccacttctcctgcaaggagcagtcatggctcattgggaaaagctgctgctgtaggccaatacaatagaagaagaaatcttggtcacccacctatatcaatgccgcctcatgaatacacatctcagctgactcagggacaccatggggatggcaccattagtaatcactttgatggctatgctcgtggacattctggttacccacaaagtgcactccctaatcctggtcatttcagttggagaccacatacatgcgctggcagtggtttatcaacagacacttcgaaccatgggtcctttccaccatctcgatacggtggttttcctcctacgcactcatccaatgtgtcagcagatacactggcttccacctcatcaataccggatccagctgattgggatccaaactatagcgaagagtcacttctgcaagaggacacttcactatcagatgcgttgagcgatctccacctgaaggatgcaagtggtcaaacaaaccaatccagcagattggcccatatccaaagccatgctattgcaaactcaaactctttatccatgaatcaaagaggtgaccgcctgttccatgcatcaactcttacagagagtagtgcctctacaggccatgtgacctatgatggttaccataatgcaaactattctcagctgaattttcaaagtcgccatggacaaccatttcagcggtataaccatatgactgcgagctacctacgtccaatggggaatcatcacaatggtcagcctgtatggcctaattatggcatggcagaacctccacctgctactatggctgacggaatgccttggggaggaaggcctggtcactcttttacagcaggcggactgccgtcttcctttgcaggaaaggattttggaaggattttctagtatggatctggaggaatgccattcaattggttgcattagtagtttgtatttgcaactcttggttgcattgcttacgggctgttgattttgcagtttgttgcattcctctaattgatcccttcgcaatgctccggctcatagaactgtatggtatgggtctgtaattgtagcattctctgttggtttcttcttttcgtttttggtttatttgttatacatcgagcggaggcttctgcctgctgcaaaaacccagcgggaaaaagaagttgagcagcccctactttc

SEQ ID NO: 3041 - DNA, 1502 bp, Oryza sativa
  ref <308>: DATABASE ACCESSION NUMBER: AK060813
  ref <309>: DATABASE ENTRY DATE: 2001-12-06
gtgtatgtgatagacccagggttttccaaacagaaggtttacaatccaaggataagggtggagtcccttctggtgtcgccaatttcaaaggcaagtgcacatcagagagctggtcgtgctggaagaacgcaacctgggaagtgtttcaggttatatacagagaagagttttaacgatgatttacagccacagacatacccagaaattcttaggtcaaatctggcgaatacggttcttaccttgaagaagcttggaattgatgatttagtgcattttgactttatggatcctcctgcaccagaaactttgatgagggccttggaagttttgaactacttaggggcacttgatgatgatggaaacctcacgcctttaggtgaaacaatgagtgaatttcctctagatccccagatgtcaaagatgcttgtcatcagtccaaaatacaactgttcaaatgagatcctttcaatatctgccatgctgtcagatagttgctgtttgttgagttattctgacaaagcaaatggtatcgtctcgcctctttgcatctgctgaccaccatggacttcgtctgttattgccgtattctttctctagtacccaattgctttctccggcctagggaggcacagaaggctgctgatgaagcgaaggctcgatttggccacattgacggggaccacctgacacttctgaatgtataccatgcatacaagcagaacaatgaagatccccagtggtgttatgagaacttcatcaatgccagagctctaaagtcagctgataatgtcagacaacagcttgttcgcatcatgaccagatttaacctcaagatgtgcagcacagacttcaatagtcgggagtactacgtcaatatcaggaaagccatgcttgcagggtacttcatgcaggttgctcacctggagcgaacaggacattacctgaccgtcaaagataaccaggttgtccatcttcacccctcgaactgtctagaccataagccggagtgggtcacctacaatgagtatgttttgaccaccagaaatttcatccgcacggtcatggatatccgtggtgattggctgattgatgtggctccacactattatgatcttagtaatttcccctcgtgcggggcaaagcgcgtccttgagaggctgtacaacaagcgggagagggaaagagctgctaataggaactgaagttgatggcgttttccccttgcgctagccttccactcgagaagattcgggtatatcagcttgtcgtgccggcgccaacaatggatgcttcctcatcctatcgtatgatttggcttgatggatgctcgtcactacgtatgacatgccaaatgctgctctctagccgtacaatctaccagcaatggcctaggatcatatttttgtttcttttagaagttgtagcctgtgacgcaggatattatgtaccggtctcccatattttgatggttctggcacccttttatttcggcatatttgttt

SEQ ID NO: 3042 - DNA, 1180 bp, Oryza sativa
  ref <308>: DATABASE ACCESSION NUMBER: AK060814
  ref <309>: DATABASE ENTRY DATE: 2001-12-06
tgcactccagagcttactaatatcgccagcctttggttcatgtcactatttatctgcatttttgctacgggcattctggaaatgagatggagtggtgtaggcatcgatgattggtggaggaacgagcagttttgggtcattggaggtgtctcttcacatctctttgctgtgttccaaggacttctcaaggtcatagctggtatcgatacaagcttcactgtgacatcaaagggtggagatgatgaagagttctcagagctgtataccttcaaatggacaaccttgttaataccccctaccactttgctcctattgaacttcatcggggtagtggctggcgtttccaacgcaatcaataacggatatgaatcatgggggccgctctttgggaagctgttctttgcattttgggtgattgtccatctgtatccgttcttgaagggtttggttggaaggcaaaacaggacaccaacaattgtcattgtctggtccattctgctggcttcaatcttctcgctcctctgggtccggattgatcctttcctggcaaagaatgacggccctcttctggaggagtgtggtttggattgcaactagaaggtcagcatgtgaacttccccaatcaagtgtgtgcttgaagaagtatttttgcaggtgtttgtgcccatatttttttttcattttttcctctgtagatagaaacacgaaaaaaaacttgcatttcttttgttccatggtggtagctcagcctcatatctgcaatattgagcaaacgggaggctgcgacaaccttgtgcagttcggccacgaaaaatacagtgaatgccagtgtttgattgttcagcattctttattagtttggtggaaatttgatcgggtgagccgaacagaaagttgcttgattctgcattgctctccaccatctacaaaaactcggtacttgtttctcaataaggcaggaatggatctgccgtctggaatagaggaagatgcacattatttatgtagcgagttaaaatatgcctgaagggcttgttcattccttgttcctctttctatttcatttttttgtccttgttagaacaaatagatctctagttttagtgatttagcccatccggtgttgtaatttgtaaaggtgcccctttgttcaatacttcaattgcgtaatgtccctgat

SEQ ID NO: 3043 - DNA, 1280 bp, Oryza sativa
  ref <308>: DATABASE ACCESSION NUMBER: AK060815
  ref <309>: DATABASE ENTRY DATE: 2001-12-06
aaaaaaaaaaaaaagagattgttcattgtacaatatcttcccccataggggatcaggaaaatctgcaaggtaacattgatggcaagatggacgttggcctggcggcttgccagacagagtcagattttgtgagtggaaatgaccattctagggagactgatttagcaggcagccaggcaccttatgatgcctcggataaggaagatactgctgctgatttgattggtcctaagcaagccactctcgagatcgaaaaaatgcagattgatggtattcctgaaggtccttctagcgtgcctgctgttttgcagttaactgacccaaatcagccagcagaacaagagagattagagaatagtgactctaaatttgcatcaacaaaggaccagggcagagtggatggaacttccaatttgagtggaggtgataatgcaaagtgtagtcttaccaatgatgattctcaaactgtgaatctagtaggatattcaccatcagaagactcgaatgatgatgattctgtccaagcagctgatagtgatggcgttctgggaaataaagaaggtactgatgatgttatctctgctgcatgtaccgatgatgtatccatgctgaagactgaatcaatagatcgtcatggttctgacgaagttgatcattccaccgccccgtctgctgccatcaaacaagagagtggtactgaagttacgtgtgacgcttctgttcctgtttctgaaagctctatatcaaaggaaatcggtacatcgcctgagtgtgatgatgatcaagtggctacagcagcacctcatccaccaacgccattatctgatgctactgatgtatctgctgatgtgcaaatcccagcaggaatatcggaggcaaagctagagcagccgaacgaaacgactagcccgtcgggtgctgctactgaagaaaataatactgtcgtgagcactcagattccaacattagctgaatcagaagatagaacacccgccgatactgctattcaaggtactgaggttgacagcgctgagccagcatctgtaagtgatgacgaaaacaaggttacagcagctgatgatagtgcactcccgtctactgggccagaggatacagcggacgataaaattgatagcagcgctgatgctagtgagaagtaggttatgacagactgagtatgtaaatgatctctctcaaacctagttgtaaatgttactgctgaactgatacagcccaactactatagtgccttagttataattattattgcatcttttgct

SEQ ID NO: 3044 - DNA, 1406 bp, Oryza sativa
  ref <308>: DATABASE ACCESSION NUMBER: AK060816
  ref <309>: DATABASE ENTRY DATE: 2001-12-06
ttaatcccagtgaaagaacctatccagaagagatgatccaaacagggatatcaaccattgatgtcatgaactccattgctcgaggccaaaagattcccctcttttctgctgctggtcttcctcataatgaaattgctgcccaaatttgtcgtcaggctggccttgtgaaaagcttggagaaaggcaagcatgcagagggtggtgaagatgacaactttgctatcgtgtttgctgctatgggagtgaatatggaaacagcccaattcttcaaacgtgattttgaagagaacgggtcaatggagcgggtcaccctttttctgaatctggcaaatgatcccaccattgaacgtatcatcacccctcgaattgcactggcaactgcagaatatttggcatatgaatgtgggaagcacgtgcttgtcatcttgacagatatgagttcatatgcagatgcgctccgtgaggtatcagcagcccgagaagaagtgccaggtaggcgtgggtatcctggatatatgtatactgatctggcaaccatatatgagcgagctgggcgtattgaaggaagatcaggctccattacccaaattcccattctaacaatgcctaatgatgatattacacatccaactcctgatcttacggggtacattaccgaaggacagatatacattgacaggcagctgcataacagacagatatacccacccatcaatgtcttgccatctctctctcgattgatgaagagtgctattggtgagggtatgacccgtcgagaccattcagatgtgtctaaccagctttatgccaactatgcaattgggaaggatgtccaggccatgaaagccgttgtgggagaggaggcgctctcttctgaggatctgctttatttggaattccttgacaaatttgagaggaaatttgttacacaaggagcatatgatacaagaaacatctttcagtcacttgacctagcatggacattgcttcgcatattccctcgtgagcttctccatcgtatccctgcgaagacattggatcagtactacagcagagatgctacccactgatctatgttcagaaaaatcaaatgttttctctcaagtgcagcttgaataaattgaaatgtttgaacttgtggcctttttgctgtagttatatatagtccggtcctattctttctgtcgggtgagcataattcgttcgtagatcactttgtcacggcaacttctgtaatattgtgccatgtatctttaaactttcacacttgagctctttttggttttcattcgccagaattgttagcaagagcattgtaggccaagatgctcgaacctccaactctccaaggcactggctgtatctacttttgtgaatgaataaagatggaacaataaactgcgatg

SEQ ID NO: 3045 - DNA, 1619 bp, Oryza sativa
  ref <308>: DATABASE ACCESSION NUMBER: AK060817
  ref <309>: DATABASE ENTRY DATE: 2001-12-06
gaactcaccagcacgcacattccatagatggattcagtgtgatggttgtggagtgcaaccaattgttgggcctcgatacaagtctaaaacaaaagaagattatgatttgtgtgatgcctgctttcatcgcatgggcaatgaggtcgagtacaccaggattgacaagccactcttaccccagagattactgagagaccctacattgtgtcgcaagatccattcacgggctgcgatgaagtcaaagcgggagaaacttgaaagtcgcttcattttggatgtaactgtcctggatggaacattgatggcaccttcaactccgtttactaagatttggcgtatgcataacaatgggtctatcatgtggcccttgggcacacagcttatatgggttggtggcgaccagtttgcactgcagacctatgttccattagaggtagattccagtggacgggtttcctgttgatcaggagattgatgttgctgttgattttgtggcacctgcaaggcctgggaggtatatatcttactggaggttagcatcaccttctggccagaaatttggtcagcgtgtttgggttcacatccaggtggaggatccttcttttgtcagtaacaacaggactgccgctataaacttgaatttgcccccagaaagcaatatcacaaacacaagtaatttgattgatgtcaatattgagcctgtggatcaagtcttcaaccaacatgtcaatagcacaaacaaggagttacttgaacatttgatccaccaccagattgacgagcccaagaatcctgagcctgctccattacctgtgcccattgtttcttccacaacatctcttcaccccatcattgatgttgatgttccctccagttcaactgctgctgcttttgtgcctgtctttgatgagcctgcgcctgaacctgctgtgactcctgtgcctccaactgttaatgtgcctgctggtaatgcacctgcgtctgttggtgcatcatcatctgatcatcatggcattgacaatctcacagaagagaaactgctgaaggaacttgaggaaatgggttttaggcaggtcgatctgaacaaggagatactcaggcagaacaagtacaacctggagcagtctgtcgatgatctctgtggcgtcagcgaatgggaccctctcctggaggagttgcaggaaatgggctttgaggacactgagataaacaaggagatgctcgagaagaacggaggaagcatcaagcgggctgtgatggacctcatcgctagggagaagaaagaccagtgaagatcgtgtgctcttgagccatccctatctataacctaactatgtgtgtatatgcgtaaataatgtgacgaggtgtaaggctagcgccggccgccggggctgctgctacagtctcagggcctgcttgcttatgaactgtgtgtggtgttgtgcgactggtatatttgtcgcggagatatgtgttaagtgcgcgtgcgcgcctcttaaaaagcggttaccttgccaggtaaactgcgtgtaattactatgggcttagctgctctatgcctcttatctactgctgtgactggaacttgatggattaataagatctatgttgcgtatgtt

SEQ ID NO: 3046 - DNA, 2129 bp, Oryza sativa
  ref <308>: DATABASE ACCESSION NUMBER: AK060818
  ref <309>: DATABASE ENTRY DATE: 2001-12-06
cgacgtctcccgccgcaacatcaacttcatcaccgagatgttcacctccggcaccctccgccagtataggcagaagcacatgagggtgaacatatgggcggtgaagcactggtgcaggcagattctgagtggattgctgtacttgcatagccatgatccacccatcatccaccgggacctgaagtgtgacaacatcttcgtgaatgggaaccagggggaggtcaagatcggtgaccttggccttgccgccatcctccgcaagtcccacgccgtccactgcgtaggcacgccggagttcatggcgccagaggtgtacgaggaggagtacaacgagctggtggacatatactcgttcgggatgtgcgtgcttgagatggtcaccttcgagtacccgtatagcgagtgcacgcacccggtgcagatctacaagaaagtgatctctgtaagaattgcctcctggatccttgtaatgtttgcagcactttgtgattctggtgtgtggctagttcgaaacggtttttgctgattttagctagtggtttggctgatagggtactaagccggaagcgttgtacaaggtcaaagatccgatggtgaggcagttcgtcgagaaatgcctggccactgcatcccggaggctctcagcgagagagctgctcaaggacccattcctgcaggttgacgatttggtcttttgtccgggtgatggagattacagcctgatgaactatctgcggcagccttatttagaacacgcttatagtaatgtctccatgatgagtgatggattatctgaaagcattgacgaggatacaccaacggaagatagatgggattgtgaagatgatgacattaaagctgatggtattgacttgttcaatgggcatgaagatgagcctcttggcaatgtggatatcacaatcaaagggagaaaaagtgaggatggaagcatattcctcagattacggattgcagataatgatgggcatgtacggaacatctattttccttttgacatagaggccgataccgcattgagtgttgcaactgagatggtagccgagctagatataactgaccatgaggttactcgaattgctgagatgattgatggcgaggttagtgcactggtgccagattggaggcctggcccaggcatagaggaatctcaagacactacatactgccataactgcggatcaaatgtatcgtcatgtggttcactttatgcctacatgtcatctgctgctcgaggttgccagtgtgcagagctacatgggcggtttgaggagataacattccaagccaatggagagcagaccgatttgcaggactccggaggcagctctgatgatggaggcggccaaacacaacatgtcaaagatcaggaagccgtacacagtaatgggtttgtacaaatgggtagaagaggtcctcgtgaccagttttgttttagttcattccaggaacagtcttgctcacctcggcactatgagtatgacactagcctccaagcaaaagggttcgacatgaagcatgaagtaaagatggccaaatacaaagcacggaaaatggcacatctaaggagagctattcatccatctctggactttgacaacttgaatggagaaaggaggatgaagtcttcactgaacaagttacagtcttttcatattggtaagaatcacaatttccgcataccgacctgcgagcgaagcccaggcgctagagacgctgaggaggaccctgacatttttaatctagcgtaccatagccggcaccccgatccaggagcccaaagggcccggcattgtgaggttgatgcacagagcagtccagatctcatgtttacagctaggagttactacacaggagctcagctgccaacaaatctcccaagaacaaaatctgtaaccctaaatgctgttgatgcctgaaatgctttcttgccgtgtaaattccatagagtatagagtgtacattgctttggttctttttgtatgcaataatatgaagtatagctatgtaggcaagaaactgaaatgcatctgggtcatctgtggatatgccagagctgtgtgtaacttcctagcttgagaatttagagggttgccttttgtcttggaaag

SEQ ID NO: 3047 - DNA, 2161 bp, Oryza sativa
  ref <308>: DATABASE ACCESSION NUMBER: AK060819
  ref <309>: DATABASE ENTRY DATE: 2001-12-06
aaaggaaccaacagaagcaaaggtggcattcgttcgtcgcacgagagcaccacagcctcacgacacgagctcatcccccgccatctccgctccgctcctctcctctcctctccgtgctacgccaccaaacccactccccccgagatagagagagagagagagagagagatccacagcctcacagcatcaaatcacctcccctttctcccagatccaagccgccgccaccaccccctcgccgtcgccgtcgccccctccggccgatctgatgcccgcgcacgcggcggtggtggtcagcgccgatgcggtggaagcttaagtcgtcggcgtacaagcgcgtgccgtccagggacgccgccatggatctcgacgtcgagacgccagcgaaaatggcggacggcggggccccgtcgtggcgcatgtcgctgccgcacgtgtgcgtcgccacgctcacctccttcctcttcggcttcgccgggaacaccctcgccgaaggccttgtggtgagcatctgcctgggtggtgcgtttgttgggtgcctgttcagtggatccatcgctgacggaatcggcaggcgtcgcgcgtttcagctcagtgcgctgcccatgatcatcggcgctgccgtaagcgctctcaccaatagtctggagggtatgcttcttggaagatttttggttggaacagggatgggattaggtccaccagtagcttcactgtacataacagaggtttctcctccttcagtgaggggcacatatgggagctttgttcagattgcaacctgccttggaatcgtagtatctctcctaattggtacacctgtgaaggatattgatagatggtggagggtgtgtttctgggttgcagctgttccagcaactttacaagctcttggaatggagttctgtgctgagagcccccagtggctgtataagtgtggaagaacgactgaagcagagatacaatttgaaaaacttctaggtcctcttcatgttaagtctgctatggcagaactctcccgatctgaaagaggcgatgatggagaaaatgtgaagtattcggaattgttttatggtcgcaactttaatgttgtttttattggcacaacgctctttgctttacaacagttatccggcataaattctgtgttctatttctcatcaactgtgttcagaagtgtgggtgtgccccctaaccttgcgaacatatgcatggggatagcaaatttatcaggctcaattgtagctatgcttctaatggacaaactaggaaggaaagtacttctttcagggagcttccttggcatggcctttgcaatgggacttcaggctgttggagcaaatcgtcaccaccttggttctgcaagcgtatatctttcagttggtggcatgctattgtttgtcttgacattttcgttaggagcaggtccagtgccaggacttcttttgcctgagattttcccaaacaaaatacgggccaaggctatggccctgtgcatgtccgtgcattgggtggtaaatttttttgtcagtttgttgttcttgcggcttctggagcaacttggtccacaagttctgtacacaatgttttcctcagcttgtgtggtagcagcaatatttgtgcggcgccatgtggttgaaacaaagggaaagactttgcaagagatagaagtttcgcttctacaaacacaataaagatttcatcagcgagtttgaggcaacaacaacctacatgattagcatctgacactatacttgttgctgaatacctgctgggaaagtctaccgtgaaagttgatcactgaaccaagccaacataccacggacaggcagcgccctacactggaccagggaagtacccagacatgcacctgtgaccagtaagggcgacctagctcgtgcataaaccatccatgtagtgaggttgcatctgtatagttggtcttctgctagatgtatctggtaatctgtgttgtcttcatcatttgtcatttgtacactgtcagtatggagaaaaaaagacgggaagtgtggttactgatggccatagtttgaaccgtggatacgttttttttactgtttaaagaggaataacagcactggctctgccagctacatgaaaataaagtgcgttctgcctgagctaatttaaaaaaaaaaac

SEQ ID NO: 3048 - DNA, 1788 bp, Oryza sativa
  ref <308>: DATABASE ACCESSION NUMBER: AK060820
  ref <309>: DATABASE ENTRY DATE: 2001-12-06
attactctccttccctctcctctcctctcctctctcgccatctctctctcctccgatctgcgcagccagccggagccaccgccgcctctctgtcgccgcctcgacctcccctccttcccgtcgccgagctagcctctccacgctgcgcggggccgcctccggcgagcaggctgggcctcgggcctcggggcctcattccaccgccctgcgcctctcggttcggatcggcttgaaggtgaaggtatggacttcggtgattctagacgcaagcctaatgtcgtcgggaagttcaccgtagctgttgcactcacggtcatgtgcatcattgtgttgaagcagtcgcctggttttaccagtacaagtgtgttctctcgccatgaaattggtgtgactcatgtgttggtgactggaggagctggatacattgggtcacatgctactcttcgtctacttagggacaactaccgagttaccattgtggataacctttctagagggaacatgggagctgtcagagtccttcaacgtttgtttccagagcctgggaggcttcagtttatttatgctgatttaggcgatgcgaaagctgttaacaaaatattttcagaaaatgcattcgatgctgttatgcactttgctgccgttgcttacgttggtgagagcacgttggagccactgaggtactaccacaacataacaccaaatacattgacagtgcttgaggcaatggcagcatataatgtaaaaactctgatatactcaagtacttgtgcaacatatggtgaacctgacacaatgcctatcacagaggcaacccctcagaatcctatcaatccatatgggaaggcaaaaaaagatggcagaggacatcattttagatttctctaagagatcagaaatggcagtcatgatcttaagatacttcaacgtcattggatcagacccaggggggcggttaggggaagctccacgaccagagctgcgtgagcatggacggatttctggtgcttgctttgatgcagcactgggaatcattccaggtttgaaggttcggggaactgattaccctacagctgatggaacttgcataagggactatattgatgtcacggatctcgttgatgctcatgtgaaagctcttgataaagctcagcctggcaaagttggaatctacaatgttggcacaggacatggtagatcagtgaaggagtttgtagaagcatgtaagagcgcaacaggagctagcatcaaggtttcattccttacccggagaccaggagactatgctgaagtttacagtgacccatccaaaatccatgacgagctgaactggacagcccgttacattgatcttcgcgaaagcctttcaactgcatggaaatggcagaaagcacacccgaatgggtatggatcggcctgattcagggtttaatagattcagacttaaggtacacagattctcaggtccatgtgcagaaatcatatatccttcagaaaattggttcttcagcacaaacatagtgccaggcacagaagtgttctgaatttttttggcagcatttggaagaagatacagaaagaatggcccctctattcctggcttaggatcatacatatagtttttttttccttgacattttttttaatcttttctactcgttaaagcataatataataaccaatagaaaatgtgttgtagacaaggtagataactatcatgtatgaacgttcatggtgttgaatgaaaggatatatgaataagtagatgtttgcttattagtggaagtt

SEQ ID NO: 3049 - DNA, 2080 bp, Oryza sativa
  ref <308>: DATABASE ACCESSION NUMBER: AK060821
  ref <309>: DATABASE ENTRY DATE: 2001-12-06
aggtgcggaggtagccacctctctttccgcacgctcccgtccccaccgctcttatccgcttctctccccgtgccctctcccgcttcttccccgcgcgtagccacgcacgcctcaccgcgccccccttctccggctccgccgcgcgttctacttctaccgttaccgcccgcggcgacaacagctaggtagatacacgtcgcgcgttcgagcctaaggtacctgctctctcgcgcgcgccaccgatggcgtgcctcgcgccgcagctcaagtggcccctttccacccgcgcggcggcgttccgggagcacggcggcgccggaatcggcgggttccgtaccgttaggctccactgcgcggtgtccaccaccgcgctggtagaggccgagagctcggattccttggcccccggggcgaggcgtctcgtcgtctacgacggagccgtcgcgccgccgcctcttccgggaggtttcggtgaggcgattctcaaccaagaagccgtggtggcggccgcagcggcggaggccgtcgctctagcaagggcagcggcggaggtcgccggagaggtcgtccggatgtcgcaaaccgagcaacggcaccggcctgacttcgtcacgacgcacgacacggaggacaactacttggccagagagatcctccgcgccgaggcgggattgggggcgaggtacgccgatgcctgtctgtcggaggatgcggggttctccagtatcttcagcgatgaatccgaggtagatgacgatgagcagtgcgtccagggcgtggctgtgaaatcggtgcgccagtccgagaggagagctcggagggtgagggcggcgatgaaggcggccaaatcgttcagcggccggaatcccgtcgcggcgtcgtcgtcggcgaggaagaagaggttgaagggttgccggagtcctctcggctgcttctacaagatgaccggccggaggcttctgacagcaaaacaagaagttgagttctcacaaggcattcaggatctcctgaagttggaagctatccaaaaggagcttgctcactacaacggcggtgaaccaaccttctcacagtgggcagaagcagctggaactgacgagaacactttgcgaaaacgtctgaactatggaatttcctgcaagaacacgatggtaaagtctaacgtgagacttgtaatctcaattgctagagagtttgaaggtcctggaatggaattttctgatcttattcaggaaggaatacagggccttgtacgaggcgctgaaaagtttgatgcttcaaagggttttcgattctctacatactctcactggtggatcaaacaagcaatacgcaaatccgttttagaacaaacccagattattcgcttgccggcacacatggccgaagcaagttcccgggtgaaggaatgccgacggcggctccgccggcagctgaagaggctacccaccaacgaagagatcgcatccgacaccggcatgccgctcaggcgcgtcgaggcggcgatgagcctcccaaaatacaccgtttccctcaccagcaaggtcgggtgcactgacatgacataccaggagatcacgccggacacgagcacggagacggcggaggagatgctgcaccggtggctgatgaaggaagacgtggacagggcgctggacgggctgagcccgcgggagaggcaggtgatcaggtacaggttcgggatggacgacggccggctgcggacgctgcacgacatcggtcggctgatgggggtgagcagggagaggatccggcagatcgagctggtcgcgttccggaagctcaggggcaggaagaaggttcagtcgctgcagcattatctgcagcctgtggagagctggtagctagccatgcatgcgtgtgctgcctagttaccacttaccaccacattgccatcttctttttggaagggttattaacctgtacgagtaactgttaatccttacgtatgagtatgtaacacacgtgtaaagaaaggagatccaaacatttgttttgtaacaacatactggtatagctattgccggaagcaaagaacgcaacatagttgcttcaagag

SEQ ID NO: 3050 - DNA, 1625 bp, Oryza sativa
  ref <308>: DATABASE ACCESSION NUMBER: AK060822
  ref <309>: DATABASE ENTRY DATE: 2001-12-06
agtggatgctggtctggctgaaagtgagaaacaaggagtcgctgtaggtctatgtttgacatatgaaaatcagtcagcaatgaagagagaagacacaaaatggcaagcaggaagggatgtttggtggcaggatgttgtgaccagtttcccaaccaagtgcgatgtagaatgggtggatgcagaggacccattgttccttctgtacacaagtggcagtacaggaaagccaaagggtgtgttgcatactactgggggctacatggtttacagtgcaacaacatttaagtatgcatttgattacaagccgtcggacatatactggtgcactgcagactgtggctggattactggacacagctatgtgacgtatggtccactcctgaatggagcaacagttctcgtttttgaagggactccaaattaccctgattctggtcggtgctgggacattgtggacaagtacaaggtgacaatattttacactgcaccaacactcgttcgatcactcatgcgtgatggcaccgagtatgttacacgtcactctcgaaaatctcttcgagtcttgggaagtgttggtgagccaattaatcctagcgcatggagatggttctacaatattgtcggggactctcgatgccctatctccgacacctggtggcagactgaaactggtggcttcatgatcactcctttacctggcgcctggcctcaaaaaccaggttctgcaacctttcctttctttggtgttcagcctgtcattgttgatgagaaagggaaggagattgaaggagaatgcagtggatatctttgcataaagaaatcatggcctggggctttccggactctctatggagatcatgatagatatgagaccacttacttcaagccatttgctggctactattttactggggatggttgcagcagggacaaagacggttaccactggctgactggaagagtagatgatgtcatcaatgtcagtggacaccggattggtacagcagaggttgagtctgcgttggtttcacacccaaagtgtgcagaggctgctgttgttgctgttgagcatgaagtgaaaggtcaaggaatatatgcttttgtaactttggtggatggtgttccttatagtgaagaactacggaaaagcctcatattgacagtccgcaaccagattggggcatttgcagctcctgacaagatccactgggcaccaggacttcctaaaacgagaagcggtaagataatgcgcaggattctgcgcaaaattgcctcaaaacagctggatgaacttggtgacacaagcacccttgctgatcctggcgtcgttgaccagctgattgcgctcaaagattgctagattgtaaaaattagatgacagatgcacttccactgatgcttgtgcgttccatttctcttcctatatgatggagatgcactttctcttcctacattttagtgtccatagtctttcgtttattcggtggaagttgctcctggtctagggaactgaaacacgatatggaatgatctgagagtgtggtgttggacttctgtatacttgtgttacacattgagatgacttgctccatgaatgtatttgatggacgcaataaatccatttc

SEQ ID NO: 3051 - DNA, 1168 bp, Oryza sativa
  ref <308>: DATABASE ACCESSION NUMBER: AK060823
  ref <309>: DATABASE ENTRY DATE: 2001-12-06
gcgcactcacacacactctccgacgatattttccttctctgttttttttttccttcgccatcaagccggattcgaggacggagggatcaatggaggaggagggggagggcctctgcgagatcgcgcggttgccggaggagctcctctccgccgcgatctcacgcgcctcgccgcgggacgcctgccacgccgccgccgtctccccggcgttccgcgccgccgccgactccgacgccgtctgggctagcttcctgccgcgcaatctccccgatctcgccgacggcgagctctcccccgcgccggcttccaagaaggagctcttcctccgcctctccgatggcccctacctcctatcagaccggctcatgagtatgtggttggacagggagactggggccaagtgctacatgctctcggccagatcgttggtgattatctggggcgatacaccgcactactggcgctggattcctctcaccgactctaggtttgcagaaggtgctgaactcatagatgtgtgctggttggaaatccgtggcaggatacacagcaagatgctctccccaaactcaacttatgccgcatacatggtgtttaagatagctgatgagttctatgggctggatgctccattccaggaggcatcagtcagcctgggaggtaggggatcaacaaaaattgtttgtgtccaaagctatgacagcgaagatgaggaggtgcctgagaattactggcctatgagtattggtccattgctgcgacgaagggccaggagaagagaccgtcgtctagttcttgatgaaggtgtaacggtccctcagaaaaggactgacgagtggatggagctggagatgggtgagttcatcaacgaggaaggtgaagatggagaggtgtgcttcagcctgatggagaccaagggaggcaattggaagagaggtcttattgtgcagggcattgagatcagacttaagaaatctggctgatgaacttctaagatcaaggcgcgtgtaattaaataagactcataatgcgccattttttttgtttgtggttttggcttttgttgccaatgctgtgcaaaactacaggtgtgtttcttttttcttgcgggcaaactgaactttctgccgagaagaaaataccatagtgcgatgcttgataatagcct

SEQ ID NO: 3052 - DNA, 2022 bp, Oryza sativa
  ref <308>: DATABASE ACCESSION NUMBER: AK060824
  ref <309>: DATABASE ENTRY DATE: 2001-12-06
aggccaaatcgcctgcaataattctctcgccgtgtaacaacaacacacgcgccagccgagagaaaccaaacactagacccccaccacgagttcacgacgtgcacgagcgagcgagctagaaaagcaagcgagagcgagcgcatggccccggcaatggtagccgccatgggagagaagccgaagcccgcagtcgtgttgggtggcatggtgagcgggctgagggaggtgtacgagagcgggaggaccaaggacctggagtggaggcagtcgcagctcaaggcgctcatcaggctcctcaccgacaaggaggaggagatcttcgccgtcctccacgacgacctcggcaagcaccgcggcgagtcgttccgagacgagcttgggattcttgtcaagtcgatcaagtacacgctgcaaaacctcaagaaatgggcggcttcggagagggcggaatcgccgttggttgcattccctgcgaccgcgatggtggtgccggagccgctcggtgtcgtgctcgttttctcctgctggaatctgccactaggcttagcgttggagccactctccggcgccatagcggccggcaacgccgttgttctgaagccctccgagctcgcgccgtccaccgccgcgttcctcgccgccaacatcccgaggtatctggacagcagggcagtgaaggtcgtcctgggaggccccaatgttggagaggaactcatggagcacagatgggacaaggttcttttcaccgggagtgccagaataggacgcattatcatggctaaagcagtcaaacacttgaccccggttgcacttgaactgggttcgaaatgcccatgcatcgttgattggctggacagtaagagggataggcagattgcggtgaaccgcataatcggagcgaaatggtcgacttgtgctggtcaggcttgcatcgccatcgatcacgtaatcgtcgaggagagatttgcaccgattctgattgagctactgaaatcaactcttaagaggttcatggccaaaccgggtggcatggcccgtatcctgaacgcaaaacattttgagaggttgagtggctatctggaggataatagggtggcagcttctgtagtgcacggtggttacatggaccccaagaaactgaatattgagccaaccttactgctaaatcctcctgctgattctgatgtcatgaccgaggaggtatttggcccgattctcccaatcatcacggtaaagaagatcgaggattgcatcgtgtatttaaagtccaagccgaaaccgattgcgatgtacgccttcaccaacaacgagaggctgaaacgccggatcgtagaggaaacgtcgtccgggagtgtcacattcaacgacgcagttgtgcagtacgctcttgaaagcgtccctttcggcggagttggccatagcggattcggacagtaccacggcaagtactcattcgagctgttcagccacaagaaggcggtgttcaagagaagctttctgatcgagttcatgttcagatacccaccatgggatgagagaaagatcgggacgctgaggcacgtcttcagctataactacttcttgctgttcttcaacctgctcggctttaggagatgaagaagccagccgaagaaagatttcggctgtgaagaagtaagcagagaaagaagctactactatatagtagtatatagtagtagtaatatactacagctaaacacgtggattatatacggttctaccttgtgtgatgtgataatgtatcactatacttcagttgcatattgtattgtcacgttctatgctcttatttattgtactctttggaaagaaagggagggattgttttattttttttaaaaaaatgactagtggaaatagggtgctccgacatgttatacataaaagaagatatgtaaagagtttaagggtgctttggatcctcagcaaggccaatcctagcattgtctagcaggttaagtgtttaatacaagtaaaaaaatagcttttgaagatgttggt

SEQ ID NO: 3053 - DNA, 1219 bp, Oryza sativa
  ref <308>: DATABASE ACCESSION NUMBER: AK060825
  ref <309>: DATABASE ENTRY DATE: 2001-12-06
atgttggttttgattggcttggcgtccatattgatgggaaacatttctttggagtgttgactgctctaatagtcttgcctacagtatggttgagagatcttcgggttctctcctacctttctgcgggtggtgttattgcaactcttcttgttttcctctctgtcgttttagttggcgctactgatggcgtagggtttcatttgactgggaaagcagtaaacttaggtggtataccgtttgctattggcatttatggtttctgctactctgggcactcagtgtttccaaatatttaccaatcaatgtcagaccgcacgaaattcactaaggcactgtttatatgctttgcaatttgcacagcaatatatggctcgtttgctatcattggctatctcatgttcggagataaaactctctcgcaaataactgaatcttcctaaacattcatttgcctccaaggtcgcactgtggaccacggttatcaaccctttcaccaaatatgccctgttgttaaacccattggctcggagtttagaggagttgcgccctgaaggatttttgaacgaaacaatctgctctattatactgaggactgcccttgttgcatcaaccgtgtgcattgcgtttcttatgccatttttcggtctcgtgatggctcttattggatctctgttgagtatacttgtggccgtcataatgcctgcactgtgcttcttgaagattaggcaaaataaagcaacgactgcccaggtcgttgcaagtattggtataataatattgggcaccataagcgctgctcttggaacatattcgtcggtactcagaattgtggagaactactaattacgaaacctagctcgcgtgcagtgcagttcccagcaggtgaggccacaggcatgtcatatctattactcaccccgcttacggttacggcgctcaaaaatggtcaaatatcgtgtgtttatcagaattttgctagaattaccgagttcactgtaattattcgacccaaccatgtaatgcatgtacctgcatagctgcttgcttctcagttccttgaagtggaatatcttcatcacttgcttataccgtgtttctgtcaatcactgttgttaggtctatccagcatgttacttaaaccgcctttagcaattatatgtactcaattaattatagatcgagattgctggatattgagtgttgcaacttgcaaaaaaac

SEQ ID NO: 3054 - DNA, 2491 bp, Oryza sativa
  ref <308>: DATABASE ACCESSION NUMBER: AK060826
  ref <309>: DATABASE ENTRY DATE: 2001-12-06
atcttccccactcgtgcctggctctctctctctccctttctcctctcctccaaggtcatggcaaaggagaaataacagctagcgggcttggggaagggaaaacagcaagtgggagatcggcagggagaggtgaattactacttgagtagaagtggtacaagaagagtcgtcgtctacctgtgagcgaattatttcgaggttgtgcgttgcgatgatgggaggtggtctggtggtggaccagggcatgatgttccccggcgtgcacaacttcgtggatctcctgcagcagaacggcggcgacaagaacctcggcttcggcgcgctcgtgccgcagacgtcgtcgggggagcagtgcgtgatgggggagggcgacctcgtggacccgccgccggagagcttcccggacgccggtgaggacgacagcgacgacgacgtggaggacatcgaggagctggagcgccgcatgtggcgcgaccgcatgaagctgaagcggctcaaggagctgcagctgagccggggcaaggaccccgcgggcggcgtcgtgggcgacccgtccaagccgcggcagtcgcaggagcaggcgcggcggaagaagatgtcgcgcgcgcaggacggcatcctcaagtacatgctcaagatgatggaggtgtgccgcgcgcaggggttcgtgtacgggatcatcccggagaagggcaagccggtgagcggcgcctccgacaacctccgcggctggtggaaggagaaggtccgcttcgaccgcaacggccccgccgccatcgccaagtaccaggccgacaacgccgtcccgggcttcgagagcgagctcgcctccggcaccgggagcccgcactcgctgcaggagctgcaggacaccaccctcgggtcgctgctctcggcgctcatgcagcactgcgaccctccgcagcggcggtacccgctcgagaagggcgtccctccgccgtggtggcccaccggcgacgaggagtggtggccggagctcggcatccccaaggaccagggcccgcctccgtacaagaagccccacgacctcaagaaggcctggaaggtcagcgtgctcaccgctgtcatcaagcacatgtcgccggacatcgagaagatccgccggctggtccggcagtccaagtgcctccaggacaagatgaccgccaaggagatctccacctggctggccgtcgtcaagcaggaagaggagctgtacctgaagctgaaccccggtgcccgccctccggcacctaccggcggcatcaccagcgccatatcgttcaacgccagctcaagtgagtacgacgtcgacgtcgtcgacgactgcaagggcgacgaggccggcaaccagaaggctgttgttgtcgccgacccgaccgcgttcaacctcggcgcggctatgctgaacgacaagttcctcacgccggcgtccatgaaggaggaggccaccgatgtcgagttcatccagaagaggagcgcgtctggcgcggagcctgagctgatgctgaacaaccgtgtctacacctgccacaatgtccagtgcccgcatagcgactatggatacgggttccttgaccggaacgcgcgcaacagccaccaatacacttgcaagtacaatgatccactccagcagagcacggagaacaagccatcgccaccggccatcttcccggcaacctacaacacgccgaaccaggctctgaacaatctggatttcggcctgcccatggatggccagaggtcaattacagagctgatgaacatgtacgacaacaacttcgtggccaacaagaaccttagcaacgacaatgccacgatcatggagaggcctaatgcagtcaacccaaggatacagattgaagaaggcttttttggacagggaagtggcatcggcggcagcaacggaggtgtgttcgaagatgtcaatggcatgatgcagcaaccgcagcagaccaccccggcacagcagcagttcttcatccgcgacgatactccattcggtaaccagatgggcgacatcaatggcgcatcggagttcaggttcggctctggtttcaacatgtcaggtgccgtcgaataccccggcgcaatgcagggccagcagaagaatgacggctcgaattggtactactgagagtactgaagaataaacttgtagcgtttaaagaaagagcaccttaagcttttaaagttcaccatggtcatccctctgcttccatggtggaagcgtctcctgtgaacccggtaattctataggtctttctcatataggttttgcattagttgcaaaatggctggaacttggaactggtttatacatgtatgtccgtccagccagtaaacctcctatggaaacttaatgttatttctagtttaatttgttagttaaatgctgttcatatgtctggttgttaagtcacctgtgcttgtttgggtatgtggtttgtatctttatcatccggtgaatgtatgaagtgctctcttgagt

SEQ ID NO: 3055 - DNA, 1684 bp, Oryza sativa
  ref <308>: DATABASE ACCESSION NUMBER: AK104342
  ref <309>: DATABASE ENTRY DATE: 2002-08-28
gtcgcgtgcgaggatagggagagaggtgaaagagacacggaggagagggaaaccaaggcggcgaggcctccgcctcactccggtggcgacacggcgggctcgccgccatgacaggagctctggcgatgatgccatccacgtcctccccctaccctctcctcgctccgccgacctgctcctcccgcctcccgcctctccgctgcttcgtcggcctccggtggtccgctccccgcatccaggtcagggagtatccggatgcggttgcagggattgccaagggtgcgggtggacgcggtggtcgattcagagcacctgcttcaagtatctcccaaccttgctctagaaccatcatcatcacaaatgaacatgttcaaaatgctgattttccacctaattactcgaaaagagagaagaaaccatttccaataccagtattggagttaagacgccgagcaaaagagagggcaaagaaagctgaagggaaacccaaacgatctttaccacctccaaaaaatgggatgctgatcaaaagactgataccagttgcatacaaggtgtataatgcaagaattttgctgatcaacaacttgaagaggcttatgaaagtaattccagtgaaaggatgcagacattgcagtgagatacatgttggatctgttggacaccctttccgaacatgcaaaggaatgtcttcagataaacgtagggggcaacatgactggggaggtactttggttgaagctgtttttgtgccggttgaagcctaccatctagaggatcgcttagggaagcgtatccctcatgatcagaggtttgctgtacctcgcatccctgctcttgtggagttatgcattcaagctggagttaatcttcctgaataccccacaaagcggcgaagaaagcccattattaaaatcggaaagaacgagtttgttgatgcaaatgaggatgacctaccagacccagagccttacaaacttgagcatccaattcttgaagaactaaatgataacgagattattgccccagcaagcccagaggagattgttgctctagctgaggaaacactcgaagcatgggaggtagtcagggatggtgccttgaagcttatgaagggctacgcggtgcgggtttgtggatactgcccagaggttcatataggagcaagtggccacaaagcacggaattgtggtgccttcaaacaccagcagaggaatgggcagcatggatggcaagcagcagtgctcgatgtcttaatacctcctagatatgtgtggcacctgccagaatccggggaggacttgcagagggatctaaagagtttctatgggcaggcacctgcgattgtggagatatgtgttcaggctggtgcaaaggtgccggagaagtacaaagccacaatgagactagatataggaattccaacaagtttgagagaggccgaaatggtcgtctgaacaaagacgtttctattgtcacctcaagctccagtttgtctgaccagaggttcacagttttactcatgtatataccaggaaggcaggaaattagctcaaacagaatttgtctaggtctgtattgtttgtaccatatgctcgctatcatttaccaaattcttctttgtatgaggcatggatgtttcttacagcagttcgagatgcatttgctaatgctgatatggttt

SEQ ID NO: 3056 - DNA, 1342 bp, Oryza sativa
  ref <308>: DATABASE ACCESSION NUMBER: AK104343
  ref <309>: DATABASE ENTRY DATE: 2002-08-28
ggctcgacccctcctccacgcctccgcctccgcctccgcctccacgacgtagcccagggcggctagggtttcggtttcctccgccgccgccgccacctcctcctcctcctcgtgcgcggcggcgaccatggcgatggtgcaggccggcatgggcctcacccgcgtcgttgtcctcatcggcgccgggatggccggctccgtcgtcctccgcaacggccgcctctccgagatcctcggcgagctccaggagatactggacaagggggagaaggggaaagacggagaagggggcgggggcgccgacatgacggacgcgctcactagacaggtgcgcaacttggctatggaggttaaacaacttgcttcttcccgtggatctataactgttcttaatggaggttctggtcaaacaggggtgtcaggtttgatagtacctgcagcaactgttggagcactcggttatggttacatgtggtggaagggcatctcctttgcggacctaatgtatgtgactaagcgtaacatggcaaatgctgtttccagtatgactaagcatctggagcaagtgcaaacctctcttgctgctgctaaaaggcatttgactcagcgtattgaaaggttggatgataaattggatcagcaaaaggcgctttctggacaaataagagatgatgttactgatgcacgactgaagcttgagaatattggttcagaaattaagaacatcaaacaattggtttggggtctggatgaaaaaatggattcgatggaagccaaacagaacttttcatgtgctggtgtgatgtacctctgccaatttattgagcaaaatggtggaaagctgccagaacgcctggaaggctcaaaaatggctgggaagcgttttggaagccaaaatctcatacaggggttgcaactggccatagaaacagggaattttgacaaggaaacgttcaatgcacttaagaacaactctgattcaagataaacaggtccaacgtctgccaaagtaatttttgtcagggcggtatccgagggcatctcatctttccagaccacgccctccattgaaatgctgtaaaggataatttcttactagtttaacatgtaaaaagttccagccttttcaagttttctgcttgcagaaggtgctgctacattttaaagcttgtgcaatacttagtggttagggtttttttaccgtgctatgctggcaccgcttgtggtttcagaatttcaggcaacactttgccgtaaataaaaggacaacacgtgtggttcgtgtgatgttttcaaacccatttcatgttttatttgtaatatatgctacaagcttacgtag

SEQ ID NO: 3057 - DNA, 1712 bp, Oryza sativa
  ref <308>: DATABASE ACCESSION NUMBER: AK060827
  ref <309>: DATABASE ENTRY DATE: 2001-12-06
cagcgctcgaggctgttgttgctgctgatgaagagctcgcagcgcttcgtgccgagcaggcaaagctcgaggcctctaacgatgctgatgacaatgagcggcttgctgaggtttatgagaagctcaacctccgggattctgatgctgcccgggctcgtgcatccaagatccttgctgggctggggtttgatcaggctatgcaggccaggtccactaaatcgttcagtggtggctggaggatgcgcatctcgcttgctcgtgcgctgttcatgcagccaacattgttgctgcttgatgaaccgactaatcatcttgacctccgagctgttctttggttggagcaatacttgtgctcacagtggaagaaaacactgattgttgtgtcccatgatcgcgacttcctgaacacagtttgcaatgagatcattcatttgcatgataagaatctgcatgtttatcgtggaaattttgacgactttgagagtgggtatgaacagaagaggaaggagatgaataggaagtttgaggtgtttgaaaagcagatgaaggcagcaaagaagactgggagcaaggcagcgcaagacaaggtcaaaggtcaggcactatcaaaggctaataaggaggctgccaagagcaaggggaagggaaagaatgtagcaaatgatgacgacgacatgaagccagctgatcttccacagaaatggcttgactacaaggttgagttccacttcccagagccaactttgctcacaccaccgctccttcagctcattgaggtgggcttcagctaccctaataggccagatttcaagctgtctggtgttgatgttggcattgacatgggaacacgtgttgcaattgttggtcccaatggggcaggaaaatctacacttcttaatttacttgctggtgatcttaccccaaccaaaggagaggtaaggaggagtcagaagctgaggattgggcgatactcacagcattttgttgacttactgacaatggaggaaaatgcagttcagtatttgctcaggctccatcctgatcaggagggaatgagcaaagcagaggctgtacgtgcgaagctcggaaaatttggtttaccagggcacaaccatctcactccaatagttaaattatctggtggacagaaggcccgtgttgtgttcacttcaatatcaatgtcacatccccacattctcctgctggatgagccaacaaatcacctagacatgcaaagtatcgatgcattggcagatgcactggatgaattcactggtggcgtggtcttggttagccatgactcgagattgatctctagagtgtgtgacgataagcagaggagtgagatatgggttgtagaagatggcactgtgaacaaatttgatggaacatttgaggactacaaggatgaacttttggaagaaatcaaaaaggaagttgaagagtaatgtgtttttatagttgcaggatactgcttattctttatagactgggctggtaaacttaatgtactagtacttattttctttggtttgcagagtatttgtatggttgagtccgaaacacctattcgagctgttcttgctttttgcatgatctaagaggttccaggatgagtctgataaatatgttttctatgattttgctgccaattactctgtactaagacttccatgatatacatccataataattcagtatgatttcatgtt

SEQ ID NO: 3058 - DNA, 1695 bp, Oryza sativa
  ref <308>: DATABASE ACCESSION NUMBER: AK104344
  ref <309>: DATABASE ENTRY DATE: 2002-08-28
acacacaacgctcgcactcctctcctctcatctgacatatctcctcccgtcctttcgaagcctctcgaatcgcatcgccgagccggatggcggtcaccgccgacgtgaagctcgagggcctccgcgccgccaccgacaagctcgaccagatcagcgagaacgagaagtccgggttcatcagcctcgtttcgcgctacctcagcggcgaggcggagcagatcgagtggagtaagatccagaccccgaccgacgaggtggtggttccctacgacacgctctcggctgctcccgaagatctcaacgagacgaagaagctgctcgacaaactcgtcgtgctcaagctcaatggaggcctcgggacgaccatgggctgcactggtcccaagtctgtcattgaagtccgcaatggctttacgtttctagaccttattgtgattcaaattgagtccctgaacaagaagtatggatgcaatgtccctttgcttctaatgaactcattcaacactcatgatgacacacagaagattgttgagaagtactccaactccaacattgaaattcacactttcaaccagagccaatatcctcgcattgttactgaagacttcttgccacttccaagcaaggggaagactggcaaggatggctggtatcccccaggccatggtgatgtgttcccctccttgaataacagtggaaaacttgataccttgttggcacagggcaaggagtatgtctttgtcgcgaactcggacaacttgggtgctattgttgacatcaagatcttaaaccacctgatccataaccagaacgagtactgtatggaggttactcctaaaacattggctgatgttaaaggtggtaccctcatctcttacgaagggagagttcagctgttggagattgctcaagtccctgatgagcatgtgaatgaattcaagtcaattgagaagttcaagatcttcaataccaacaacctgtgggtgaacttgaaggccatcaagaggctggtagaagctgaagcacttaagatggaaatcattcctaaccctaaggaagttgatggtgtgaaagttctgcaactcgaaactgcagctggagcagccattcggttctttgaaaaagcaattggcattaatgttccccgctcgagatttctgccagtcaaggctacatctgatttgttgcttgtacagtctgatttgtacaccttggtcgatggctttgtcatccgcaacccagccagaacaaacccatcaaacccttcgattgagcttggacctgagttcaagaaggttgccaatttcctggcccggtttaagtcaatccccagcattgtcgagcttgacaccttgaaggtctctggtgatgtctggttcggctctggagttacactcaagggtaaggtgaccatcaccgccaagtcagggaagttggagatcccagatggagccgtgcttgagaacaaggacatcaacggtccggaggatctttgaggctgctcacggaaaccttccagatatatttagctgagcgttttgtaattgtcgtgtgcattcggcagccagggctcgatgatcccattacagaataattgtaatcatcttggcacatccgtacttctgttttttggtgtgccaagggcgttgtatttcatttacttaaatgatctcgtaataccatagttttgcatgc

SEQ ID NO: 3059 - DNA, 1535 bp, Oryza sativa
  ref <308>: DATABASE ACCESSION NUMBER: AK060828
  ref <309>: DATABASE ENTRY DATE: 2001-12-06
aagaatacaggcctcggaagaaccaatctgggtctagagtcaagggtgatacgttctatattgatccaaccaatatgtatgaatttcgttctcaaaaggatgttcaacggtatcttgaatctggagatgttactaattgtgtaatgatacaaaataagaggaaaatggaagacctgcacactgcaagaaaccaatctcatcatacacgaagaccatctgatcacagacaacttgatgctggtgaaggggctactcaatgtgatctaccaatagcaagaggtaatagtgcacggagtgattttttggtaaatgcaaacagttcagacaattctgaagatatgtcatcatcagtgcccaagggtgtgtccgaagggaaacttacacggttaaagcttcagaaggcaagggttccgaatcaatccgtggagcatgaatcttccacaggagaagtagcaaatatggagcataagcccaaggaaaagaaacagaaaactaaacctgtcaaacagatctctacacctcttcgagcgtcacctcgtttagctgcgctgaagattaaccaagaaggcaataatgagcccaaagatgaagctctcagcacaaacacagacactgctaatcagtcacaaccaaagttgaccaaaagtcctaaagcaaaggctaattcctctgtacttcctgagaagagtgatggagcacatacttcaaatgcttctgaaattcctcaaaacaagtatccatcagctaccgagcaaatgcaaggatcatctgttcatcctcaacaggctggaacagctgatgctatgcctgggtccgccctttcatcgttattgcgaagtatctggtcagatccatgcctcaagtttgcgatcaagactcttgcaggtgacatccctgctctagacttcattccatcacaggacatgaacaaagggacgacaccgaattgttcctcttctgcttatgatggtagtagaaaccatgcgcaagtcgaccatgtcggcatgccaatgccaaggccatcagataagttctacggcagtggctggtttcctccccagtgagttccatctggggaatatgtggcaaatcttctcacctgcaaaagcaaatcagaagaaagccaaagactaaccagcctcacaggcttcttagaactcctcattaggtaccttgacaaggatgcatgttgcaagaaagactgtatcttgttggaactgtagtagatggttcgtcactaataagtaataataacctaataatatacccccatcttatgctaaactggacactattttctgtctgtctgaatttgtgtagtaacctgactactaattcatttgtttgtatcattagtgcagactagagatgctgattgtatgcagatgcctgtgccagattgtcatgctcagggtcactgctctgccagcacaaagacccttcatgtgtattactactacatgtaataatagcttagacatttgatatggcaatgtgcattggactaagttctacctaaattttgtttctggttt

SEQ ID NO: 3060 - DNA, 1189 bp, Oryza sativa
  ref <308>: DATABASE ACCESSION NUMBER: AK060829
  ref <309>: DATABASE ENTRY DATE: 2001-12-06
aaatacgcacacgagtacaacgcgacggtggagttctactgggcgccgttcctggtggagtcgaactcggacaacccgcaggtgcacagcgtccccgaccgcgtcatccagtggcactccatcgccaagcacgcgcacaactggctcggcgtcgactacctcatcttcaacacctacatctggtggctcaacaccctcgacatgaaagtcctgaaggggtcgttcgaccagggtgcgacggagtacgtggaggtggaccggcccgtggcgtacaaggaggtgctcaagacgtgggcgaagtgggtcgaccgcaacattgaccccaaccggacgaccgtcttcttcatgagcatgtctcccaaccacatcacgccggaggcgtggggaaactacggagggatcaagtgcgcgatggagacgctgccgatcacgaaccggacgacgtcgctggacgtgggcacggactggaggctgtacgccggggcgcaggaggtgctccagacgttccgccgggtgccggtgcacctcgtcgacatcacggcgctgtcggagctccgcaaggatgcgcacacgtcggtgcacacgctccggcaggggaagctgctcacccccgagcagcagtccgaccccaagacgtacgccgactgcatccactggtgcctcccgggcctccccgacacctggaaccagttcctctacgcccgcatcgcctccgccccatggtcatccgaccagtagaaaaagagccaaataaggctagcttccaagtgttctgcgggacaagaaaaggagccaagaacaccgttgacacaccatcgatgcccgccgcccggccgcggccacctcactttttcttactttgggttactttttttcttctctttttttcaccatttttctttctttctctggagttgcgtaaagctgtcttgtgctgtgtttaacatgtgattcttttgttaaaaaagaaatggagggttcaggatggtgaaggaggatctgtgggcgggctgtgttgactatagctcatttcttgtcctgctgataaaggatgcatggataggagaaagcaaaaaaagggtgtgatgtgagatgtaaggggggaaagaaaaagggagggttacatgtaaagaatttttgtgtattacaccattctagtacattgatgctcaagagaggtataaaggcc

SEQ ID NO: 3061 - DNA, 1465 bp, Oryza sativa
  ref <308>: DATABASE ACCESSION NUMBER: AK060830
  ref <309>: DATABASE ENTRY DATE: 2001-12-06
gagagagaaggaaaaaaaaaatccccaaatcgaatcgatcggaatttgcttctccgttgaggcgaggcgagggcgaagggggaacgaagtggaaggagatttggattgattggttggacgccggcggcgcagatccccaattcgatctcctcctcttcgatcttcatcctaccctgcctgccagtgccagtataagattcttatgagctggtcggctgtggttttccctcaattctggtgctactaagatgggtcaggagctcaccacaaacaagcctctcacaaccctcttaccaacggatgaaatagcaaccgcctaccatttctccctcctcctctcacctgtcgtctccttttgggactgcatcttccgcaagataagatactcattcagacctgagtgggtgtagcatcctgcactgcctgtttctttttagcgctagccagtgctttgctttctggcctggatcactccaaacaatgaactttgaagcttttgctttcccgtaattacaattacagtcactagtggagtttagctgaaaatagtacatagttgtcatggaaaaggccgcggccaatcaggcgggcaaagtcttgaagaaaggtaagaagaaacaagccaaggatgaattagatcgccagaagcaggctgagaagaagagacggcggctggagaaagcgcttgcaaactccgctgccattatatctgagctggaaaagaagaagcagaagaagagggaagaacagcaaaggctggatgaggaaggtgctgcgatagctgaagcagttgctcttcatgtcctcattggtgaggactccgatgaaccctgccatttgatgctaaacaagcacagaagatgcaaccattgggatcactcagctggttttgatttcgccgtggatgcacaaggcgctgatatttatcctcctgatggactgatacagtgcgctgatcatgtttatgctcccaaagggaggtgtactgattgggggattggccagccattgccatcttggggagaggtgaaggacttgcagttgcaggcaccgtgctaccaaggaatgttccaccagtcggttgcatgcccaggtttcatagcagctcaagcggtctcctccttgcaaatcggaggagattcgtcagatattacctctccaagccaaggagcgactgtcgttaataggatgcttggtgccaccaacaggctcaacctttacagagagatataaaaacatacacttcacgatattattattgtatatagtcatcaaacttgtgttgactactttgcctgcagtatatctcataaccaaagaagaattggatagaacaccttgtttactgtttctgtgagtctaaaaggatatcttatatcagtcaaattggtattgtaatgaacatattgttttgattccctgttgattttcttggaatgtatcctgtgtcgacttgatgttctgt

SEQ ID NO: 3062 - DNA, 1815 bp, Oryza sativa
  ref <308>: DATABASE ACCESSION NUMBER: AK060831
  ref <309>: DATABASE ENTRY DATE: 2001-12-06
actgatccgaacagaacaggtggtccgatcgccacccgcctcgtcgtcttcctcgcgaactctccacccccaccaccatggcgatggcgatggcgatgcgacgcgcggcggcgctcggcgcgcgccacatcctcgccgcctcgtccacctcctcctccggcgtcctcctccgccgccacatgagcgtggacgcgggggcggcgatggagaaggtacgggcggcggggctgctccggacgcaggggctcatcggcgacaaatgggtggacgcctacgacggcaagaccatcgaggttcaaaatccagcaactggagagactcttgccaatgtgtcctgtatgggcagcaaagaaacatctgatgcaatagcttcagctcacagtacattctactcttggagcaaactcactgcaaatgagaggagcaaggctctaagaaaatggcatgatttaattatctcacacaaggaagaacttgcacttctcatgacactggagcaagggaaacctatgaaagaggctcttgttgaggtcacatatggtgcaagttttattgaatactttgctgaagaagcaaagcgtatatatggtgatattattcccccaactctatctgatcgtagattattggttttgaagcagcctgttggagtagttggagctgttacaccatggaattttcctttagcgatgataaccagaaaggttggaccagcattggcttgtggctgcactgtcgttgtcaagccatcagagttcacacctttgacagcacttgctgcagcagatcttgctcttcaagctggaataccagctggcgcaataaatgttgtgatgggtaatgctcctgagataggtgatgctctactccagagtacacaggtcagaaagattacattcacagggtcaacagctgttggcaaaaaactgatggctggatcagcaaatactgtgaagaaggtatttatgaaaaatttgcaagtgcgtttatcaaggctgttcagagtttgaaggttggtaatgggcttgaagagagtacatcacagggccctctgatcaatgaagctgctgttcagaaggtagagaagttcataaatgacgccacttcaaagggagcaaacatcatgcttggtggtaaaaggcacagccttgggatgtcattctatgagccaactgtagtagggaacgtcagcaatgatatgcttcttttcagggaagaagtctttggtccagttgcaccacttgtaccattcaaaactgaggaagatgcaatccgtatggccaatgataccaacgcaggcttagccgcatatatcttcacaaagagcatacctcgttcatggcgcgtttcggaagctcttgaatatggactagtcggtgtgaacgaggggatcatctcaacagaggttgcgccgtttggcggcgtcaagcaatctggccttgggagagaaggatcaaaatacggcatggacgagtacctggagctcaagtacatttgcatgggaaacctgaactgatccacttgagagtaccgtacgtcttaaaaccgaagtacctggctggtgatgaatcgaagccgggggcaagagtagctgcaagaactgaagagcactgaggctacttgcacctgcaggacaggttagaaacttagaataataataagaagaaataataaaaataaagtggagtaagctaagccagggagccggaataaaaagttccccaatgagttgtacatgatgtgaaccgtaaagcacggcttcatctccgagctttgtttggtactagtactacctgagaaatcatcacgctactc

SEQ ID NO: 3063 - DNA, 1526 bp, Oryza sativa
  ref <308>: DATABASE ACCESSION NUMBER: AK060832
  ref <309>: DATABASE ENTRY DATE: 2001-12-06
aagttgcgcagtgcgacgtgggtcggtgggtgcgtgtggccccgcttgcagcgtgccggcccccggtcctgcctgtctcgcccgttccccctgcgccgcccctcgccggcccgcgcacgcgcccaagacgcacttggtggtccgcgtcgcgctcgtctctcgcgtgcgctgcgtctcccctcctacccctgattcgcacggaattcctcgaatcgcccgtgagatccgcttgattcgatctccgattcaggccccggggtctagggttttcgccgccgttcgagcggagcagagcggggcgtgggagatggcggggaagggagccaaggcgacggcggccaagtcggcggagaaggaaaaggggaagaaggcccccgtatcccgctcatcccgcgccgggtcccaggagaagccagctccaaacaaggatgtttaccaactatttgctgagaaggttagggataacaagcagctggaatcaagatgggcaattatgcaagaaactcgtgttgagtatttccgtggaaaagattttactaccttcatgaggaatcatccagaagttagggaaattttagggccagataaagatttagaagtggaagacattgttaacactctgctgagcaagaaccttgtgataaggtgtgaccgagtttggaaaactgtcagaccaggaaagaagaaattgtcatcgtggcctgcacatttggagatacatcgtgaacaagtgttcactgagaatgatggattttttgcttggatgtttctcaaaaggaggaccttgtggcaaacgattctttcatttgtttggcctctctttgctttggcagtttgcttatttccagtttacccataccaatgcaagattgtggtcttgtactcatgtgctggagctttattgttcattgtctctattcttttgttaagagctgctatctttggcatactatgggtactccttgggaaacgtgtgtggttctttccaaatataaatgccgaagagacaacatttagagaacttgttcggttttggcccgagaaggatgagggagagcgaccaaagtggacatcaagactcttctatgccactgttgctgtattggtgatattactgctcaggcaccatgctccagatgaagcagctagggcaaggtaccagaagaaggtttcgaacataattgatgatgttcttgagtggtctccaaagttagctttgtctgggatgatggaaaaacatactgggactaatgcatcagaaactagcaatcacaccagtggaactgggagtagtcctgtccctcccactaatgaagggaataccgcaaaagcagacccagatatggatcgtcagacgaactcagataaagtccaagatggtgatgagtatggtgatgacatgagaacaagatttagtgaagtttagaatcgacttataaactctaaagctctggtaatttggagtacttaccctcggggatttatctgcagaatcatatagataggttactgacaagttcaaattc

SEQ ID NO: 3064 - DNA, 2153 bp, Oryza sativa
  ref <308>: DATABASE ACCESSION NUMBER: AK060833
  ref <309>: DATABASE ENTRY DATE: 2001-12-06
gctccctctccttcccatttccgttctccgcttccccacctcgccttctccgctcctcctcctcctcctctcctgccgctctcctgtgtgtgctaccggaagcaagctaccccctcctcctgtatttgttcaatatccataatcagaggaagctgtgccttgagtttgagtatttagcctagtaggtttagaagcactacagaaaagtaatgtcttttatcaggcgagcagacccgtcaaccacttacgcagataatctttacatacataaatttggcactccaaattcaaatttcgctgcacgaagatatgcgtccgacacacagctgttccgttatgggcctgaaccatacaatcctgagaactccttttacaatcaacaggcctcaccaatgccgtacatggtaacagctgatggccattctccatcttctgcagacaattcctgctcagatgtggcaaaagactcaccattggtgtccaatgtatctcagcagaattctcagtctatatcagacaatcagagttctgaacttgaagtagagtttgatgaagatgatatcaggatgaagcttcaggagctggagcatgctttacttgatgatagtgatgacatcttgtatgagatttcccaggcaggtagcattaacgatgaatgggctgatccaatgaagaatgtcatactccctaactcaccaaaagaatcggaatcaagcatcagttgtgctggtagcaacaatggagaaccacggaccccaaagcagttgctctttgactgtgcaatggcattatctgattataatgtagatgaagcacaggcaatcataacggacctccggcagatggtctcaatccaaggggacccttctcagaggattgcagcctatctagtggaaggtcttgcagcaagaatagtagcttcagggaaaggcatatacaaggccttgtcgtgcaaagagcccccgactctttatcagctttcggcaatgcaaatcctctttgaaatctgcccgtgcttccgatttggtttcatggctgctaattatgctatacttgaagcctgcaaaggtgaagatagagtgcacattatagactttgacattaatcagggcagccagtacattacactgatacagtttctgaaaaataatgcaaataagccacgtcatttgagaataactggtgtggatgatcctgaaacggtacagaggaccgttggcggtttgaaggtcattggtcaacgtctagagaaacttgcagaggactgtgggatatcttttgagttcagggcagttggtgctaacattggggatgttacacctgcaatgctagattgttgtcctggggaagcactagttgtcaattttgcattccagctgcaccaccttcctgacgagagcgtttcaattatgaatgaaagggaccaactccttcgaatggtgaagggtctgcaaccaaagctcgtcacactggttgagcaggatgccaataccaatactgctccatttcagacaaggttccgtgaggtttatgattattatgctgcactttttgattcactggacgcgacacttccaagggaaagtccggatagaatgaatgtggagcggcaatgtcttgctcgtgaaattgtcaacatcttggcttgcgaaggtcctgatcgtgtggagagatatgaagttgctggaaaatggagggcaagaatgacaatggctggcttcacaccatgcccatttagtagcaatgtcatcagcgggataagatcgttactgaagtcgtactgtgacagatacaagttcgaggaggaccatgggggacttcacttcggctggggagagaaaactctaatcgtctcctccgcatggcaatagagcttacagaatgagttggcattagtcttgctgttatttaggagcatctgatgcagagactgtaaaaaatgtgaaccactgaacttgtcaactgatcttacctaatcgtagatgtctgcttgtcagaataatcgagttagttgaactatgttgtattagagaattggcacatgatcgtgttgtattctggggtagaattatcttgtcgactctgcttcatgtataaaattatgtgttgctagaatatgccatatttatcatcttgggagcctaaatggtatt

SEQ ID NO: 3065 - DNA, 1481 bp, Oryza sativa
  ref <308>: DATABASE ACCESSION NUMBER: AK060834
  ref <309>: DATABASE ENTRY DATE: 2001-12-06
atacagcagggagctattctggagatcctgacgatagaggtatacaaacaacctcggatgctaagcattttgctatatcggccaagttcccagaattcagtaacaagaaccggacattggtggttcagtattcgataaagattgagcaggatattgaatgtggtggtgcttatatcaagcttatgtctggctatgtgaatcagaagaagtttggcggtgacactccttatagcttcatgtttgggcctgatatatgtggtgatcagacaaagaaactccatctgatactgtcttaccaagggcaaaactaccctataaagaaagatctgaaatgtgaaactgacaagttgacacatttttacacattcattcttaggccagatgcctcttatagtctacttgttgataaccgggagagagaatttggtagtatgtacactgactgggacatcctccctcctcgcaagatcaaagaatctaatgcgaagaagccaaaagattgggatgacagggaatatattgaagatcctgatgaagttaaaccagagggctatgactctattcctaaagagattcctgatccaaaggacaaaaagcctgagtcatgggatgatgatgatgatggtgtatggaagcctagaatgataccgaatccagaatacaagggacgttggaaacgcaagaaaattaagaaccctaactacaagggaaaatggaagatcccatggattgataatccagaatttgaggacgacccagacctatatgtgctgaaacctttgcagtatgtgggaattgaggtttggcaggtgaaagctggttcagtttttgacaacattttgatttgtgacgacccggagtatgcaagaagtgttgtcgatgaagttagggctgcaaataaagaggctgaaaaggaggccttcgaggaggctgaaaagcggaggaaggctagagaagacgaggaggctcggcgtgcacgagaggaaggagagaaacgaagaagagacagggatcggcaccgaggcagggaccgttacagggatagatatagaggtcatcatcgtaggtatgactaccatgacgagctatgaggtctccagattatcccattctttcaaggaacttcaggaagttagtgttgcccatcgactatttcatcacccaattgatgattgtaccaataaaatagaacatgttatttcgaggacagaacaaagctttatttcaggtgtggatagcacactacaacacgaactgatgctgttcacctgaaaccaagtaacaaactgaagatgtgaaagctagaacgtacatttttgggcagtaacaatatgctagcgaagaggacgatatgtttccatcttccagtaatatttctccttattagtgccttagaacatagaaaataaatcactctaggttgtgaaatataaactgtactttcattgtacttcagttatatatatctggcagtgtgtgtt

SEQ ID NO: 3066 - DNA, 1581 bp, Oryza sativa
  ref <308>: DATABASE ACCESSION NUMBER: AK060835
  ref <309>: DATABASE ENTRY DATE: 2001-12-06
cttcaccaacgtcggcaacccacacgcgctcggccagaagccgctcaccttcccccgccaggttgtggcgctgtgccaggcccccttcctgctcgatgatcccaacgtcggccttatcttccccgccgacgccatcgcgcgggccaagcactacctcgccatggcacccggtggactaggtgcttacagtgattcccgaggtatccctggtattaggaaggaagtcgccgagttcatcgagaggcgtgatggttatccaagtgatccagaacttatttacctcacagatggtgccagcaaaggtgtgatgcaaatgctgaataccattatcagaagtgagagagatgggattctggttcctgttccacaatacccgctttattctgctgccatttccctctttggtggttctctcgtgccatactacttagaagaagaggctaactggggacttgacttcgtcaatctccgacagactgtggcgtcagcgcggtcaaagggaatcactgttcgagcaatggtgattatcaacccaggaaaccctactggccaatgccttagtgaaggaaacataaaggaacttctcaaattctgcttccatgagaacttagttctgcttgcagatgaagtctatcaacagaacatttatcaagatgagcgcccatttataagtgctagaaaggttctgtttgacatgggtcctcctatgagcagggaagttcagctggtttctttccatactgtgtcaaaaggatattggggggagtgtggacaacgtggggggtattttgaaatgacaaatcttcctcccaagacagtagacgagatctacaaggttgcatcaatcgcactcagtccaaatgttcctgggcagatctttatgggtttaatggttaaccctcctaagcctggagatatctcttatctgaagttttctgctgaaagcaagtctatcctcgagtctttgaggaggagagcacgcctgatgacagatggtttcaatagttgccgaaatgttgtctgcaatttcacagaaggagctatgtactctttcccccaaatacgcttaccaccaaaagctatagatgcagccaaaagggctggcaaagcggccgatgttttctactgcctcaagcttcttgaagcaactggaatatccactgttccagggtcaggtttcggacaaaaagaaggggtgttccacctgaggacgaccatcctgccagctgaggaggacatgcctgccatcatgaccagcttcaagaagttcaacgacactttcatggatcagtacgatggctactccaggatgtgaaatgaaaacaagatgagcactaccccaggagaagagagaaagaatctgcctcagcgtggctgatcgagcagttataattaaaaggcactgttaattaattaattaatcaatcaatcgaaaggctaattatttgctgcaacaatctgtaactcgatctactgaaggaaaaaaaaaacttcttgtccttgatatgcatgatgtatagataaaattatttctgctctttgggaattgaataatacgggcgcacccaccggttacagtct

SEQ ID NO: 3067 - DNA, 1945 bp, Oryza sativa
  ref <308>: DATABASE ACCESSION NUMBER: AK060836
  ref <309>: DATABASE ENTRY DATE: 2001-12-06
ggcgatggcgagctccggtttctcatggacgctgcccgaccaccccaagctccccaaggggaagacggtagccctcgtcgtgcttgacggatggggcgaggccaacgccgacaagtacaactgcatccatgtcgcccagacgcccgtcatggattcgctcaagaatggtgctcccgagaggtggagattagtgaaggctcatggaacagctgttggtcttcctagcgaagatgacatgggcaacagcgaagtgggtcacaatgctcttggtgctggtcgcatttttgctcagggtgctaagcttgtggaccttgctcttgcctctgggaaaatttatgatggagaggggttcaattacatcaaagaatgttttgacaagggtaccctgcaccttattggtttgttgagtgatggaggcgttcactcccgtcttgatcaagtgcagctgcttctgaaaggtgccagtgagaggggagcaaaaagaattcgtgttcacattcttactgatggacgcgatgttttggatggcagcagtgttggttttgtagagacactagagagtgatctttctcagcttcgtgacaagggtattgatgcacggattgcatctggtggtggaaggatgtatgttaccatggaccgctatgagaatgactgggatgtggtcaaacgtgggtgggatgcccaggtgcttggcgaagcaccctacaaattccaaaatgcagtcgaagcagtgaaaactctaagagcagagaccaaggctagtgatcagtatttgcctccatttgtgatcgtggatgagagtggcaaatctgttgggcctgttgtagatggtgatgcagttgtgactttcaatttccgagcggatcgtatggttatgcttgccaaagcactagagtatgcagactttgacaaatttgatcgtgttcgtgtaccaaaaatccggtacgctgggatgcttcagtatgatggtgagttgaagcttccgagccattaccttgtctccccaccagagatagagagaacatctggtgaatacttggtaaagaatggcgtccgcaccttcgcttgcagtgagacagtgaagtttggccatgtcacatttttctggaacggaaaccgatctggatactttgatgaaactaaggaagagtacgttgaaattcctagtgatattggaatcacattcaatgttaaacccaacatgaaggcacttgaaattgcagagaaagccagggatgccattcttagtggaaagtttgatcaggtacgtgtcaacctgccgaatggtgacatggttggtcacactggtgatattgaagccacggtagttgcttgcaaggcagctgacgaagccgttaagattattttggacgcgattgaacaagtcggtggtatttatcttgtcaccgctgatcatggaaatgctgaggatatggtgaaaagaaacaaatctggccagccacttctcgacaagaacggtggtatccagattcttacctcacatactcttcagccggtcccggttgctattggaggtcccggtcttcaccctggtgtgaaattccggtctgacattcagacccctgggctcgccaatgttgctgcaaccgtaatgaacttccatggtttcgaggctcctgctgactacgaaccaaccctcattgaagttatggacaactaaaatagtaaaatcgcggtagcgaagttttgttcctatagtgttgagatgatcaagagtgatcatatcatttaataattgaataatttatgtttgcccgctcgctgctcaaactctactatggagagaaaagagtgtatttgacttgcagttctgctcttatctgtaactagacgttgtcgcgcaggctggcctgacgttttttcatccgctatatgcgataatgcgaggcgtcaaacatgctcttgtccagtatttaaagtt

SEQ ID NO: 3068 - DNA, 1546 bp, Oryza sativa
  ref <308>: DATABASE ACCESSION NUMBER: AK060837
  ref <309>: DATABASE ENTRY DATE: 2001-12-06
acgaatccgaaatactggtgtcaagccagagattctaaaacgtgttggagaagccatgactactctgcctgaaaatttcaagccccacagggctgtcaaaaagatttttgagctgcgtcgtcagatgattgagacgggcgaaggcattgattgggctgttggtgaagcacttgcttttgcaactcttataattgagggaaaccatgttaggttaagtggtcaggatgttgagaggggtacattcagccaccgccatgctgttatccatgaccaggaaactggagagcaatactgtccgcttgataatcttgttatgaatcaagatgaggaactatttactgtaagcaacagttccctgtcagagtttgctgttttgggctttgaattgggctattccatggagaatccaaactcactggttttatgggaagcccagtttggtgatttttccaatggagctcaagtgatatttgatcagtttctgagtagtggagaggcaaaatggctccgccagaccggtcttgtcgtttgccttcctcacggatatgatggtcaggggcctgaacattccagtgcaaggttggagcgtttccttcagatgagtgatgacaacccttatgttattcctgagatggatccaactctgaggaagcaaatccagcagtgcaactggcaagttgtgaatgtcacaactcctgcaaactatttccatgtcctgcgtcgccagattcaccgggacttcagaaagcctttgattgttatgtctccaaagaatctccttcgacacaaggactgcaaatcgaatctttctgaatttgatgaccttgctggtcaccctggatttgacaagcaaggaacccggtttaagcgtctaattaaagatcagaacaaccataaggaccttgaggagggaatcaagcgtttagttctctgttctggaaaggtatattatgagttggacgaagaaagaagaaaaaaggagcgtgatgatgttgctatatgtagagttgaacagctctgtccattcccatatgacctcatccagcgcgagttgaagcgatatccaaatgccgagattgtttggtgccaagaggaacccatgaacatgggggcgtacagctacatcaatcctcgcctcctgaccgcgatgagggcgcttggtcggggcacgatagacgacatcaaatacgttggaagggccccatctgcagccaccgcaacaggtttctactccgtccatgtgcaggagcaaaccgagcttgtgcagaaggcactgcagcgagaccctatcaactctccattttgaacctgtagattttatttggatagccgtgggtaatcaaacctttgatccaacagcaaaattattgcctgtgcagccatttggtgaataatccgcttcggatgtttggtaccgcatgagagaaaccatttgaaacccatgttgggatgcatcattttgtgtttcttaacatcaaattaaaccaagttgcatccaatgcttacttgaggagtagaaataagtcgatgctgaatactgatcttc

SEQ ID NO: 3069 - DNA, 1426 bp, Oryza sativa
  ref <308>: DATABASE ACCESSION NUMBER: AK060838
  ref <309>: DATABASE ENTRY DATE: 2001-12-06
tagagaaacgttttggtcaatcgccaatttttattgcgtccaccttcatgactcaaggaggcataccaccctcaacgaacccagcatctctactgaaggaagccatccatgttatcagttgtggatatgaggacaaaactgaatggggaaaagagattggctggatctatggttcagttactgaggatattctgactggatttaaaatgcacgcaagaggttggatatcaatctattgcatgccaccacggccatgcttcaagggttctgcgccaatcaatctgtctgatcgtcttaaccaagtgctacgttgggctcttgggtctgttgagattctgcttagcagacattgtcctatctggtatggttacaatgggcgtttgaaacttctggagaggctggcttacattaacaccattgtttatccaattacatccattccacttatcgcctattgtgtgcttcctgctatctgtctcctcaccaacaaatttatcattcctgagattagcaattatgctgggatgttctttattctgcttttcgcctccattttcgcaactggtattctggagctccgatggagtggtgttggtatcgaggactggtggagaaatgaacagttctgggtcattggtggcacatctgcccatctcttcgctgtgttccagggtcttctgaaagtgttagcaggaattgataccaacttcactgttacctcaaaggcgtccgatgaggatggtgactttgctgagctatacgtgttcaagtggaccagtctcctcattcccccgaccaccgtgcttgtcatcaacctggtgggcatggtggcgggtatatcatatgccattaacagcggttaccaatcatggggtcctctctttggaaagctcttcttctccatctgggtgatcctccgtctctaccccttcctcaagggtctcatgggcaggcagaaccgcactccgaccatcgtcatcgtctggtcgatcctcctcgcgtcgatcttctcccttctgtgggtcaagatcgatcctttcatttcgcctactcagaaagccgtcgccttggggcaatgcggtgtgaactgctgatcggcaccgttacgaagatgaacttcaatcaatcaaggtctacccccccttgtgtaaatacctgaggggggctagaatgggatcttctttttgtgtagatgaagaccttttttatctaagttatgccactgtttattagctacttcagtgctggcgctagctgctgatacgatggaactgtgaagccttattttgcctgcgaagaagccagcccagcagcgtaaattgtgaatctttttcttcttttgtgacacccgttattttagtcatttgtttgaggggtcgttgttacacatactatgggatgttatttatacggatatattccaatt

SEQ ID NO: 3070 - DNA, 1351 bp, Oryza sativa
  ref <308>: DATABASE ACCESSION NUMBER: AK060839
  ref <309>: DATABASE ENTRY DATE: 2001-12-06
agtagcgcagcttttggtggcaccgactcgcacaaccacacaagattacaaggagagtggcacatgaaactgccggcagctgtccaatgtatcttggattctgctgccacaattttctgtgctatcttcatggcgtctccagctcaaagtactaacaatttctttgtactttggactattttagtattgtactggaagaggtacgcgacagcatcgtgttcatcctgggcaaggcacccgtgaatcttgtcttggatttttttaaaacaaaacagcctgcaggggtcgtctcccatattctcaccaccttcttgttcctggagaacctcctctccagctctgtccaagcatcaattctctttcttttgcttcctgctgatacctttgatcctgagcagaagaagctgcagaagtgggttaaggcaggaagagccatgaacaacgaatttgattacctgttcaagctgctcctcatcggcgactcctcggtcggcaagtcatgcttcctcctccgattcgcggacgactcctacgtcgacagctacatcagcacgatcggtgttgacttcaagattcgcacgatcgagatggacgggaagaccatcaagctgcagatctgggacacagcaggacaggagcgattcagaaccatcaccagtagctactaccggggagctcatgggataattatcgtctatgacattacggatatggagagcttcaacaatgtgaaggagtggatgagcgagatcgacaagtacgccaatgacagcgtatgcaagcttcttgttggtaacaagtgtgatctggcagagagcagagttgttgaaactgcagtagcacaggcttatgctgatgagataggcattccattccttgaaacaagtgctaaggactcgatcaatgtcgaagaggctttcttggctatgtgtgccgcaatcaaaaagcaaaaatctgggagccaggcagccctggagaggaaggcatccaatctagttcagatgaaaggtcagccaattcagcaacagcaacagccacagaagagcagctgttgttcatcgtgatggcacaatggtctggcatcttccatgaattgggatgaacatggcatatctgttaagtgtgttcctctgtcttctcatagatttgagcactttagttactgcaaggtgtcgccacatctgttgaaaatcgagtcaagaacctaatttcctgtctttgatgattctctaataaacattgcatctagaaagttgtaccatatttaatagatacatgtagtttccagtctgaaaggtcaatttacacatgcaaaataatgcacagatgcaaatgcatatattttttccct

SEQ ID NO: 3071 - DNA, 1907 bp, Oryza sativa
  ref <308>: DATABASE ACCESSION NUMBER: AK060840
  ref <309>: DATABASE ENTRY DATE: 2001-12-06
actgccttctcatttactgcagaaggtgaaggtgaaggaggaggcggccatggcgagggagcaggcgctgctgttgacggagatcgtgaaccgcggcgtggagccgtcggggccggacgccgggtcgccgacgttctcggtgcgggtgcggcggcggctgccggacttcctccagtcggtgaacctcaagtacgtgcggctcgggtaccactacctcatcagccacggcgtgtacctggccaccatcccggtcatcgtgctcgtctgcggcgccgaggtcggcagcctcagccgagacgagctgtggcgcaaggtctggggcgaggccacctacgacctcgccaccgtcctcgccttcctcgccgtcctcgccttcaccatctccgtctacatcatgtccaggcctaggcccgtctacctcatcgacttcgcctgctacaaaccagccgacgaactcaaggtgtcgaaggcggagttcatcgatctggcgaggaagtcgggcaagttcgacgaggatagcctggcgttccagtcgcggctgctggccaagtctggcatcggcgacgagtcctacatgccgcgctgcgtgttcgagccgggcaccaactgcgccaccatgaaggaaggccgcgccgaggcgtccgccgccatgttcgccgcgctggacgagctgttcgacaagtgccgcgtccgccccaaggacgtcggcgtgctcgtcgtcaactgcagcctcttcaacccgacgccgtcgctgtccgccatgatcgtcaaccactacaagatgcgcgggaacatcctcagctacaacctcggcggcatggggtgcagcgccggcgtcatcgcggtggacctcgcccgcgacatgctccaggccagcggcgcggggctcgccgtcgtcgtcagcacggaggccgtctccttcacctggtacgccgggaagcgccgctccatgctcatccccaacgccttcttccgcgccggctgcgccgccgtgctgctctccaaccgccgcagggacttccaccgcgccaagtaccagctcgagcacatcgtgcgcacccacaagggcgccgacgaccgcagcttccggtcggtgtaccaggaggaggacgagcagcggatcaagggcctgtccatcagccgcgacctcgtggaggtcggcggccacgcgctcaagaccaacatcaccaccctgggcccgctcgtgcttccgttctcggagcagatcctcttcttcgccggcgtgctcttccgccacctgttcccgtccaagacctccgccccgccgccgccgtccgccgacggcgacgcctccgccgccgctccctacatcccggacttcaagcgcgcgttcgagcacttctgcatgcacgcggcgagccgcgacgtgctggagcacctgcagggcaacctgggcctccgcgacggcgacctggaggcgtcgcgcgccgcgctccaccgcttcggcaacacgtcgagcagcagcatctggtacgagctggcgtacctggaggccaagggccgcgtccgccgcggcgaccgcgtgtggcagctcgccttcggctccgggttcaagtgcaacagcgccgtgtggcgcgccgtccgccgcgtgcgccgcccggcgcgcagcccgtggctggactgcgtcgagcagtacccggctcgcatgaacgcttaagctgcagtggtaagtatgcagaggctaatgaacggaaaattactgcaacgtcaaaagacgggatcggcatgcgatgccggttaaggttcaagcttgattaatttgtgttggtgtattagcaagtcggtttatgagccatagactaccataaaagttgtgcgagacatgtgtactgaaccagtgtacgcgagttcggtgatatgtgaacttatctacgtttgattctatt

SEQ ID NO: 3072 - DNA, 1470 bp, Oryza sativa
  ref <308>: DATABASE ACCESSION NUMBER: AK060841
  ref <309>: DATABASE ENTRY DATE: 2001-12-06
acgagggcaagcagaccgaccaggacaggtggaagggtctcgcctacgacatctccgatgaccagcaggacatcaccagggggaagggtttcgtcgactcccttttccaggctcccacgggtgatggcacccacgaggccgtcctcagctcctacgagtacctcagccagggtctcagaacgtacgacttcgacaacaccatgggaggcttctacatcgcccctgctttcatggacaagctcgtcgtccacatctccaagaacttcatgaccctccccaacatcaaggtcccactcatcctgggtatctggggaggcaagggtcagggaaaatccttccagtgtgagctcgtcttcgccaagatggggatcaaccccatcatgatgagcgccggagagctggagagcggcaacgccggagagccggcgaagctgatcaggcagcggtaccgtgaggcggcagacatcatcaagaaggggaagatgtgctgcctcttcatcaacgatctggacgcgggtgcaggtcgcatgggaggcaccacccagtacacggtgaacaaccagatggtgaacgccaccctgatgaacatcgccgacaacccaaccaacgtgcagctccccgggatgtacaacaaggaggacaacccccgtgtccccatcatcgtcaccggcaacgacttctccacgctgtacgcgccgctcatccgtgacgggcgtatggagaagttctactgggctcccacccgcgacgaccgtgtcggcgtctgcaagggtatcttccgcaccgacaacgtccccgacgaggacatcgtcaagatcgtcgacagcttcccaggccaatccatcgatttcttcggcgctcttcgtgcccgtgtttacgacgacgaggtgcgcaagtgggtgtcggacacgggtgtggagaacattggcaagaggctggtgaactcgagggagggcccaccggagttcgagcagcccaagatgacgatcgaaaagctcatggagtacggatacatgcttgtgaaggagcaggagaacgtcaagcgtgtgcagctggctgagcagtacttgagcgaggctgctcttggtgacgctaactccgacgccatgaagactggttccttctacggttctgcgccatccagctgaataaaagatctctagctattcgcatcccatcgatgcatcgtaggcggcctgcataggaggaggagggcaaggagcacagcaagcaggtaacctgcctgtgccggaaggttgcaccgaccctgttgccaagaacttcgacccaacggcgaggagcgacgacggcagctgcctttacaccttttaagcaggccggcttgacgcttgctattaattatttctcctttttatgttttctctttgttctgtgtatcagatcgcgcccaagccatagctgggcatgacaagtttttgttaataataatataatataaagatatgggct

SEQ ID NO: 3073 - DNA, 1089 bp, Oryza sativa
  ref <308>: DATABASE ACCESSION NUMBER: AK060842
  ref <309>: DATABASE ENTRY DATE: 2001-12-06
atcgctggatatgtcggtgtccgtgtttggaggacaatcaaaggaacctcagaagggtggaaatctgttgcttggctgacctcctgcttcttccctggcattgttttcgttatcctgactgtgctgaactccatcctgtggggcaagaagagcactggagctttacctatctcactgtttttcacactcctggccctgtggttctgcatctcagttccactcacacttattggaggtttgctgggtacacgtgctgcaagcatagagtaccctgtccgtaccaaccaaattccacgagagatccctgagcgcaagttcccgtcatggctgcttgttttgggtgctggaacattgccctttggcaccctcttcattgagcttttcttcatcctgtctagcatttggttggggaggttctactacgtctttggcttcctgttcattgtccttttcctgctggtcgtagtctgtggtgaggtttctttagtcctaacctacatgcatctttgtgtggaggactggaagtggtggtggaaagccttctttgcttctggttctgtcgccttctacgtcttcctatactcaatcaactacctcgtgttcgaccttaggagcctaagtggaccggtctcagcaacgctctaccttggctattccctgatcatggcccttgccatcatgctgtctactggtgctattggcttcttgctgtccttctacttcgtccattacctcttctcatctgttaagattgactagaggcacccacactcttgctgcaataggatcacctgagcatggtgatagttatcccttagaaacatatcacacgataatattgaattgaaaagaaaaatgtaaacatggcaacgcccatggcttttggccctgattaattctatcatttagcatagcacagtttctttaagttcatgcttatgttttgtaggcatgtctgcaatgtttcagctatgttttttgactttgtaatactattatgttttgttttctctgggcatttgtgagcagcctttgttggaacactttgacagatattcaatattaaagagctattcgattacagtcctt

SEQ ID NO: 3074 - DNA, 1533 bp, Oryza sativa
  ref <308>: DATABASE ACCESSION NUMBER: AK060843
  ref <309>: DATABASE ENTRY DATE: 2001-12-06
ttctgctccgacctcacctcgcctccttcctccgccgactccctcccctccgccattgcagcctcgcctacggccttgagctcgtcgccgatccccgccaccgccgcgacctctgcctgccccccatgcctcggccggcgaaaatcaggaaaaaacatgagaatgtgtttgatcaattgatcaaggcgataaaagctcctgtggactttgatctgccgcctgtattgaaagaatggaagtcaaattactatgtgccaattaagcggaatgcttatattactcggaaacgcgttgaggatgatggcattttttgttcctataccccttctggatcatccgcaacttgtgacaaagattgccaatgcgggatgttgttctcttgttgttcgtcgacctgtaaatgtgggaataaatgtgctaacaaaccgttccagcataggactttgaggaaaaccaaattaattaagacagagaaatgtggcaatggggtggtagctgaggaagatattaaaaaaggagaatttgtaatcgaatatgttggagaagttattgatgacagaacatgtgagcagagactatggaaaatgaagaggcagggtgacactaatttctatctttgtgaggtcagtagtaatatggtgatcgacgcgaccaacaaaggaaacatgtcgcgcttcataaatcatagctgtgagccaaacacagagatgcagaaatggactgttgagggagagaccagagttggaatttttgctcttcgtgacataaaaacgggggaggagctgacctatgattacaagtttgtccaatttggagctgatcaagattgtcactgtggatcttcaaactgtcgaaaaatgcttggcatcacaaagcctgttaactcaattgtacttcataatggaaatctgtcacaagatcagcatgtccggaagaaaagaaagacatatttggagaattgtattggggagattgtccgtttgtggcatcgacgtcacagcatgtatctcgcagcaagtatatatgacttcaatgagcgcaatggaatacatacattattgtttaccgatgcaactattgaagaatttgatttgagagaggaagattgggacttcttaccggatccagatggtcctgaggaagtgtgagtgatctgaagcttcatatgaggatgtcatcgcaactgtgtcaatcggatgattgtactgttgggatttaacatgtggaagtgtttagctgcaatcatccacccacaaatcaattcttcagagcgtgtacccaacatgatactgtcctcctaaactgtaaaaagcttttttcaattgttgaatgttcattaatttttttcaggtttgtatcaatcgaagtgcatcttgtgatgcttgtaaaaattgttggctgggtgagtttacaatcgttgttgtaacgtgcgatggtgatagtttattagtttagtttatgctgttataccatgtagttatgcttgtactgagagctacttgaaccataagatatttcggtatgtctgctctt

SEQ ID NO: 3075 - DNA, 1894 bp, Oryza sativa
  ref <308>: DATABASE ACCESSION NUMBER: AK104345
  ref <309>: DATABASE ENTRY DATE: 2002-08-28
caccggggaaggattagctgcgcagaattgtgcgagcgaagcctgccagccgtgcgaatttcaagctccgaggtcctgcattgcactgaaatggggaggcattcttgctgctacaagcagaaattgaggaaggggctctggtcccctgaggaggatgagaagctcatgaatcacataaccaagcatggccatggctgctggagttctgttcctaaacttgcagggctccaaagatgcggcaagagctgcaggctgaggtggataaactatctgaggcctgacctcaagagaggtgcattctctcaggaggaagaagacctcatcattgagctccatgctgtccttgggaacaggtggtctcagattgcagctcagctgcctgggaggactgacaacgagatcaagaatctctggaattcttgcatcaagaagaagctccggcagaaaggcattgatcccaacacccacaagcccctcaccgaggctgatcgcaggggagcagcacccacagtcagcaccgagaggacctcagggtccagcgacgtcaacccgtcaagtgctggtgctctagggaacttgagccacctcctcagcgagacagcacaatcatcaatgctgctgccggtgtatgataagaatcaccctgaaactgcaagcttgccacgccctaaggtgccaccaaaggagttgtttcttgaccagcttactgccggtcacgagagcccatcaagttgccgctcatcaggtccaaccctgtattttcctttccagcaaccattaggctacagtaatgaatgtggcactggggatggtgcgagtatgaattcactctggttcaaccagaatgatttcaactgcagcacaatctccaccgtgatgccaccagtttcaccatcagccctctcaacatcaatggggctgaatcttcccccagaagatcctcgtcacggaggcactggcattggcaacaccccgttctactgggatggttccaatcctagcagcagcggcagtactgggagcagcggaagcaacagtatgggattcgagccacagagcacaacctcaattttggagaacagtgtattcccatggacagatatcggacaagagaaagataccagagttcacttagtggaggaactcaagtggcctgatttgctccatggaacctttgctgaggcgacgacagccatgcagaaccagagccaatcattatacgatgatgtgatcaaggcagagagccaattcaacatggaagggatatgtgcctcttggttccagaatcagcaaccacaacaacagctgcaagcagcatcagacatgtatgataaagacttgcaaagattgcccttgtcttttgaacatatctaggtgcaatgctacgccatgcatggaacagagcagagatcagaagaagcagaaacttgtaactctcgcatattgattggcaggcaaaacactgaagtgtttgatgttttgacacagaatcgacctcaacactttctcctcacttaaagatcctacagtgtcatggaaaagacagctctggccttacgagtagcagaagaagggatagaaaagtacgttctagagtctccctcttttctcttgaaatttgctgttttttgtacacgacaactcaacttttggatacttgagttttggttcactctgtttatcaaataaatatagacacgcatgggcaaaacatgtgtcggtagctctcacaaaccatacaagtagtcccaagcttttcaactgctaccatgcacgtacatgcaaattaattattgcatgttgtatttttatttcttttgagaagttgccgacaaagtgcagttgtatatttgtaaaggaaaaaaattggaacattgacccaagagttattttc

SEQ ID NO: 3076 - DNA, 1517 bp, Oryza sativa
  ref <308>: DATABASE ACCESSION NUMBER: AK060844
  ref <309>: DATABASE ENTRY DATE: 2001-12-06
caagaggaaaggggacgagcagagaaactggagggtgagcaaggcacacgatatcaaggagctgagggatcatctcgctgaactgaaaaggcgaaatgcgatagagaagaagaaagctgagcaggcatcacgtgatctcagagagagaacggcattgttgaatttggcttttgtcacgctgaaaaagaagcgaaatgattcatcggtgatgcacaccaatgccatgaaagcagcacagatgggtcttatggcaactacctcagagcatttaaaaatgcagtcaaaagctatgaagcaactttgcagattgttcccattgcgacgagttattaaggatggcgaacagaatgatggctacaatggtccatatgatgtaatatgcaacgctcgtctacctcgtggtctcgacccacattcagttccatccgaagaattatcagcttctttggggtacatgttacagctcctcagtattgtagttcctatcctagccgcacctgtcctccacatatctggctttggggcttcgtgttcacgtgtatggcagcgtagttcctactggagcacacgacagtcccaaagcaaagtctacccactttttatacctaggaaaaataattgctctgttggtgaggataattcatggacggaaagtggttcgggtaactttggtgttcaatctgttgattcagacaacaaatcggttcttgactccaagagaagcaatagctttaacttctctattgcatcttctcactccatggagaggcaccaagatttgcaaagaggaatatcattactaaagacaagtgttactgccattactacctattactataactcattgggtatggatgtgccatccaatctttttacttttgaagcatttgcaaagttgctccatatgctatcatcattaaaggtccttcgcacaactcttcaatcgaacgttgcttcaaggtcagagaagcaaggacagcaactaaatagatctatatggaaagcgagctccgctatctcatctaacagcagcctgatggacagtgtgaacacagctataatgcctagttctctggacaacctcctgctgaactccaacacgagcttcctgtatagcggtaaaccgacgaagcatggtggagttccagacaacattttagaaggctgggatatggtagagcgcgacgtcctaccaccaccaccgtcgcgggttgaagacgttgcgcaatgggaaagagcccacaccttcaatcgcactggctccaaaaagaagtgatggttaggcgctcatgtattctctgaagccaggctgttaatttaggacactgcaagcctctgcataggctttcagctgatcataaggtttttggttgatgtacagaactgaccataacctgtgacaatgaatatgcagagaagagggtgtaattgatcagctggcatctgtaaagcaccttcaatttgtaaatatacatgtaattgtacagtacttcctatccaataaaaaaatatagttg

SEQ ID NO: 3077 - DNA, 1463 bp, Oryza sativa
  ref <308>: DATABASE ACCESSION NUMBER: AK060845
  ref <309>: DATABASE ENTRY DATE: 2001-12-06
agcaaaagcgattcccgtagtagcggcgagcgaaatgggagcagcctaaaccgtgaaaacggggttgtgggagagcaatacaagcgttgtgctgctaggcgaagcggttgagtgccgcaccctagatggctaaagtccagtagccgaaagcatcactagcttacgctctgacccgagtagcatggggcacgtggaatcccgtgtgaatcagcaaggaccaccttgcaaggctaaatactcctgggtgaccgatagcgaagtagtaccgtgagggaaaggtgaaaagaacccccagtgggtagtgaaatagaacgtgaaaccgtgctgagctcccaagcagtgggaggggaaagtgatctctgaccgcgtgcctgttgaagaatgagccggcgactcataggcagtggcttggttaagggaacggaacccaccggagccgtagcgaaagcgagtcttcatagggcgattgtcactgcttatggacccgaacctgggtgatctatccatgaccaggatgaagcttggatgaaaccaagcagaggtccgaaccgactgatgttgaagaatcagcggatgagttgtggttaggggtgaaatgccactcgaacccagagctagctggttctccccgaaatgcgttgaggcgcagcagttgactggacatctaggggtaaagcactgtttcggtgcgggctgcgcgagcggtaccaaatcgaggcaaactctgaatactagatatgacccaaaaataacaggggtcaaggtcggccagtgagacgatgggggataagcttcatcgtcgagagggaaacagcccggatcaccagctaaggcccctaaatgaccgctcagtgatagaggaggtgggggtgcaaagacagccaggaggtttgcctagaagcagccaccctttaaagagtgcgtaatagctcactgatcgagcgcccttgcgctgaagatgaacggggctaagcgatctgccgaagctgtgggatgtcaaaatgcatcggtaggggagcgttccgccttagagggaagcaaccgcgaaagcgggggtcgacgaagcggaagcgagaatgtcggcttgagtaacgaaaacattggtgagaatccaatgccccgaaaacccaaggtttcctccgcaaggttcgtccacggagggtgagtcagggcctaagacctggctccgcctgaagtgtactgtaccaccacattgtttgtttcataatcaatgtgtgtcaatacaatcgtatgtgctaccagagtatatcacagcagcaactgttttaatttgtatgcttatgtaattgttatgctactgctgtgttgataatgtgatataaatgactaaacgatgagtagtagaaattgtgcggagtcaccctcccccttcctcatttctgaaccctttggttctgtgtgactctttgtatgtaacatgaacaaatacctcctttcccgtc

SEQ ID NO: 3078 - DNA, 1827 bp, Oryza sativa
  ref <308>: DATABASE ACCESSION NUMBER: AK060846
  ref <309>: DATABASE ENTRY DATE: 2001-12-06
cattagcatgggataacatcataggattccggtcctattgtgttggccttcgggatcggagtaatgattaatagggacagtcgggggcattcgtatttcatagtcagaggtgaaattcttggatttatgaaagacgaacaactgcgaaagcatttgccaaggatgttttcattaatcaagaacgaaagttgggggctcgaagacgatcagatcttggacgctgattactacaggaggcggcggcgggtagaaaaggaagatgggatgaattttattgaatctatcttttcatttgtatttggagatggtgatccaaatgatggtcttgaagataagaggtggaagatgattgggcaatatatttcatcgaatggtggagttgtcacggcagaagaactagcaccgtatcttgatgtgccaccaatttcagaacaatccaaggatgatgaatcatttattcttccagttctattacgcttccagggacacccagaagttgatgaacagggaaacattctttataggtttccatcactgcaacgtactgcttcatcaaaaggaagtggggttagagaatatgttggtaacaaatggtctgctatgtttagcagtgttgaaaagtacttagaggagaaaccatggaaattcagcaaagcaaatgcatctgaaagggcaatggttgctggtttgggaggactcaatctttttggtgtgatcattcttgggaacctgttgaagcaaatgacagtgccacctggtggacttatctcatttgttgcgcaactgtttcctttgcttcaggtatatgctggttccttttttgcaataccgttgtttagatggtttctactccgcaagaccaacaatgacattgaaaggaggaacaaggccagagaacagcgagctcaggaacttgcattgccagaatcttctctcagaagaaagttactcagtgcacgcgacatggctcaacgtaaggtaattactccagaggagatcgtctacactaccgaaaaggatcttttggatcaggattatgaagtcaaggaatgggaaaagagatttaaggagcttgaatcagactgatggaaatacttggctttcatgctatcccttcatggtcctttggtctgcttggatggtcatttttatcagcatccaattgattggtggatatatctgactaaaccattaaatcaagtggcgcaacgtctaactggactggatggttctgacacccattgataggcgcgcactatttcgaccttgaaatttttgtgtaaactgttagtcaatttgcattgatcaaggtctgcagctgatgtacatatctgtaacgtttagcagcatatttgtataggtagttcagtgcacaggagcagtgaaccacaaagttcagaattcgacatgggtaccagggaccattctttatggatggagaaggatagccggaaaagtaaaagattatgccattactggggcaccagacttggtcattctggtttctgtatcgctgaaactttactggtgatcatgcacaagtcttatgctttacacaggcatgttagaacattcaggggaaaatcaattcctgattggtgagaaacagtaattgtgtataggagctgtgcaagaatatacgtccagattccagaccttagatgccagaatagaacaagatcatttataaatcccaaaagaatgtgatacgcttacaactgatgatttgctatgtattatcgaccaatgacaattcttctgtatgactcttcctctgtaacactgtaagacgaaaggcagtgcaagcctggtgggttaatactttcc

SEQ ID NO: 3079 - DNA, 1691 bp, Oryza sativa
  ref <308>: DATABASE ACCESSION NUMBER: AK060847
  ref <309>: DATABASE ENTRY DATE: 2001-12-06
gagcagcagcggccggccatcatcagtgatcctctacaatcatcgactttcagcaaattaagatggctgctgccttctcctccaccgttggagctccggcgtccactccgaccaacttcctggggaagaagctgaagaagcaggtgacatcggcggtgaactaccatggcaagagctccaacatcaacaggttcaaggtgatggccaaggagctggacgagggcaagcagaccgaccaggacaggtggaagggtctcgcctacgacatctccgatgaccagcaggacatcaccagggggaagggtttcgtcgactcccttttccaggctcccacgggtgatggcacccacgaggccgtcctcagctcctacgagtacctcagccagggtctcagaacgtacgacttcgacaacaccatgggaggcttctacatcgcccctgctttcatggacaagctcgtcgtccacatctccaagaacttcatgaccctccccaacatcaaggtcccactcatcctgggtatctggggaggcaagggtcagggaaaatccttccagtgtgagctcgtcttcgccaagatggggatcaaccccatcatgatgagcgccggagagctggagagcggcaacgccggagagccggcgaagctgatcaggcagcggtaccgtgaggcggcagacatcatcaagaaggggaagatgtgctgcctcttcatcaacgatctggacgcgggtgcaggtcgcatgggaggcaccacccagtacacggtgaacaaccagatggtgaacgccaccctgatgaacatcgccgacaacccaaccaacgtgcagctccctgggatgtacaacaaggaggacaacccccgtgtccccatcatcgtcaccggcaacgacttctccacgctgtacgcgccgctcatccgtgacgggcgtatggagaagttctactgggctcccacccgcgacgaccgtgtcggcgtctgcaagggtatcttccgcaccgacaacgtccccgacgaggacatcgtcaagatcgtcgacagcttcccaggccaatccatcgatttcttcggcgctcttcgtgcccgtgtttacgacgacgaggtgcgcaagtgggtgtcggacacgggtgtggagaacattggcaagaggctggtgaactcgagggagggcccaccggagttcgagcagcccaagatgacgatcgaaaagctcatggagtacggatacatgcttgtgaaggagcaggagaacgtcaagcgtgtgcagctggctgagcagtacttgagcgaggctgctcttggtgacgctaactccgacgccatgaagactggttccttctacggttctgcgccatccagctgaataaaagatctctagctattcgcatcccatcgatgcatcgtaggcggcctgcataggaggaggagggcaaggagcacagcaagcaggtaacctgcctgtgccggaaggttgcaccgaccctgttgccaagaacttcgacccaacggcgaggagcgacgacggcagctgcctttacaccttttaagcaggccggcttgacgcttgctattaattatttctcctttttatgttttctctttgttctgtgtatcagatcgcgcccaagccatagctgggcatgacaagtttttgttaataataatataatataaagatatgggctatact

SEQ ID NO: 3080 - DNA, 1461 bp, Oryza sativa
  ref <308>: DATABASE ACCESSION NUMBER: AK060848
  ref <309>: DATABASE ENTRY DATE: 2001-12-06
atcccccgttcgtccgtccgctctcctccttcccaaccggcaatccgccgatccgtccgacctctagcttgtacgctgccgctgccgccatgagctggtggtgggcgggcgccataggcgcagtgaagaagcggcaggaagagaacgcggcggccaccgagccgtccttccagagcgtcgccctcgtcgtcggctccacgggcatcgtcggcacctccctcctcgacatcctcccgctccaggacaccccgggcgggccctggaaggtctacgccgtctcccgccgcccgctccctccctggtccccgccggcctcccccgccgccacccacctccacctcgacctcgccgactccgccgccgttgccgaggtcctcacgcccctcaccgacatcacccacgtcttctacgtcgcctggtccgcccaccccacggaggcccagaaccgcgaggtgaactccgccatgctccgcaacatcctctccgtcgtcgtccccaactgccccgctctcgtccacgtctgcctccagaccggccgcaagcactacatcggaccattcgaggtcatcggcaagatcgccgccccggacccgcccttcaccgaggacatgctccgcctcgattgccccaacttctactacgacctggaggacgtcctcttcaacgaggtctcccgccgcgacggcgccgtcagctggtccgtgcaccgccccaccgtcgtcttcggattccctccccgaagcgccatgaatgtcgtcggcagcctgtgcgtttatgccgccatctgccgcaaggagggcgctgtgctgcgatggcctggatccagggtcgcctgggagggattcagtgacgcgtccgatgcggatctcatcgctgaacacgagatctgggccgccgttgagccattcgccaagaatgaggcatttaattgcagcaacggggatctctacaagtggaaacttctctggccgatgctggcagaccaattcggcgtcgaatggtctggctacgagggagaagagagcagcttcaagcttgcagatgccatgtcggggaaggaggcagtgtgggcagagattgtcaaagagaatgatctcatggacaccgagcttgaagagatcaccaattggtggtttgttgatgccgtgttcggcgtccgcagcgagcatttggatagcatgaacaagagcaaggaacatggattccttggcttccggaacacggtgaattccttcaacacatggatagaaaagatgaaggttttcaagattgtcccatgatgcgttcaattgttttttatattattgcacatcttgttttctatgccattcatccaaattgctcccgaatttagttccattataaacattgctttcaaggttacatgttgtaaaatgctgtattctacaaaaaactagaaccgaataaaattaatcaagtggagaatgaattttatggatc

SEQ ID NO: 3081 - DNA, 2445 bp, Oryza sativa
  ref <308>: DATABASE ACCESSION NUMBER: AK060849
  ref <309>: DATABASE ENTRY DATE: 2001-12-06
aactcccaactcccaagttgcaatcgagaataaataaaaatcccaatcccctccttctcttcttcttcctccctgttcccttttcgattcgattggattggattgttttgctggctcgctctctctctctctctcgtggtgtggtgtggacaagaaaggaaggaaagatggagggcggcgtagggggggaggtggaccacctcgccggcgagagggccaccgcgcagttcgacgttgaacacatgaaggttgcctgggctggctcccgccacgccgtcgatgtcgccgaccgcatggcgcgcctcgtcgcttccgaccccgtgttccgcaaggataacaggactatgctccccaggaaggagctgttcaaggacacactcagaaaggcagcccatgcgtggaagcgtatcgtcgagctccgtcttacagaagaggaggcaaatttgctaaggctatacgtggaccagcctggttatgttgatctgcactggggcatgtttgttcctgctataaaaggccaagggactgaagagcagcagaagaagtggctacctctggcctacaggttccaaataattggatgctatgctcagactgaacttggtcatggttccaatgttcagggccttgaaacaaccgccacatttgacccaaagactgatgagtttgttatacacagcccgacactgacctctagcaagtggtggcctggtggcttgggaaaagcttccactcatgcagttgtgtatgctcgtctgataactgaaggaaaggactacggcatacatggtttcattgtgcaactacgaagcctagaggaccactctccccttcccggtgttactcttggtgatatcggcggaaaatttggtggtggtgcatacaacagtatggataatggagttctgcgatttgaccatgtgcgcatcccaagggatcaaatgttgatgaggctttcacaagttacgaaagagggaaaatatgtgcactcagatgtcccaaaacagctgctttatgggacaatggtttttgttcgtcaaacaattgttgcggatgcttctaaggctttatcacgtgctacttgcattgctgtaagatacagcgctattcgaaagcagtttggccctcaaactggtggccctgagactcaggtcctcaattacaagactcagcaaagcagaccctttcctttgctggcttcagcttatgcatttaggtttgtgggtgagtggctgaagtggctgtacacggatgtcacacataaactggaagccaaggatttctcaacacttcaagaggcccatgcctgtactgctgggttgaaggctgtgacaacatctgcgacagctgatggaattgaagaatgccgaaaactctgtggtggacatggttacctgaacagcagcgggcttcctgaattgtttgctatctatgttcctgcttgcacttatgaaggagacaatgttgttttactattgcaggttgcaaggtttctaatgaagactgtatcccagttagcttctggaaaacagcctgttggtacaacggcttacatgggcaacatacagtacttgatgcaatgcaaatgtggtgtaaatacagctgaagattggctaaatcctgctgccatacgagaggtatttgaagctcgggctctcaggatggcggtgaattgtgcccagaacataaacaaggcgccaagccaagaagaagggttttatgagctatcccctgatctgcttgaggtggcggtggcccatatccagttgataattgtaaccaagttcatagagaaattagagcaggacatccctggtgagggagtgaaggagcaactgtgcatcctttgcaatgtgtacgcgctgtatcttgttcacaagcatctgggtgacttcctgtcgacggggagcatcacagcaaggcagggagcgctggcaaacgagcagctgggaaagctgtatgcgcaggtgcggccgaacgcggtggcgctggtggacgcgttcaactacaccgaccactacctggggtcggtgctggggcgctacgacggcaatgtttacccggcgctgtacgaggaggcgtggaaggaccccctcaacgacacggatgtgccggacggttaccaggagcacctccgccctctgctcaagcagcagctcaagctctccaggctatgatcatccatccatcatcctccctttcttgctctatcaatcatatcatactgcatacgatttgagtagtagtaaaataacaccagcatatgcaaggtgctggctggctgctagtattttctttttctttataatttatttatttggggagagctggtattgtcttatttatttgggaagagctggtattgtatgtctggtgatttggtatagctgtaactgtgaacttcaccacatctcccccttctcaagggcatatgcattctactcc

SEQ ID NO: 3082 - DNA, 1650 bp, Oryza sativa
  ref <308>: DATABASE ACCESSION NUMBER: AK060850
  ref <309>: DATABASE ENTRY DATE: 2001-12-06
ctctccggcggcggcggcgtcttgtgcgcgtgagaaagagaggagaagaagatggcgacgatcgtgaacacgacggaggaggagccgatgctggccgtggtgcgcttcaccgccgagctggcctgggcggacgccggcgccgacgtcgccgagccggaggtcacccgtctctgcgtcgaggcgcagcagcacatcctcgccgcccgctggctcgacatggcctccctcatgctcgcctccgccgacctcctcctccaatccacgcgcctccccgacaaggacaaagatctcgagtgcatcctcgctatcatctgcaacctcgtcaccaaggcccgatcccaagacgaggccctgcagatcgccgaactcatctgcgccaagctcacccaccagccccaagacaaaccggccctgcgcctcaaagttctcttcagcttgtacaatctgctcgggagcccctatgccaaggccttcgtctacaagaaggcactcgacctcgccgccgctgggaaggctgccgactgcattatccctacttttaagaacatcgacagcttcatcagcgattggggcattggcaaggtggagcagagggacctgttcctcgctgccgctaggatcctcaaggaccagaaaggcatgaacaaggagtacttcaactttctgaataagtaccttgccaccttcgatggatcggccgatgacgctgatgcaatcggtgatgcaaaggaagaagctgttgcagcaatcattgagtttgtcaagtcatctgatctctatcagtgtgatctactcaatatgccagcagttgcacagctggaaaaagacgaaaagtatcagctggtttatgagctcttgaagatattccttactcagaggcttgattcctatttagagtttcagtcagctaattctgccttgctgaaaggttatggactggttcatgaggattgcataacaaaaatgagactgatgtccctgcttgacctcagcagccgttgtgctggggagatcccttaccatgcaatcatagatgcacttaagatcaatgatgatgaagtggagtattggattgtgaaagctatttcatgcaagatattggattgcaaagttgaccagcttaaccaggttatcattgtcagtcggcatactgagaggatatttgggatgccacagtggcagagtttacgttcaaagcttggagtttggaggggaaacattgctagtgctattaacacaatacaagcaaacaaggtgactgatgatggatcacaggggatccaaggcttgatgatccgttgatggagaggggttcctgaattgaaattatagtttcaactttgagtagatgagcaatccttttgtatgagattacttgtaatgtgaattactttgatcccatgaccttgtggctggatctggattgctatggcatgctaagcaatctcattgtttttgtagtcatagcggtgcttaaaagtcggttgttacacaagtaccaatcagtcgattactaaagagttccaacagaatggcagatctattgtggcaattttccttcataacggattgatgagttaatgtattattgtttagaacatctggtgcgatttttcataacaattatgacagtcatagaacgtcttgttc

SEQ ID NO: 3083 - DNA, 1235 bp, Oryza sativa
  ref <308>: DATABASE ACCESSION NUMBER: AK060851
  ref <309>: DATABASE ENTRY DATE: 2001-12-06
aactcacactcgctcgctcatcgccatctctctcagctctcacagctcactgcatcaatggccgcggccaccatggcgctctcctccccggtgatggcccgcgcggcgccgtcgacctcctccgcgctcttcggcgaggcgcggatcaccatgcgcaagaccgccgcgaagcccaagccggcggcgtcgtcggggagcccgtggtacggcgccgaccgcgtcctctacctcggcccgctctccggcgagccgccgagctacctcaccggcgagttcccgggcgactacgggtgggacaccgcggggctctccgccgacccggagacgttcgccaagaaccgggagctggaggtgatccactcccggtgggcgatgctgggcgcgctcggctgcgtcttcccggagctcctcgcccggaacggcgtcaagttcggcgaggccgtgtggttcaaggcgggctcgcagatcttcagcgagggcgggctcgactacctcggcaacccgagcctgatccacgcgcagagcatcctcgccatctgggcggtgcaggtggtgctcatgggcgccgtcgaggggtaccgcatcgccggcgggccgctcggcgaggtcgtcgacccgctctaccccggcggcgccttcgacccgctcggcctcgccgatgaccccgaggcgttcgcggagctcaaggtgaaggagatcaagaacggccgcctcgccatgttctccatgttcggcttcttcgtccaggccatcgtcaccggcaagggccccctcgagaacctcgccgaccacctcgccgaccccgtcaacaacaacgcctgggcgtacgccaccaacttcgtccccggcaagtgaagtgggggaccgtagcttagcagtggttaattgtggttggatggatttgtggccagcgagttcgttgtctttgggttggggaagatgggtttagtgcgacgagatgatgatcgagttggtgttgtgtacactaagaagatgaagaagaagatgatgtttttgcaataatgattttattcgtttcccaactaatggtctaggtacttatccgtggtgttattctgattagcggatttctcatctctattagatcggaaacaaatactccctcgatcccaaaatataaccatttctggctatgtatagtgtaaatatgtagtctaaattgtttatattgtggcatggaaggattaattagtgctttaaatttacgtatacag

SEQ ID NO: 3084 - DNA, 1797 bp, Oryza sativa
  ref <308>: DATABASE ACCESSION NUMBER: AK060852
  ref <309>: DATABASE ENTRY DATE: 2001-12-06
aggaggctatggcccatgcttggaattcctatgtgaagtatgcctggggaatggatgaacttcagccacaatcaaagaatggtgtcaatagctttggtggtctcggggcaactcttgtggactcacttgatacactgtatataatgggcctaaaggatgaatttcagagggccagagactgggtggccgattcactaagctttgacaaggattacgatgcaagtgtctttgaaacgaccataagagttgttggaggcctcctcagtgcatatgatctatctggtgacaaagtatttcttgagaaggccaaagatattactgaccgtctactacctgcttgggatacaccatctggtatcccttataatagaatcaacctagctcatggacgagcccataatcctggatggaccaatggtgatagtatccttgctgattctggcacggagcaacttgaatttatagctttgtcacagaggactggtgatcccaagtatcaacaaaaggcagagagtgtcatcagacagcttcagaagatatacccaagcgatggcttactccctatatacataaaccctcattcaggaactgcgtcgtactcaacaattacatttggtgcaatgggagatagcttctacgagtacttgctcaaggtttgggtccaggggaataaaactgagcatgtaaagcattacagacaaatgtgggagacatcaatggaaggcctactaagcttgaccaaaaaactacaccctctaattactactacatttgcgagaagaatggtggttcattgtctgacaagatggatgagcttgcatgttttgcccctggtatgctggcactgggggcctctggctatgaggagactgaaaaggctgaagaaattatgaatcttgcgaaagagcttgctcggacctgttataacttctaccaaacaactcctacaaagttggctggggagaattattttttccatactggacaggatatgaacgtgggcacatcatggaatatcctgagacctgagactgtcgaatcacttatgtacttgtggcgtcttacggggaacaaaacataccaagactgggggtgggacatattccaggcatttgaaaagaactcccgcatagaatctggttacgttgggctgagagatgtgaatactggcgagaaggataacatgatgcaaagcttcttcctagcagagactctcaagtacctatacctcctgttctctcctccgtcagtcatatccttcgatgagtgggtcttcaataccgaagcccacccattgcgaattgttcctttaaatgacaatagcaaagcccactcagtaggcattgcaacaccgacggtacgaccgttcgggaggaagcaggggaaacaagagtagatttgaaccatagagcacaggaatttttcatctgccctctgatttttgacctgcctgatccaaggttctgacaggagcagcgattctgcctgtagcagtataagggctgaaagtcatggcaataggctgtttaggcaacggaattataggtagagcacgatgagatattctggggcacattgaaacttcagagtataaatcgaagaccaataaccccatgaaagtttatatttctgtacttgtttgcgctccctgcattattgatctgtcatgtaaatctaacagtgtccatatgttgttggttacacgggggcttccgtggagttgtattttcattacgtggcccgacttgtgacattttgaaacacggtctataaaaacggattgcattttacttcccc

SEQ ID NO: 3085 - DNA, 1245 bp, Oryza sativa
  ref <308>: DATABASE ACCESSION NUMBER: AK060853
  ref <309>: DATABASE ENTRY DATE: 2001-12-06
ttgattcacaatggctgtcgatcacattctccaaggctatatttcttggcaatggcctggtcgcaattgtatccgggctatttgcaaacctgcttgccgacaacttgggctttggtcccgtggcaccatttgatgctgctgcatgcttcctggcaataggcatggctatcataatgtcttcatggagtgaaaactatggagacccatctgaaagcaaggatttgatgtcccagttcaaggttgcagccaaagcaattgcttcagatgaaaaaattgcattactgggagccatacagtcattgtttgagggctcaatgtatactttcgtcttcctctggactccggcgttgagcccaaatgaagaagatattcctcatggcttcatatttgccacattcatgctgtcatcaatgttgggtagctcaattgctgcacgcttgttagcccgaaagctgaaggtcgaaggttatatgcagatcgtgtttacaatatcagccttcacccttttccttcctgttgtcaccaacattctagtgccagcttcttcagtgaaaggaggtagcatctcatttggaggcactctgcagctgcttggtttctgtacctttgaggcatgcgttggcatattctggccatcaatcatgaagatgagatctcaatatattcctgaggaggcaagaagcacaatcatgaatttcttccgcataccactgaacttgtttgtttgtgtggtgctttacaatgtgaatgcattccctatcactgtcatgtttggcatgtgttctatcttcctcttcatggcggcaatcctgcagagacggctaatggttgtttctgacctacacaaatcatcgacaaaagcacaagagatggttgatgaagatgagccactgaatccttaaggattgataggatcatacaaacagatcgaatataagcatgtggcatactgcaattcatttctaccgagctgctgaataagattggacgttgcagaaaagagcagttgtttttgtttgtaactttatttctgcaatgtcgattgaccattggctggtagttcacatctgtggagcaaatgtagtaggcacgagaggcaatacatagttcagcaagcattgagctatagccgagatataggctattcatgttgtcatttgttatttgttattgttattcaccagcatgacattgtatgaaattaaatgctacggatatcctaatcgaagttatattttacacgag

SEQ ID NO: 3086 - DNA, 2078 bp, Oryza sativa
  ref <308>: DATABASE ACCESSION NUMBER: AK060854
  ref <309>: DATABASE ENTRY DATE: 2001-12-06
agaaaagaagcttctagagctgccaaaatttaataagatagtaatggttgaagtgtgtttagtttgttgccttaccaaactttggcaatatcaaaatttggtaaggttgaaaacagcaacaactaaatatgcacgtaggatgtcatgttctcttatttagaattaagagagaatgattgttatgtagcatgattcaaccttttcttctttgagagaggaatggtagagctgttcacatcagttgaagcagacagacaaggtgattggaatttgagaacatcaccctgcttttttccatggttagtcatcgctgatggcaggcgagtcacacttgatggagaaaattccaagggctcttttgacgtgaagatggaagatagtgtactacaattgaagagcttgaagccatatcaggataagagactctgccttccccgtctctgatactgtatgtgttgctttcagttggccatctatatccaccagtttttctatccattatctttaaaaaaaatcccttttgacatagatgtgttcctctaatgacatagatgtgttcctctaatgccataaggtagagactctctaccttttacttcaaaaaaaaaaggcatgatttagctagtgtaaacacctggatacctaaacagtaaaccataaaatcaagtgagtgttcttctgaaggtctataaatatggtatattctacacgttatatgcagtatacagcctagaacaactgcttgccaaaaaaggaaaagaaaagaaaacacttagtgcagaaactgggaattgcaatggcgggagcaagatccgttggttctctcccagtgcctaatgtgcaggcgcttgcagaaatttgcaatgatccagatgaacacatacctgaaaggtacatcagaccagaggctagttctgaggaggtcatcaacaactaccaaggtgacatggcgattccgatcatcgatctcaagaaattgctttgtccgcaatcatcagaagaggagtgtgtgaagctgagatctgcctgccagtattgggggttctttctgctcattaaccatggagtgccagatgaagtgattgcaaacctgaagagagacattgttgatttctttagccagccactggacaccaagaaggagtacacacagctaccgaatagcctagaaggctatggacagagctttgttttctctgaggaccagaaacttgactgggcagacatgctgtatcttcatgtccatcctagcgattcaagggacctaaggttctggcccacttctccagcatctttcaggtgatctaccaaaaaaaaaaaaaactgtgcaatttagcttttgataggcatctgtctcttcttaactggagatgtctggaaataggcaatccattgatgcatactcatcagagactaaaagcctggcactctgcttgtttgagttcatggctaaggctgtgggcgctaagccagagtcacttttagatttatttgaagagcagcctcgaggcttaaggatggcctattacccaccatgccggcaagctgacaaggtgatgggcctttcgccacactctgatgcgggtggcctgacactgctgctcgagattaacaatgtgcagggcctgcagatcaagaaagatggcaagtggttctccatagatgctccaaatggtgcacttattgctaacattggcgacacacttgagatcctgagtaacggaaagttcagaagtgttgaacacagggccgtgataaacccaaataaagagcgaatttcagcagcactcttccactatccaagtgaaaatatggtgatcagccctctgccggagtttgtgaaagatggtaaagtgaagtacagatcaataagttaccttgatttcatgaaacaaatcttcacacaacagcttgatggaaaaaaccgagtggaggtattaaagctggaccagtagctgtgaccatgacgcctgagatactgacatgaacctgcttgggggctgtccatgagatctgctgcttagaggtgaaacaatcctgtattacaatgatgatttacctgatattttgagtcttgt

SEQ ID NO: 3087 - DNA, 2131 bp, Oryza sativa
  ref <308>: DATABASE ACCESSION NUMBER: AK060855
  ref <309>: DATABASE ENTRY DATE: 2001-12-06
acgaaatggcagtggcgttccactgaaccaggccaagccagacggacaagacttcgccgcagccgcgtcctcctcaccgcgccgccgtcgcaatggctacggccatcgcagcctccgcgttcctctcctccgccttcgccagggacaggccgctcccccgccagcggcgcgcggcgaggcccgcgacccgccgcgccgccgcggggggcctgtcggtgcggtgcgagcagagcgagaagcagaagaggcagccgctctccgcgctcgtcccccgcgagcagcgattcatgttcgaaggcgacgagctctgcggccccgacatatggaacacaacatggtaccctaaggctgcagatcatgtaactactgagaagacatggtatgttgttgatgcaacagacaagattctaggtaggcttgcatccaccattgcagtacacatcagaggaaagaatgaggccacatacactccaagtgtggacatggagtagtggcgctacctctttcttctctctatctctcaacgagcgcggcgcgagcaagaggagcgcgcaccccggcgacatcagagctcgtcgacgccggggactctgcgcggcggctagggagttcgcccgccggagcaagggctgggcgggacaaagagaagaaatctgcagcgaacccatggcgattctgcccctctcgatttcccactctcttacctccgccttgtccgccacctcctccggcatcggcaggccagttgcccgcctcctccacccgcgggtcccctcccgtcccaccgtcatctgcctcgccgcgccgcccaaggtacccgtccccatcgcctcaccggcttcactaggggacgacccttccaaatgggacccggccgagtgcgacgcccttctccgcggcggcgagcaggtcgcctccgtgctccaggagatgctcaagctgatggaagacatggagatggatggctcgtttgaatcattggctgtggagttgatcgctcaaggagtcattgggaaaagagttgatgagatggaatctggctttctaatggcacttgattacatgatacagcttgctgagaaggatagtgacaatgagcgtaaatctctccttgaggtagtcaagcagacagtgctggatcatctcacaaaaaaatgccctccacatgttcaagtggttggacttctttgccagactgaaaagaaggatagcagacatgaattactgcgtcgtgtagctgctggtggaggtgtgtttaaaaatgataaaggccttaagtgccagattccaggggccaatcttaatgatattgcaaaccaggcagatgatctcttggagtcaatggaatcaaggcccacaattcctgatcgaaaacttctcgctagactagttatcgtaagagaggaggctcgaaatatgatgggaggtggcctgttagatgaaagaaatgaccgtggtttcacaacgcttcctggggcagaggtgaacttcttgagcaagctggttgctctcaaacctgggaaagcattggagaggatgatcaaggatgttatgcagggcaaggcagaaggtgctgataacattgaaaatgcaaatgctggaccagattctaagcctaatcatctaactgggatatctggaaggggaagtgtgacaggcctcaagccacggccagtccgtccaggaatgttccttgagacggtttctaaggttctaggtggtatatatgcaaacaacacatctggcattacagcacaacatctagaatgggtacatcaaacaacactgaagattcttcaggaaatggccttctaatgctgttttctggacgacattcactgccctgttcaagtatatgaactccctagattcttggcccttttaagcttatgatattacagcctagtgggcaaaaggatcatggtatggaccttagtcttgctgcaaaaacttattgatttttttttaccagtgaatggcaaatcttggaggaacttgagtggccattactaatatagttaaaaatagaagcagaagaaatgatgtctgggcatgcaaaggccaatggtgatctctgggtggaatgtaatatttataccacatttagtgcagaagtaaagtaagagcttcg

SEQ ID NO: 3088 - DNA, 1390 bp, Oryza sativa
  ref <308>: DATABASE ACCESSION NUMBER: AK060856
  ref <309>: DATABASE ENTRY DATE: 2001-12-06
aacgagcgccccagaatccctcccctccctcgtgcaccgcctcccgtcccatccagctccttcttcttggcgggcgagagatcgatcgagctggctgcgtgtgagcgagttgccacgagcggccaagagattaacggagggggcggaccagcggagcgaggtcgttgaggggatatggagcggtacgaggtgatgagggacatcgggtccgggaacttcggggtggccaagctcgtccgcgacgtcgccaccaaccacctcttcgccgtcaagttcatcgagaggggactcaagattgatgaacatgttcaaagggagattatgaaccaccgatcactgaagcatccaaacataatccggttcaaggaggtcgtgctaactcccacacatttggcaatagttatggaatatgctgctggtggtgagctatttgaaaggatttgcaacgcagggagattcagtgaggatgaggcaaggttcttcttccaacagctgatttctggagtgagctattgtcattctatgcaagtatgccatagagatttgaaactcgaaaatactctcttggatggcagtgtcacacctcggcttaagatttgtgattttggttactccaagtcttctgtcctgcactctcaaccgaaatcaactgttggcacaccggcttacattgctccagaggtcctctctagaaaggaatacgatggaaaggtagctgatgtttggtcatgtggggtaacactctatgtgatgcttgttggtgcgtatccttttgaggaccctgatgacccaaggaacttccgcaagacgatcactaggatactcagtgtacagtattcaattccagactacgttcgagtttcagcggactgcagacatctcctgtcccggattttcgttggaaatcctgagcagaggataactatcccagagatcaagaaccacccatggttcctgaagaacctgcccatcgagatgaccgacgagtaccagaggagcatgcagctggcggacatgaacacgccgtcgcagagcctggaggaggtcatggcgatcattcaggaggcccggaaaccgggcgacgccatgaagctcgccggcgccgggcaggtcgcctgcctggggagcatggatctcgacgacatcgacgatatcgacgacattgacatcgagaacagcggggacttcgtgtgcgccttgtgatcgatagatgccaaattcgatcgatcgatcatcagctggttgaagactgaagtaacggggcagcgagctttctttgtggctgatgtgttgctgtcattcatgcctcgtttttacttctgggatcacatatgctttgtgaccaagagattgccatcgctgtggataaataagatgaatttaattgcat

SEQ ID NO: 3089 - DNA, 1083 bp, Oryza sativa
  ref <308>: DATABASE ACCESSION NUMBER: AK104346
  ref <309>: DATABASE ENTRY DATE: 2002-08-28
acctctcgctaccaaacacgcgcacacgcagccgagatcgagagcgagctacttgccctagcagcagcagcagcgaggagcgcgagggggcggcggcggcggcgtgcatggcgggggctccgtcgaggtcgcgcggcgacttcgaccacctcatcaagctcctcctcatcggcgacagcggagtaggaaagagttgcttgcttctgaggttctcagatgacactttcactacaagttttatcaccaccattggcattgatttcaaggttcggacagttgagcttgatggaaagcgtgtaaaattgcagatttgggatactgctggtcaagaacgtttccggacaattacaactgcctactatagaggtgctatgggcattctgcttgtttatgatgttacagacgagtcatccttcaacaacattagaaattggatccgcaacatagaacaacatgcatctgataatgtcaacaagattttggtgggcaacaaggttgatatggatacaaagcgggtggtgtccacagctcaaggacaaaagctcgcagatgagtatggaatgaaattttttgagacgagtgcaaaaacaaatcagaacgtggagcaggtattctttaccattgcaagggacataaagcaaagattgaccgaaactgttgctgcagcagctgagcccccaactattcaaatcagtaggcaagaaccagatcaggcagctgcctcgtcaagatggtcagcctgctgtaacacctgatcaacgctgcggcgcactgcacggcttgtcctgttcgcagcttacctatgacagcaaatttaccactcccatcttccgtgtattcaatgccaagatgtatatttcgcccagttgatatctaggtcaaaagatcttttacctgaccattctggtgttgtgattcctcaatgaggtgtaagggtgtttgcctgtgttctagctctgttgttagttctgaattatgcttcaaaactcttcttttttagctctgtgttcgtcagataagctgatggatttgctcctgtcatgtaaacaaaccttctaagagacagcagtatctgattgtctg

SEQ ID NO: 3090 - DNA, 1487 bp, Oryza sativa
  ref <308>: DATABASE ACCESSION NUMBER: AK060857
  ref <309>: DATABASE ENTRY DATE: 2001-12-06
attgtgttctctccccccacccttccaatcccaatctcttctcttcccctctcgttagggttaggtttttattttctctctctcgatttctctcttcgcttccacttcccaaaattctcgagtcaaacctcgtggcgttcggccatggcgacggcggcggtgctcggatcccacgacgccctcgacaaccggatgcatctgggggccttcgccgtgtccccggcgtcgaagccgaggcggaggcggcacagcaaggcggcgtcgccgccccccaaggtggcggcggtgagctcgccgccggtggttaagtcggcggcgagggtggcgtcgcctcctcccaaggctgcggcggcggcggcggtgcctcaggggcgtcgctcgccggtggcgaggaagcaagggtcgccgacgaaggagttgccgaagcagaggctcgtgatgggggagatccggatcctcaagcgcggcgaggagccgccggtttcctcgccgtcgcctgctccggttgcggcgcaggccgcggcggttgaccagcgggcgccccgtgttccggctgtggcgcaagccgcgccgactgaccagaaggcgcctcgccccgccagatcgaagcagcagcagcacacggccgctgtgccgacgaagatcaagtccgtcgccgacgcgccagtctacgccggcccggccttctcctcggcttcgcctgagccgagctccctccccttcccggccttcatccgtcgcgccgaggccgaggcgacccgcggcctccgctgcctcctccgcatcggcgagctcccttgacggcctctctcaccgccgtcttccccggagccgtgagccgtgcacgctcctctcctcgtttctcctcctcttctctgatggatggattgcttggtggtttcgatccgatcgaaagcttgtccggatcagatcccggctgcgttccgatcaaactctcccggtattttttcagaggacgagtttgggggaacgcatctgccggtggttggatttggtagtggttaggttttcaaaagtttcgtggtggaattatgttgggggtttgcttctacgaagaacaacactaggttgattagttctttgtcttttgagtttggtttttaggtggtgtcttggttgggaaaaattggggttagtttggtggaaatttaggctggcttggtgttgctgatctgttagtacagcagtagtggtaataatagtagaggtttggttagatgaataattcgtcggtagtgattgtgatttgtggtttggtgagcgtgagttcaatgtcaggtgaagaatagtagcactaaattcgtgttaggtattatgtccagtgtcaaaggcaagacatatatagttcttattatcagtaattaagttatgttaggtgttatctttctgttcgtctgtaagatatatatagatcttatcgggtaatcaaatcaactatgtatcagatcctcgcagtggtgaatttc

SEQ ID NO: 3091 - DNA, 995 bp, Oryza sativa
  ref <308>: DATABASE ACCESSION NUMBER: AK060858
  ref <309>: DATABASE ENTRY DATE: 2001-12-06
caagggtttcataatgcttcttgaatctgcagaagataccgcacttgatatattggatgcctcagatgagctgggactgttcctagccagagcagtgattgatgatgtgcttgcgcctctgaacttagatgagataagcggcaagcttccaccaaactgcagcggggctgaaacattgaacatggcgcgctcccttgccactgcccgccatgcaggagagaggcttctgagatgctggggcggtgggacaggatgggttgtggaggacacaaaggacaagatagcaaagcttctggaggagtacgagagcggaggcgatgtaggagaagcttgcaactgcatccgcgagctgcacatgccgttcttcaatcatgaggtggtcaagaaggcgcttgtcatggcaatggaaaagaagaacgacaggatcctcggtctgctgcaggagtgctttggtgaagggatcatcaccatcaaccagatgaccaaggggttctcaagggtgagggatgggcttgatgatctggctctcgatattcctgatgccagggagaagttcctgtcctatgtggagcatgccaagaagagcggatggcttctaccctcattcggcgtcgctacttcagcttgaaccaatgttatgagtgagcaggaagcatcaagctggaccggaccgatgaacaacgaagcaagaaggcacatgccgtgatatttgctgcatccaagatattccaagttgatgattttcatttgcgttttctgatgcttgtcgttgtgcttgcgcgtgtaggtagcggagcgagcccctcttacttgtggttgttgtggtggcttatgtgtctagatctttcacctctgacacacccgttgctgttgttagttgcattccatttttaacttcccccatagacccttttttacttcacaagtaaaaacagagaaaagaacccccgtcatgtaaaagttgctccctgcctcagcatttgcatctgttgctt

SEQ ID NO: 3092 - DNA, 1212 bp, Oryza sativa
  ref <308>: DATABASE ACCESSION NUMBER: AK060859
  ref <309>: DATABASE ENTRY DATE: 2001-12-06
gtcgccgccggtgaagccgctagggtttatcgccgccgctccgaccacttcactagggttttgcacgcggcggcggcggcggcgagatgctgcggcggaacacgcggctccggcgggagtacctgtaccgcaagagcctcgaggggaaggagcggcagcactacgagaagaagcggcgcctccgggaggcgctcgacgaggggaagcccatccccaccgagctccgcaacgaggagctcgccctccgccgcgagatcgacctcgaggacaaggactccgctgttccgaggagcctcatcgatgacgagtacgcgggcgcggcgctccgcgagcccaagatcctactcaccacctctcgcaatcccagcgcgcccctcactcagtttgtcaaggagctcaaagtcgtcttccctaactcgcaaagaatgaaccgtggtggtcaggtgatatcggaaattgttgagtcttgccgttcgcatgatatcaccgaccttgttttggtgcatgaacatcgtggccagcccgatggtttaatcgtctgccatcttccatttgggccaactgcatattttgggttgctcaatgtggtgacacgccacgatattaaagataggaaggccatgggtaaaatgtcagaagcgtacccccatttaatactagataacttcacaaccaagactggtgaaaggactgctaatattgtcaagcatctctttccagtgccaaagccagattcaaaacggataattactttcgctaacagagatgactacatctcattcaggcatcacgtatatgaaaaacatggtggcccaaaatcccttgacctgaaggaggttggccctcgattcgagttgcgactatatcagatcaagcgaggaactgtcgaccaagcggaggcgcaaaacgagtttgtgctacggccatacatgaacacagcgaagaagcaaaaatctcttggtgcctgattagcctgcaaggctgcaactgctgtagtacatcaattttgagtttctgtttcatccttgtaacgttagctcagtgtgtctaatgtatcctgctgtgataatggttccatcgaaatagttactgggtccaatttgttggattgtttttacacctctgctgtggattggggcccaataacggccaatttttgtagaaatggcagcccacatcatgcaagatagaacttccaaaatcatttaaagg

SEQ ID NO: 3093 - DNA, 1667 bp, Oryza sativa
  ref <308>: DATABASE ACCESSION NUMBER: AK060860
  ref <309>: DATABASE ENTRY DATE: 2001-12-06
gtgtttgcgttcggtgtggtgctgcgcgccagcctgcagaagaagaagaagaagaagaagaagagaagatagtggtggtgggttcaatcagagcggttcttggtgtctgaagaaacgcacaaagccgaagtggaaggaagaataaagggtgaggtgagctaagtcgtaggctgtctgccgcgcgcgtaccatgggttgtgggctgtcgagggagaaggacgccggcggcggcccacggcggcggccggggagcgtcggcgacgtggtcgtgttcctcccggggctccgggtgccgaggagcgtggacttctcccaggcgctcgccggtcgcctcgacgaggcctcgtcgaggctgtcgtcgctgcgggcgcgggtcgtcgacatggcaatgcaagaatcggcggcggcgctgaagccgaagcggcgggcggcggcgcggcacggttcgagcactgctaatctcctacaggctctggaagactatctgccagtgctgctaggattggtgaaggaaggtagcgaattgcggcacggagtgcacttcgtctggactaaccaagaggataatgctgaggaaacggccatggcagatgcatggtatgaagtgttgtccgttctgcatttgatggccatggtctgcttgttgcaggccaattctctgcttcttcccaggtcatacggtgatggttatgcgccaagggtttctgaagagagcagacgagctactgttgatgttttcttgaaggcatctggctacctagactgcgcaattagacaagtactaccccaaatatcgtcggagttaaggagacaacttccagtagatctggctgaaggaaatctcaaagctcttagcctgcaagctctgggtcagggagtcgacatgcaacttggtctggcaattgatagcccaaaggccactctagcggtaaaacggcgcttagcttgcgagatggtcaaatattggcatcaaattcaggagagcattccagaaattccggtatccgatggatgggggaaaaagcatttattgtttgttaagtggaagtatgttgaagcaaaggctgcagcatactatttccatggtttgattctagacgagggaaacacagagaaatctcatggaatggcagtagctgccttgcaagcttcagaagaatttctgaaagaaagcaaaagggcttctgaagccttccatgcaactcctccaacatcaaggagccccactcctttcggaacagctaagtacatgcttgacaagattccaaaagatgcttcaagcaaggtcaagatcaatcaggacctgtatacgcaagagagggtcattggaacaccgcctccattgccggattttgcgttggctctaaaacctgacgactacgatcttcctccattagatccactttggaacaaagaagacagccgtcagtagcagtatattcagcaagaatgtgaatgttgtctttcagaggttcaggctctagtataccatgtcgaagccagacgtggtacgaatgaagtgtacaaaatttgtcccaacaaattgtggtgtcagcaaaatttaaacaaggcctggagataatctcaagagcattgtacaggcgaatcttattctgacaaaggaaatgctttgccaaaaaaaaaagaagaaaaaaactaaccatttc

SEQ ID NO: 3094 - DNA, 1101 bp, Oryza sativa
  ref <308>: DATABASE ACCESSION NUMBER: AK104347
  ref <309>: DATABASE ENTRY DATE: 2002-08-28
atgtcgtgttgttagcttcgttttcttcttgtttcatcaatccaaggagtgtggaaggccacacgccaagattatatctatgctaatttgattagcagtaggattaattcagtggctagcgtagcttgattagttggtttaattagttggagagtaaagaagatgttgggagtgttcagcggcgacgtggtggaggtgccggcggagctggtggccgccggcagccggacgccgtcgccgaagacgcgggcgtcggagctggtcagccgcttcctcggcggcgccgagccggccgtgtccgtgcagctcggcgacctcggccacctcgcctactcccatgccaaccaagccctcctccgcccaaggtcatttgcagcaaaagatgacatcttctgcctgttcgagggagtcctggacaatcttggcaacctgaaccagcagtatggtctgtccaagggtgccaatgaggtgctccttgtgatcgaggcgtacaagacgctgagagacagagcaccttaccctgctagcttcatgctctcgcagctcgccggcagctacgcctttgtgctcttcgacaagtccacctccaccctccttgtggcctctgatccggagggaaaggtgtctctgtattgggggattactgctgatggatctgttgccttctctgacaacattgacctgcttaaaggatcgtgtggcaagtctcttgcacctttcccacaaggctgcttctattccaatgctcttggagttggaggcttgaagtgctatgagaacccaaagcacaaggtgaccgcagttcctgccaaagaagaagaaatttgcggtgcaaccttcaaggtggaaggatctacaatcctcacagcgctgcattaggagatttttggatctccagctgttgttgggaaaggaaaactctgtagtctgtaaatggtggtgtaacatagtcgcaaggcatgcatctgatctgtatcatcatcttccgtaaagactagtgctgccagcatggttagcacttttcagtgtttgggtgtgtgtatgatctgtatcctatgctgttcaggcggaaatgaacttcaggcccagctgtgtcagttg

SEQ ID NO: 3095 - DNA, 1145 bp, Oryza sativa
  ref <308>: DATABASE ACCESSION NUMBER: AK104348
  ref <309>: DATABASE ENTRY DATE: 2002-08-28
aagtttaatttggagcacacatttcagctcaccactgctagcttgggaagaggaggaggagcttgagcttggagagagacaacaatggcggctcaggctcttctctctgggaggcagctgctggggaggccattgcaatcttcagtctccaggtcttcttcctccaggaaggcacccttcatggtcagggcagaggccactccccctgccaagcaaggtgctgacaggcagctgtggttcgcatccaagcagtccctgagctacctggatggcacgcttccgggagacttcgggttcgacccgctggggctatcggacccggaggggaccggtgggttcatcgagccacggtggctggcctacggcgaggtgttcaacggccggacggcgatgatgggcgtcgtcggcatggtcgccccggagctcctcggcaagctgggcctcgtccccgccgagacggcgatcccgtggttccagaccggcgtgatcccccccgcgggcacctacacctactgggccgacccttacactctcttcgtcttcgagctcgccctcgtcggcttcgccgagcaccgccgcttccaggactggtacacgccgggctccatggggaagcagtacttcctcggcctcgagaagtacctcgccggctccggcgagccggcctaccccggcggcccgctcttcaacccgctcggcttcgggaccaagagcgaggcggagatgaaggagctcaagctcaaggagatcaagaatggcaggctcgccatgctcgccttcctcggcttctccgtccaggcgctcttcaccggggttggccccgtgcagaacctgcttgatcacctcgctgatcccgtccacaacaacatcctcaccagcctcaagttccattagagatgccatcaactacgtatttaattaattacgagtttttaattatgtatgtatgtacgtgcgtatgcgtatatgtgtgtacgtatgtatgtacgcaactttgtacgatcgatggtgcgtgtgatcgagaggggtatgtatgtacgtacgtatatacgatgtattattatgcatgggtgtagggtgtgggtgtaacatgtaaatttgtgctccaactgatttgcacgcatggtcgcatggatcgatttgct

SEQ ID NO: 3096 - DNA, 1045 bp, Oryza sativa; identical to SEQ ID NO: 2057
  ref <308>: DATABASE ACCESSION NUMBER: AK104349
  ref <309>: DATABASE ENTRY DATE: 2002-08-28

SEQ ID NO: 3097 - DNA, 1077 bp, Oryza sativa
  ref <308>: DATABASE ACCESSION NUMBER: AK060861
  ref <309>: DATABASE ENTRY DATE: 2001-12-06
atcttcttcttccttccaccaccaaccccccatctcctccatctccactccacctcacacgcctcatcgacctcccaagaaccaccaccgccttctcccatggccgccgccaccgtctccgtccgcttccacccggccgcatccgccgcgcgctgcggcggcggctcgcgccggagcaggcgcctgtccggggtcatcagggcgcagtcggcgccggcttcggcggcggcggcggcgctgacgcaggacgacctgaagaggctggcggcggtgcgcgcggtggagcaggtggagagcgggatggtgctggggctggggaccgggtcgacggcggccttcgccgtcgcggagatcggggcgctgctggcgtccgggaagctgagcggcatcgtcggggtgcccacctccaagcgcacgttcgagcaggcgcagtcgctcggcatcccgctctccaccctcgacgaccacccccgcatcgacctcgccatcgacggcgccgacgaggtcgatccagaccttaaccttgtgaaagggagaggtggtgcccttctccgggagaagatggttgaggcagcatcagacaagttcatcgttgttgttgacgagacaaagctagttaccggcttaggagggagtggtctagccatgcctgtggaggttgtgcagttctgctggaagtacaaccaagtgagattgcaggatctgtttaacgatgaaggatgcgaggcgaagctgagattggatgaaggcggcaaaccctacgttaccgacaactcaaactacatcgttgatttatacttcaagacgccgatcaaggatgcgttggcagcagggaaggagatctcagctttggaaggcgtcgttgagcatgggctgttcctggacatggcgacttcggtgatcatcgctggaacagatggcgtcagtgtcaaaacaaagtgagttttggggttttgttgttgccggtgttgaatttacgattttttgttgggatgtataagctattggggtgtaaaagcaggcaataagatgcttcactaataataattgaatatatttccccactctttcattgct

SEQ ID NO: 3098 - DNA, 1013 bp, Oryza sativa
  ref <308>: DATABASE ACCESSION NUMBER: AK104350
  ref <309>: DATABASE ENTRY DATE: 2002-08-28
acactcgctcgctcatcgccatctctctcagctctcacagctcactgcatcaatggccgcggccaccatggcgctctcctccccggtgatggcccgcgcggcgccgtcgacctcctccgcgctcttcggcgaggcgcggatcaccatgcgcaagaccgccgcgaagcccaagccggcggcgtcgtcggggagcccgtggtacggcgccgaccgcgtcctctacctcggcccgctctccggcgagccgccgagctacctcaccggcgagttcccgggcgactacgggtgggacaccgcggggctctccgccgacccggagacgttcgccaagaaccgggagctggaggtgatccactcccggtgggcgatgctgggcgcgctcggctgcgtcttcccggagctcctcgcccggaacggcgtcaagttcggcgaggccgtgtggttcaaggcgggctcgcagatcttcagcgagggcgggctcgactacctcggcaacccgagcctgatccacgcgcagagcatcctcgccatctgggcggtgcaggtggtgctcatgggcgccgtcgaggggtaccgcatcgccggcgggccgctcggcgaggtcgtcgacccgctctaccccggcggcgccttcgacccgctcggcctcgccgatgaccccgaggcgttcgcggagctcaaggtgaaggagatcaagaacggccgcctcgccatgttctccatgttcggcttcttcgtccaggccatcgtcaccggcaagggccccctcgagaacctcgccgaccacctcgccgaccccgtcaacaacaacgcctgggcgtacgccaccaacttcgtccccggcaagtgaagtgggggaccgtagcttagcagtggttaattgtggttggatggatttgtggccagcgagttcgttgtctttgggttggggaagatgggtttagtgcgacgagatgatgatcgagttggtgttgtgtacactaagaagatgaagaagaagatgatgtttttgc

SEQ ID NO: 3099 - DNA, 1182 bp, Oryza sativa
  ref <308>: DATABASE ACCESSION NUMBER: AK060862
  ref <309>: DATABASE ENTRY DATE: 2001-12-06
aataaggcggatatggctaagatgggtttcgctcccatgctttcagtggccgtgctccttggaaccttggcagcatttcctgcagcggtacactccatcggcgtgtgttacggcgtggtcgccaacaacctgcccgggccgagcgaagtcgtgcagctgtacagatccaaggggatcgattcgatgcgcatctacttcgcggacgccgccgccctcaatgcactcagcggctcgaacatcggtctcatcatggacgtcggcaacggcaacctctcgagcttagcttccagcccctccgccgcagccggttgggtcagggacaacatccaggcctacccgggcgtctccttccgctacatcgccgtcggcaacgaggttcaaggcagcgacaccgcgaacatccttccggccatgcggaacgtcaacagcgcgctggtggcggccggcctcggcaacatcaaggtatccacgtcggtcaggttcgacgcgttcgccgacaccttcccgccctccagcggcaggttcagggacgactacatgaccccgatcgcgaggttcttggccaccaccggcgcgccgctgttggcgaacgtgtacccctacttcgcctacaaagacgaccaggaaagcgggcagaaaaacatcatgctcaactacgccaccttccagccgggcacgacggtggtggacaacgggaacaggctgacctacacgtgcctcttcgacgcgatggtcgactccatctacgccgcgctggagaaggccggcacaccgagcgtcagcgtcgtcgtgtccgagagcgggtggccgtccgccggagggaaggttggggccagcgtgaacaacgcgcagacatacaaccaggggctgatcaaccatgtccgaggcggcacgcccaagaagcgcagggcgttggagacttacatatttgctatgttcgacgagaacggcaagcctggggatgagatcgagaagcactttgggctgttcaaccccaataagtcgccatcgtacagcattagtttctaaggggatcgtacagactgatatatatttttatatggaataagttgctcccgtgataggccaaacgcaagcatgggaagcaagcatagtgccgtgtggtgtccatgcatctttcccaatttgtgaaatatatactcccagtgaattttaagcgat

SEQ ID NO: 3100 - DNA, 1245 bp, Oryza sativa
  ref <308>: DATABASE ACCESSION NUMBER: AK060863
  ref <309>: DATABASE ENTRY DATE: 2001-12-06
cacgctccgggacccgccctacacgctgggccccaagatctccgactgggacgagcagcgggccgcgtggcaccgccgccacccggagacgccgcccttcgtcaacgacgtcaagccgcgggtgctgctcgtcacgggctcctcgcccaagccgtgcgagaaccccgtcggcgaccactacctcctcaagtccatcaagaacaagatggactactgccgcgtccacggcctcgagatcttctacaacatggcgctgctcgacgccgagatggccggattctgggccaagctcccgctcctccgcgcgctgctcctcgcgcacccggagatcgagttcctctggtggatggactccgacgccatgttctccgacatggcattcgagctgccatgggagcggtacggcccctacaacctcatcatgcacggctgggatgagatggtctacgacgacaagaactggattggcctcaacacaggcagcttcttgctgcgcaactgccaatggtcgcttgatttccttgatacatgggcaccaatgggaccaaagggccctgtccgtattgaggccgggaaggttttgaccaagtacttgaaggatcggccggtgtttgaggctgatgatcagtcggccatggtatacatccttgctacagagcgtgagaaatggggtgacaaggtgtaccttgagaatgggtattacctccatggatattggggtatcttggttgataggtatgaggaaatgcttgagaattaccatccaggacttggtgatcaccggtggccactggtcactcactttgtcggatgcaagccgtgtgggaagtttggggattaccctgtggagaggtgcctcaagcagatggagcgtgctttcaattttggggataatcagatcttgcaaatgtatgggtttacacacaagtcgcttggcagcaggaaggtgaagaggatcaggaatgagactagcaacccacttgatgtcaaggatgaactagggttgctccacccagcattcaaggccatgaagactacttctacgtgataagtgataattagagtacaatgccacgcgttatttcgttcattgtagatccttttgggtctaaaatcttaaaaaggtgttctttttgtagacttgggttgacaagggagtttgggttgggatcaaacatcaaaggatggatatctatgttgtaatgtgaaattttaggagaacaatggtatgtttattgctggcat

SEQ ID NO: 3101 - DNA, 1118 bp, Oryza sativa
  ref <308>: DATABASE ACCESSION NUMBER: AK060864
  ref <309>: DATABASE ENTRY DATE: 2001-12-06
atcgtcctcagctcatcatctgcatgcagttcactgcacaccacacagcttagcttgctcagcttcactgatcttcttagctgcagctacttcactttgcatagtttgatcgaactaaataactcaccaagttagctgtaatggccaagctgatcctcgccaccttcgccgtcgtgttcatggcgctcgccgccacctccctcgccggcgacccggacatgctccaggacgtctgcgtcgccgactacaagtccctcaaaggcccgctgcggctgaacgggttcccgtgcaagaggatagagaacgtgacggcgaacgacttcttcttcgatgggctgatgaaggccgggaacacggggaacgcggtggggtcggtggtgacggcggcgagcgtggagagcctgccggggctgaacacgatgggggtgtccatggcgcgtatcgactacgcgccatgggggctgaacccaccgcacacgcatccccgtgccaccgagatcatcttcgtcgtcgagggctccctcgacgtcggcttcgtcaccaccgccaacaagctcttcacccgcaccgtctgcaagggggaggtgttcgtcttcccgcgggggctcgtccacttccagaagaacaacggcaacacgccggtgttcgccatcgccgccttgaacagccagctccccgggacgcagtccatcgccgccgcgctcttcggcgccgcgccgccgctgccgtcggacacgctggccagggcgttccaggtcgacggcggcatggtcgagttcatcaagtccaagttcgtcccgcccaaatactagaattgcattgcatgcatgcatactgcaggaagaacaagatggcagctgagctagctagccctatcgcgataataataattaagaggacgtacgtacgtaccgttaaaaagtttgtgatttgattggtaggatttgtgtcagtgtgtgtttgtgtttgtgagtcgtttgatttgtaatttttatttttgtttttgagtcgtcgtcgatcgatcgggtcgtgtctcgtactacgtgtgtgtggtacgtggccggacctgatcattactgtattattacttcatggtttagtactaccactgttacttc

SEQ ID NO: 3102 - DNA, 1114 bp, Oryza sativa
  ref <308>: DATABASE ACCESSION NUMBER: AK104351
  ref <309>: DATABASE ENTRY DATE: 2002-08-28
tcaccaacaacagtaacccaaccagagagcttgcggaagcgggggtttggtgcgggcgcgcgcgtgtgaggggggagagaaggccaggaggaggcgacgccgtcgcccgagggaggcaaaaatccgatcctcctcctgccctgctcgctcgctcgctcgcctgcgctgcgcgcacttggccccgtcccgtccgttcccgctcgccaggcatagaaagatggtgctctgggtcttcggctatggctccctgatctggaaccccggattcgacttcgatgagaagatcctgggcttcgtcaagggctacaaacgcaccttcaatcttgcttgcattgaccatcggggcacgccggagcatcctgcgaggacctgcacacttgagtccgacgaggaagccatatgctgggggattgcatactgtgtcaaaggggggcttaaaaaggagcaagaagcaatgaagtacttggaaagaagagagtgtgagtatgaccagaagatctctgtggatttctacaaggaaggagattctttgaagccagctgtgacaggtgtactagtctttgtatccactcctgatccagtaggcaacaaatactatcttgggcctgctcctttggaggacatggcaaggcaaattgctacagccaatggccccaatgggaataacagggattacctgttctcaatggagaaggcattgtccaacatatgccatgaagatgattcaatcatcgagctagctaacgaggtcaggaaggtgttgagccggccgaaggagaagatcactggctccgatagcccacaaaaatctcacgctctcgtacacctgtctgcgcttcctgagggcactgttgtggactcaagatagcaagctcggcggtggaagagatgagatctcctctgacctactcactcttgacgctggattgaacgagtttaacagtctgcttcgagctccctggcacactggggaaccagaatgtgctgattttctttcgcaaccgctgcggcaatgctgtaactttcattttgctaatactagagccgagactggtgtgctgctgtttcctttgacacactaaataataaagggattccatgagcttttcactct

SEQ ID NO: 3103 - DNA, 1129 bp, Oryza sativa
  ref <308>: DATABASE ACCESSION NUMBER: AK104352
  ref <309>: DATABASE ENTRY DATE: 2002-08-28
agctcctctttcgctttagccgcagctgcttcgctctgctttctccgtagggtttatccctttgcttctcctcgtctccctccccctcgcacgcaaaggcacaaagcccggattccaccgccggagccgacccgcttcgaggcgaatcgagagttagctttccagccagcaatcgaggatgtcgtcggtgcagctctccggtgccggagtcgccgcggtggccttcaccaagaatggcgcgtcttccttcgacgggctccgcctcgcgccgccatctgtgcgagtctgctcctccaggcgcccgtctcgtagcctcgtcgtcaaggccgccacggtcgtcaccccaaagtatacctcgctcaagcctctgggagacagagtgcttgtgaagcttggtgctgcagaggagaagactgttggtgggattctgcttccgtcaaccgcacagtctaagcctcagggaggtgaggttgttgctgttggagagggaagaactattggggataagaaagttgaggtcagcttgcagattggggctgaagttgtatattcaaaatatgctgggactgaggtgcaatttaacgacaccaaacatcttattctaaaagaggatgatatcattggtgttcttgagactgatgatgtcaaagatatgaagccccttaatgaccgggttctcatcaaggttgctgaggctgaagacaaaactgctggtggccttattctcactgaaaccactaaggagaagccatcaatcggaacagttgtagccgttggtccaggccctcttgatgatgaaggcaagaggcagccattgtcagtttcagcgggcagcactgtgatgtactccaagtacgcaggcagtgagttcaagggagctgatggcaccaactacattgtcttgagagtatcagatgtgatggctgtcctatcttgagctgtgatttgtttcaattttgagttcagaatagacggtagcaggtggtaatggttgccatgtggtgatcttcactctgcggagatgctgtctttgataatcctagaattcgaacgcaacaatttgcagatctcctacgggatcaacattccactgtgactgatttttatttataaaagtttgttttgtttc

SEQ ID NO: 3104 - DNA, 965 bp, Oryza sativa
  ref <308>: DATABASE ACCESSION NUMBER: AK060865
  ref <309>: DATABASE ENTRY DATE: 2001-12-06
gtggagcaacagatctatccatccatcccatcctcgatccttcattcctgcccggcggcgagcgagagagaggcggaggagatccgagatggcggggagcgggtggaggaggatcccggcggtgaggaggccgcccatgtcgcgcccggcctcggtctgcctctggatcgtgctcgtcgccgccaccctggcgctcgcccaggtgctcatccacctcgcgaagaaatcgaaggcggatttgactgaggtcacccacaaggtctacttcgacgtcgagattgatggcaagcccgcaggacgggttgtcatgggacttttcgggaagactgttcctaaaacggcagagaacttccgagcactttgcacaggagagaaaggaactggaaagagtggcaaagcactccacttcaagggaagtgcattccacagaattatacccagctttatgatccaaggaggtgacttcacacttggtgatggaaggggtggtgaatctatctatgggacgaagttcgccgatgaaaacttcaagatcaagcacaccggaccaggcctcctgtccatggccaatgctgggagagacacaaacgggtcccagtttttcatcaccactgtaaccaccagctggttggacgggaagcacgtcgtgttcggtaaggtgctgtctggaatggatgtggtttacaagattgaagctgagggccagcagagtgggtcaccgaagagcaaagttgtcatcgcggacagcggcgaactgccgatgtaatgagctgaaatgatgtttcactgaagctactgctactgcttctcgttgtagaactgttattagctgctctgttttgctatgcttctaccccgaatctggttggagtaaatttctgttagactataacagcgtgcttatatcgcctcttagttgtgggcgatttggagtgaactagcataaaaaggtcgaaactttactt

SEQ ID NO: 3105 - DNA, 1513 bp, Oryza sativa
  ref <308>: DATABASE ACCESSION NUMBER: AK104353
  ref <309>: DATABASE ENTRY DATE: 2002-08-28
atctccaaatccttcttccctaatccccctcgccggcgaagcgcggcggcggcggcggcgccttcttccctaatcccctcgccagcggggagccgcagggcggcggaggcgtgcgtcggctgctgctgctgcgcgggcgggggaggtggggagagatgcacagatccgcgggcgccacgatggcgtggaacgtgttcaggttctgcactgcgctgagggggctgggctccatcatgatcctgctcgtcctctccatcgtcggggtcacctactacgcggtcgtggtgtacaactacggccccgcgctcttcgccggcggcgccagcaccctcctcgcgctcgtcgtcctgctcctcttccacttcctgcttgttatgcttttatggagctacttttctgttgtattcaccgaccctggttctgttccaccaaattggaatctcgactttgatgaggagaggggagaaactgcccccctttctggcttagatttcaatagccaggtaaactcgcaacaatctatcgctcacaatgacacaggacatccaagggctaggtattgtaggaagtgcaaccagatgaagccacctcgatgccatcattgctctgtttgtggaagatgtgttcttaagatggatcatcattgtgtatgggttgttaattgtgttggggcactaaactacaaatactttcttctcttcctgttttacaccttccttgagacaacactggttaccctttctctattgcctcacttcatagccttctttagtgatattgatatcccaggaagtcctgcagcacttgcaaccactttcctcacctttgtgttgaacctggccttttccttgagtgttctggttttatgattatgcatgtttcacttgtttctgctaatacaacaacaattgaggcatatgaaaagaaaactacgccacgctggatgtatgatattggccggaagaggaatttcattcaggtttttggaaatgacaagaggtattggttcatccctgcgtactcagaagaggatttgagaagaatgccagttctacagggccttgattaccctgtcaggacagatttggatgggcaagaattgtgatgggacaatttcgcctgtgccctcacttcccatatgcaccaaatatgttccatgtaaattttacggtttccttccgatatcgtagagttaaatatttttaaaggtacaccttagtactgacagcattgctggttgggtactacatggcctccgaagagagtgttcccagaattacttttcaaaccctgtgtaattcacttgtgctgtctgattgggcaaagaacgtagaggtcttgctattgtggctaaaagaggcatgtgatgtaaattctttttagtgtgtttcagatgggtttccagatgtatgatgtacaatgatttgagctgtgcaatagacgtacagttattagagcatgacatgttgataagataacctgtgttaattagagaactggatgtttaagtgtt

SEQ ID NO: 3106 - DNA, 1196 bp, Oryza sativa
  ref <308>: DATABASE ACCESSION NUMBER: AK104354
  ref <309>: DATABASE ENTRY DATE: 2002-08-28
gattctcttccattccattcccaaccatggcctcctccatcgccatgtccctccgctccctcgccgccaccgacgccttcctccccaagccctccccctcctccgccccattcctcctcctcctctccccgtccaccccgcgcctccgcctccacctccacctccgctccacccgccgcctcccgctcgcgccgctcgccgcgtccgactccttcgaatccgcttcgtcctcctccgccgccgcgctcgacttcgctgagccaggtgccgccgaggagtccgacgtgccggaggagtctgaccaggaagaggaggggtacgcgccggaggccgaggaggaggcggaggcggatgaggaggtggaggaggaagccgtcgaggcctccgcggaagttgcggaggaggccgaggacgtagaggaggtcggcgagtacgtggagccgcccgaggaggccaaggtctacgtcgggaacctaccctacgacatcgacagcgagcgcctcgcccagctcttcgaacaggccggcatcgtcgaggtctccgaggtcatctacaacagagaaacagatcggagtcgtggatttggatttgtcaccatgagcaccgttgaggaggctgagaaggctgtggagatgttccatcgctacgatgttgatgggaggcttctgactgtaaacaaggcagctcctagaggcgctcgggtggaaagacctccccgtcagtttgggccttctttcaggatttatgtgggcaatctcccttggcaagtggatgactctaggttggtacagctgttcagcgagcatggcaaagtagtcgacgccagagttgtgtatgacagagaaactgggcgttcacgaggatttggttttgtaacaatggcgacacaggaagaattggacgacgctattgcagccctcgatggacagagtttggatggccgtgcgctgagagtgaatgttgcagaggagcgaccaccgcgccgaggcttttaatgggatagcaggctttgtgggggtttaacagcatcggaggcatcatagcacgtctgatactggtttagtccctcaaatagtagctttcttgcgattcttggttctgtatcctcccaagtcctttctcatgcctgctgtttactgctcctttcttgttaactgttggttgtggccacgagttgatgcacgtaggctactgtt

SEQ ID NO: 3107 - DNA, 1035 bp, Oryza sativa
  ref <308>: DATABASE ACCESSION NUMBER: AK060866
  ref <309>: DATABASE ENTRY DATE: 2001-12-06
agaaatggcagatgaaaaattatgtggaaatatggatggactaggtagcttaagtattgaagcaaaaaaactcattctcggtatgcaatctcgcttggattccatggaaaaggagctacatgaacttaagaagaaaaattcttcccaacaaatgcagcaatttgctggagaagagaaaaacgagctgctgtattacttgagatcgctgtcacctgagaaggttgttgaactctcggagtcttcctgccctggtgtggaagaagctgtttactccgtggtacatggtctgctagcaactctctcccccaaaatgcatacgaatcgctctccgacctcagagaacatggcgggtggagctgtaaattttgggatggaggaggacgatgaattcactgagctcgtggaggacgtgtccctcccatttcagcccctgatatctattcctcgcgaccgtcttgcccgtctattattctggtgcatgatgctgggccattacatccgaggtcaggagtgccggcttgagctgatgcacctcctggcagtctccagtgatgcacattcatgatctcccctagtctggtagcaacagcaaatgctctgcaaagcttctgtcagctgaacgaactacttctgcatgacaaagacggaaacaggaaactctcaagcatcatgcgaatcgatccaatttggatgctgcaacattagtatggggatacataggagagggagaagaggagcaaacccatggatggccaaggtagaggtcaggtcatggtccctgcagtagctcgaaccaggttgggttgctcagtagcgtcagatttccatataggattaaccatttcatcatggttaaatgtgcttttcaccttcttgttagtttgtgttgtgctatgtgtacaaatcctggagttagtatacagtatttcctcaccgatgtactggtattttggttgtagcaacgttggtgttgcatcctgtatatataacattatactagtagtatgtatgtaaaactcttatatttccttgtgt

SEQ ID NO: 3108 - DNA, 1565 bp, Oryza sativa
  ref <308>: DATABASE ACCESSION NUMBER: AK060867
  ref <309>: DATABASE ENTRY DATE: 2001-12-06
aacgaaacaaggagagactcagagaggaggcgtgttggttagctcattggcagcagcacacacaaaccacatctcctatatatagctcatttttagcttttggaatttgagagaggttttgagagaaatggctagccaaggtgtagcctccatgttcgctctcgcattgctcctcggtgcctttgcctccattcctcaaaaggcggaggcgatcggggtgtgctacggcatgagcgcgaacaacctgccgccggcgagctcggtggtggggatgtaccgctccaacggcatcacgtcgatgcggctgtacgcgccggaccaggcggcgctgcagtcggtgggcggcacggggatcagcgtcgtcgtcggcgcgcccaacgacgtgctctccaacctcgccgccagccccgccgcggcggcgtcgtgggtgcggaacaacatccaggcctacccgtcggtgtcgttccggtacgtcgccgtcgggaacgaggtcgccggcggcgccacgtccagcctggtcccggccatggagaacgtccgcggcgcgctggtgtcggcggggctgggccacatcaaggtgacgacgtcggtgtcgcaggcgctcctcgccgtgtacagcccgccgtccgccgcggagttcaccggcgagtcgcaggcgttcatggcgcccgtcctgagcttcctcgcccgcaccggcgcgccgctgctcgccaacatctacccctacttctcctacacctacagccagggcagcgtcgacgtctcctacgcgctcttcaccgccgccggcaccgtcgtccaggacggcgcctacgggtaccagaacctgttcgacaccaccgtcgacgcgttctacgccgccatggccaagcacggcggctccggcgtctccctcgtcgtctccgagacaggctggccctccgccggcggcatgtccgcctcgccggccaacgcccggatctacaaccagaacctcatcaaccacgtcggccgcggcacgccgcgccaccccggcgccatcgagacctacgtcttctccatgttcaacgagaaccagaaggacgccggcgtcgagcagaattggggcctcttctaccccaacatgcagcacgtctaccccatcagcttctgatgcattccgtacacatatacgcatacgtatgcgtatacgtgaccgcaggtagtgtagtatacacgtacacgtacctgtacattacagtattgtacagagggcttggcttgcgaccgctgagaggacacgtacaccaagtgtacgtctgtcagatgcgtacgcgatagtatatatattgggtatattatatatataccgtattattacggtatgtatagaagggaagctacaggtacaaaatacggtacgctgtggtaggcgaattagcccccattttcccttcctagattactattactatatagagagggttgcaatatatatacatgtatatgtacgtacttaggaggtgtattttgtacgtacacagattgtaatactgtacatttgtacgccgtacgtcgaggtattttgcctcacgtaggcgtttgag

SEQ ID NO: 3109 - DNA, 1012 bp, Oryza sativa; identical to SEQ ID NO: 2068
  ref <308>: DATABASE ACCESSION NUMBER: AK104355
  ref <309>: DATABASE ENTRY DATE: 2002-08-28

SEQ ID NO: 3110 - DNA, 1044 bp, Oryza sativa
  ref <308>: DATABASE ACCESSION NUMBER: AK060868
  ref <309>: DATABASE ENTRY DATE: 2001-12-06
agagcgctgcacgacctccgcctccccaatccgccccgtctccttgcccgccgccccccgactcccgtctcctcgcattcgctcaccggtgagcatcctaatccatcccatccggcctcggcctcgaatttcgtctcctcgcccgccgcttgcgccgatccccatcctgcgagcagaggtggcgcccggcgtcctcctgcttccaccgcatcgtctatcgccgatggcggagctgaccacagccgctgatgtcaccgccgccccgccgcctccacctgggccaactccaccaccggagcccgtggtcacggccacggtcgttgccgagcagaaggtctctcctactgctcctccgctcgatgtgccggcacccgcaccgccgccgccgaagaagcgtaaggtggaggaggcggggttccataactccgcctactacaagatccgggccaccgtcgccgacctccgtgttcgtttcgtgcaggtttacgaagctactgatttccgaaacagtgatgctgctcgcgagattctgaaagagatcaaggtagtcatggagctagccaagaaaatgaggcatgacctcggtgccacttttgaacctgctaagccaccagagaagcctttagctggagttgtgaaggatgggccagtggaaccacctccatctgcagaaaacaatcacgctcctcagacagagaagatgggggaaacaccaagaagtgagattgcgcaagggtcttgtgtgacaggtggatctcctatcggctggaattttcttgtgtggcctgggggtgaggtggtttactacgggcggacaaaagaagtgtttcgggcgggtcaagctgaaaattaaaatgtggtgttcaccctgtcttctgactggtaaagtggtaatgtatcattcaattgtggtaggacgatttatagaatgtggtgttcgcattcagtctttctgaccggcaatgtgccaatgtatgtactattcaattgtgcgaggaatggaggatgaatcgtagtagatcttagcattctgttgactgaggt

SEQ ID NO: 3111 - DNA, 1013 bp, Oryza sativa
  ref <308>: DATABASE ACCESSION NUMBER: AK060869
  ref <309>: DATABASE ENTRY DATE: 2001-12-06
attcgatcgcttccccaaatcgctctcctctcctctcctctccaccgccgccgatctcctcctcctccggcgccgtcgccgcgtcgcctcccggagctccggtgctgccaccagcctacgcagcgccgcctcctcctcctcctccggcatccgccaatcgccgccgcctggttcgtcggggagccccgcgccctaacgttttctagaggcgccgcggatccagcgcgaatcgatcgagaggtaaaggggaagttgatttgagtcggcggccgaagaaggaagccatgaactcgagaagcaccagaacttctctttttgatggcattgaggagggcagaatccgtgcaacatcctattcttcacatgagatagatgagaatgagaatgatcaagctattgatggattgcaggatcgagtcagcattctcaagcggttgtctggtgatatccatgaagaggtggaaactcataaccgtatgctagaccgaatgggcaatgatatggattcgtcaaggggttttctgtctggaacagtggacaagttcaagatggtttttgagaccaaatcaagtcggaggatgggaaccctcgtagcatcattcgttgcgctttttctgctggtatactacttgaccaggtagaagaggaccatgcatcacttgcctactgttgtgaagcgatgtgaactgggttgggtactcaagaacacgctgaaaatgtctgtgtcaatttaccgtggtgtcgtatatacctccaatatctcgctgtcataaagcaaaatatgttgaccagaatgtttctaactctgcactgtgtgaggattacaacatgttcgtcgtttgctctggtgctgtaattacctttacagaaaatgtttcctgctgtgttctgtaacatctgtttctgtatgcggtcatgctatctgtattatattataacttcacaagagattgtactttggagtcttaattgccatatataagacgctattagtatgtggttaatttgctgct

SEQ ID NO: 3112 - DNA, 1015 bp, Oryza sativa
  ref <308>: DATABASE ACCESSION NUMBER: AK104356
  ref <309>: DATABASE ENTRY DATE: 2002-08-28
gtgccccctcctcgtctttcgtctcttctctccttccttcctccccttctcttcctctcctcccaccgagtcgccgccctctcgctttcaacccccacacggaagcaagaattgttcatcaaaacccgatctttggcgtggccccgtggatttcttgcgatctgtttggtgctatggatttctgatccggggtttcttggatcttggggagtaggaggtggggggcggcgatctggccgggagatggccggcgggaaggagccgatcgaggtcaagttccggctttttgatggtacggacatcggcccgagcaagtacgacccctccaccaccgtctccgcgctcaaggagttcatcctcgctcggtggccgcaagataaggaaataactccaaaaactgtcaatgacctgaagctcattaatgccggacggatattggagaataaccggacacttgctgagtcccgtgttccagtaggagaggttccaggaggtgtaattacaatgcatgtggtagtacgccctccacaacccgacaaaaacagtgagaagcagcttgcgaattcccccaagcagaacagatgtgggtgtaccatactgtgatacgccgcctgcctgatgatgatgtacaatgtctcgctctaggattttgtatctgctttcctgtgttcgcagctcttgtgaattcattttgacatccaattttagagccattcaaatcctagaaatatacatactttaacacccgtcaaatatgcttgggagctggaactgaaggtttctggaggatgcgtcatggtgatcttaatgttgtaacgagtgtgcagaagacagggattggatgctttctgttgtataaattgtaatgtgaaaacgaaaaaaattctctcctttttcttttttctcttgccacattgacattttatcgattctttttagcactggtgtttgtcatgtaaaaccagaatattgtactcatatatgtaagctgaaaaaaggggtgttttattctgtt

SEQ ID NO: 3113 - DNA, 1091 bp, Oryza sativa
  ref <308>: DATABASE ACCESSION NUMBER: AK060870
  ref <309>: DATABASE ENTRY DATE: 2001-12-06
caaaagaggaaaggcttgcggtggatacctaggtacccagagacgaggaagggcgtagcaagcgacgaaatgcttcggggagttgaaaataagcatagatccggagattcccaaataggtcaaccttttgaactgcctgctgaatccatgagcaggcaagagacaacctggcgaactgaaacatcttagtagccagaggaaaagaaagcaaaagcgattcccgtagtagcggcgagcgaaatgggagcagcctaaaccgtgaaaacggggttgtgggagagcaatacaagcgtctaatcccattagccatacgcagcccgagtgtcttccccttccctttgtggcgtaaaagaaagaaaatctcccgtctcctccgctccttgcgccgccaagacgagtcgcggctgaacaggggaggggcggcgatctccatctggcgagcagagcaggcgagaggattatgtgagaagaaatgcatcaagagtcaagaatatgcttcggagcatggtctgcctatacttaaaaatgttcttcttccaaagacaaaggggttcctttgctgtttgcaagagttgaagagctccctagatgcagtttatgatgtcacaatagcgtataagcatcgcctgccagattttctggatattatatatggcaccgatccttctgaagtccacatccacatcagaactgttaagctctgtgacattccaacgtcagaagatgaagtaaccgattggatgatagagaggttcaggcagaaggaccagcttctgtcagattttttcatgcaaggccacttccctgatgaaggaactgaaggggatgtatccacaccggagtgccttgctaatttcattgcaatagtcagctcgacaggcttcttcttgtacctatctcttttttcgtctgtgtggttcaaggtctatgtattattaagctgcgcttaccttacatttgttacctatttctccattcaaccaccccaactgatatgctcatcagagggtggaacccatgccaaaaaggtactgtagaaagaggctgtagctttgactggaaactgtatatctgcaaaagatatttactgt

SEQ ID NO: 3114 - DNA, 1073 bp, Oryza sativa
  ref <308>: DATABASE ACCESSION NUMBER: AK060871
  ref <309>: DATABASE ENTRY DATE: 2001-12-06
atcgatgaaatggaaaaatattccccgtcctctgcttctctctcgtgtgctctgcttctttcttcttcctcacgcctctgaattcagttggatctccggcaaacttcgccgccggcaatcggggttgtaacaacttggtatcagttgctttcggtcctgtttgctccctcgcactctctcgaccgtctggtggtaattcctgtggccgagttggtggctgacctccaggttgcgccgccgtcaatctcgtatctggttcgccaggtttggagtaggtgacgcaacggcacccgcgaagcaaagtgttcaggtccgtcaaatggtggcggcgatggaggtgatggaggcgcgcgtcatggaagtgttgacgaagttggcggggaaggtggagggcatggacgtcatcaccaatcacttgggggagattgacgccaagctcgtcacgcaaggggagcggctggatcgggttcaagcgaagatggatctctcgattactttgttgggtcaggttcagcaagagcagtcgcgccctgaaggcggtagcggctgctccagggccggaggcgccatcaattccatcgcatcgccagccgccgttgctggagactccgcgaggggcatttgcggcgtctacttcgacggcaccacctccgccaccgccgccgcctcctccgccgtttctgcgtcggttgcgtaggtatcgggttcccctttgcctcatacttctgttgagggtggggattcggcgccgcggtgccaatggtcgcctaagatggattttccccgttttgatggtacagacgtgagagtgtggctggataactgtgaaacttactttgggttttatcaaatcgctgagggttttcaagtttctgccgcttctctgaatatgattggggatgccgctaattggtatcaagcatggaagttagaaataggtgtacatgattgggccactttgaaggcattagtcttaactgaatttgaggtatatttgcaaaatgtgaagatggatgaacttttgttgttgcatcaaactggttcggtgactgaataccgtttcaaattcaatc

SEQ ID NO: 3115 - DNA, 1052 bp, Oryza sativa
  ref <308>: DATABASE ACCESSION NUMBER: AK060872
  ref <309>: DATABASE ENTRY DATE: 2001-12-06
gagagtcaatcgagcggataacgaacagaacacacacccactgtgctcatggcttcctcttcctcctcccttggccttggcgccatcttccaaagcggctgccccctcctcccgcctcgccccgccgtccgccgcgcgcccaccaggcgccgcgccgtcgccaccaagatctcctgcatcggatgggaccccgagggcgtcctcggcccgccgcagggcggccacatcgtgcgcctcgagttccgccgccgcctcgagagggactccgacgcccgcgaggccttcgagcgccaggtccgcgaggagcacgagcgacgccgccaggagcgcgaggcgcgggtcatccctgacacggacgccggcctcgtcgagttcttcctcgacacggaggcgcgcgagatcgaggtagagatcggcaggctccgccccaggctcaaccagcccttcttcgactacatccagcgcgagatcgcccagatcaagttctcaatcacccgaacagcggaaatggaggaccgattgatcgagttggaagcgatgcaaaaggttctgcttgagggagtggaggcctatgacaagttgcaaaatgaccttgtcagcgcgaaagaacgcctcacaaagatcctgcaatcaagcgacaaaaaatcgacacttcttgaaatggttgaacggaatgagctcaacatgtccatactaacactcctcgatgaaaatatagcaagcgccaagaccaacaatcaggaagaagctgtggctttcatggagaatgttcgctcatccatcctgaaatatattacagtatgaaattggtaggcatgtggacttagccctgtcacatggttatcaaaattaggtcatgaacctgtaatttgcaaggacatgtcacatattcaagggtctgattatgtttctctcttgtatttagttattgtgttccatatatgctcatgtcagtgtcaatagttttttggtaaagagaaattgtacaatcatatacttgtaccaccaacatatacttgaaccagtttcctggttggacagctagttttacc

SEQ ID NO: 3116 - DNA, 1321 bp, Oryza sativa
  ref <308>: DATABASE ACCESSION NUMBER: AK060873
  ref <309>: DATABASE ENTRY DATE: 2001-12-06
gcagtcgtgtgtataacattttcgtttaacactataccacctattcttctcgcacattcgcacgctcctgcatctccatccgtcgccaccacctccaccgcctccgcctccgcccccgccccctcttccgccgccaccaatgtcttcggcggccggtgaaccctcctcctcctccgccgccgccgccgccatctcttgctcctcctccaacgacgacgagaagccaccgccgtctctggaggggaaggagctgcggcgagtcgaggaagaggagcccgccgccgccgcgcgccccgagaagctcacggaggggtcctcgcgcgccgctgaggctgaggaggaggaggaggtggtggaggatgaggaggacgatgacgaggaagatgaggggaaggtggcggaggccatcgacctcggccccagggtcagcatcaaggagcagctcgagatggacaaggaggatgagagccttcggagatggaaggagcagcttcttggcagcgtcgatttgaactcagtcggagagtcactggagccagacgtgaggatcacaagcctgtgcatcctgtcaccggggcggccggacgtccttctgccgctgcccgtggagccgagcaactccaaggaaccatggttcaccctcaaggaaggcagcacgtacaggctcaagttcaccttctctgtcagcagcaacatcgtctctggcctccgctacaccaacaccgtatggaaggccggcatccgagtggacaaaaccaaggagatgcttggcacgttcagccctcagctggagccgtacacttacgtgacgcctgaggagacgaccccctcgggagtatttgctcggggatcatactctgcaaaaacaaaggtaatgaaatctgataccgtgatacacctctgagaaaaccagaatgtcgatcactgcttcccgcgcccactgaactgaatcaagtttcgatttcgctccatcaccagttcgtcgatgatgaccggaagtgctacctggagatcaactacaccttcgacatccgccgggactggccctgcaagtcctgagaagctggacaccaagcagaagaggatggcaggcatctgtgaaagaggcatgttcaggctgccctgtccctgtctgctctgatcttttcagagtgtaaggatgattggttacagcgattgtttgtagacacatagtagattcatttgtcaggtcagcattgttaatctgtgcctgtcgctcgagctcagttgtaaacttggaatgctgggtgttcagagaattgtactactagctccgttttcaagcaacggttgcaggttg

SEQ ID NO: 3117 - DNA, 1074 bp, Oryza sativa
  ref <308>: DATABASE ACCESSION NUMBER: AK060874
  ref <309>: DATABASE ENTRY DATE: 2001-12-06
acacacacctcttcaatactctcactgcaatttctggagctcacactgcatgcgccggccaataatggcgacgacgacggcgaggttgctcctcctgctcacggtggcgggcttctgcctctgccacaccacctgccaggaggcggcgccgccgccgccgccgtactgcggcagcctgaggacggccgtggaggcgcggaacatcatcgggtggaagacggtgccgccgccgtgcgccaagtacgtcgccgactacatcaccggcgagcggtacggccgcgacgccgacgtggtgatcaacgaggccatcgcctacgccgagagcctcaagctctccggcaccggcaaggagatctgggtgttcgacgtcgacgacaccgccctctccaccgtgccctaccaagccaaccatggctacggagttcaaccgttcgacaaccagagcttcctcaagtacgtggtgcagggaagcgcgccagcactgcagagtacactgcggctttaccgacggttactccagcttggtataaagccggtgttcctgacagaccgcaccgaggaccagaggacggtcacaaccaacaaccttattaagcagggctactgcaattgggagaagcttgtgctgcagccggttaggcttcagacctcgacgttggcgttcaagacctgcgaacgacagaagctggtgaatgatggctacatcatcgtcggcaacattggcgaccagtggaacgacatccgccgctcgccggatggttgccgcacctttaagttccccaaccccatgtactatgtcgactagctagctagctatccatggatatataccttgtttgtgtctgtttcatctactcgttttttgtcatgaatttgcatctagtaattaatctttgacgcgtgcatatgtttgatatgtttgttaatttttcgtgagatgaaaattgaatttgtaataacgcttgtttggcagttggccattgattggtcaatgtactgtgttgagcaagcttgttgtatttttacagaattaataatggaactgatgggccaatatgatgtcttgcactactt

SEQ ID NO: 3118 - DNA, 1119 bp, Oryza sativa
  ref <308>: DATABASE ACCESSION NUMBER: AK060875
  ref <309>: DATABASE ENTRY DATE: 2001-12-06
acagcagcagctgcttgtacctatcctccaccaccaccagcagcgagtcatggcggccatggcgatggtgtccgtgcaactcacagtcgcggcgaggcccctgcgctcccgccgcgcgctctccgtcttcacctgcgccgcacccccgaggcagcggcctcctccaggcccaaccaagcaccgccgcctccgccacgacgccgacgcgcagcctcccaggaagcgaggtcatcctcctcctcctcctcccaggcgcacccgcacccggggccctcccgctcgcccccaacaatcctacactgacgacgacgaggaagaggacgaccaagacgaggaggaggggagcttcggtgggggcacccgggctgccgccatgcccaagccgccagcgggcttcgtgctggacgaccagggaaggtgcatcgccgccgcctccaagcgcatcgtcaccatcattgatgacaccaacaaccggcccttggagtgcatcatcaggagggtgttccgaagcacgctagaccacgactgcatgctcctttgcccagttgacatgcctgtgcaggtccttaagagtgccaatttcagtggctggattgctgttgatgatgaccagattaaggaaatcattccatccgttgcatatgccctcgctagagtgcatatgcactttgtagagagtggattttgttatacagcacggggtggcttttgctttcctgaagacgcgattcaagaatttcatgattctggtgacggcggtgatagtgtaccttttgaaggtgtagagatttgttgtttcaatttggatggcgcacattatatgatttatacaccagttgatcctcttctgttcgttgcagtgaaggataaagatggcgtgctacgcattgctgaagatgaactcatggacgaccctgctgttgtcggtgccatagacgaagagacagaattcacagctttggtggaggaggaagaggcccttcttgaatcggtgctgggtgaaagatgaccatgccgcggcctgtattgatggtcgatcagaggcggagactgcaatggtgggcgtccatcgatcatcattcccacccaccaattaagtagcagaagcaagctccccgc

SEQ ID NO: 3119 - DNA, 1628 bp, Oryza sativa
  ref <308>: DATABASE ACCESSION NUMBER: AK104357
  ref <309>: DATABASE ENTRY DATE: 2002-08-28
aatccagtgtcatttgactcatttcctcttcctgccctcggggagtacgtgaggacctaaaagtacctcgcccccaaaccctagaaccccacaccacacccaattcgcccacccaaaccctagtcctcccgatgctgtgatccgccgcgcgtgccccatggctctagacggccccgcggagcgacgggacgaggcccaggccgcgatgggtaatggcaacggcgtggccccgccgccgttgcggccggccggccggccctccggggcgccggcgtgcgcagatcggcggctgcggttgaaccccaacatggagcacaagccgcaggactacagcgacgtccgcggcgagtacgcaccagctgtatacagtgcacttgagaggcacctcccacccagtgtccttgatgccaaccgggaaatcaagctgcagctcatgcgagaggtcctcgggcactattggccccatggtgagcgcaacaaggttcaaaggcacagagaatacagacagagaatactcaaccattataagccacttcataaagagctatacaaaatgcgcccttcatcgttctttttaccaacattccttgaagctattaggaccaatacagaagaaagctttagaagcattatgactgagccagttcctggtgtttattcatttgctatgttacagcctaatttttgtgagatgctattacaggaggtagagaacttcgaaaaatgggtccacacaatgaaatttaagataatgaggccaaatacaatgaacaagtatggtgctgtccttgatgattttggcctggaagttatgctgaaccaattcatggaacagttcatagctccaatgtctacagtattatatcctgaggttggtggaggaacattagatacacaccatgcttttgttgttgagtatgggaaagacagggatgttgaactcggtttccacgttgacgattctgaggttacattgaatgtttgccttggcaagcaattctctggtggtgagttatactttcgtggcatccgttgtgagaatcatgtgaattcagagacacagcatgaggaaatgttcgattactctcatgttcctggacgagctgtgctccatcgtggtcgtcataggcatggtgcccgaccgacatcatctgggctcagaatcaatcttcttttgtggtgcagaagctctgtgttcagggagatgaagaaatatcagaaggacttttcgggctggtgtggtgaatgtaaacgtgagaagaaggagaggcagattcatgctgttaaagcaactaagctggcgtttcttaggggtgctggaggggcaacgatttaaattatatttgctttatgtatttatacaatcttgtattatattatactttactgtcatttgggaagcagctagtgtgatcttcagtttttctggtcacaatcattagtggtcacaggtgtatgtaaattgaacttgtgatcaaatcaagctgaaacttagtggaggatcgcatgttagtgtgaaaggagtgctagcagaatagcaactccccccttcaatatcgtctaagcctgatattgtacagataagtgcatctgcatagaatgttctaatctgtcatcaaatttgggtg

SEQ ID NO: 3120 - DNA, 1014 bp, Oryza sativa
  ref <308>: DATABASE ACCESSION NUMBER: AK060876
  ref <309>: DATABASE ENTRY DATE: 2001-12-06
gcgaccaggagaaatttcagcaggagcaggcgatggcgagcccgcagtgctgcgcgaacccaccgacgctgaacccggccggcggggaggggaaggtggtggagagcttcggcgggatcaaggcgtacgtcgccggcgccgcggagtccaaggccgccgtcgtcctcatctccgatgtcttcgggtttgaagcgccgaacctgaggaagatagccgacaaagttgcctcgtctggatactttgttgtggtgccagatttcttacatggggatcctttagtacctgaaagtactgagaaaccgtttcaaatgtggataaaagaacatggcccggacaaagcatttgaagaggcgaaaccaattattgccgctctgaaggagaaaggagtgtctagtattggggctgtaggttattgctggggtgcaaaggtggtggtagagttagtgaaagctcatgagatccaggctgctgtgatgtgtcacccctcttttgtgactgttgatgatatgaaagaggtcaaatgcccaattgctatacttggagctgaaattgatcgtatgtccccaccagaagtggtgaagcagttcgagcaggttctttcttcaaagtcagggattggccactttgtcaagatcttccctggggttgaacatggatggactgtgagatacaagaatgatgatgcagctgctgtcaagagcgccgaggaagccctggcggacatgattgactggtttaataagaacctgaagtgaatttgacatatccgctgtccacgatcggtttgtgtattgctcatgtttcatcgcaagcatcctgaatttacggttgagtagccttcccattatgtttgtgctagtagtgtatatgctttgcttgtgttaggaatttgctttgtgtcaacctgaacttccacttctgtaataaaaatggatgggcgagcatcttctcggtttggtggtcacgactgacgagaacatatcattttgttacatcgaacttttgaaactttgc

SEQ ID NO: 3121 - DNA, 1072 bp, Oryza sativa
  ref <308>: DATABASE ACCESSION NUMBER: AK060877
  ref <309>: DATABASE ENTRY DATE: 2001-12-06
ttggatattgccgtcgcaagggtgaacttctactagtatatgagtacatgccaaatggcagtcttgataagtacctgtatgaccaggataaaccctcgccgaattggattcaaaggtttgagatcatcaagggtgttgcatcaggtcttctctacctacacgaagaatgggagcaggtcgtcatccaccgtgatatcaaggcaagcaacgtcctcctcgacagtgagatgaatggtcgactaggcgattttggcctagcacgattacacgaccatggagttgatgcacacacgacatgtgtggcagggaccagaggctacatctcccctgaactagcgaggctgggcaaggcgaccaaggcaaccgacgtgttcgcgttcggtgcattcatcctcgaggtcgcctgtggccgtcgcccgataggcatgaactcatcaggagaattgcaagtgttggtggacttcgtgctcagattctggcagcgagatctgatcctgtgcatgttggataccaggttgggaggagagtttgtgacggaggaggcagagctagtgctcaagcttgggcttctctgctcgcacccgtcgccagcttcaaggccaagcatgaggcttgtgatgcaatatttgtgcggcgatgtgctgttaccggcgatgccggagagttaccggagcatccggagtttcagtgagatgcaggttgaaggtgatcagcttgatgagaatcccttattaagacagtatctgtcggtgcaaacgagtataaccggtctctctggtgggagatgatactgtcaagtgtcaacaactagagtttaattagccgataccaaggagaagagaaatcttgatatggattaaattaagaagagatttaggtaatttgagccagagcagacccgaacagaggtttttagttcagtgaacacacgggaagatcggcctcgatatatatattttgtgattttattattttgcggtttcatttagacttaaagatacgctttatttgtgcgtgtaactacttttataccgagcaggacacaatatgctagccagtccgaattccatcg

SEQ ID NO: 3122 - DNA, 1220 bp, Oryza sativa
  ref <308>: DATABASE ACCESSION NUMBER: AK104358
  ref <309>: DATABASE ENTRY DATE: 2002-08-28
aagacacaagtggaagttgcacagctcctcctcgatccacccggcaccaaggtacggccggaagctatctaaggactgcagctatgggcaatttgttctgctgtgttcaagttgatcagtctacagtggccattagagaacagttcgggaagtttgatgctgtgcttgagccaggatgtcactgcctgccttggtttgctgggaagcgtatagctggccatctcacactcaggttgcagcaactggatgtgcgctgtgaaaccaagacaaaggacaatgtgtttgtcaatgttgtggcatcgatccagtacagagctttggctggcaaggcaaatgatgctttctacaagctgagcaacacaagatctcagatccaagcttatgtcttcgatgtgatcagggcaagtgttccgaagctgaacctggacgacgcatttgagcagaagaacgacatagcaaaggcagtggaggatgagctggagaaggctatgtctgcttacgggtttgagattgttcagacgctcatcgttgacattgagccagacgagcacgtgaagcgagcgatgaatgaaatcaatgcagctgcgaggctgagggtggctgcaaacgagaaggcagaggcagagaagatcgtgcagataaagagggcggagggagaagcggaagcaaagtacctgtcggggctgggtatcgcgaggcagcgtcaggcgatcgtggatgggttgagggacagcgtgctggggttctcagtgaacgtgccgggcaccacggccaaggacgtgatggacatggtgctcatcacccagtacttcgacaccatgaaggagatcggcgcctcctcaaaggcctcctccgtcttcatcccccatggccccggcgccgtccgcgacatcgccacgcagatccgcgacggccttcttcagggccaggctaccaccacctcccattagcatccatgtgggacaccagctgtgggattgctaagctgctgtttctcttgatttgtcctgtgtgattagatatgtcttgtaatttcttcatgctagctgtccgaccgacgtgtgtgcgcgcgcgggcaacattttcattttagttgtgaatgatatcctatcgtgtatgtatgtgtggaactatgccttgtgaaaactttgtgaaatttcagcgtcaaacatgtaaatgtgcatgtaatccggttctctgtattgtattacttgtatgat

SEQ ID NO: 3123 - DNA, 1242 bp, Oryza sativa
  ref <308>: DATABASE ACCESSION NUMBER: AK060878
  ref <309>: DATABASE ENTRY DATE: 2001-12-06
tgagtctagtccagacgtaagattgcgaccccgtttctcacatgatagagggattcgcttgagccctgggagtacggggcctatgtctcttggtgccagtccatcacaatttaccccacctaactaccaaatgcaaatcccatctaattccactgggatgcatggttctggttcacctgcaagtggaggcattcatggatccccattaggaaaaactccatccagttacagcaagaggaggggtttgccaatgccacctcatgaatatccatctcagcatggacaaggacgtcatggagatggtgtcggttttagtcattctgatgccaatgttcgaggacatcctgtctactcccagaattcaataccaagttctggttattctagttggagaccgcaaattggttccggtagtttttccttggaggcttcttctagtcatgggccttctcaaacatttcattcacactttgctcctcgtctgcaaactcttgataatttatctgattcatcagcggcatccacacttgacaatgcttattgggacccttattttagtgatgagtcactattgcatgaagacaattcactgtcagctgatttaagcagcagtcttcacctcggggattcagctaatccaacaagtggatccgccagaacagcaaatgtccaaagccacattttcatgggctcgaaccctttaccagcaggcgaaagttacagagcagaccatttttttcacgcatcttctcgtgggtcgcttggagggaatactcattctgctgttcctgttaactatggtggctataaccctgtaaatcatccccaacaaaatccccaaattcggcatgggcaaccatatattcagcatcgatacaaccaggcaacttcaactcataatcatcctagagggagtcaccacaacaggcaacctgcatggcccatggccgatggaacgccctggggaggaacgagtgggcatccatttaccacaactgggctaccttcatctcttccaagaaaggattacgggagcatcttctagcgcggaattgtggagcagtgcgattcattgctggcgacatgaattatttgtagtttcaaactgggagttgcgttgcgttgcctcagcccgtctgagtattcttttgcagtgttgctgcacttgcattcttccattgggggtggtcctttgtcgtactcacaattatatgaaggcataatgcgatcgataattacagc

SEQ ID NO: 3124 - DNA, 1233 bp, Oryza sativa
  ref <308>: DATABASE ACCESSION NUMBER: AK060879
  ref <309>: DATABASE ENTRY DATE: 2001-12-06
ttaatccagtgttttatcaaaagggacaaatcaaaattaacttattatctctacctgtgtcttagccctgctgtgctcagcgagaatggaaaattccttcttgcagctaagaggaatcgtcgggcaacttctacggaatacataatttctgtggattctaaaaacatctcacggtcaagtaatggttatgttggaaaaatgaggtcaaattttcttggcaccaaattcgttgtctacgatacacagcccccgtacaatgctgggagcctcatgtcatgtcagcatggcagccggcgaatctcttctaggagggtttccccaaagttacccaccggtagctacccaattgctcatgtgaaatatgagttgaacgttcttggcactagggggccgaggcgtatgcaatgcaccatgcattcgatcccagcctcagcagttgatcctgaaggtgtggtgcctggtcagccagagcagcttctcccaggtccattcgaggagtcgtttcgcagcacaaacacctcctccaggttctctttcatggacagatctctggacttcagcagctcccgcttctcggaaatcagtggatcagcgaaccaacagggcgaggatgatatacctgaggctaaggagaggcctttggttctacgaaacaaagtgccaagatggcatgagcagctgcaatgttggtgcctcaacttccgtggccgggtaactgtggcttctgtcaagaatttccagctgatagctgctgcgtcctctgaatcttcacagttggagcagcagcagcagcagcagcagcaaaaccatgcttcgagttcttcttcggcatccgatcatggcaaggtgatcctgcagtttggtaaggttggcaaggacatgttcaccatggactaccggtaccctctctcagcattccaggctttcgccatctgtttgaccagcttcgacaccaagctggcttgtgaataacatacatcagtactataagtgtgtttgtatagcgtgtcagtgtgtgtggatagtataaacatcagtcagtctcgttgtgtgcagatgcaggtgcagtttgttgttgctgttgatttagttgtctgttcttcttgtgtggcagatgtgaacaaagaatggcaacacatctcaagtgcagttgtttgctgctactacatttatatcatgtaagtatttggaggttggaagtggaacaaccccaggctcctctagtttctcgag

SEQ ID NO: 3125 - DNA, 1685 bp, Oryza sativa
  ref <308>: DATABASE ACCESSION NUMBER: AK060880
  ref <309>: DATABASE ENTRY DATE: 2001-12-06
atcatttcatctgatctagtatctcatctcctcctcccctccttttccttctcccccaaccaactcactcttcatcttcaacaccttgctgttcgtcctcgtctcgtcgtgctgattgttcaagaacaggagaaagaaaggaagaagcagtttgattgatctgtttctgttggggggagctcggtgatccatgcatggatggcaaagaactcctctcaccgtccgaactgtcatactatgcgcaccagcagcatcagcatcagcatcagcagcatcagcagcaacaccggatgctcgggggcggaggaggcggcggcgggcatagcgcgtcgccgctcgccgggatgcacggcggcccgtcggtcatccgacccatgcccaacatggggatgagccccaccgcgatcctccagtccatcggcccgggcccgctcgccggcatgcagttccagatggacgccgcgccgccgccgccgccattgatgcacaacagcatggcctccgtctccgcctccgccggcgccggctcacccaccgtgccgccgtccgcgacgcccatggagccggtcaagaggaagcgaggccgcccgcgcaagtacggcccggacgggaccatgaaggtgtccaccgccgccgccgcgcagcaccagcagcagatgctgagcgcgccgccgaggatggggtccgtgtccggcgccgacatggttggcggcggctcagggatggacgactcggcgcagaagaagcggcgcgggcggccgccggggacagggaagaagcagcagctctcatcaccggttaagctttcagggggcaatgcgttcagtggctcagctggaacgagcttcacccctcacatcatcacggcatctccttcagaggacgttgcagggaagatcgtggcgttcgccaaccattcgtccagggcggtgtgcgtgctctcggccaccggctccgtctcccgggtggtcctccgccacccggccgacggcgccatgtcaagggttcacgcctcctcccactacaagaaccctgccatctacgaggggctgtacgagatcttgagcatgtcggggtgttacaacctgatgaacgaggggcagagcgacgggctgagcgtgacgctgtgcagccccgagaggcatatcattggaggcgttctcggcggagcattggtagctgccagcaccgttcaggtggtacttgggagtttcgtgcagggagggtcgaagcccaagtcgaagaaggccgggaaacagcagcagcaacaggcggcggcggcggccttcagctcggactcgctgaccggaggagggcaggacgcgtcgccgagctccggccataaccaaaatctaacgccgccgccccctgtaacaacgacgggagggtggcctagctccgggatatttgacacgagaagttccaacattgatatcaactcatctagaggctagcttcatctctcaatttgtcgactcttccatatgtgctccagaaatttgtttttctgattcccaaagaattacccccaaaattgtactcctctctgtaatagcctgttcagtttttgagccgttaattcttatagattattattattcactaggcaacgttgcattcatgcatgcatgcatgctcagagttgtgtaatcccaacaggataatcttgcttttctttcagcgac

SEQ ID NO: 3126 - DNA, 1093 bp, Oryza sativa; identical to SEQ ID NO: 2099
  ref <308>: DATABASE ACCESSION NUMBER: AK060881
  ref <309>: DATABASE ENTRY DATE: 2001-12-06

SEQ ID NO: 3127 - DNA, 1209 bp, Oryza sativa
  ref <308>: DATABASE ACCESSION NUMBER: AK060882
  ref <309>: DATABASE ENTRY DATE: 2001-12-06
tatgcaagatggatgttgtagtaaaaaaattggggcttagaagtggcttagatataatctattagcttgtctacaaaaagtgtgatttatattttcctaaccacgtggatgtcaggtaaacacaattaactctagatttaatgtccatttaataatgtacaagctagagttagtctgaaacagcactgtaacttcagattttgcctctgcctaatgttgaggtattgattggaggtatatgactacatctatatggatctgaattctgatgcaatcacaagtatttgacaatgaacttgtgctgtcataacaggcatacttgtccagcttccattgccaaagcatattaatgaggaaaagatattgaacgagatcagcttagagaaagatgttgatgggttccatcctctgaatattggcaagcttgcaatgaaaggcagagacccactgttcctaccatgcacgccgaaggtatggaaacactacaacagaatgctagaatatgactgctgctgcagttttcgtttgcagttttgatgttttgattttcattgaagggatgcatggagctcctaacacggagcggagttaccatcaatgggaagcgagcggtcgtggttggccgcagcaacattgtcgggctacctgtatccctgcttcttctgaaggcggatgcgaccgtatccattgttcactcccggaccccaaaccctgaaagtattgtccgtgaagcagacattgtcattgcagcggctggccaggctatgatggtacattgttctaccaccaaattatgacatggttcatcacaatccactgcccagttctaactgcagatttcttggttgccagatcaaaggagactggatcaaaccaggcgctgctgtcatcgacgttgggacgaactccatcagtgacccaaccaggaaatcggggtacagactcgtcggcgatgtggatttcgcagaggtgagcaaggttgctggtcacctgactccagtcccaggtggcgttggccccatgacggtggcgatgttgctgaagaacacggtggatggagcgaaacgtggtatagttcagtaaagtttccatcttgtatgctgtaactgcaaggatgatgttgtaattgagtgcatttctggacaaattcgttctcatttttgttgtgtgacggttatttcgagaataataagaataagtttgtctgtc

SEQ ID NO: 3128 - DNA, 1481 bp, Oryza sativa
  ref <308>: DATABASE ACCESSION NUMBER: AK060883
  ref <309>: DATABASE ENTRY DATE: 2001-12-06
gcagagcaccaatcaatccttcctcccagccaagatctttcttcctcctcctcgtcttcaggactcaattcgtcttctgatagcttagcttgattggggtgggtgacaatgggaggtggcaaggacaagcatgacgagagcgacaaggggctcttctctaacatgatgcacggcgttgccggcggccatgggtatcctcctcaccagggataccctcctcagggctacccgccgccgccgggagcgtacccgcctcctccgggggcttatccccctcctcctggggcttaccctccaccacctggggcataccctccacagcatgggtaccctcagcctggtggctaccctccacctggtggttacccccaacatggtggctaccctcctgcgggctaccccggatcatctgggcaccagggtatgtaattcttgttcacttatgtgctattaaggttctgttcttgtcatttttgtacaattcttgttgaacttttaagcaaattcagtattgagttgaattgtggtaattccctcctgttggaccatgcatgatatatgatgctgatcatgctgtatcacctatgccgtgatatgtgaagtttttatctttattgcaatcatttgcgctcatgatgccaactccattcttaccacttcgtcttagttgaatgcatgatgtttcttctccaattattagatgccattatgtgtgtttttaatctacatcgtactgcaattcctgctgaactcgagtaaacacctctgcattttgcacatattctgaattttaggattgatttggattactctagttcccttctgttgtaccataccacatacaactcttgatgcttcatctacactttagatgccatactatgcgtattttttgttaccatcattgaactgtttcagcaaaatggtgtgactctgttctcagcgttctatccttagagagtttctaatgtaatgttgcaggcggccatgggagtagcggtggaggacacatgggagcaatgctggctggaggcgccgctgcggctgctgcagcctatggggcacacaagatctcttctcatggccatggtggacacatgggctatggaggccatggaggctttggtggttacggccatggctacggcggtcaccacggcggcaagttcaagcatggcaagcacggccaccatggcaagttcaagcatggcaagcatgggcacggcatgttcggtggtggcaagttcaagaagtggaagtaatgcgcatgatctgatcatgctggaactctgtttaggctttaactgaagtgcttgcgcttggctggttaaaagcctaaaaaaagcctctcgaatgtatctaagcaggatggagctttgctcagttgctgctcccatccttcctctatgatttggtactctagtatgtggctcagtgacaatatggcttgctaataattaattaaataccttctgacgctt

SEQ ID NO: 3129 - DNA, 1024 bp, Oryza sativa
  ref <308>: DATABASE ACCESSION NUMBER: AK060884
  ref <309>: DATABASE ENTRY DATE: 2001-12-06
atatactctctctcctcctcctcctccactccggcgactcctccgccgcatcccgagcaagcaagccgccgccgccgacgacctagctccccgatcgcggccatgtcgaggcgcggcgactgggtctacgagaacaacggcgggacgtgcgtggccatcgccggcgcggactactgcgtggtggccgccgatacccgcctttccgtcggatacaacatcctcacgcgcgaccactccaagatctgcgagctagcggacaaatgcgcactagcatcttccggcttccaaggtgatatcaaagctctgcacaagaacttggctgccagagaattgctgtaccagcaccagcacaataaaaggatgagctgccctgccatggcacaactgctctccaacactctgtactacaagcgattcttcccatattatgctttcaatgtacttggtgggcttgatagtgaagggaaaggatgtgttttcacctatgatgcagttgggtcctatgagaggactggctacagtgcacagggaacaggatctgctttgatcatgccagtgctggacaaccaactaaaatcacctagtccactattactccctgcaagagatgccgtcacacctttgtcggagacagaggcggtcgatttagtgaaggatgtgtttgcatcggcaactgagagggacatctacactggtgataagctggagatagttgtcatcaacaaagctgggacgaagcgagagtacatcgacctgaggaaggactagatcgacgattatgttcttcagttaccgcaaatttgcatcaacaaatttgcttcgaacattctccctgatacgccagggaatcatgccctgaacttgatagaaacgcctgtgctttcttgcttctattctgtaccaggattctcccaacctgctttgttgaactaatcgctgccttgatgcaaatgagaccgaacatatttattgtcagaaatatcacaatggtcgatatgttgaactgtgcttgtgtttgctcgat

SEQ ID NO: 3130 - DNA, 1551 bp, Oryza sativa
  ref <308>: DATABASE ACCESSION NUMBER: AK060885
  ref <309>: DATABASE ENTRY DATE: 2001-12-06
ggagaccttttgcccccctcctctcctccgcctcctccacacacgagcgcgtcccccgacgccgcgccgagatctagggttgggcgcgcgcgacgcccccccccgcggcgaggaggatgagcagcccccatggcggcctcgacgaccagatcgagcgcctcatgcagtgcaagcccctccccgagcccgaggtcagagcactttgcgagaaggcaaaagagatattgatggaggagagcaacgttcaacctgtaaagagtcctgttacaatatgtggtgatattcatgggcagtttcatgaccttgcagaactgttccgaatcggtggaaagtgcccagatacaaactacttgtttatgggagattacgtggatcgtggttattattctgttgaaactgtcacgcttttggtggctttaaaggttcgttatcctcagcgaattactattctcagaggaaaccacgaaagtcgacagatcactcaagtttatggattctatgacgagtgcttaaggaagtacgggaatgcaaatgtgtggaaaacttttacagatctcttcgattacttccccttgacagcattggttgagtcagaaatattttgcctgcatggtggattatcgccatccattgagacacttgataacatacgtaacttcgatcgtgtccaagaagttccccatgaagggcccatgtgtgatcttctgtggtctgatccagacgatcgatgtggttggggtatttctcctcgaggtgctggatacaccttcgggcaggatatatcagagcagttcaaccataccaataatttaagacttattgctagagctcaccagttggtcatggagggattcaattgggctcatgagcaaaaagttgttaccatatttagtgcacctaattattgctatcgctgtgggaacatggcatcaatcttggaagttgatgattgcagggagcatacattcatccagtttgagccagccccaagaaggggagagccagatgtaactcgtagaacacctgactatttcctgtgatgtaaaagtggtggactgtctctgcagcaaatgtttgatagctaggtgaagttccctggttgcagatatttttttcccctcgaatctcctgtgtgttattcttactacctttgcccgtggcgcttggctatcgcgagctgctttgctgcatcatgattcaagtgtatacctacagctgggaggattcatcgtgttctcacttatctctaattggctgatgcttggcttgggggctgcagtggtgactcgaagcatcaagtagcaaatttgtattatgaaaggaaaactattctctttgtattcattttgttcgcctttcttccccacaaatttcacctaattttcttttttcttttttcatgatccttgtagagatgaacaatgtagttgtatggctccctgttgagccggtaggtctttctgagtacatcttgatttgccgtacataattgcttgaaaaacaagtattagaattctttgtgaccaacacttgagctccgatttttctttc

SEQ ID NO: 3131 - DNA, 1208 bp, Oryza sativa
  ref <308>: DATABASE ACCESSION NUMBER: AK060886
  ref <309>: DATABASE ENTRY DATE: 2001-12-06
acgatacaacccacacggacacggccacaccacccaccaactgagagctgagcaggcgagcgagcggacatggcagcatcgctccaagccgcggccaccctgatgcagccggccaagctcggcggccgggcctcctccgccgcgctgccatcgcgcccgtcttcgcacgtcgccagggcgttcggcgtcgacaccggtgccgccggcaggatcacgtgctccctgcagtccgacatccgggaggtcgccaacaagtgcgccgatgccgccaagctcgccggcttcgccctcgccacctcagctctgctcgtctcgggcgccagcgcggagggcgtgccgaggaggcttaccttcgacgagattcagagtaagacgtacatggaggtgaagggaaccggcacggcgaaccagtgcccgacggtggagggcggcgtcgactccttcgccttcaaggccggcaagtacaacatgaagaagttctgcctggagccgacgtccttcaccgttaaggcggagggcgtggccaagaacgcgtcacccgagttccagaagaccaagctcatgacccgcctgacctacaccctcgacgagatcaagggcccgctcgaggtcagctccgacggaaccatcaagttcgaggagaaggacggaatcgactacgccgccgtcaccgtgcagctgccgggaggcgagcgcgtgccgttcctcttcaccatcaagaatctggtcgccaccggcaagccggagagcttcggcgggcccttcctcgtgcccagctaccgtggttcgtccttcctcgacccaaagggccgcggtggctctaccggctacgacaacgctgtggcgctccccgccggaggcagaggagacgaggaggagctcgctaaggagaacgtcaagaacgcctcgtcgtcgacgggcaacatcacgttgagcgtcaccaagagcaagccagagaccggcgaggtgattggcgtcttcgagagcgtgcagccgtcggacacagacctcggcgccaaggtgcccaaggatgtcaagatccaaggggtgtggtacgcgcagctcgagtagggaatgaacaaatgttttgtgcgtggccgggttgatatatcgatacatggagagagggaaggaaggctgcaatgtgtgtatctagtaatgcaaactcgatcgggctgttgatggttttaatttttagcttttgtttc

SEQ ID NO: 3132 - DNA, 1585 bp, Oryza sativa
  ref <308>: DATABASE ACCESSION NUMBER: AK060887
  ref <309>: DATABASE ENTRY DATE: 2001-12-06
ctgttcattttcccctcttcccccgctccgctctcgtctccgctctgctctggtctgctctgctgcgagggtgggtgttgcttgtaccgggcggggatggaggcggcgacgatggcgtggacggcggcgggggtggggatggcgctggtgtactggttcgtgtgggtgatgggagcggcggaggtgaaggggaagcgggcggtggatctcaagatgggatccatcacgaacgacaaggtgaaggacaagtacacgcagtactggtcgttcttccgccgccccaaggagacggcgaccaccgaggcctccgccgagaaggtgccggccttcgtcgacaccttctacaacctcgtcaccgacatctacgagtggggttggggtcagtcgttccacttctccccttccctccccggccgctcccaccgcgaggccacgcgcgtccacgaggagcgcgtcgccgacctcctccaggccaagccgggacaccgcctcctcgacgtcggctgcggcgtcggcgggcccatgcgcgccatcgccgcccactccggctccaacgtcgtcggcatcaccatcaacgagtaccaggtgaaccgcgcccgcgcgcacaaccgcaaggccggcctcgactcccgctgcgaggtcgtctgcggtaacttcctctccatgccgttctccgacgcctccttcgacggcgcctactccatcgaggccacctgccacgcgcccaggctgcaggacgtctacggcgaggtcttccgcgtgctcaagccgggcggcctctacgtctcctacgagtgggtcaccacctccctctaccgcgccgacaacccggagcacgtcgaggccatccacggcatcgagcgcggcgacgcgctcccgggtctccgccgccaggacgagatcgcgtccatcgccaaggaggtcggattcgaggtgctcaaggagctcgacctcgccctcccgcccgctctcccatggtggactcgcctcaagatggggcgcatcgcatactggcgcaactccctcgtcgtccgcgtgctcaccatgctccggattgcacccaagggcgtctgcgaggtgcacgagatgctctacgagaccgcgcagcacctcacccgcggcggcgagaccggcatcttcacgccgatgcacatggtgctcctccgcaagcccgtcgagagcaaatagtgcaacaaagtcatcgacgacaacaacaacacctaccttcattcactcaccagcggaagaaacagagggaaaacaacaaaaaaaatctcgcagatcagcagctgaggtaagaagagcagactacctacctggtgaggaggagaggttgaagaagagagtgccttaaaattaagttaaatttgatcgtttagaggagaaataaggatgatgtttattgttactctttcttgttcgtagctaattttgctttcaatttttttggtggaggattttgggttggaaagacaaggtcgggatctcttttaaagtttgtttttcttttcttttccctcttgatcggtggatcgatctactatcagtatcagtaatcagccatgccatgttttgtcgagctcac

SEQ ID NO: 3133 - DNA, 1153 bp, Oryza sativa
  ref <308>: DATABASE ACCESSION NUMBER: AK104359
  ref <309>: DATABASE ENTRY DATE: 2002-08-28
gcagcgatacggcattcgtgacctcccgattgttgccaacccccctcgccttccgattgctgccacccccgcgcctcgccgcttgcccgtctcctgttcgtccctcgggagcgggaggctagggccgacagcagcgttcgcgccggcgcgggattgggttctttgttcttgtcagtgctgtgtttgctcgcaagggtcatcgtgagaatggaccagatttacatggctgctgtcaataacaagacttcattgcctgatgatgagccaatgaagaaaattagtggagatatgcctgtgactgctggaaacgcttgctttgactgcaacatttgccttgattttgcagcagagccggtggttactctttgtggtcatctctactgctggccttgcatctatgagtggctatgtccaggggttggatcgactgccagtaacaacagcagtttggcaaggcgacagtgccctgtgtgtaaggctacactctccccagacatgctggtgccattgtatggtcgtggggggagtctgaagaaatcactgaatggtgtgcccattccacgacgaccaaccgtgcagcgggaggcggttgagcatcaaaacacacacaataacatcgatgatcggcaccatgagaacatggaacccagccctccaccacaaccgctgcggcattcgagccatcattccagtgcaactgaatttgattttatttacccgccatcaccaattgggcgtggcttgatccactcgacggctggtggtgtgcttggggggatggcagtggcggtgctaccatgggcattccgtggccaggtgccaccgagcatgttcatgagtccccactatgtcacggcacacaatatgagctctagagcgaggagacatcagatggaagttgagaggtcactgcatcagatctggttcttcctcttcgtttttgtggtgctgtgcctgctcttgttctgaagcaagatggtggtgtattccttttgtaaatacgggaaggcaagacactaatgggtggatgcatatggtaaaagagggtggttaacactgttggtctgtatcgataagcatgtgcctaaagcatgctgatatagagatgtaatgtgacaagacttaaggtgaaatgcacatttcattcttctct

SEQ ID NO: 3134 - DNA, 1650 bp, Oryza sativa
  ref <308>: DATABASE ACCESSION NUMBER: AK060888
  ref <309>: DATABASE ENTRY DATE: 2001-12-06
gtcttcctcctccctccaccttaaacctcgaggagtcaagaatgggggtggacgctgctccggatcgcatggacgcggcctcttcttggatgaatcctccggttgaggtctcctctccggtggccggcggcggcggaggagaggatggggcagcgaccaagctgcagaaggtgtaccggagctaccggacccggcgcaagctcgccgactccgccgtcgtcgtcgaggagctctggtggcaagcgttggatttcgcgcggctgagccacagcaccgtctccttcttcgacgacccgaaaccggagaccgtagcgtcgcgatggaaccgcgtcagcctcaatgcctccaaggtgggtcagggtttatccagagacggcaaggctctgaagctggcattccagcactggatcgaggctattgacccacggcatagatatggtcacaatctgcatttctactatgatgtttggtgccaaagccaggccggccagccattcttctactggcttgatattggggaaggaaaagatgttgaccttcctgagtgtcccagagctcgcctgaagaagcaatgcataaaatatcttggtccgcaagagcgtgagctctatgaatacatagttacagaagggaagattatccataagcactctggagaaccacttgatacaagccagggtcctaaagggacaaaatggatttttgttatgagcacaacaaagaaactttatgctggcaagaaagagagaggtgtattccagcactcaagctttttagcaggaggtgctaccatagctgctgggaggtttacagcagaaaatggagttatcaagtccatctgggcctatagtggtcactataaaccaagtgcagagaacctcgccaacttcatgaacttccttgaagagaatggagttgatctgaaagaagttgaggtgcgctcatccaccaacgaagactattatgaagatccagtgcctaataaacagaaccctcttgctaccgtcatggaatccaatcctccacaattgattctccctcagaacatgatagaagaagataaggcatctgagccgttttcgcaagctgaaggtgccgaaagcgataacgttcctaaagtgcaaacaaagccaacctaccaaagaaccctctcaggtggtctgaaaagccctagagctgctgatgtcccgcgggaagcaattctcgagagggtgaaatcgaagggagagtcgaaatcctatcagctcgggcacaggctctccctgaaatggagcactggggttggtccaaggattggatgtgtgaaggactacccaatggagctcagaatgcaagcactggagatggtaaacctgtcaccaagggcgtcgactccatcgccgtcatggaggctgccagcatgcctctcacctacacccaacttaccatcatctcctcttggaccaatccagacttcactgccccagccaagttagaatagcatatgagtatgtaactagtatgtgcagcagcgagacaccattgcagaattgcagttaagctcttggtgtagaatgcattggccagagtcagatgctagaggttaatgcctgctgcttttcaaaggttatgtggatctatttgtgccatgaatgaatcaataagattagt

SEQ ID NO: 3135 - DNA, 1051 bp, Oryza sativa
  ref <308>: DATABASE ACCESSION NUMBER: AK060889
  ref <309>: DATABASE ENTRY DATE: 2001-12-06
gttgctacaaacgtggctgcacgagggctggacattaatgatgtgcagcttatcattcagtgtgaacctccacgtgatgttgaagcctacatacaccggtcaggtcggactgggagagcaggcaatactggtgttgctgtcatgctttttgaacccagatataagttcaatgtgaacagaatagaaagggagtctggggtcaaatttgaacatatctctgcaccacagccaactgatgtggcacaatctgctggtactgaagcagcagaagccatttccagtgtttcagacagtgtcattcctgtttttcgggagcaagctgagcaactattgaactcttccgggatgtctgcagttgatctactagccaaagcacttgcgaaggcagttggctacacggacataaagaagagatccttgctgtcttctatggacaaccacactacattacttcttcaaactggtcgatcggtgtatgcagcaggatttgttctttctactttgaaaaggtttatgccagaagagagacttgcagatgtaaagggtataaccatcactgctgatgggacaggtgctgtatttgatgttccttcagcagaggttgaagactatattcaaggtgcacagaacgctgccatggtgactgtcgaggaagtgaaacaattgccacccttgcaagagagggaacagtctggtggcagccgaggtggaggaaggtttggaaacaggagattttctggtggtggtggtggccggggtggaggcggcagagggttcggtggaggcagaggcaggggaggtggcggcggcaacaggtttaacaagaggtactagctgttgctggagcactctcatttttgacctataggttgagccaaggcacagggaatcgccaaaattttgactgcgccatgtatcggttttttgtttatttgttagtgtttgtgtgttcgagattatgatgatcaattttgccatcgcaatagtgtacaatattgatctgatacttgctacatagtaactgttaagaatgaagctatatacttgtttc

SEQ ID NO: 3136 - DNA, 1165 bp, Oryza sativa
  ref <308>: DATABASE ACCESSION NUMBER: AK060890
  ref <309>: DATABASE ENTRY DATE: 2001-12-06
gcgtgtgtagctactgctataaggagcgcgccgtgcaccgcctctcacaatgtcgaccgccgccgccgctgccgctgcccagagctggtgcttcgccactgtcaccccgcgctcccgcgccacagtcgtcgccagcctcgcctccccatcaccgtcctcctcctcctcctcctccaacagcagcaacctcccggcccccttccgcccccgcctcatccgcaacacccccgtcttcgccgcccccgtcgcccccgccgcgatggacgccgccgtcgaccgcctcaaggatgggttcgccaagttcaagaccgagttctatgacaagaagccggagctcttcgagccgctcaaggccggccaggcacccaagtacatggtgttctcgtgcgccgactctcgcgtgtgcccgtcggtgaccatgggcctggagcccggcgaggccttcaccgtccgcaacatcgccaacatggtcccagcttactgcaagatcaagcacgctggcgtcgggtcggccatcgagtacgccgtctgcgccctcaaggtcgaactcatcgtggtgattggccacagccgctgcggtggaatcaaggccctcctctcactcaaggatggagcaccagactccttccacttcgtcgaggactgggtcaggaccggtttccccgccaagaagaaggttcagaccgagcacgcctcgctgcctttcgatgaccaatgcgccatcttggagaaggaggccgtgaaccaatccctggagaacctcaagacctacccgttcgtcaaggaggggatcgccaacggcaccctcaagctcgtcggcggccactacgacttcgtctccggcaacttggacttatgggagccctaaatccgaccgtccgtccgttcagttcgtcagtttacgccaacgcttttgcataagtactacctgaggatatcgtccccgatcatcgatgtgaacgcgtggagtactactacgtacgtaccggatggttcgatatatgtgaatgctgtattaagtaataacaagaaatatatctcctctactttttcctgacgcggagttgtactgcctatgatgcataatttgatcgcagtgtgatcaaaagacatcagctataatgtcttaataatattattatgaagagtttacctttttactacc

SEQ ID NO: 3137 - DNA, 1001 bp, Oryza sativa
  ref <308>: DATABASE ACCESSION NUMBER: AK060891
  ref <309>: DATABASE ENTRY DATE: 2001-12-06
aaaaaccatccaacctcacacagttcacacaaccacaagcttcaaagctccctactacttctcctcctccttcttctccggcgccggcgacgatgacgctgacgatcccggacgacgtgcgggcgaaggcggaggtgtacgtcggcgacgaggccgggcaggagaagacgcggctgctgctggaggagacggggctccccagcggcctcctccctctccgcgacatcatcgagtgcggctacgtggaggagaccgggttcgtgtggctgaagcagcggcggaaggtggaccacttcttcgccaaggccggccgccacgtcagctacgccgccgaggtctccgccgtcgccgagaagggccgcctccgcaagatcaccggcgtcaaggccaaggagctcctcatctgggtcaccctccacgagatcgccgtcgacgacccccccaccggcaagctcacctgcaaggccatcggcggcctctcccgcagcttccccgtcgacgccttcgaggcccccccgccgccgcccaagaacccctcccccgccgccggcgacaccaccaaggtcgatgaggagaagaagaaggaggaggaggtcgccggcgacgccgccgccgccgccattgacgagatcgaggggaagatgaaggagatgaacagcaaggaggtgcaggtgcaggccgagggagtggcagccaagaactgaagaagatcgatcgatcgatatacacagatcatcatacatctcatcatcatcatcagcagcagaagcagcagcacgagatctcactatcatatggagattcagatgagctagtagctgagatgatgagttattattaattaatcgttttatttggttctgaataatctgcatctgcatgcatgcactgctttaaattaattattattaagttgttactacttcttttcttgctgctgttaaacagagagaaaatgatatatatatatggagagatcgacgacatgtattattattgct

SEQ ID NO: 3138 - DNA, 1329 bp, Oryza sativa
  ref <308>: DATABASE ACCESSION NUMBER: AK060892
  ref <309>: DATABASE ENTRY DATE: 2001-12-06
aatggctggattaaggtcatagcgcttccaatcctcctcctccttcctccgctcgccgtcttctcgacgacgacccgcggccaccgccgcgccgccctcctcgccgccgccgccgccgccgtctccgcagaatctgatcgatggcgccgtcgtcgacgtcgtcggagggtgcctccgacgagtggttgccacccagccggcggccggagctggcggacgtggtccccgtgacgcaggacgacgggccccaccccgtggtggccatcgcctaccgggacgagttccgcgaggtcatggactacttccgcgccctctacttcgccggcgagcgcagcgtccgcgccctccacctcaccgccgaggtcatcgaccttaatcccggcaactacacggtgtggcattttaggcgtcttgttctagaggcactggatgctgatctgcgtgaggaaatggattttgtggaccgaattgctgaatgtaacccaaaaaattatcaaatctggcatcacaagagatggcttgcggagaaattaggaccagatattgcaaataaagagcacgaatttacaaggaagatactttctatggatgctaaaaattaccatgcttggtctcataggcagtgggttcttcaagcactgggtggatgggagactgaactacagtattgcaaccagctgcttgaggaagacgtcttcaataattcagcttggaatcagagataccttgtaataacaagttcaccacttcttggaggccttgcagcaatgcgtgactcggaagtggattacacagttggggctattctggctaaccctcagaatgaaagcccctggagatacctcaaaggcctgtacaagggtgaaaataacttgctgatggctgatgagcgcatctctgatgtttgtctcaaggtcctgaaacatgattcgacctgcgtatttgctttgagcttgctgctcgatcttcttcaaattggtttacaaccttcagatgaactcaaaggaactatcgaagcaataaagaactctgatcctgaagcagatgaagcagtagatgctgatcttgcgactgcaatctgctcaatattgcagagatgtgatcccctgcggataaattactggtcctggtacaggaccactatttcttctcaaacctgaagcatgcagtggcctccatgaggtcataatggagatatcttctatcttcgtgtgattctgggcgttgaggtgcctagctacatttgttatgaactttccttgggcataactgatcactgatattactccaatattgtgttcttgtgcatcgtatgttattccagatatt

SEQ ID NO: 3139 - DNA, 1097 bp, Oryza sativa
  ref <308>: DATABASE ACCESSION NUMBER: AK104360
  ref <309>: DATABASE ENTRY DATE: 2002-08-28
catgatgatgcagatcaccaaattcacctgcggcgggttcgtgatggggctccggttcaaccacgcgtcggcggacggcatgggcgcggctcagttcatcaacgcggtgggcgacatggcgcgggggctcccggagccgagggtgaagccggtgtgggacagggagaagttcccgaacccgagcatcaagcccggccccctgccggggctgccggtgctggcgctcgactacatcgtcctcgacttccccaccggctacatcgacggcctgaaggcgcagtacaaggcgcacagcggcaagttctgctccggcttcgacgtgctgacggcgaagctgtggcaatgccgcaccagggcactcaacctcgagcccggcgccaccgtgaagctctgcttcttcgccagcgtgcgccacctgctgaagctggacagggggtactacggcaactccatcttcccggtgaagatgtcagcgccgagcgagacggtgctgtcgtcgtcggtgatggaggtggtggacatgatccggcaggcgaaggagaggatggcggtggagttcttccagttcgccaaggaggagacggagcaggacccgttccagatgacgttcaactacgagtccatctacgtctccgactggagcaagctcgggttcgccgaggtggactacggcttcggcccgcccaagttcgccggcccgctcgtcaacaacgacttcatcgcctccgtcgtcatcctcaaggcgccgctgccgctcgacggcacgcggatgctcgccagctgcgtcaccaaggaacactcggaggagttcgtccgcggcatgaaggaggacctgccatgaactgagcaaatgaggtgatgagctttttttcttttgttacttgaagctgctgcttgtgagctgaagtgaagggcttcttctaatagggaggggaacacatgctggtgaaaaatgatgttgttgtaagaggcgtattttgtttgtatttatttgtttctttactcttggttaatacggattcgagttatgttcttagacagtttaatatttgtaccatttgatatgggaataaaagaaaagatatactctccatttg

SEQ ID NO: 3140 - DNA, 1099 bp, Oryza sativa
  ref <308>: DATABASE ACCESSION NUMBER: AK104361
  ref <309>: DATABASE ENTRY DATE: 2002-08-28
aaaaaagagagaaaaaactcactgcatcgcctccgcctctcgccgccatcgccgcgatgaagctggacgtctccgccatggagaacaacttcgccgcccacgccgccggcggcgaggacgacggcggcctcttcggcgccggcgccgacctgcccgccatggagctccccacctgccccgccgacttcgacgggttccagaaggagaccaaggagatgctgaagcacaagaagggaacgaccacgctcgcgttcatcttcgacaagggcgtcatcgtcgccgccgactcccgcgccagcatgggcggatacatatcttcgcaaactgtgaggaaaattattgaaataaatccgtacatgcttggaacaatggcaggaggtgctgctgattgtcaattttggcataggaacttgggcatcaagtgccgactccatgagctcgcgaacaagcggaggatctctattgctggtgcttcaaagcttttggccaacatcctgtactcctaccgtgggatgggactgtcaattggtacaatgattgctggatgggatgagaagggtcctggcttgtactatgttgatagtgagggcgcaaggctcatgggaagccgattctctgttggatcaggttctctgtatgcctatggtatcttggacgagggttaccgctatgtgatgccagttgaggaagctgctgagttagcaaggcgggctatttaccaagctacattccgtgatggggcaagtggtggttgtgttagcgtttaccatgttggcccgaacggctggacgaagctttctggagatgatgttggggagctgcactacaagtactacccggttgaggccactcctgtcgagcaggaaatggccgatgccccagctgcttaaacctccctctgcccaatctggcgcatggtatccagggctgtgaactgtagaagcgcccttgtctatgaacttgtttggacatgtttctctcgtcgatgttgagagatctcttttgagatcagctgatgtttctcattaactttacgctactgctaccgcaaatgtgattgtagactcgtatagatgctttttattcatgtttcctttac

SEQ ID NO: 3141 - DNA, 1426 bp, Oryza sativa
  ref <308>: DATABASE ACCESSION NUMBER: AK060893
  ref <309>: DATABASE ENTRY DATE: 2001-12-06
gcgtcgactccactctcgcctcctcgcgactcggagttcaccgccgccaccgcctccgccgccgatctccccgtcccgccgcgccgccgccaccgtcctccctcctccggccgcatccccggaattcagaaccagtaggaggaaatggctgacggcgaggacatccagccccttgtgtgtgacaatggaactggcatggtcaaggctgggtttgctggggacgatgcgcccagggctgttttccctagtatcgtggggcgcccccgtcacaccggtgtgatggttggtatggggcagaaggatgcctatgttggtgatgaggcgcagtccaagagaggtatcctcaccttgaagtacccgatcgagcatggtattgttagcaactgggatgacatggagaagatctggcatcacaccttctacaacgagctccgtgtcgcgcccgaggagcaccctgtgttgctgactgaggccccgctcaaccccaaggctaacagggagaagatgacccagatcatgtttgagactttcaatgtgccagctatgtatgtcgccatccaggccgtgctctccctgtatgccagtggacgtacaactggtatcgtgttggactctggtgatggtgtcagccacaccgtgccaatctatgaaggatatgcccttcctcatgccatcctgcgtctggaccttgctgggcgtgacctcactgacagcttgatgaagattcttactgagagaggttactccttcactaccactgctgaacgggaaattgtaagggacatcaaggagaagcttgcatatgtggcccttgactatgagcaggagctggaggctgcaaagagcagctcatctgtggagaagagctatgagctgcctgatggacaggtgatcaccattggggcagagaggttccgatgccctgaggtcctcttccagccctctttcatcggtatggaagctcctggaatccatgagaccacttacaattccatcatgaagtgtgatgtggatatcaggaaggacttgtatggtaacattgttctcagtggtggatcaaccatgttccctggtattgctgaccgtatgagcaaggagatcactgccctcgcaccaagcagcatgaagatcaaggtggtggcaccgcctgagaggaaatacagtgtctggataggagggtccatccttgcctcccttagcaccttccaacagatgtggatctcaaagggagagtatgatgagtcgggtccagcaattgttcaccggaagtgcttctaagctctggctttttaatcgcttatctacaaggcagtttcttttcagttttcacaagcccttgtcatgtaagctactctgtttgggattgttggtgtcctatcagaatgttgttggatttgtttcatggctgaatattatgcaccttctg

SEQ ID NO: 3142 - DNA, 1074 bp, Oryza sativa
  ref <308>: DATABASE ACCESSION NUMBER: AK104362
  ref <309>: DATABASE ENTRY DATE: 2002-08-28
agcttctcgggaaggaggagggaacggagatcggaggcggaggctccaagaaagcagcaagaaagtgcgaaaatctgaggaggaaggagaagggaggttgaatcgatcgatcgatggctcggcggccggcgccgtgggagcagggcggcgacgagtacgactacctgttcaagatcgtgctgatcggggactccggcgtggggaagtcgaacctcctctcccgcttcacccgcaacagcttctccctcgactccaagtccaccatcggcgtcgagttcgccacccgcaccatccaggttgaaggaaagattgtaaaggcacagatatgggacacagccgggcaagaacggtaccgggccatcacaagcgcatactaccgcggcgcagtgggagcattgctagtctatgatgtcacaaaggccacaacttttgagaatgtgaagaggtggctcaaggagctccgtgaccatgccgactccaacatcgtcgtcatgctcatcggcaacaagatcgacctcaagcatctccggtcagtgtccttggaggacgcaacaagctttgcagagagggagggcctatccttcgtcgagacctcggcgctcgacgcgacgaatgtggataaagcttttcagacagtgctcactgagatctaccggatcatcagcaagaaggcattggctgcagatgaggctggagctggtgctggtgctgtcagagagggccaatctatccaagtctccgcgacagattccagcagttttacatcaagatgttgctctttctagtggccatcgatatcgtttccattggattgcttgaggtgatcctatttgtaattgtcaaaatgtggtgtcatgcaacaagaataaaggattacattcaggagatgaagatttttcattctgtacataagagtaacatagtacagccgcttcgacaatttggatctgaatatcataaactcgtgctatgcatgggtgatgcagttgctgttatactattgccaaaattgaaatattttgtcctactactgtgaaactgtggtacaacataaagtaagtcttgctatgtgtc

SEQ ID NO: 3143 - DNA, 1360 bp, Oryza sativa
  ref <308>: DATABASE ACCESSION NUMBER: AK060894
  ref <309>: DATABASE ENTRY DATE: 2001-12-06
cccgactccaccgaccccccgccgagctttctcgcctcccgcgaagtcgccaccgcgcgctgctcgtccgtcgtcgccgctgcatccgcctcctcctcgtcctccctacggccgtagggtgcggcggcggagggggcgacgatgccacgctgcggagccggaggtccctgcgtgtggatccgggccctatcccagccgcaacgccacgggaggaagccatggcggggcgtgagggtcgtcgtgctgctgctgcacgcgctgttcatcggcgccgtcttcctgctcgatccgacgctccagaggcaaatccacgaggccaagtggtacataattctatatgggttgctggttttacttaccttggtacaatacctatatacagccacttcttctccaggatatttacctgatatgttgacagctggctcaaggatgcatgcaacctttattaatacaacaactctctcaaagcaggccaattccaaaagtggaagcttaaactctgccatgagtcgcagcaaaatagatcagcaaaatccacaatccactacagctttgttactacagcagacgatggatctatatcctcctgggacatccaccagggatttcacatgctcttactgccggctcatccagcctccacgcaccaagcactgtcatgactgtgataaatgtgtcctccaatttgatcatcattgtgtttggcttggaacatgcattgctaaaaggaactactgcagattttggtggtacatattcgaacaaacagttttaactgtctggactgttgctttctacattcagttcttttatttgggcatcgttgtatcctggtggaagtttgctattggtattgtacttttggtagcattgatattaatcctcgtggtcctgctgcccttgttgatattccatgcttatcttgctcttacgaaccaaacaacatatgaaattgccagaaggaagcggatttcttacctaagggaggttcctagcagggttcatccattcagcaaaggcatttgcagaaatctgtatgatctttgcatctctaaacagaggggattttttctggaagcagtgcccccgctggaggtactacaagccagagctagaccttacacatgccgagatgtaatctcctgccggtgctgttaggagcttggtatatgctctatatctggactcactagtttagtgtaatgcaaataatatggtagctataatttgtgtctcatttttcatgtacagtgtatgcgcatttttctcctagaaaatctggattgatcgatatccataccttgatctgagtatgctcaaatctggatttttttttcttatgcatttgtagattcag

SEQ ID NO: 3144 - DNA, 1329 bp, Oryza sativa
  ref <308>: DATABASE ACCESSION NUMBER: AK060895
  ref <309>: DATABASE ENTRY DATE: 2001-12-06
ttgtttactacccacagcgtcaagctccaggcattcaggatacacaggggcagcaagtacaaccagaggtgcagtacttgccagtaaggccttcagcaacgcaagatgttcctgtccatgcttcatctcaacagtctcaggcagcaaatcaaacccagcctcagtctttccctccctaccagcagcagtggccccagcaatcttcccagccggctcctgcaccagtggcccagccacagccgactttctcgcagccatttcctccacctgtgcagcagccccaattatctaacactcagcagtttcctccacaaccaatgcagcagccccaactatctaacactcagcagtttgctcctcaaccagtgcagcagcctaatgttcaacagtttcctccgccaccagtgcaaccgcagcaatctaacactcagcttcctcctcaggcaatgcaaccacaacagcatcctcctgtacaaaatcagatgaggcctcaaactccaccaaactaccctcattatcaaccccaccagtccttgaaccctccccctgaaactctacctggcagcatggctatgcaaggaccatacaacacggttgctccggcagcggggagccgttctgaagtgccatattcatacggaggacctggcatgccaccaccgcagcacaacatgcaaaggcagcagctacctcctccaagccagggctctttcggacctccaagtaaggggggctatgccggcccgccacaatatgcgccgcagggcagctcacatggctacaacactgcatatggctaccccccaagtggtccttcagcagcccaggcacctcagatgcctccagctccaggtaatgttggtatgagtcacccaggttcgcatcagatgatgcgcggccatccttatggggaaatgattgagaaggcaatcaccatgggatatcccagggagcaggtgatgaatgttattcagaggatgaccgagagtggccagccgatggatttcaacacattgctggaccggttgaacgaagcagggtccggagcaccccctcgtgcgtggtgatttcgtcctgggttgggtttggacctctctccatcccggcacggcgctcatacgtgtgcaaagagtggtactatcgtgtagtagttgaataaataagatttgaagtgatgccatctgttgactgttgcgtatttgtacgatgtacatattatacattgatcttaatcttcatgtacttcctgcacgtgtaccaccaacttctttgcaattggaccatttcagcagatctgtgctaatccaaattattgccaggtatattgtc

SEQ ID NO: 3145 - DNA, 1076 bp, Oryza sativa
  ref <308>: DATABASE ACCESSION NUMBER: AK104363
  ref <309>: DATABASE ENTRY DATE: 2002-08-28
acacaaaccacaaacccgcatcgtctcctcctcctccacttgttgttcaattccccccccccctctctctctctctctctctccgtcgcagatctcggcaagggggcaacaaggtaggaggcggcgatgggttcggcgagccgcgcggtgtcgtgcctgtgctgcccgtgcaagtgcctggcgtgcggcctcttcagctgcctctgcagcatcctcatctccctcctcgtcaccctcggcgtcctcgccctcatcttctacctcatcttccgcccccacatgatcgccgccaccgtcgactccgccgccctcacccagttcaccctctccaccaactccgccctcgcctacagcctcaccgtcgacctcaccgtccgcaaccccaacaagcgcgtcggcctctactacgacaacgtcgagtccctcgccctcttcgacggccagcgcttcggctacgcccccctcgactccttctaccagtccaccgaggcatccaccaagctctcccccgccttcaagggccagcagccgctccaaggcgacatcaccgccgccaacttcaggtcgcagcagaccgccggcaagttcgacatcgaggtcaagctcaacgccaagctcagggtcaaggtctgggccttcaaggttcccggacccaaggccaagatcagctgccccatcaccgtcccagcgtccgcccccaacgcccccgcattccagcgcaccgactgcaaagtctggttctgatttcgatggttggttccgcttcgcatttggggattactattagccagcactgcttccagtatggacggatggattcttttgtttctttcgatttgttgatgagggattagctcgccggatgttgctgtacatcgctgtggtttaggtggttacatatcttctagcccttgtagctagcgcttgtcatgcacatattatcgatccatgtcttgttcttcttagttttttcccctttcttttgggtacggcttacttactgctgttcagatcatatatgactgtatgttggttgatacattcagagattttattcaggatcacctattacttct

SEQ ID NO: 3146 - DNA, 1218 bp, Oryza sativa
  ref <308>: DATABASE ACCESSION NUMBER: AK104364
  ref <309>: DATABASE ENTRY DATE: 2002-08-28
acgctgctagttgtagcacgcacgctgtcgctgacgctgctgttccgccatggcgttgatgatgagccttcgcttcgcccccccagcgtccgtcgctgctccgccgccgcgacgaccacgagctgttgcctcttcggcgtcctctccggcactccaacgccgccgcccgcagaacgtccccggcgacttcttcgtcgatcaccgatgcatcgattgccagacctgccgctggatggcttcggaggtgttcaagagggtggacggaaaagccgccgtcgccgcgcagcccatctccgacgaacacaggaccaaggccctgcaggctctgctctcctgtcctacttcctccattcacaccgagaaacctgcaaaggacattcttcaagtgcaaaacatgttcccgctccccatcgacaatcatcttctccctggtgtttacctctgtggctatcattctcaagattcatatggagcaacttcttatcttttaacccatccagatggaaacatactagttgacagcccaaggtatacaacgaaactggcagagaacatcgaaaaacttggtggagcacgctacatgtttttgacccacatggatgatgtcgcggatcataggaagtgggctgagcggctaaaatgtgagaggatcatccattcgggcgatgtagaggatgttactgcagatgttgagtggaaacttactggaaatggcccatgggacattggagctgatttcgaacttatccataccccaggtcatactgaaggttcagtctgcttattctacaaaccagtaaaggcgcttttcactggagatcatgttgcaaaatcagaagaatctgatgatttagatctctttcttatgtacagcaagcaatcagtgggcttgcagctggacagcatgagaaaattgttgaagttagacttcgagtggtttttacctggtcatggctatcgaatccattataaagacgtacgtgctaaggattcagcaatcgagtccctcatagctaactacacaagctaggagcgtattataattctctctaccttcattgtgtataaataacgaccgattctggaatgaaggggcaagagagaatgcacttgccattttgtcagcgagagtggcacttcatatccttggaagatgatggtactgtttttgcttcacgacatttgcaatatatcaagtcgaaaatgtcattgatgcac

SEQ ID NO: 3147 - DNA, 977 bp, Oryza sativa
  ref <308>: DATABASE ACCESSION NUMBER: AK060896
  ref <309>: DATABASE ENTRY DATE: 2001-12-06
actcaacccaagcatctctcttcttcactagctacttctccaagttgaagagatcaaagctagaatgggcagctgcaagattctcctggtcacagctctcctggtcggcattgcctcccagcagagctctgccaccaggaacctgcacggagatcatcacgtcgcggaaaagaagttcggcggcggcggcggcggctacggtggcggtggcggtggagggtacggtggcggtggcggcggcggcggctactcaccgtcgcccacgaccggtttcaccgggagctgcgatttctggaagagccacccggagaagataatatcgtgcatcgggtcgctggggagcatcgtggggtcgttcggggacgtgtgcagcggcttcttcgggagcaagctgcagacgctgcaggacgcgctgtgcagcacccgcaaggactgctacggcgacctgctccgggagggcgccgccgcgtacatcaactccgtggccgccaagaagcaggccaagttcgcctacaccacgcagcaggtcaagtcctgcatcctcctcggcctcacctccaaggccgccgccatcgagcaggccgccttgttcaagaaggccaacctcgcctgccactacacctagctacccatacctcgccgccggccggccatctctccggccatctctctctcttagctagttggtagctagtgtcgtcatggtgttgatgatgaataagtccttgcatggatgcgtcgtggcaaaccatgcgtatattattcaagaattgtgtgagtgttcagatctgacctcagctgtggcttgtgtgcgtttgcagttaaattgatgaggtgcacggcgccacgacgacgtctcgtcgtcggtgcttagttgcatgctttgtttgcttttcttagtttcttggcgatgtacttattaagagaataagatgagtttgatttggttagtgatgaactggtctctgcttttacct

SEQ ID NO: 3148 - DNA, 1765 bp, Oryza sativa
  ref <308>: DATABASE ACCESSION NUMBER: AK060897
  ref <309>: DATABASE ENTRY DATE: 2001-12-06
aatatatttgcttccaccgaggcgcagagcggaggagagtgacgagctgacgcacgcggcgcggcggaccagctcaatttgcctgccgctcctcgtcttccggtggggcggaggagggggacgccgggcgggcgggcgctcgcattccggagcggggagcgcgagctcgatcgggcggggatatggcggtggggggagccgggagctccagatccgtggcgccgtgctgctgctgcgccgtgctgctcgcggcggcgctgctcttctccgcgccggccaccacagaggcttatgatgcgctggatccaaatggaaacatcacgataaaatgggacgttatgtcgtggactcctgatggctatgttgctgtggtcacgatgttcaactatcaacaattccggcacatccaggcacctgggtggcagctggggtggacatgggcaaagaaggaggtcatttggtcgatggttggagcacagaccactgagcagggcgattgctcaaagttcaagggtggcacgccccactgctgcaagaaggatcccacagttgttgatctgcttccgggcaccccatacaacatgcaaatcgctaattgctgcaaagctggagttataaatacatttaaccaggacccatcaaatgctgcttcttccttccagatcagtgtaggtcttgctgggactaccaacaagacagttaagttgcctaagaacttcactcttaaggccccaggtcctgggtacacgtgcgggcgtgctatgattgtcaggcctactaagtttttcaccggggatgggcgcagagcaacccaagctctaatgacatggaatgtgacctgcacatactcccaatttcttgctcagaagactccttcctgctgtgtatctctctcatcattttataatgacacaattgtgaactgcccaacatgctcttgtggctgccaaaacaatgggacaagtcctggaagctgtgtaaatgagaattcaccttatttacaatctgccattgatggccctggcaaatggaccggtcagcctcttgtccaatgtacttctcacatgtgcccgatcagaatccactggcatgtgaaactcaactataaggaatattggagagtgaagatcacgattacgaacttcaactaccgcatgaattacacacagtggaatttggtcgctcaacatcctaacttcaataatatcacccagctgtttagcttcaactacaagccacttactccatatggaagcaagataaatgatactgcgatgttctggggagttaagttctataacgatttgctcatgcaagctggtccacttggaaatgcacagtcagaacttcttctgcgtaaggattccaaggacttcacctttgacaagggatgggccttcccacaccgcgtgtacttcaatggtgataattgtgtcatgccacctccggatgcatatccatggttgcctaatgcaagtcctctgacaaaacaaccattgacactctcggttttggtattttcgattgtgttggctactttgctggcttatgcatgatgagtgaaaccaagaaattcggtgagcttcaagttgtcaggttccatggtgtgcactgcaacagatcatttgttcattcagttccacggttgcatagaagagaagatgtcacgctgaggaaagctgatatgtgtgtgtgtgttgtatgttaaaagaaggccaaaatgtatttcttttttggtatatatactggccacagcattttggtg

SEQ ID NO: 3149 - DNA, 987 bp, Oryza sativa; identical to SEQ ID NO: 2123
  ref <308>: DATABASE ACCESSION NUMBER: AK104365
  ref <309>: DATABASE ENTRY DATE: 2002-08-28

SEQ ID NO: 3150 - DNA, 1298 bp, Oryza sativa
  ref <308>: DATABASE ACCESSION NUMBER: AK060898
  ref <309>: DATABASE ENTRY DATE: 2001-12-06
gtcttgtcgccgcttcgggctttcgtctccaccgccttgatgccgccccgggagcaggagtagcggctcatcgccaactacccttctccgtcggagcgtgcgtcgtcgtcaccggcgatccccacccacctcctcactgcgccgcctcgccgtccgccccttctccaccttgccctcaacccgccacagatccctctccctcccttcctcgtccccggccttcctcgccgcaaacactgccccctcttctccgctttccttcctcctctccacctcagccgccggccacgatctcagccgtgatctggaagaggctcttcttttaatttcagagccttaaccttaatacaagtaacagtttgggggttcaactgaacccccatgtcccaagttggatccgcccctgctcccatggtgacatcccatgaagatgctaagaaggcgtatgctgatttcgagaagaaggtcaagaggaccatctatattgatcatctttcccctcaagtcacgagctcagtacttaaagcagcccttgcccaatgtgcaaatgttgtcgatgtggagttcattgttaattacacaatcccgtatgacattccttctgctgcattggtggaattggatgacgaaatacaagctaaggctgcactagacttgatgaatgatttccctttcataattggcgggatgccaaggcctgtaagagctacatgtgcaaagcccgacatgtttcgggaacgccctccttgccctgacatcaagaaagagttccggtgggtaaaacaagaagatggaacagagtatgaaggaatgaagaaattgaggatcctagcaaaaaggcaagaagcagaaaatatggcactcataaagaatcaattggaagaggagaaggagctggcaaagcagcagcaggaattactcgatggaaattacaagaagtacgacatgctggagaatgtcgtacagaacggaaacatgaagagcctagctcagcattatggagtcagcctggccgatgagttttgacaattcaatccatgagctgctcgctcactaataagtccggtctagttcccggtgcagcaacatgcctaataacctttctctctctctctctctctctctctttctctctctctctaggcctttagggcagtgataaatcatgtcaatgtgtgagatgaaataataattgaatgactggtttgaggcacgcattaggcgtgatcaaaggcatatcctctgtgtaaagatagttgcctgcctgctataatttatctggaggggttattgacaac

SEQ ID NO: 3151 - DNA, 1239 bp, Oryza sativa
  ref <308>: DATABASE ACCESSION NUMBER: AK060899
  ref <309>: DATABASE ENTRY DATE: 2001-12-06
gaaatggaatgaattgaaatgcagcactggttcaaggacatgaggttcagcaccaaggtgaaggacggggagggcatgccggcgttcgccctcgtcaacaaggccaccggactcgccgtcaagcactccctcggccagtcccaccccgtgaagcttgtgccgttcaacccggagtacgaggacgcgtcggtgctgtggacggagagcaaggacgtcggcaagggcttccgctgcatccgcatggtcaacaacacccgcctcaacttggacgccttccacggcgacaaggaccacggcggcgtccgcgacggcaccaccgtcgtgctctgggagtggtgcaagggcgacaaccagagctggaagatcctcccctggggccccgaggctcactcctcctcccccggcgccgccaccgcctgcaccatcggcggcgcccccgtccacaccgtccgcgtcttctccgccgcaggcgaggactactgcctcaccgtccgcaacggcaccgcctgcctcgcccccaagacccccagggacgactaccagcactggatcaaggacatgaggcacagcaacaagatcagggacgaggaaggctacccggcgttcgcgctggtcaacaaggtcaccggcgaagccatcaagcactccaccggacagggccacccggtgaagctggttccctacaacccagagtaccaggacgagtctgtgctgtggacggagagcaaggatgtgggcaagggcttccgctgcatccgcatggtgaacaacatctacctcaacttcgacgccttccatggcgacaaggatcacggcggcatccacgatggcaccgagatcgtgctgtggaagtggtgcgagggtgacaaccagcgctggaagatcctcccctggtagattccggggagggggagctgcattgcattgccatcgtcgtcgcgtctgctctgcttctactctagctaataatttgatcgatctgctaccgaaataagaccgtgttcgttcgttcgatcgatcggagtatggcagtcaatggtgtccgtccgtcctcgagtttgtgtcagtgtgtgtccttttgcgagccagtgattgctatgagatgaaacagtgggtgatgtaagtgcaggaggaggggccatatgattcagaaatctgatgcaactcatcttgctttcccctgtactctctacttttcgtatgcctaatgaatgaattatgaatggctcatttgtctcg

SEQ ID NO: 3152 - DNA, 1776 bp, Oryza sativa
  ref <308>: DATABASE ACCESSION NUMBER: AK060900
  ref <309>: DATABASE ENTRY DATE: 2001-12-06
gtgcgaatgaaaagatttcaagaaatccaaccaaaaatctcgcgctctcctctcctcctcctccgcatgagctcatcggcgttggcgttggcctgtcgtctccgggaggagtagtgcaggcggcggcggggaattccgaaacggagtttgttcgttttggagcggagtggtgaggtgagtcgtcgagatgggggagtgcaaggtgggaggaggaggcggaggcggagactgcttgatcaagctgttcgggaagaccatccccgtgccagagcccggcgcctgcgccgccggcgatgttgataaggaccttcaacacagtggcagcagcacgactgaaccgaaaactcaagagaacaccgttcaagactccacaagtccacctccgcagccagaggtcgtcgacaccgaggactcttcagctgataagaactcatcagagaatcagcagcagcagggcgatacggccaaccagaaggagaagctgaagaagcctgacaagatcctgccgtgcccccggtgtagcagcatggacaccaagttctgctactacaacaactacaacatcaaccagccgcgccacttctgcaagaactgccagaggtactggacagcgggtggtgccatgcgcaacgtgcctgtgggtgcaggccgacgcaagagcaagagcgtatcggccgcttcccatttcctccagagggtcagggctgctctgcccggtgatcctcctctctatgccccagtgaagactaatggcaccgttctcagcttcggctccgacctgtccaccttagacctcacagaacaaatgaagcatctaaaagataagtttatcccaacaaccggtatcaagaacaccgacgagatgccagtcggtttgtgtgctgaaggattgtcgaaaacagaagaatcgaaccaaacgaacctaaaggagaaagtttcagcagatagatctccaaatgttgcacaacacccatgcatgaacggaggagccatgtggccatttggcgtggcaccaccacctgcttattacacttcaagcattgcaattccattctatccagctgcagcagctgctgttgctgcatactggggctgcatggttccaggagcttggaacgctccatggccaccgcagtcccaatcccaatcggtttcatcatcaagtgctgcttctccagtatccacaatgaccaactgcttcagattaggaaagcaccctagagatggtgatgaggaactggatagcaagggtaatggcaaggtgtgggtgccgaagacggttcggatcgacgatgtcgacgaggtggccaggagctctatctggtcgcttattgggatcaagggtgacaaggtgggagcagatcatggcagaggatgcaagcttgcaaaggtttttgagtcaaaggatgaggcaaaggcatcaactcacacagcgatcagcagcttgccattcatgcaggggaacccggctgccctaacacgctcggtgaccttccaagagggatcttgacttgaacaacgccttggaaatttttatgctgccttctgctgctataaagacatagcgtgatacagctgaaattttgtacattagaggattgtaaagtaggtatgggagatggagtgtcagggtgtataacttaacatagctacaagcaagcccagtagctgtattagataacttgtacatagctatgtgggtttgagaaagatagggagagcaagttccccttataatatgtagataaataatataatgatttgaatatttagatc

SEQ ID NO: 3153 - DNA, 1060 bp, Oryza sativa; identical to SEQ ID NO: 2120
  ref <308>: DATABASE ACCESSION NUMBER: AK104366
  ref <309>: DATABASE ENTRY DATE: 2002-08-28

SEQ ID NO: 3154 - DNA, 1364 bp, Oryza sativa
  ref <308>: DATABASE ACCESSION NUMBER: AK060901
  ref <309>: DATABASE ENTRY DATE: 2001-12-06
ttcgccgtctcctcctcctctttcccttcctccgccgctccatcaaaaaatctccacaaggcttaagcagagggagggtgagggattagaaacaaacaacccttcggagaaaatcacgagaggcttcccgagggcaaagtctccgattcattcaggtccgactcgatcggcgatccgacgaagctcgagcaggtgagggagacggactcggactcggagcacggaaccggtatattagggaggctgaagagggagcttgagagggggtctagccttaagctcgaacgcggggtggtggttgtaccagcagcagcagggaatcatggactcggagcactggatctcgagcctcgccgccgccaagcggttctacgcggcgcagctcggtcacgtcgacgatatggcggggattggaatggaggaggtggagatggagatggaggatgatggcgagggcatggagctggagctggagatgcagctggaggaggcgacgtggccggacgtggcctgcccctactgctacgaggaccacgacatcgcgtccctctgcgcccacctcgaggaggaccacccctacgagccccacacctcgccctgtcccatctgcttcgaaaagattacaagagatatgttaaatcatatcaccatgcaacatggttacttgttcaagagtggtcgcaggatgcgcagattcgatattcccgagagccaggcactttctttactgagccgagatctgcgggatgctcagttacaggcacttctaggaggtggtcatcgtcagcgaagaagcaacactactgccacaaacatttctgctgatcctctgctttcttcgtttggcctgggcttctcaacattggattcagaggaacgatcaaaagcaccagttcctattcctgatgatacatcaattcataaggatactcctgctcagccatgggaatcaaggatcgactcatcgctcacgagtgaggaaagggaacaaaagcggaaacaagccactgacagagcaacctttgtgcaaggcctggtgctctccactttatttgaagactgactgttcaagtagccctagtttttcttgctagatgcatgtttcctctcgctggttcccataaaagcgcaatgttccacctgatttggtgaatctgatttcgtcaacagtgagatggatgtgcttctggtgccccgttgttctttcgcttcagtaaagcgcgaagttgatttgggcatgatacacaccttaatttatgtcagctgccctgtaccattgctttttatgaattaacgggtagccacaccttgactgtaactcgttgttgtacctctccatactgtctaggaacattggtttgtac

SEQ ID NO: 3155 - DNA, 1059 bp, Oryza sativa
  ref <308>: DATABASE ACCESSION NUMBER: AK104367
  ref <309>: DATABASE ENTRY DATE: 2002-08-28
atcacaagcacccacaccaaccaaagatgagcaacaccaccatggctatttccaccatccttctcttcctcctcgccggcctcgtcgccgcccacggcgacggcgacaccatgatccgtctcccaagcgacggcgccgaagcaccaccacgcccgcccaaaccctgggactgctgcgacaacatcgagatgtccccgctcgagatcttcccgccgctgtaccgctgcaacgacgaggtgaagcagtgctccgccgcctgcaaggagtgcgtggaggcgcccggcgacttcccccgcggcgccttcgtgtgccgcgactggtactcgacggtggacccgggccacatgtgcacggcgccggatcagccgacgacgaagaggccgtggaagtgctgtgacagcatcgtgcagctgccgcagaggatcttcccgccgttctggcgctgcgacgacgagctggagcccggcaagtgcaccgccgcgtgcaagtcgtgcagggaggcgccggggccgttcccggggccgctcatctgcgaggacgtctactggggcgccgacccgggccccttgtgcacgccgcggccatgggggaaatgctgcgacaaggccttctgcaacaagatgaacccgccgacctgccgctgcatggacgaggtgaacaagtgcgccgccgcgtgcaaggattgccagcgtgtggagtcgtcagagccgcctcgctacgtctgcaaggaccgcttcaccggccagcccgggcccatgtgcaaaccccgagcggagaactagctagctacagatgatcgatgatcgatctgtgtgtccatcaataaaactcgccctagcttgcagctagctgatcgttcgttcgatcattcagagttggtatagctagaggctagagcttagctccatccagatttttcagtgctctgcagcttttgtgcatcttgcatgctttgttagtttgtgtgctccatgtgtgtgggtgtgtttaatttgtccctgttcgcttgtgtggaccaagagggaaaataaaatatatatgcaacgcaagcatgcaccc

SEQ ID NO: 3156 - DNA, 1034 bp, Oryza sativa
  ref <308>: DATABASE ACCESSION NUMBER: AK060902
  ref <309>: DATABASE ENTRY DATE: 2001-12-06
attcctcaggtttcccctcgccgacgcctccatcgccctccgggctccgcctccgccgccgccgccatggggagaaggcctgctaggtgctaccgccagatcaagaacaagccgtaccccaagtcaaggtactgccgtggtgtccctgaccccaagatcaggatctatgatgttggcatgaagaagaagggcgtggatgagttcccctactgtgtgcacttggtgagttgggagaaggagaatgtctccagtgaagctcttgaggctgcccgcattgcttgcaacaagtacatgaccaagaatgcaggaaaggatgccttccacctaagggtcagggtccacccgttccatgtccttcgtatcaacaagatgctctcgtgtgctggggctgataggctccaaactggaatgaggggtgcttttgggaagcctcagggtacctgtgctcgcgtggacattggtcaggttcttctttctgttcgttgcaaggagagcaatgctaaacatgctgaagaggcactccgccgtgccaagttcaagttccctggccggcaaaagatcatccacagcaggaagtggggcttcaccaagttcacccgtgaggagtacgtcaagttgaaggctgagggcagaattatgtctgatggtgtcaatgctcagctgcttggttctcatggtcgtcttgcgaagcgtgcccctgggaaggcgtttctggctgagaccattcaagcttccgcctagatgcctcttgctgaatggaacttgagagattttgctttagctagtctaattttgcatgctagaactcatgttttaagaattggttgtcttcaggatgatctatttttctgtaatagttccttctgtaggccagcttgatatggaggttttgcatatcatcagtaccttgtttgaatttttgctacatatcgttatcccaaagctatatctcagttggattgtgaagctttattaattcataaactcgcctgcgtctttacatctcataatgtagtgatatgcccattttggtt

SEQ ID NO: 3157 - DNA, 1080 bp, Oryza sativa
  ref <308>: DATABASE ACCESSION NUMBER: AK060903
  ref <309>: DATABASE ENTRY DATE: 2001-12-06
agtagtagctatacagaaagcaaattaattaagcatccaaaatggcttcctccccaagcacagtatttcttgtactgtccctaaccctagccaccgtctccgtcgtcgtcgtctccggcgccggcgaagcgccaagcccggcaccgacggggcccctcaacctgacggagatcctgacgaaggccgggcactacaacaccttcgtccggctgctcaaggacacggaggtgacgtcgcaggtgagcagcctgctgaacaacgaccggaacggcgacgggctgacggtgctggcgccgacggacgccgcgttcgggcggctccggccggggacgctcaaccagatggacgcgcaggcgcaggcggagctggtgctgtaccacgtcctccccaggtactacggcttcgtcacgttcgagaccaccaccaacccggtgcgcacccaggcctccggccagcgcggcgtctgcaccgtcaacgtcaccaccgccggcgaggacagggtgcgcgtctcgtccggggtggtggaggccgagctcgggaggccgctccgcgacggccacccgctcgccgtgtactcgctcgacgccgtcctcctcccgcccgacatgttcggccccggcgccaagaaggactacggcgccgccgacgcgcccgcggcggcggggaagcacgggaagccgcagaccgcgtcgtcgtcgtcggtggcggcggcgcctgacgaagcgccgtcgaaggaggtggacgccacggcgacggcggccgccggcaggatggcgccggcgggatgggcggcggcgtttgcaggggtcgtgaccgcggtggtcgccgtgagcctgctctcgtattgatgagcaggcatgcatgcgatgcaggcgatgcacatatcgttaatttacattgggtttttgctcgatatatgctacgcacaagcacgctccatttcgctctgttaatatgttgtgtacaaacaacattgcattttgtttatcagatgtataccttgtgaatgcatgttttacattccaagttactgcaccgatgtagttttataatttacatatacgctcaactttaattcgt

SEQ ID NO: 3158 - DNA, 1095 bp, Oryza sativa; identical to SEQ ID NO: 2124
  ref <308>: DATABASE ACCESSION NUMBER: AK104368
  ref <309>: DATABASE ENTRY DATE: 2002-08-28

SEQ ID NO: 3159 - DNA, 1115 bp, Oryza sativa
  ref <308>: DATABASE ACCESSION NUMBER: AK104369
  ref <309>: DATABASE ENTRY DATE: 2002-08-28
gtgctcagtttcactcttatcagtgaattagatcatatacttgtgtccttgatagctcgttaattagcatggctaggtcactcgctgctgtcctactccttttggtcgccgccgcgggagccagccatgccgcgtcgccggcggagatgtactggaagatcgcgctcccgacctcgccgatgcccggcgccattcgcgacctcatcagcccagcgagctcagtgggctcagcttcgaaggaggacacggtgggcaacgtgttcttcctcgagaaggacctcttcccgggctccaagatgacgctccacttcacccgcgccaccgccggcgccgcgctgctcccccgcggccgcgccgagtccgtcccgttcgcctccgaaaggctcccggagatcctctcccagctctccatcccggccgtctcgccgaccgccgacgccatgtggtccacgctcgccgagtgcgaggccgcgcggctcgccggcgagacgaccaagcacaagcactactgcgccacgtcgctcgagtccatggtcgagttcgtcgcgtccagcctcggcacccgcgacgtccacgccgtgtccacggaggtgatcagcacgttgacgccgacgccgaggcaggcgtacagggtggaggccgtgaggcccgtggcggtgcccggcggcgacatggtggcatgccacgggatgccgtacgcgtacgccgtgttcgggttgcacgggctcaagggcgcaggcggtggccgcgtgccacggggacgtggacgggcacggcgcggtggcggaggcatacaagaggctcggcgtggcgcccgggagcgtggccatctgccacttcctgcctcaggacgacatgatctgggtgcgcaactgaattaatgaagcagctaccttgcgcgccatccatggctaattattttagacatgctccttcctatattttggatctacctgccggctatcatgttatcataaatttacgcgtgtgcgcgcgacgatccgacatgcccacactaacgtgttttactttgttaattaataagtctgcatacccaggtcatcttgtacggtgctactccctctatcccgaaataaaacaacttatagagattg

SEQ ID NO: 3160 - DNA, 1707 bp, Oryza sativa
  ref <308>: DATABASE ACCESSION NUMBER: AK104370
  ref <309>: DATABASE ENTRY DATE: 2002-08-28
aaaaaaaaaaaaaaactcactcaacccaagcaacgcgcagcacaccatcaccagccaagtgttcgacagagttcttggcgagctagaggtgtcgaacaccttcaagagaggagggatggggaaggcggcggcgatggaggtgtcggcgtcggcggcggcggaggcggggatgatggtgggtcatggggagtggcgcgacgacgacgggcgggcgcggcggatggggacggtgtggacggcgagcgcgcacatcatcacggcggtgatcggctccggcgtgctgtcgctggcgtgggcgatcgcgcagctcggctgggtggccggccccgccgtcatgctgctcttcgccttcgtcatctactacacctccacgctgctcgccgagtgctaccgctccggcgacccgtgcaccggcaagcgcaactacacctacatggacgccgtccgcgccaacctcggcggctccaaggtccgcctctgcggcgtcatccagtacgccaacctcttcggtgtcgccatcggctacaccatcgccgcctccatcagcatgctggcgatcaagagggcggattgcttccacgagaaggggcacaagaacccgtgcaggagctcgagcaacccgtacatgatcctgttcggcgtcgtgcagatcgtgttctcacagatcccggatttcgatcagatatggtggctgtccatcgtcgccgccatcatgtccttcacctattcgacgattggcctctcgctcggcatcgcgcagaccgtcgccaacggcgggttcatgggcagcctcaccggcattagcgtcggcaccggcgtcacctccatgcagaaggtctggcgcagcctccaggccttcggtgacatcgcgttcgcctactcctactccatcatcctcatcgagatccaggacacgatcaaggcgccgccgccatcggaggcgaaggtgatgaagcgcgcgacgatggtgagcgtggcgacgacgacggtgttctacatgctgtgcgggtgcatggggtacgcggcgttcggggacaagtcgccggacaacctgctcaccgggttcggcttctacgagccgttctggctgctcgacgtcgccaacgctgccatcgtcgtgcacctcgtcggcgcctaccaggtgttcgtccagccgatcttcgcgttcgtcgagcggtgggcggcggcgaggtggccggacggcggcttcatctcccgggagctccgcgtgggccccttctcgctcagcgtgttccgcctgacatggcgcacggcgttcgtctgcgccaccaccgtcgtgtccatgctcctcccgttcttcggcgacgtggtggggctcctcggcgccgtctcgttctggccgctcaccgtctacttccccgtcgagatgtacatcgcgcagcgcggcgtgcggcgagggagcgcgcggtggctctgcctcaaggtcctcagcgccgcctgcctcgtcgtctccgtcgccgccgccgccggctccatcgccgacgtggtcgacgcgctcaaggtgtaccggccgttcagcgggtagagagaatgtgagatcgatcggtgaccgtccgatcgaagtagtactagcactagcaaacatgtgtacgtcgtatgggcagcagagcaacactgccgttgccaggtggggcccaggtgtgagataaaaaagaacgaggtaaacaaaaaattatttactgagct

SEQ ID NO: 3161 - DNA, 1051 bp, Oryza sativa
  ref <308>: DATABASE ACCESSION NUMBER: AK060904
  ref <309>: DATABASE ENTRY DATE: 2001-12-06
tttaccggccacctcttcttcctacttcgtcttcttgctggtgtgttcgaggaggaggaggaggaggagaagctagcggcggcggcggcaatggcgacgagcgggctgaggagctgcagcgcggtgggcgtgccgagcctgctggcgccgtcgtcgaacaggagccgcctgccggtctgcgcctacgccaccacctccgggcgcgtcaccatgtccgccgagtggatgccgggccagccacgccccgcccacctcgacggctcctctcccggtgacttcgggttcgacccgctgggcctcgccaccgtgccggagaacttcgagcggttcaaggagtcggaggtgtaccactgccggtgggccatgctcgctgtgcctggggtgttggtgccggaggcgctggggctgggcaactgggtgcaggcgcaggagtgggcggcggagcccggcggccaggccacgtacctcggcaacccggtgccatggggcacgctgccgacgatcctggtcatcgagttcgtcgccatcgccttcgccgagcaccagcgcaccatggagaaggaccccgagaagaagaagtaccccggcggcgccttcgaccccctcggcttctccaaggaccccgtcaagttcgaggagtacaagctcaaggagatcaagaacgggcgattggccatgctggcttttgtgggtttctgcgtccaacagtcggcgtacccgggcaccggcccactggagaacctggccagccacctctcggacccgtggcacaacaacatcggcgacatcatcatcccgagaaccatctacccttgagcttggcacgaaccggtgcgtgcgtccgggcgtacgtgaaggctatgggtggtttttatgtgcgtgcgtactgtgtgtgattggttgattattgcgcgcgcgtgcgcacgcagtggtcggccggcaggcagctgctggttggccttgtaatgtaaagcttaagtagagggtgctctcttgtgaatccgtccatcttaatttttgtatcaaacacgaaatcaaactggtcttagtt

SEQ ID NO: 3162 - DNA, 1155 bp, Oryza sativa
  ref <308>: DATABASE ACCESSION NUMBER: AK104371
  ref <309>: DATABASE ENTRY DATE: 2002-08-28
tacaaggggagccatacatatgttcctgttacccgcaaaggctactggcagtttgagatgggggatcttcttattgatgactactcaactgggttctgttctggtggttgcgccgctattgcggattcagggacttcattgctcggtggcccaacaactattgttgctcaaattaatcacgcaattggagctgagggaattgttagtatggaatgcaaacaagttgtgcgggactacggggacatgatcctcgagatgctcatagcacaggcaagccccatgaaactgtgctctcagattggtctctgtgcatttgatggtactcgttctgtcagaaacaatatagagtctgttgttgataaagaaaaggtgggctcagatctttcctgcactgcttgcgagatggctgttgtctggatacagaatcagctccgacataaccaaacaagggagctcattttgcaatatgctgaccagctctgcgagcgtctcccaagccccaatggcgaatcggcagtcgactgcgatgagatctcaaacatgccgaacctttcattcaccatagcaaacaagaccttcaccttgacaccagagcagtacgtagtgaagctggagcagcaaggtcaaactgtttgcatcagcgggttcatggcgttcgacgtgccacctccacgcggcccactctggattcttggagacgtgttcatggctgcataccacactgtcttcgactttggcaaaaacaggattgggttcgccgagtctgcttgaattgcttggctagggccttcaggatcatacaacatatcaagtattgtaatgtttgttaggcagcttgtttactcggtattgtaacctgggaatgtctaaaggtatagtgcattagtagtagcatgcaaaaccttgtagaggaataaacgttttcacgatggagctgtatcagctatggatatgcagatatggatcttggatggtgcaatgcagatgtaatgagcaaatgagcacgatgagaattagggctttttaatctgatctcatcatataggtaatggtttgtctggcatataatgatgggcctaaaacttctggcgaggttaataatggctgtactgactgtttatgcaccttaacattcagagttcaaaatctctcatt

SEQ ID NO: 3163 - DNA, 994 bp, Oryza sativa
  ref <308>: DATABASE ACCESSION NUMBER: AK104372
  ref <309>: DATABASE ENTRY DATE: 2002-08-28
attcacattcacattcccaaacggccacctcactctccctctctctatctctctcttcacatttccattccaactcaatttcctcctctcttctcctctcctcttctcacacgaagccaagaaagccaagaaatccatccatccatagcaagggagctagctcgccggcggcgatgggcaaggactgcggcaaccacggcgacgacgacatccggcaggcgtgccggcggctgctgacgatcctcttcggcctcgccctgatcgtggccatcatcgcgctcatcgtctacctcgtgctccgccccacccaccctcgcttcttcctccaggacgccacgctccgccagctcgacctctccaattcctccacctccggcgtcctctccaccgccctccaggtcaccgtcgcctcccgcaaccccagtgaccgcgtcggcgtctactacgaccgcctcgacgtctacgcctcctacaagtaccagcagatcacgctcgccgcctcgctcccgccggtgtaccagggccacggcgacgtcgacgtctggtcgccggtgctctccggcccggacgtccccttcgcgccctacctcggcgacgccctcgccaaggacgtcgcggcggagtacctcatcctccaggtcaagatcgacggccgcgtccggtggaaggtcggcagctggatctccggccactaccacctcttcgtcacctgcccggccttcttcatcgcctccggcggcaacggctaccccggcgccaatggcctcaagttccagaccgccacctactgccgcgtcgaggtctagctgtctcgtcttctccggctccggcgacggcgaggtgtgcataaatgtcggtaattactgtagcgttgaggtggggggtatagaggtaaatttagcgtgggttaatcaaagtatattttgtgtttaagcgttgttaagctttcagttccacgtttaattgttaataaaaggatattataactatggtt

SEQ ID NO: 3164 - DNA, 1810 bp, Oryza sativa
  ref <308>: DATABASE ACCESSION NUMBER: AK104373
  ref <309>: DATABASE ENTRY DATE: 2002-08-28
agtacacacactccacctaatcttcttctcctcacacattcacacacacacaccccgcagaccccggcaccttaccgagcggcggctcagcacgctgctgctacgcacatggacaagagccagggagtcctactgtccagcaacgtcggggccggctcccggccgtggccggagctgctcggctccgcccactgggacggcctcctcgacccgctcgacctcacgctgcgccgcctcatcctgctctgcggcgacctctgccaggtcacctacgactccttcaactccgactcccactccaagtactgcggcacctgccgcttctccaggtccacgctcctcgaccgcacgcagttcccggccgccggcgacctctccgtcgccgcctacctctacgccacctccgacgccacggcgttcccggggagcatggtgtactcgatgtcgcgcgaggcgtggagcaaggagtccaactggatcggctacgtcgccgtgtccaacgacgccgcagcggccgcctcgggccagcgcgtcatctacgtcgcgtggcgcggcaccatccggtcgctggagtgggtcgacgtgctcaagccggacctggtcgaccacgacgacatcctccccgaggggcacccggggcgcggccggtcgcgcgtcatgaaggggtggtacctcatctacagctccaccgacgagcgctcccctttctccaagtacagcgcccgcgaccagatgctcgccgccgtgcgcgagctggtggcgaggtacaggaacgagagcctcggcgtcgtctgcacggggcacagcctcggcgcgtcgctcgccacgctctgcgcgttcgatatcgtcgtcaacggcgtgtccaaggtcggcgacggcgcgcacatcccggtgaccgccgtggtgttcgggagcccgcagatcgggaacccggagttcaagaagcagttcgaggagcagcccaacctgcgggcgctgcacgtcaggaacatgcccgacctcatcccgctctacccgagcggcctcctcggctacgccaacgtcggcaaaaccctccaggtcgactccaagaagtcgccctacgtgaagcgagacaccagcccaggcgactaccacaacctgcaggggatcctacacacggtggccggctggaacgggaaggacggcgagttcaagctccaggtgaagcgcagcgtcgcgctggtgaacaagtcgagcggcttcctcaaggacagcaaccttgtgccggagtcatggtgggtggagaggaacaaaggcatggtgctcggccagaacggggaatggcagctcgaggggcccgcagaggagaacctgcccgtgccaccggtggtgaccgggaagatcatcgacgacgacgtcgctgccgtggccacctccagcagtgccaaggaggataagaagacgggcaaagggtctaagcttctgtctggattgattgatcaactgctttgtgtgcctgatacatgtaaagccggagctgcgtgagttgttgaagaccacatcagaaaaagactcgagagcggtggcgtcgaactgatatgcttgtgaagtagctggagcttgggagttgggagcgagctagattacaacaatgtcatttatcggtttttctttggaataaaatgagttgttttgttaggagaaagtagtatttttcctttctgcttttagtgtctcttgagaaagaataaaatgagtcctggcatcataagtaggtgggttagtcgactaggttcgagcctcaccacatctcaataaatatcgatatgtgacccctcctttcatatcc

SEQ ID NO: 3165 - DNA, 1237 bp, Oryza sativa
  ref <308>: DATABASE ACCESSION NUMBER: AK060905
  ref <309>: DATABASE ENTRY DATE: 2001-12-06
aagagctccacctccacctcctccacctccaacccccgatcccccgcaaaccctagccctctcccccaccctcctcgccggcggcgagcggcggcggcgcgcggcgggacccggagcccccagtagcgcctcctccgtcctcccctccctgaggtgcgggggagaggatgccgtcgtcgcacggggatctggaccggcagatcgcgcagctgcgggagtgcaagcacctggcggagggggaggtgagggcgctgtgcgagcaggcgaaggccatcctcatggaggagtggaacgtgcagccggtgcggtgccccgtcacggtctgcggcgacatccacggccagttctacgacctcatcgagctcttcatgggcgactacgtcgaccgtggctactactcagtggagactgtttcgttgttggtggctttgaaagtacgctacagagatcgaattacaatattgagaggaaatcatgagagcagacaaatcactcaagtgtacggcttctacgatgaatgcttgagaaagtatggaaatgcaaatgtatggaaatactttacagacttgtttgattatttgcctctcacagctcttatagaaaaccaggtgttctgccttcacggtggtctctctccatcattggatactttagataacatccgtgctcttgatcgtatacaagaggttcctcatgaaggacccatgtgtgatcttttgtggtctgacccagatgacagatgcgggtggggaatttcaccgagaggagcaggttatacatttgggcaagatatcgctcaacagtttaaccatacaaatggtctatctctcatctcaagggcacatcaacttgtaatggaaggatttaattggtgtcaggacaagaatgttgtgacggtcttcagtgcaccaaactactgttatcgctgtggtaacatggctgcaattcttgagattggcgaaaacatggatcagaacttcctccaatttgatccagctcctcggcaaattgaaccagacacaacacgcaagactcccgactactttttgtaatttgtggtgttgacaattttaactcacctgtgttgatgctcctctcctccgcggtgtcggggtctgtagatcttctgtccttagatacgggttccacgagcccggctgtatgtctctcaattcttttgtttggagattttgttgctgcttctcaacctttatacaagacgttaaaagttacatgc

SEQ ID NO: 3166 - DNA, 1031 bp, Oryza sativa
  ref <308>: DATABASE ACCESSION NUMBER: AK060906
  ref <309>: DATABASE ENTRY DATE: 2001-12-06
gagcttgctttgatttgatccgcgcgcggagaagacgaagcgagagagagagggagaggtggaggaggctagctagggttgcgagcgatctgcagcgtgggagatggggaaggggttcatgtcgtacctggcgatgaagacggacgcggcgggaggggaggcggcgcaggcggcgctgatcgacgccgacctgcaggagctgggcgtggcggcgcggaagctcgccaaccacgcgctcgtcctcggcggcggcctcgggttcggcaccaccttcctcaagtggctcgccttcttcgccgccgtgtacctcctgatattggataggacaaactggaagaccaacatgctgaccgctctcttggtcccttacattttctttacactgcctggtgggctgttctctctgttgaggggagaaattggaaaatggattgcgatcattgctgtcatccttcgtctcttctttcctcgccatttccctgattggttagagctgcctggtgctgtgatccttctcattgctgttgccccgaacctgtttgcgagcaccttccgaggcgacttagttggcatcttcatatgcctcatcattggatgctacctgcttcaagagcacatcagggcgtcaggtggattcaggaacgccttcaggaagggcaacggagtgtccaacagcattggcatcctcttgctcttcatctaccctgtctgggccctggtgctgaactttctgtaggcgccaccgcttcagcgcttctctacaccatccagctccgatcgctgttcgttcttgtgtacatgtcttgtacggtgatttggtatctggtgatctggtagtatcgttttgaggagatggataatgtatgtttggacctcctgcctcctgatgcacgttttcttggcattttcgtttgttgtagctttgctatcagcccgtgtttcgtcgttctgagtgtacaagcgtcaataaattcatctctgttgccttctgtaaatttaaagagcttttatccaagttctcttatgtgatt

SEQ ID NO: 3167 - DNA, 1196 bp, Oryza sativa
  ref <308>: DATABASE ACCESSION NUMBER: AK060907
  ref <309>: DATABASE ENTRY DATE: 2001-12-06
taaatgccaagcttggtggaataaactcattgctgcaaattgaagcatccccttcaatacctcttgtatcgaagacacctaccatcatcttaggtatggatgtgtcacacggtcaaccaggacaatctgatagaccttccattgctgcggtggttagctctcgccaatggcctctcatctctaaatacagagcatcggtgcacactcagtcacctaagctagaaatgatgtcttccttgtttaagccacgaggaactgaagatgatggcctcattcgggaatcgctgattgacttctacactagttctggaaaacggaaaccggatcatgttatcgttttcagggatggagttagtgaaagccagtttactcaggtcattaacattgagcttgatcagatcattgaggcatgcaaatttctcgatgagaagtggtcaccaaagttcacagtgattgttgctcagaagaatcatcataccaaattttttcagtctggatctccagataatgttccgccaggtactgttgtggacaaacaagtgtgccatccaaggaattatgacttctacatgtgtgctcatgctggaatgattggaacgacgaggccaacacattatcatgttctgcacgatgagataggtttctcccctgatgatctgcaggagctagtgcactcactctcttatgtgtatcagagaagcacaacagccatatcagttgttgctccgatttgctatgcccatcttgctgctgctcaggtgggcacattcctcaagttcgaagatatgtcggacgcgtcgtccagccaaggaggtcatacgtctgtcggaagtgtaccggtgcctgagctgcctcgcctccatgagaaagtgaggagctccatgtttttctgctgatcgtgccgcctctcgatcaaatgctcgccgacgttgagaaatccggtgatcggcctgggggaactactagtacttttgcttctcataattaggaacatgtatggaacctatgtacctgcccttggcatgctgcctgtgtcatggattatctgctggtaggagtatcctttaaccaaacccttttagcttttaagttaggtttaatggactgctgtttagtatgtggtgtggtgttagtaagtttccagacttcgacattgtgcagctatgcctattgctggttatggtcccttcccttct

SEQ ID NO: 3168 - DNA, 1086 bp, Oryza sativa; identical to SEQ ID NO: 2135
  ref <308>: DATABASE ACCESSION NUMBER: AK060908
  ref <309>: DATABASE ENTRY DATE: 2001-12-06

SEQ ID NO: 3169 - DNA, 991 bp, Oryza sativa
  ref <308>: DATABASE ACCESSION NUMBER: AK060909
  ref <309>: DATABASE ENTRY DATE: 2001-12-06
tgctcatgtggtgctgctccaagaccttcctcgtcagctcctaccgcctccgcggcaacctccaccagatgtggactgtcccccgatatgggtttcagtacttcataccggcggcgaagaaaggcatcaacgagcagatcgagctggccatcctgcgtgcagatcggatgggcgtcaaggtgctcagcctcgccgctctcaataagaacgaggcactgaatggaggtggcacgctgttcgtgaacaagcacccggagctgagggtgagggtggtgcacggcaacaccctgacggcggccgtgatcctcaacgagatccccagcaacgtcaaggacgtcttcctcaccggcgccacctccaagctcggcagagccatcgccctctacctctgcagaaaaaagatcagagtcctgatgttgacattgtcgtcggagaggtttctgaagattcagagggaagcaccggcagagttccagcagtacctcgtgcaggtcaccaagtaccagcctgcacaaaactgcaagacgtggctggtggggaagtggctgtcgccgagggagcagaggtgggcaccggcggggacacacttccaccagttcgtggtgccgccgatcatcgggttccggcgagactgcacctacggcaagctcgccgccatgaggctccccaaggacgtccagggcctcggctactgcgagtacacgatggaacgcggggtggtgcacgcgtgccacgccggcggcgtggtgcacttcctggaagggtgggagcaccacgaggtgggcgccatcgacgtcgaccggatcgacgtcgtctggaaggcggcgctcaagcacggcctcacgccggcgtgaccgccgccgccggaggccagcggcgaagccaacgagaacggccggcgatcttgtgggatttggtgtgctgtaagatagaagaaatgtacgagaaaaaaacgatttgccgtgggatttaaattaattaaaatttaatc

SEQ ID NO: 3170 - DNA, 1208 bp, Oryza sativa
  ref <308>: DATABASE ACCESSION NUMBER: AK060910
  ref <309>: DATABASE ENTRY DATE: 2001-12-06
ctcatccccttttcccttctcctccaccccccccccccaaccacctcaccgccgacgacctcatcctcgtcggcgccgtcggattcaccagcgagggaggttgcggcggcggcggagagcgcgagggaggaaagcgggggaggtgaccgccagcgatggggcagcagtcgctgatctacgcgttcgtggcgaggggcacggtggtgctcgccgagtacacggagttcaccggcaacttcaccaccatcgcggcgcagtgcctccagaagctccccgcgagcaacaacaagttcacctacaactgcgacggccacaccttcaactacctcgtcgaggacggattcacatactgtgtagttgctgttgaatcagttgggcgacaaatccccattgctttccttgacagagtcaaggaagatttcaccaaaagatatggtggtgggaaagcagctactgctgcagcaaacagcctcaaccgagaattcggatcaaaacttaaggagcacatgcagtattgtgtggaccaccctgaggaaatcagcaagcttgcaaaggtcaaagcacaagtctcagaggtcaaaggagttatgatggaaaacattgagaaggttcttgaccgtggtgagaagattgaactgcttgtcgacaagactgaaaacctgagatctcaggcacaagatttcagacagcagggtacaaaggtgcggcgaaagatgtggttacaaaacatgaagatcaagctgatcgtcctgggcatcatcatcgcgctcatcctcatcatcatcctgtccgtgtgccatggcttcaagtgcaagtgagggtgttggcttcccagtcctccacattcaccttgccccccataataccgcctattcctggcgaaaaaaaagaccatatgtttttttttgttctgttagtcatgagtcctgccccgattcttgggtgttcgagtgtccctgatgtcgcgcttgattggtgtcggatagtgactgggtttatgggtcggagtcccgtgtatttttggacgctattcatgtatagcctgtatgctaccctcttttcgctctgctatatgagtagtaggtgttactacgtttgttcccccactttatatcttctcttactccacagctaaatcttagtaagaaggaacaacttgcattttcaaacctgtgatcttcataaataattttgattttggagagatt

SEQ ID NO: 3171 - DNA, 1081 bp, Oryza sativa
  ref <308>: DATABASE ACCESSION NUMBER: AK060911
  ref <309>: DATABASE ENTRY DATE: 2001-12-06
ctagctccctgctacatataccggccggtcggaccccctcatcttgccggcctcatcatcgtcaccgatcgatcccggccattccacggtcgatcgatcgtctccggccggccggtcgccggtgggaattgaagcagctagctgacatacatacatggcgggcgtgtgggtgttcaaggacggcatcgtgcggcgcgtggagaaccccggcagcgaggaatcgtcgtcggcgggggacggcggcggaggcgggcggcggaaggtgctggtgcacgtgccgagcggggaggtggtggcgtcatacgaggtgctggagcggcggctgcgggagctcgggtgggagaggtacctcaccgacccgtgcctcctgcagttccaccagcgctccaccgtgcacctcatctctgtcccccgcgacttctccaagttcaagctcgtccacatgtacgacatcgtcgtcaagacccgcaacgtcttcgaggtccgcgacgccgctgcccccgccgtctcaccggcgacctagctgctgatccgagatccatccatccatcgatcagacgacagcttatagctacagcagtccacatgagcttgcctgcctgctattataagagtgtaagtatgtatatatatactggtatgcgtgtgatcgatcaaggatcgatgtacacacaaatgatcagcatgcacagatcactagatcgagatctatagctcgatcgatttggggtttctcctgccggcgttgcagcttttggattagatgttgcgccggtgaggacattgctataggttaattggcttttgggtatatttctgcataaataatgcatcaatagagagcacaacatgtgtatgcatacttatatttatatgtacacatgcatacatatataagtacatacataggggccgggggcaacatgcaggttgcagagattctgccagagatcaagcagaaaggggatcgccgatgccctactctcaaccgtacctttttactgtttaatttggaataatttggattgtctcaatacaaattatgtaccagttttttcacatatgatttgcacgacatttt

SEQ ID NO: 3172 - DNA, 1073 bp, Oryza sativa
  ref <308>: DATABASE ACCESSION NUMBER: AK060912
  ref <309>: DATABASE ENTRY DATE: 2001-12-06
ctattattttttatcttgctgttggtgggtccttgctttcttacatatattcagctccacctctgaagctcaagcagaatggatggattggaaactttgctcttggtgcgagctacattggcttgccctggtgggctggccaggcattatttggaacccttactcctgatattgttgtcctgacttctttgtatagcatagctgggctagggattgctattgtaaatgactttaagagtgttgagggagatagagctctggggcttcagtcactcccggttgcttttggtatggaaactgcaaagtggatatgtgtaggagcgattgacataactcaattatccgttgcaggctaccttttcagttccggcaagccttattatgccctggcactgctaggactcacaattcctcaggtggtctttcagttccaatacttcctcaaggaccctgtgaagtatgacgtcaaataccaggcaagcgcgcaaccgttcttcgtcttgggccttctggtgaccgcccttgcaaccagccactgatgaaagcagcaatcgccctggactgtgattctgtgacagcgaagttttgggtggaagatgcagattgatggttctctgcaactgttggtggagctaggttcagcagctatgttcgcgagtgtattagcgctcttttggcggtgctgggtagtagaatgtagaatcgtttcttgttgattccctgaactgatccagatcaaacatcttctaaaggttctgcgatgcaatgctagctgcagacgggagatggtacagggggtcgttttgctactttgccgccgatgttgtagggtgtgtagacagactgtagatgaataatgtcagtaacacctgtggggggttcagtgctagtgggctgcaaaacttgagcactgcttcgatcaaattgtgtctttgattatgaaattatggaatccagcacaggcaggtaataatttcgtaatagagcataaacaatttgtgaccttaggtgcgaagaacataaagctgaccaaggtgaagtaatattgatgcattgtgcgctgcatttaattt

SEQ ID NO: 3173 - DNA, 1949 bp, Oryza sativa
  ref <308>: DATABASE ACCESSION NUMBER: AK104374
  ref <309>: DATABASE ENTRY DATE: 2002-08-28
gcaagccacaggtctatcttccttcccctaccttccttccccaaatccaacgcacgcgccgtggccccacccaaatccgatggcgagctgaatccccggcgtgcaaccacggcgccgacaaactcccgccccaccgctggaggcggcggcggaggccgtcgcgctgccggatgctgcggcggtggcgtcggcatggacgcggcgctgtgcgacgacctgctgcaggaggtgttccgcctgctgccgcgcgcctccgcgccggctgtgtccctcgtctcccgccgctggtacgccctcctccgcgcgtcgattgcctccctgaccctccgcctgccggtctcctccgacgcctcggtgttggcgccgctctctgcgctgctgtctcggttcccctatctctccgccctggcggtggtctgcacagccgcaaccgcccaggtcgcggacgcgatgctgctcgtggtcgcgtcttcgccgtcggccgcgcagctctccgggctgaggttcctgcctgattcggctatctcgcctgcggcgctggttgctgcctgcccagccttctacggcctcacctcgcttcacctgaccgccctccgtcccctctctttctgctggattgcgttcttgccccgcctcaaatccttctacctcgtcaactccgctgccgccgccgccgttgactacgccggatggagctctgatgatgtcgacggcaacggtgagaccattggctctttgcctctagagaggctgtctctgtgcggcatctgctccggcgaccgagggatcgggtggttgtggcgacgatgtgggaacctccagtggcttcagctgcgcgcctgtgacggcactggggacgggccctcgtcgcagttcttcgcgggatgccttgctggcctgctcgcgctagagctccgtgcttgtcgctccgtctctgaccacgtcctcctcctcgctgctgatcgctgccgtgtgctcaagtcactcctggtgtacgatggcggcagccgggaggccctccaccggttcatccaccagcgtggcgcagcgttgcacacgttagacctccgcctccctctcgacttgcacaatgaccacctcctagcgatcggtgccgaggccgagcaaggtcagcaaagccagaatggcgggcatagcctcgctgcgctccggcttcagagctgtgtgctcatcactggcgacggactccggtccctcgcacgcacaaccactggagctggtatcgaagagcttgccttggtgaactgcgatgtggtggaacgggagcctggactgcttaccttcctcagccagagcatgcgccgccttcgccgtcttgatttgtcatacaacgagactctcagtgacaaggaggttggtgccatgctatcgtcctgccataatctaattgatatcaggctcaggggttgcaggtgcctcactcgaggatctttggtatcgttgctcagatactgtggccggtcagtggaggtcatcgacatcactcgctgccttagcattgcagcagccgatgttgaattatttgcacaggaagccactcgattaattcaggtaatcatcgaggacagcttgttgtcagaggaattgcgggccattgcacataagaaaggcataagggttggcccattgcgttgcgattgataattgtgataaaaggtaatcttcttcataatgcccctcatagatgcttgaatctgagcaatcccaactccctacttgaatgtgggaataaggtttcacaacgacatctcactacttgtgtatatgagtttatatgttcaagtatgtatatattattagggaacctattattaattgcaaacttgtctggcaatgtaaattcagcaccaagaattgtgctgttttgtatgctcctagaaataacacgtgaaataatacagaaaacttcaaattcatcattatttttt

SEQ ID NO: 3174 - DNA, 1272 bp, Oryza sativa
  ref <308>: DATABASE ACCESSION NUMBER: AK060913
  ref <309>: DATABASE ENTRY DATE: 2001-12-06
tttggccagccaataaaagtcaattgggcatatgcaagtactcaaagagaggatacatcaggccattttaatatttttgttggcgatctttgcccggaagtaacagatgctgctttgtttgcttttttcgctggatttaccagttgctcagatgctagggtaatgtgggatcagaaaactggacgatccagaggttttggttttgtttctttcagaaatcagcaggacgcacaaaatgccataaatgaactgaatgggaagtggctcggcaaccgtcaagttcgttgcaattgggcaacaaagggtgctaatgctggtgaagagaaacaaaatacagactccaagggtatgatagagttgacaaatggttcatcagaaggtggaaaggataatgcaaatgaagatggtcctgaaaacaacccacagtacacgactgtttatgttggcaatcttcctcatgatgtcaacagcaatgatgtgcacagatttttccattcacttggggttggttcaattgaggaggtgcgtgtaacgcgtgataaaggttttggctttgtgcgttacagcacccatgaagaagctgctctagcaattcagactggtaatggacaacttattggcggtaggcagatcaagtgttcctggggaagcaagccaactccaccagggacagcatccgcgcccctaccccctccagcaccagcaccattcaatcctggcatgtcggcgaccgacctcctagcctacgagcgcaccctggcgctgagcaagatggcagcgaacccggccctgatgagtcagcacgccgccctaaagcaggctgccgccatggggatgggcgccggagccagccaggccatctacgacggcggctaccagagtgccaacgccgtcttctactagagtgacctgagtacctgaccccccatgaagcagaccaccaccattgcctgcctgcctctgtatgaccaaggaggatgatgatgacccctccacccccttatacatatagtagatgaagccttacctgaacctctccttttctacctttgttatttgccaatctagtaatcttctcttcgctggatgctggctatatatatatatctagaacatatatataatgtttttctgcatttttagagatatggaaacgacctttggtatttggatggttccctctgttactatcatcgtatcatgtcggtgtcatattgtattgctctatgcgcattttttttttttaattttaccttgctctcaattaacgat

SEQ ID NO: 3175 - DNA, 1416 bp, Oryza sativa
  ref <308>: DATABASE ACCESSION NUMBER: AK060914
  ref <309>: DATABASE ENTRY DATE: 2001-12-06
ccatctttggtctcctccccctccctctcgctcgcatcttccccggagatgccgccgccgccgagatgcgccgccaccaccgcccaccactccctcctcggctcgcccacctgcctcgcgcgcccgcggcggcggtgctgccccgtgcgcgccgccgtcgccgtccaggccggggcgcaggccaaggtctcgctcatccggattggcacccgcgggagtcctcttgcactggcacaagctcatgaaacccgagacaagctgaaggctgcacactcagagttagccgaggagggggccgttgagattgtcatcattaagaccacaggagacatgatcttggacaaacccctggcagatataggtggcaagggtttattcaccaaggagatcgatgatgcacttttgcagggaaggattgacattgccgtccactcgatgaaagatgttccaacatatttaccagaaggcacgatattgccttgtaatctcccacgggaagatgtgagagatgcattcatatgcttgactgcaagttcccttgcggagcttcctgctggcagtgttgttggaagtgcttctctgcgtagacaatctcaaattctctacaaatatccatcactcaaagttgttaacttcagaggaaatgttcaaacacgattgaggaaactcaaagaaggagatgtccatgctacattgttggctctagctggactaaaacgcttaaacatggcagaaactgcgacatctgtattgtcagtggacgaaatgcttccagcagttgctcaaggtgctattggaatagcttgcagaagcagtgatgacacaatgatgaattacttgtcctcattgaaccatgaagataccagattagctgttgcatgtgaaagagaattcttgtcagttcttgatggcaactgccgaactccaattgcggcatatgcttctcgtgacaaggatgggaattgttcattccgagggctattggcttcacctgatggatctacagtatatgagacttcgagaactggaccttatgatttcgatatcatggttgagatgggtaaagatgctggccacgagctgaaagcaaaggctggccctggcttctttgatagcttgcaatgaaaatagaaatccaccattggccaactagagtgttgagtggattattttgatttttttttgtaccctagttctactagaggattgtaccacaatgttgagctgtctcattcagatctgtatctttgcttcttttagcaaggtgagctagaatttagaacgtggttccacggttattgtaatcccttgtatttccaatgaattctggaagaggcttttgcggccaattatgttgtaactttgtaatttgatgtaattttgcagatgctttgttttcaaaataatttgattctg

SEQ ID NO: 3176 - DNA, 1133 bp, Oryza sativa
  ref <308>: DATABASE ACCESSION NUMBER: AK104375
  ref <309>: DATABASE ENTRY DATE: 2002-08-28
gagctaagctctcctccccatcactccgatggcgctgtccgcggcggcgccggcgaactcctcctgcttccacccgcgcgccgccgccgccagcgcgccctcatctctcagcgtgggcaccaaggtcttcgtcgggttgaaggcccagaccaagctaggctcgtcggagtcgtcgtgcccgaatgtcaccgccgggttctacaccgccgtcaaccggaggatctctctgggattatcaaacaagagggctaccagggcgcgcatttcaatgatgcctgttggtacaccacgggtgccttacagaacacctggtgaaggaacttggcaatggcttgatatatggaatgctctatatcgcgaacgaattatcttcattggggacagtatagatgaagagtttagtaaccaagtattggcgagcatgttgtatcttgacagcgttgataacactaaaaagattcttctatacattaatggtccaggaggagatcttacaccatgcatggcattatatgatacaatgctaagcctaaaaagtcctattggtactcattgcctgggctttgcattcaacttggcaggatttattcttgcagctggtgaaaagggttcacgtacgggtatgcctctttgccggatttcacttcagtcacctgctggagcagctcgagggcaggctgatgatatagaaaatgaagcaaatgaacttattaggatcaagaactatctttacagcaagttgtcagagcacacaggtcatcctgttgataagattcatgaagatctatctagggtgaagcgcttcgatgctgaaggagctttggaatatgggattattgaccgtattattaggccttctcgcatcaagaaagagggatccactgctcaaaagaaggatctacgtaatctgggacttggctagtagatgctattgtatcagttatacgtgttagattgtattgttctcccctcattactcctgctttgaaatcctactgctttatttcatcaacaggagttcatgtggagatatgagatttgttttgctgtctccattggtattggacttaaaagagagaataatgttgtagcagtcataagagaaatacggtactctagttgccattctggtg

SEQ ID NO: 3177 - DNA, 1279 bp, Oryza sativa
  ref <308>: DATABASE ACCESSION NUMBER: AK104376
  ref <309>: DATABASE ENTRY DATE: 2002-08-28
attccattccactcgccaacccgacacgtctctcatcttcacgcaacgaacagcagcagcagctcaagctaagctaagctaaagtactacgtgttctttcgtcttcgtcggcgccggagtttgattcgtcggagctagctagcaagaggaagaagaaaatgttggccatattccagaagcaggtggcgcacgcgccggcggagctgaacagcccgcggagcagcgcggcgaagcccaagaaccccgacgagatcctcagggacttccacgccctccaccccatcgaggccttctccacctccttcggcggcggcgccgccctcgcctgcgtcgccggccacgcccgcaatggcctctctggctacgagaggatgttctgtgggctggatgacatctactgcgtgttcatggggaggctggacaacctgagcagcctgatccggcagtacgggctgtgcagccgctccaccaacgaggcgctgctcgtcatcgaggcctaccgcaccctccgcgaccgcggcccctaccccgccgaccaggtcgtcaaggatctctccggctccttcgccttcgtcgtcttcgacaacaagtccggcgccgtcttcgccgccctgagtacggatggggaggtgccgttgtattgggggatcgcggcggatgggtcggtggtgatctgcgacgagagggagatcgtgaagggagggtgcggcaagtcgtacgcgccgttcccggtggggtgcatgttccacagcgagggggggctcaagagcttcgagcacccgatgaaccggctgaaggcgatgccgcgggtggacagcgagggcgtcatgtgcggcgccaccttcaaggtcgacaccttcaccaagatcaactccatgccccgcgtcggcagcgccaccaactgggccgccacctgggacgacgctgccgcctgatgatggcgctccgtacgccgtcgtctcgtcgccgtgcgcctgccctcgccgccggcctcctcgccgtttgccgccgccgctcatctcttcctcctcttcttcctcctctctatatccgatgtgcttctccgtccgaagcatgcagattattagagcgatatttgcagctagcgtggaagcgcgccaatctatttttctgcggtgtttttacttaattttcacctcttctttttaaatttttatgtccatctttgggctctcgcctctcggcaatgtatattctcggtcgcgggtggcatgtcatggtacatactatgaatgatgaataagaaagagtttgcttc

SEQ ID NO: 3178 - DNA, 1031 bp, Oryza sativa; identical to SEQ ID NO: 2137
  ref <308>: DATABASE ACCESSION NUMBER: AK060915
  ref <309>: DATABASE ENTRY DATE: 2001-12-06

SEQ ID NO: 3179 - DNA, 1297 bp, Oryza sativa
  ref <308>: DATABASE ACCESSION NUMBER: AK060916
  ref <309>: DATABASE ENTRY DATE: 2001-12-06
acagaagagagacaggggagaaaaccctaatctcaaggccgcggctgtgagcgctcctcccgtctctcccccaacccgccgccagccaccgagctcgccaccgtctccgttgcctcgccgtgctctaggttctcggatggaggccgaggcggcggcgaagagggcgcgggagagcggtgacgcggcggcggccggtgccggcgagcaggcgggtatctctgccgtcatccctggatggttctccgagattagccccatgtggcctggtgaggcacactcattgaaggtcgaaaaggtactattccaaggaaagtcggactaccaaaatgtgatggtgtttcagtcctccacgtacggcaaggtgcttgtgctggatggagtgattcaggtcactgagagggatgagtgtgcttaccaagagatgattacccacctccccctttgctctatcaaagatcccaagaaggtgttagttattggaggtggagatggtggtgttttgcgtgaagtttcacgacattcctcggtggagcaaattgacatatgtgaaattgataagatggtggtagatgtctccaaacaattttttcctcatctggctgttggatttgaagacccccgtgtgtcattacacattggagatggcgtggcctttttgaaaaatgctccagagggtacttatgatgcagttattgtggattcctctgatccaataggaccggctcaagagcttttcgagaagcctttcttccagtcagttgccagagctttgcgtcctggtggtgttgtatgtacccaggcagagagcatatggttgcatatgcatattattgaagatattgtagctaattgtcgccaagtttttaaaggctcagtgaattatgcttggacaacagtaccaacataccctagtggtgttattggttttatgctttgctccaccgaggggcctactgttgatttccagcatcctatttttaacattgaggataatgagttctcaacaaaatcgaaaggaccacttaagttctacaattccgagatccactcagcatcattttgtttgccgtcttttgcgaagagagtcattggatccaaggccaactagatcaaagatcactgagcccaaggccaactggactggaatccctccgacaagagatttggttgtagcagaaagagcaatgaccccttttttcccatttaaataaaaattggagatgtaaacggttatccaagtgcttttgaattttgtctcagtatgagaacgttttgtatttggtaactgttttcccgc

SEQ ID NO: 3180 - DNA, 1167 bp, Oryza sativa
  ref <308>: DATABASE ACCESSION NUMBER: AK060917
  ref <309>: DATABASE ENTRY DATE: 2001-12-06
ttgaacccaatacccctactcggcggtgactagtacaccttatctcttcgaaaccctagctaagagccgtcgctttatctcttttctcttcttcttcttcccttgtactcctccgatccccaatctcatctatcaccacctgacctgatctttccctgcagatctcattgagaaagagaagagaagagatattcttttttccaaagaagaaaatcttggccgcgcgcgcgagatctttgcgcaaaagatgatatatgatgcctgatcgatcttctcgtttcggatcttattattgctcggctaattagtattattaacgctgctagccagggcctttgatccgcgtggtcgtggtcgtcggtgaggcagccgggcaggccgactcccatgcatggaagctcgcttcagggtcaagtcaactgattatgtttttcattaatttgttggtaattaatttttttatatgtacgtacatatatatatagctcggatggtttggtatttctttctcagatctatatatattgcaaggggatcggagtgtcgttagttacacggtatttattatagagtttttgggatagagagagatttctgactattagctagactagactgaaggcttttgtttcttttcttctttgatttgatctgatctgttcaatggagaacatttttatggaagccgagggcaggggatagctagccggaggtgctcctagtccgtgatatggaaggggctatatattcaactgcaacgctattggtcctccaatccattttatctcggcccctgaaactcaagttgttttgatacaattacaattaataatcaacaactgggtggttgtggtgaaaactctcagcattgcaagaccaatgcccctcagcctggacagcacaaaggcacattacaccatgatgatggcgcccactaaataaatttgttaccacctaccatttttcatcgttgtgtgtttggattactgagcgtgaacaaaggggtcctatatatctgttggactgagcagggaaagatagatagtacttgagggggatggtgctctatctttgttggattgtactgtcttactgattagcgatttctattcatgtgtcggttagctcaatagctgttaaactttatatttgataactattttatat

SEQ ID NO: 3181 - DNA, 1196 bp, Oryza sativa
  ref <308>: DATABASE ACCESSION NUMBER: AK104377
  ref <309>: DATABASE ENTRY DATE: 2002-08-28
gtattcttagtgaccaccccccatatcacatcctctccttcctcttcctctgctcactcagctctcccccgcgcgcgccaccgtcgtcgccatgtcgggcaacatcgccttcggccgcttcgatgactccttcagcgcggcctccctcaaggcctacgtcgccgagttcatctccaccctcgtcttcgtcttcgccggcgtcggctccgccatcgcctacaccaagttgaccggcggcgcgccgcttgacccggccgggctggtcgccgtggcggtgtgccacgggttcgggctgttcgtggcggtggccatcggcgccaacatctccggcggccacgtcaacccggccgtcaccttcggcctcgccctcggcggccagatcaccatcctcaccggcgtcttctactggatcgcccagctcctcggcgccatcgtcggcgccgtcctcgtccagttctgcaccggcgtggcgacaccgacgcacgggctgtccggcgtgggcgcgttcgagggcgtggtgatggagatcatcgtcaccttcgggctggtgtacaccgtgtacgccaccgccgccgaccccaagaaggggtcgctcggcaccatcgcgcccatcgccatcggcttcatcgtcggcgccaacatcctcgtcgccggccccttctccggcggctccatgaacccggcgcgctccttcggtcccgccgtcgccagcggcgactacaccaacatctggatctactgggtcggccccctcgtcggcggcggcctcgccggcctcgtctaccggtacgtctacatgtgcggcgaccacgcccccgttgccagcagcgagttctaattacccatttcgccatcggcaacacgcataaaaatggtggtcactccatcgtcagaatcttgtgaggatgtgttgtgaaggactgatttggttcagatggggaagaaggcttttgttgcgaggatgtgacacttgggtgatgatcgatccatgtttagtttcttcttgattaatttgtaatgtgatcagtgtggagcaagttggatgagatgcatgtttaagatcgaacacttctgttgagtttcattgtgagatttcatttgattcgggccatgtcatttcagtttgtttgtagcctccaaaataagcttgtgtcttctcctcgcaaataggaaatcagaaataaaattgttccggg

SEQ ID NO: 3182 - DNA, 1012 bp, Oryza sativa
  ref <308>: DATABASE ACCESSION NUMBER: AK060918
  ref <309>: DATABASE ENTRY DATE: 2001-12-06
gaaccgtctcctcctcctcctcatcctcttctccactgcccccgcacaaatcaactctactttccaaaacgcggcggcggcggcggatcaaaccctcatttggtgggattttttgctgcgtttaatcaaatcctctctctcttcgaccgcggggagatccggggttcgattgtttcgtctcctcctccccctctcgtgcgggcgtcggaatcgatccacgccccgcccgctcgctcgctcgctcgctctgtgagcccaagaggacattttgctcagtgctgtgctagctttgttggctcaagttcacaatgggaggttgtgtgggcaagggacgacgacatattgaggaagacaagcttgatttcaaaggtggaaatgttcatgtcataacaagcaaagaggactgggataggaagattgaagaagcaaacaaggatgggaaaattgttgtggcaaatttcagtgcttcctggtgtggaccatgtcgtgttattgcacctatttatgctgagatgtcaaagacttatcctcaactcatgttcttgacaatagatgttgatgacctaatggatttcagctcatcatgggatatccgcgcaacgccgacctttttcttcataaaaaacgagaagcaggtcgacaagcttgtgggcgccaacaaacctgagctcgaaaagaaggttcaggcacttgctgatggcagctgaaccttattatagcgcaacggctagaactgaaacgaatttggcatgtctgtccggccaagtttgtgtccgtgtgctcccttgcagcttctagtgtatagttttggtgtctctgttcaaaccatgtttctttttctttctgaattttgcccatgtgtctggccacacacatatgcaatctgtgaactaagaagttgtgatgtgttcagagctgtaacataagagtaatgtactagagtagttttaaaagacagtgatatggttgtattttgagctatgaagttgtgccaataaatgagtgggttttg

SEQ ID NO: 3183 - DNA, 2110 bp, Oryza sativa
  ref <308>: DATABASE ACCESSION NUMBER: AK104378
  ref <309>: DATABASE ENTRY DATE: 2002-08-28
tactctcactctgtctcctcccccgcgtcggtcgcttcgcttctactggaggagagcagaggtggtggttggtgagagaggatgcgcggcggcggcggcggcggcggcggcggcggcgaggaggccggccagaagctgaagagcatggacgtcgacaagctggagaacggcggcgacaagcccgccctcaagtaccacggctggagggccatgcccttcatcatagggaacgagacgttcgagaagctggggacgctggggacgtcggcgaacctgctggtgtacctgacgcaggtgttccacatgcggagcgtggacgcggcgacgctgctcaacggcctcaacggcaccaccagcctcgcccccatcatcggcgccttcctctccgacgcctacctcggccgctacctcgccctcgccatcgcctccgtcgcctccctcatcggcatgttcttgctgacgatgacggccgccgcggacgggctgtacccggcggagtgcggggtgggggagacgtgctcgaaggcgacgtcggggcagttcgcggtgctgttcatgtcgttcgcgttcctggtgctggggtcggcggggatccggccgtgcagcatgccgttcggcgccgaccagttcgacccccacacggagtccggcaagcgcggcatcaacagcttcttcaactggtactacttcaccttcacctccgccatgctcgtctccgccaccgtcatcatctacgtccagagcaacgtcagctggcccatcggcctcggcatccccaccgcgctcatgctcctcgcctgcgtcctcttcttcatgggcaccaggctctacgtccgcgtcacccccgagggctcccccttcaccagcatcgtccaggtgttcgccgccgcggcgaggaagcggtcgctcaagcagcccaaggaccccaagcaggacctgttcgacccgccgcacaccagcgccatcgtcaccaagctggcgcacacggaccagttccggtgcctcgacaaggcggccatcgtgtccggccccgacgacgtgcgcgccgggggcgccgcgccgtcgaacccgtggaggctgtgcagcgtgcagcaggtggaggaggtgaagtgcctcatccgcatcgtgcccgtctggtccacggggatcatctactacgtcgccgtcgtgcagcagtcgacctacgtggtgttgtccgcgctgcagtccgaccgacacctcggccggagcttccagatccccgcggcgtcgttcacggtgttcgccatgctggcgcagacgctgtggatccccatctacgaccgcctcctcgtgccgcgcctccgcagggtcacgggcaaggacgagggcctcaccctcctgcagcggcaggggatcgggatcgcgctgtcgacggtggcgatggtgatgtcggccgtggtggaggaccggaggcggcacatcgcgctgacgcagccgacgctggggacgaccatcaccgggggcgccatctcggccatgtccagcctgtggatggtgccgcagctcatggtgctggggctctcggaggcgttcaacctcatcagccagatcgagttctactacaaggagatcccggagcacatgcggagcgtggccggcgcgctcgccttctgcaacctggcgctggggaactacctcagtgggttcctcgtcaccatcgtgcaccggaccaccggcgccgggagcaactggctggcgcaggacctcaacaaggggaggctcgacctcttctactggatgatcgccggcatcggcatcttcaacatcatctacttcatgatctgcgccaagtggtacaggttcaagggggcagccgccaactgagatgcaagtgaagtgaagtttgttcgtttgggtggttaattaattatgtcaatggcagataattaattggtggagtgcttttagctgggttttttttttctgcctcatcatttctctcttgtatttttgtatctgtggtgtcttgaattataaaatctataggattaagtgggtgaggaaagagaaggaaagaaacaaaagggttggtttcttgtaagtggttaaaattcaaagataaatgaatcttcaatcctagtaaatcgct

SEQ ID NO: 3184 - DNA, 1010 bp, Oryza sativa
  ref <308>: DATABASE ACCESSION NUMBER: AK104379
  ref <309>: DATABASE ENTRY DATE: 2002-08-28
aactgctgctacgccgcgccttctcctcctccttcctctcctccccattccgccgcccgccactccaccccgcccgctccttcgttcccccccgcgccgccatggcatcctccgccgcgccgttccacatggtccagatccagcgcgacgacacgacttttgatgcctatgttgttggaaaagagaatgctcctggaattgttgttttgcaagagtggtggggggttgactatgagatcaagaatcatgctgtccacatttcccaaattggtgaaggatacagagctctcattccagatttgtatcgtggtaaggttgctcttgatgtagcggaagctcagcatctgatggaaggtctagactggccgggtgcggtcaaggatattcaggcttcagttaaatggctcaaggcaaatggatcacccaaggttggtgttactggatattgcatgggaggcgctttgtcaattgcaagtggagtttcagtcccagaggttgatgctgttgtggctttctatgggacaccaccttctgagcttgccgatgcttccaaggcccaggctcccatccaggctcattttggggagcttgacagttttgttggatttgcagatgtcacggcagccaagtcgctggaggagaagctcaagtcatctggcgtgccacatgaagtccacatctaccctggctgctcgcatgcttttatgaacacatcacctgaggccgtcaagaggaggaaggagatgggtctgactgatgagaaccaggcagcaattgacctggcctggtctcgcttctcgacttggatgggtcgtttccttggatcggcgtgagccatttacgcatatatgttgtcaacctgtcaggttgtatgaataaaatcattcaggccagatgcagagtaattaagtatacccaaaccaaataattgtgctgtgttggactatgtgaacatgccatgctttggtttgcgaattatctgtggttttactgtgctttcgagattgcat

SEQ ID NO: 3185 - DNA, 1292 bp, Oryza sativa
  ref <308>: DATABASE ACCESSION NUMBER: AK060919
  ref <309>: DATABASE ENTRY DATE: 2001-12-06
cttcgtgctagtgcgtgtgtgagagagagggaggcggccatgaccggaggggaggagcaggggaggaggctgtttggcgtgtcgctgacagacaggcccaggtggcagcagttcttgatctgctcatcggggttcttcttcggctaccttgtcaatggcatctgcgaggaatacgtctacaaccggcttcagttcagcttcggctggtacttcacatttgtgcaggggttcgtgtacttgggtctgattcgcctgcagggattcacggtgaagcagatggtgaacccgtggcggacgtacgtgcggctctcggctgtgctcatgggatcccatggcctcaccaagggttccctcgcattcctcaactaccccgcccaaattatgttcaaatccaccaaggttttgccagtgatgataatgggagcatttatacctggattaagaagaaaatatccgttccatgagtacatatcagcagtgatgcttgttatcggcctcatactattcacgctcgcggacgcacaatcatcacctaatttcagcatgattggtgtggccatggtttctggagcgcttgtcatggatgcatttctaggtaatctgcaagaagccatatttaagatgaaccctgacaccacacagatggagatgttgttctgctcaactgttgttggcctacctttcttggtggtgccaatggtgttaacaggggagctgatgcgggcgtggactgcatgttcccagcatatgtacgtgtacgccgtgctggtgttcgaggcgatggccacgttcgtcggccaggtctcggtgctctccctcatcgcgctcttcggcgccgcaacaacagctatggtgacgacggcgaggaaggcggtgaccctgctcctgtcgtacctgatattcaccaagccattgacggagcagcacgtcaccgggctgctgctgatctccatgggcatcgtgctgaagctcctgctggagaacaaggagaacgtcccgcgcaggcaggtgaggaagacggtgcagcattgggacgacaagcagcgggagatcagagaagtagaagaggagaaagctcccttggtatgaccatttttttagttggcccaagcaaaggctgaacgaatcacaatacaccaattgcaggacaggatagaaaatgctcaaaaaagagtaacaacccctctccctctgtctctctcatgtaatgttttgctgttgtgagattgttttgtgggtctatgccaaaggattcgattgacgataattacagattaatttggttggaggtg

SEQ ID NO: 3186 - DNA, 1083 bp, Oryza sativa
  ref <308>: DATABASE ACCESSION NUMBER: AK060920
  ref <309>: DATABASE ENTRY DATE: 2001-12-06
aaaaaaccaaaatccaatctccagctctcttcccccccccccccccccgcgtccagttccatctaatcagcttctcgtcgagatgggccgcaagttcttcgttggtggcaactggaaatgcaacgggaccactgatcaggtggacaaaattgtgaaaattctgaatgagggacagattgcttctacagatgttgttgaggtggttgtcagcccaccttatgtgttccttcccgtggtcaagagtcagctgcgcccggagatccaagttgctgctcagaattgttgggtgaagaagggcggggctttcaccggtgaggtcagcgctgagatgcttgtcaaccttagtattccctgggttattcttggacactctgaaaggaggagtttgttgggtgaatcaaatgagtttgttggagacaaagtggcatatgcgctctctcagggcttgaaggtcattgcatgtgttggtgagactctcgagcagcgggaatctggttcgaccatggatgttgttgctgcacaaacaaaagcaatttctgaaaggatcaaggattggactaatgtggttgttgcctatgaacctgtgtgggccattggaactggtaaagttgctacaccagatcaagcacaagaagtgcatgatggcctgaggaagtggctcgctgctaatgtcagtgcagaggttgctgaatcaacaaggatcatctatggaggttccgtaactggtgcgaactgcaaggagctggcagcaaagcctgatgttgatggttttctcgtcggtggtgcttcattgaagcctgaattcatcgacatcatcaactccgccaccgtgaagtccgcctaagatcttcaccccattcaccttcggcgtgggaagatgtctgaagaggatcatacctttttctgtgcttatgtaatgctagtagttttgtgctggagcagctactctttttcctccccttcacttccctgaagctacctgcagcttgagcaatgctaataatgcacaccactgaacatactaccataccaataatgtttagctccttttgtcgtgagttattatcatgtgagtttcagatc

SEQ ID NO: 3187 - DNA, 1308 bp, Oryza sativa; identical to SEQ ID NO: 2151
  ref <308>: DATABASE ACCESSION NUMBER: AK104380
  ref <309>: DATABASE ENTRY DATE: 2002-08-28

SEQ ID NO: 3188 - DNA, 1660 bp, Oryza sativa
  ref <308>: DATABASE ACCESSION NUMBER: AK060921
  ref <309>: DATABASE ENTRY DATE: 2001-12-06
aatttgcgacgaaccctaaccgcccaccaaatcctctcctccttccccaacggcgagcgtccccggcgaatccgccttgacggaggcaccccggcgagctcaccttcccggaggaatcccagctcagcctcatcgtcttcggtgagggaaatatcttggtgattcttgggaaccttcagaaagaccacttaatagttttccttggcccagaaaggcttgaggcttgagagctgaaaagttctgctggagctagtgctataatggccacaaaacttgtggttcttggaatcccatgggatgtggacactgaaggattaagagagtacatgggcaagtttggacccctagatgattgcgtcgtcatgaaggagcgttcgtctggtcgatctcgtgggtttggttatgtaacgttctcatcagctgatgatgccaagaatgttcttgagtgtgagcatgttctcggaaaccgaactctagaagtgaagatagccactcctaaggaagaaatgaaatcacagggatcaaaaaaggctactagaatatttgttgctcgaattccgcagtccgtggatgagtccatgtttcgtaggcattttgaagcctatggagaaatcactgatctttacatgccaaaggaacatggttcaaagggtcatcgtggaattgggttcatcacttttcagagtgcagaatctgtggacagtatcatgcaagattcacatgaactggatggcacaacagtagttgttgaccgcgccactcctaaggatgaagaagtcagatatcctccaagcaggggggcatctcagggtggctatggtgcatataatgcatacatttcagcagctaccagatatgcagctttgggtgcacctactctgtatgaccatccagggtcagcttatggaagaggaggatactatggatcctcccaaggaatgggcaacaaaaagatatttgttggcaggcttccacaagaggcaaacacggaggacctaaggcattactttggcaaatttggccgaattgtggatgcatatatcccaaaggaccctaaaagaagtggacatcgaggttttggttttgtcacctttgctgatgagggtgtggcagatcgggtagctcgcagaagtcatgaaattctaggacatgaggttgcaatagacactgctgcaccacttgagggtgactctggtggtggttacatggaacccatggatctttatggggcttatggttcaatgcgaacttatggcaggttctgcagtggtatcgactatgattacggttatggtcacagcggaagtagcagtagcagatcaagggctgattggcgataccgaccttactgagcctgctgtcttgttactgttaatgatgttttagtttacctccaagggaactgtggaaacggagaaaagaacaactccataaagaatgccaggttgtactatgttaatcttaagcgggacgggacatacgtggaatctgtatttcagttcatcctgtaaatttttctttgccattagaacgcattaatgcggtttctgtgccaggatgccatgagatcgaggcagcagtgtagttatcattattgtggaagtaccatatgtaataacaatctttcttctacacatgtaaacggtggttctggtttttg

SEQ ID NO: 3189 - DNA, 1786 bp, Oryza sativa
  ref <308>: DATABASE ACCESSION NUMBER: AK060922
  ref <309>: DATABASE ENTRY DATE: 2001-12-06
ctcttcgcctccgctgcgccgcgcatccgcaaccgcatcgcccattccatttccatggcgctcgccgccgccgccaccaccttccgccctcgcctcgtcgtcaccgccaaagccgacaacaccgacactcgccgtcgccactggaaggccggtgagttccccttccccacctcttccgacactccccgccggagcgcccgcaccgccgagcgtccgcccgataagccgagggatgaagatggggatagcagcaggaggactgggcgcaggcactggaaggcaggcgaattcccgggcacgcaggaggactccaggcgacctcggaggagccccatcaagaacgtcaagaagcggcttgacgcgcgcgccgaggccaaggcgtgggcctgcaccgtcaccgaggccctcgctgatcgcatcgacgccaaaaactggcaagaggcgctccaggtcttccagatgctcaaggagcaacctttctatcatcccaaagagggcactttcatgaagctcctcctgctgctgggcaggtcaggccagccttcccgtgctcgctacctcttcgatgagatgctgcagcaaggatgccagcccaccccggagctctacacggccttgattgctgcctactgcaggaatggcctcctcgacgacgccttccgccttcttgccgatatgaaggcctctccggtttgccagcctgacgtctatacctacagcaccatcatcaaggcttgtgttgatgcctcaagatttgacatagtcgatgctatgtacaaagatatggctgaccgctccatagcgcccaacacggtcacgcagaacattgtcctcagtggctatggcagggctggaaggttggatgacatggagaaagtactctctgcaatgctcgacagcacaactagcaaaccagatgtatggactatgaacattatattaagcctatttggtaacaggggtcagattgaatctatggagaagtggtatgagaaattccgaggctatgggatcgaaccggagactcggacactcaacattctcattggcgcatatgggaagaagcggatgtatgacaagatgtctgcagtgatggagtacatgcgcaagttagcgtttccatggaccactgcgacattcaacaatgtgattgaggcattcgctgacgcaggcgatgcaaaaaacatggagcacacatttaaccagatgcgtgcagaggggatgaagccagatacaaagacattttgttgtctcataaatgggtttggcaatgcgggtcttttccataaggtggttggcatggttaagctggctgagaggcttggtgtgccaatggatacaactttccacaatgctgttctcatgacatgtgtaaaagctgaggatttgatggagatggagagggtcttcatgcgcatgaagcaaatacagtgtatcccagatgctacaacatactccattttggtgggagcttatcggaaggaaggaatgactgacaagatctatgttctgcaacaggagaacccgactttggttccaactgaccttgtccatgtgtaactctcaccactgatctgtacgtactctgtactaactaatgtagtgaagcgttttcagattattcagtttcttgatttcagtttttacttttagttgtcatccaagttctgctttgtgcagactgataattttttctttgaaaatgtaatatgacaatgagatgatatgatgtcatgatgatgggatttacaacaaattgagcttcatgtttcatgggtttttattt

SEQ ID NO: 3190 - DNA, 1401 bp, Oryza sativa
  ref <308>: DATABASE ACCESSION NUMBER: AK104381
  ref <309>: DATABASE ENTRY DATE: 2002-08-28
ctgcaccccaagtgcttggattttgcagctgctcccctgatccggttcagataggctcttcttgacaggatcaccatgtctgcctttgtgggaaaatacgcagatgagctgatcaagacggccaagtacatcgcgacgccggggaagggcatcctcgccgccgacgagtcgacgggcaccatcggcaagcgcctggccagcatcaacgtggagaacgtggagcccaaccgccaggcgctccgggagctcctcttcacgacgcccggcgcgttccagtacctctccggcgtcatcctcttcgaggagacgctctaccagagcacggccgccggcacgccgttcgtcgacgtgctcaaggccggcggcgtcgtgccggggatcaaggtggacaagggcaccgtggacatcgccggcaccaacggcgagaccaccacccagggcctcgactccctgggcgcgcgctgcgccaagtactacgaggccggcgcccgcttcgccaagtggcgggccgtgctcaagatcggcgccgccggcgagccgtccgagctcgccgtcaagcagaacgccgagggcctcgcccggtacgcgctcatctgccaggagaacggcctcgtccccatcgtcgagcccgagatcctcaccgacggcgcccacgacatcaagacctgcgccgccgtcaccgagcgcgtcctcgccgccgtctacaagtctctcaacgaccacaaggtcctcctcgagggcaccctcctcaagcccaacatggtcacccctggctccgacagcccaaaggttggcgcggaggtgataggggagtacacggtggcggcgctgcggcgcacggtgccaccggcggtgcccgggatagtgttcctctccggcgggcagagcgaggaggaggcgtcgcagaacctgaacgccatgaacaagctggaggtgctcaagccatggacgctcaccttctccttcggccgtgccctgcagcagagcaccatcaagaagtggggcggcaagaaggagaacgtcgccgccgctcaggctgccttcctcgcccggtgcaaggccaactccgaggccacgctcggcaagtacggcggcgccgccggcgacgccgccacgtccgagagcttgtacgtcaagggctacacctactagaattcgtcccaatcactgggtggcgcctatgcggccgtgcctatgacagtagtagggtctcggtccaatccgcgtggcccacgtggcggtgcggattgcatcaagattcgtgcgggtatacatgtgttcctttctgctgtatactctcgattctctgcttccttcccctctagctcttatattttaacaaaagctgcgtctaaatgttcatctctttgcagtttatttgcaatgcaaactaatatgaat

SEQ ID NO: 3191 - DNA, 1375 bp, Oryza sativa
  ref <308>: DATABASE ACCESSION NUMBER: AK060923
  ref <309>: DATABASE ENTRY DATE: 2001-12-06
gcgtgcttcttcttcttctctctctaaatttctccattccgctcgcgatctccactcgcttcgtccagatctccgcatcaacccacagttagcgagcatgtcgtcttcgtcggagaaccccacggtgacggagcgtggcggcgggaaggaccgccgggacgacgacggcggcgaaaagaaggaaggaggcgggggattcatggagaaggtgaaggacttcatccacgacatcggggagaagatcgagggggccgtcggcttcggcaagcccactgccgacgtctccggcgtccacatcccgcacatcagcctccaccgcgccgacctcgtcgtcgacgtgctcatcaagaaccctaacccggtccctatcccgctcgtcgacatcgactacctcatcgagagcgacggccgcaagctcgtctccggcctcatcccggacgccggcacaatccacgcccatggcgaggagaccgtcaagatccccatctcactcatctacgacgacatcaagagcacctacaacgacatcaagcccgggagcatcatcccctacctcgtcagggtcgtcctcctcatcgacgtccccatcatcggcaggatcaagctccccctcgagaagtccggcgagatccccatcccctacaagcccgacgtcgacgtcgagaagatcaagttccacaggttctccttcgaggagaccaccgccacgctgcatctcaagctcgagaacaagaatgacttcgacctgggcctcaacatgctcgagtatgagatgtggctcggcgacgacagcgtcgccagtgccgagctcaccgagtcggcaacgatcgagaagcaagggatcaccaccatgcaggtcccattcagcttcaggcccaaggatttcggctctgctgtctgggacatgatcagggggaggggcactggctacaccatcaagggcaagatcgatgtcgatactccgttcgggaacatgaagctgcccattagcaaagagggtggaaccactcgcatcaagaaggatgacgatgatgacgatgaggattgaagttgtgctgataaaacatacagggtagggaagcagagatggtgatgccctgtgctctgaagcatatggtgctattgttggctgccttatctgagctgagccgctgtgttgtgttgttactcatctagctgcctcccgttattttgttcatgtttattagactcgggacaacttaatttgtggtggaaaccttgataataaaatcaacaggcccttgttctttgtggggtcagttgatatttttcgttatgttttccccaaatactggttgtgagggcgaatgctgttcaggaacctgttccaatggtaaactgaagaatggttgtc

SEQ ID NO: 3192 - DNA, 1201 bp, Oryza sativa
  ref <308>: DATABASE ACCESSION NUMBER: AK060924
  ref <309>: DATABASE ENTRY DATE: 2001-12-06
ctgaccgccgcacttcatcccccctcccctccctccctccgccggagcgccgtctcaaaatggccgccacctcctccaccgcctccgccatggcggtggccgccacctcccctaccattgccactgcgccattctcgtctcttcctctccgccttcgcctccgccccaaacccctcctcttcacttctcgcctcctcctccccgtccccaagtcctcctcctgggttgaatccgtctcggaggaaggggaggaagaaggcgtggaggaggattccgaggaatccggtgccgcgggggaagacgatgacggggaggacaacgacgaaaagccgcggcctgagccggtggccgcctctgggttcgagttcgcgtcgccgccggagggctacgtggagccggccccgttcgacgagctgcccccggagtcgcccgaggacgtggcagcggcgtacgaagcgctctacgggccggcctttagcggcgagacggtcatgggcaacaacgtcttcgaggtcaaggtggtggatcccgtcgacatggaccgggagcagcgccctagcgacgagttcagcgagcgggtcgtgcaggtcaatcgcgtcaccaaggtcgtcaagggcgggaggcagttatccttccgtgcgatcgtcgtcgtcggcgacatgaagggccacgtcggtgtgggcgttggcaaggccaaggaggtcaccgaggccatcaccaaggccgccatgaacggccgtcgcaatctcgtcaccgtgccgctcaccaagtattcgaccttcccgcatagagcagatgcagactatggagcagccagggtcatgttgaggcctgcttgccctggatctggtgtaattgcaggtggagctgtgagggtcgtgctggagatggctggggttgaaaatgctctggggaaacagctgaggagcaagaaccccctcaacaatgcaagagctaccatcaaggcgacccaaatgatgaggcagttcaaggatgttgctgcagagcgcgggcttccaatggagcagctatggaaataatcaaataaatcaaccttaaattccctccaatatttttctttctccatttcttgagttcattttcagttgtatctgtcagtggggataatcctacatttaagtcctctccccaccctaaatgcattatgtgtctccacatatacatggcaaagctttagatg

SEQ ID NO: 3193 - DNA, 1468 bp, Oryza sativa
  ref <308>: DATABASE ACCESSION NUMBER: AK060925
  ref <309>: DATABASE ENTRY DATE: 2001-12-06
tctgcactcagctcgcgccgccgccgccgtcgccgtcactctcctcaggtaaggaggaggaagatgtcgcacaggaagttcgagcacccgaggcatggatccctcggcttcctcccgaggaagcgctcctcccgccaccgcggcaaggtgaagtccttccccaaggatgacgtatcaaagccctgccaccttacttccttcgttggctacaaggctggaatgacacacattgtgcgtgaggtcgagaagcctggctccaagctccacaagaaggaaacctgcgaggctgttaccatcatcgagacccctccgcttgtcattgttggactcgtggcctatgtcaagacacctcgtggacttcgctctctcaactctgtctgggcccagcaccttagcgaggaggtgcggagaaggttctacaagaactggtgcaaaagcaagaagaaggctttcactaagtatgcccttaagtatgacagtgatgctggcaagaaagaaatccagatgcaacttgagaagatgaagaagtacgcatctattgttcgtgttattgcccacactcagatcagaaagatgaagggcttgaagcagaagaaggctcacctcatggagatccagatcaacggtggcactatcgccgacaaggtggactatggctacaagttctttgagaaggaaatccctgttgatgcagtcttccagaaggacgagatgattgacatcattggtgtcactaagggtaagggttatgaaggtgtcgtcactcgttggggtgtcacccgccttcctcgcaagacccacaggggtctccgcaaggttgcttgtattggtgcctggcatccagccagggtgtcctacactgttgcccgtgctggtcagaacggataccaccaccgcactgagatgaacaagaaggtttacaagattggcaagtctggtcaggagtctcatgcggcctgcaccgagttcgacaggactgagaaggacatcaccccgatgggcggcttcccgcactacggtgtggtgaagggcgactacctcatgatcaagggttgctgcgtcggtccgaagaagagagtcgtcaccctccgccagtcgctgctgaagcagacctcgcggctcgccctggaggagatcaagctcaagttcatcgacacctcgtccaagttcgggcacggtcgcttccagaccaccgacgagaagcagaggttcttcggcaagctcaaggcctaggccatcagaattcaatcgaacctcacctgatagctttcccagtttctgtacttgtcctgagttttgtggcagatattttgagtacccagtttaaatgctttgctactctgagctgctggtgctgcggatgatcaagctgttgagatttatgaattttgaactcgatagttatgttttttcgcctgccttgcatctttcagctaccaattggttgaatcaaatttgaaatttgttt

SEQ ID NO: 3194 - DNA, 1350 bp, Oryza sativa
  ref <308>: DATABASE ACCESSION NUMBER: AK060926
  ref <309>: DATABASE ENTRY DATE: 2001-12-06
ttgtttgacatatggcaacgacatcaaatggacagtggtgtggactatcttgatttccaaaaaacttataagcaagcagcaggatctttttctgagtggagaggcagactagtcagaaattttggttttgtcattgacttgataagcttattgatgtcacttggtcattgcccaatgatcttctggctccgtggtatggcgtttcatctggttgacgctgttctcctattgaacttgcgcgctcttatagcttcattttggaagcggataaaaacttatgccaagttacgaaaggcacttagttcactcgacggagcacttccagatgctacatatgatgaaatctgtgcatacgacgatgagtgtgccatctgtaggggaccaatggctcgagctaaaaagttatcctgcaaccatctatttcatctagcttgcttgcgatcatggttggaccaaggattaatggatggttactcatgtccaacttgtcgaagacctctctttctgtcatctcaaggtcacacaagatctacagcagaggtaggaaacgtccagttaattgcagaacaacttaatgcggggttgaatcagcagagggttcctggtcatgaacatcctattgaacatcagaatcctgcagatgctgtttggagaggtgctggtcttgattctagctgggcaccaccatggtcgagccctgggatggacaatcccagttcttccagcgccgtgacatcagtggggcttagtggagttcagatgatgatgaggcagttgacttcagtgactgataattatgggcatccagatgccacctggagtctatggcctgagccagttgcaggatcttcggttgttccatcctcttcctcgaggcctgatggtgcttcagctgctggcttgcggttccgaggcactgcaagacccgcgaatggtagcatgtcggaggttctctccatggtagatagagtacgagaagttttaccccatatccctgacgagctaattattgaggatctgatgagaacaaataatataaacgctactgtaaataatcttctgctgatgcaataaaagataaaccagcaatacaacatataagcacgatgtttaccggctataagttcatatatgaaaggatgtatagttaagttaaagacgaacctgggtgtccaagcacctcttggttcttgtaataagtgttttttttagtttatttcttcccaatgtactaaaatgccccggctttgtatagtaatcacagctgtataatattatgctcaatatggcgtaggatagcatgtgtagaagatgttatcatccaaataaaagtgtgtttgtcatcccaat

SEQ ID NO: 3195 - DNA, 1212 bp, Oryza sativa
  ref <308>: DATABASE ACCESSION NUMBER: AK060927
  ref <309>: DATABASE ENTRY DATE: 2001-12-06
aagcccaacccggccggcagcacacgcgacgcgcgcgccgacgcgaccacaccgacaccgacgcggccggcgagataagataagcagctagcagggagtggcctccgaaaccgagaggacgaggagtacacaacgtacgggactacggggcgcgggggccatggacaccttcttcctatcgcacggcacgcccacgctctccatcgacgacacgatgccggcgcagcacttcttcaggtcgtggctaccggcggcggtggcgggcgcgcagcctccgcgtgccatcctcatcgtgtcgggccactgggagacggccacgccgaccgtcaacgtcgtccgcggcaacaatgacaccatccacgacttcgagggctatggcttccccaagtccatgttccagctggaatacccggcgccgggcgcccctgatgtggcgaagaaggccaaagagctcttggagcaagccggatttgggccggtgaaggaggaccacggccgcgggcttgaccacggcgcgtgggtgccactgatgttcatgtacccggaggcgaacgtgccggtgtgccagctctccctgcagaccggccgcgacggcgcgtaccactacgatctcggcagagcgctggcgcctctccgggacgacggcgtcctcatcctcggctccggcaacgccacgcacaaccttagctgcatggcgcccgtcgccgagggcacgccggtgccccagtgggcggcggagttcgacgggtggctgcaggaggcgctcctcgcgggcgggaggcacgacgacgtgaagcagtacgaggagaaggcgccgaacggtaagatggcgcacccgtcgccggaccacttcctcccgctgcacgtcgcgctcggcgccgccggggaggatgccaaggcggagctgatccaccatagctggtacaacgcgacgctctcccacgcgtcgtaccgcttcaccaccaccaccaagaacaaaccgattgccgcatgcaaagagtgaaacatgtcttgcttatatcatcgccattttactcttaacaattaataatctccgtgggatctacgttaatatactcctattaacgtagacgtacgttcgtgcctgtatttcctaacggccgtgtcttgtggttttcagttgcaataaacttgcatgcatggtggtttgggttgtggcccagcctctcatggcgttgatatcactatgat

SEQ ID NO: 3196 - DNA, 886 bp, Oryza sativa
  ref <308>: DATABASE ACCESSION NUMBER: AK060928
  ref <309>: DATABASE ENTRY DATE: 2001-12-06
tagtctcctctcccgctccacctccccgccgccgcctctcgccgctcgccgccgccgccgccgccgccatgggtgcgtacaagtacgtgtcggagctatggaggaggaagcagtcggacgtgatgaggttcgtgcagcgcgtgcggtgctgggagtacaggcagcagccggccatcgtccgcctcacccgccccacccgccccgacaaggcccgccgcctcggctacaaggccaagcagggttatgtggtttaccgtgtccgtgtgaggcgtggtggcaggaagaggccagtgcccaagggtattgtctacggcaagcccaagcaccagggtatcacccagctcaagttccagaggaacaagaggtcagttgctgaggagagagctgggcgcaagttgggcggactcagggtgctcaactcctactgggtgaacgaggactccacctacaagtactttgagatcatccttgtggatgttgctcacagtgctatccgcaatgacccaaggatcaactggctctgcaagcctgtgcacaagcaccgtgagctccgtggtctcacctctgctggcaagaagtaccgtggtctgcgcggcaagggtcacactcaccacaaggccaggccgtcccgcagggctacctggaagcgcaaccagactgtctctcttcgccgttatcgttaagcctatgtgctttgatgttacgttactgtggaatccaacccttgcagactttgataatatctgtttgcacttttaaaattttggtacttgtgttctgaaaccagtgaactatcttctagaagcaatgttgctgttctctatttgcctgtgatgagatgaagaaatgattcagttatcgaatgctctgtgagctggttatgatt

SEQ ID NO: 3197 - DNA, 1195 bp, Oryza sativa
  ref <308>: DATABASE ACCESSION NUMBER: AK060929
  ref <309>: DATABASE ENTRY DATE: 2001-12-06
gaaaaaaaacacgacgaacacgttaaaaaaaggtcgaagagaagtgggagacccaaaccgcgaacaatgtgtggaggcgccatcctcgccgagttcatcccggcgccgtcgcgcgccgcggcggcgaccaagcgggtgaccgccagccacctgtggccggccggctccaagaacgccgcccgcggcaagagcaagagcaagaggcagcagaggagcttcgccgacgtcgacgacttcgaggccgccttcgagcagttcgacgatgactccgacttcgacgacgcggaggaagaagacgaaggacacttcgtgttcgcgtccaaatctcgtgtcgtcgccgcgcgcccacgccgcggcaacacgagagccaccgccgtgccaccgccggcgacagcacccgccgccaccggccatgatgatgacgagctccttcaccgacagcgtcgccacgtcggagtccggcgggagccccgccaagaaggcgaggtccgacgacgtcgactcgtccgagggcagcgtcggcggcggcagcgacacgctgggtttcaccgacgagctggagttcgacccgttcatgctgttccagctcccctactccgacggctacgagtccatcgacagcctcttcgccgccggcgacgccaacagcgcgaacaccgacatgaacgccggcgtcaacctgtggagcttcgacgacttcccaatcgacggcgcccttttctgatgtactcctccattgatgcagtttgtgcactcaattgttaatcacgtcgtcgttgatgaatgtttaaccggaggatgatggggtgcagctgatatcatggcttgcttgattaccgaattatattgcggtgtttgtgtttgtcaattagattctgaatctgtactactgccgatcttatgatcaaaactatatattaagtttatgtactcttaatttgtgggctacttttacggggtcttcgtactgctggtcaaatagtcctatgaaatcgatcatgtcggcaatatcgtcgtcaattatcgtggtcgtggttgttaatgatgtcaaataagtctatgaaaacctggtcctcttggtgtttatgtaccactgatcgatccatcatttgatctctgtcatgttgagatggatcgtgtaagaatatcataatttgctggattcagtccagtcgtaatgtattttggtttgtac

SEQ ID NO: 3198 - DNA, 1061 bp, Oryza sativa
  ref <308>: DATABASE ACCESSION NUMBER: AK060930
  ref <309>: DATABASE ENTRY DATE: 2001-12-06
acacagccactcgatcgttatcccttgtccgtcttgccttgccttgtcgtaagctaggcaatggctatgccgctgccgccgccgccgccgcctcgtcctcctcttggacggggacggctcgtcggagtaggaccagctccagcaccagcaacggcctcccaatccaaccgcccagtgccccccctgcagctgcctcgctgccgctgccatcgctcggagggaccctggaggacgacggcggcggcgaacgggaggaggcggtggtggtccgacgaggacatggaggaagaggacgacgaggagggatacggatacgacgacggcggcgcgccaggcgggtcagcgcaggagctgttcggcgagccatggttttccaagctcttccgtgcgtacggctacgtgctgccgctgctgctggcgtccatgctggtggccacggggcccagagctttcctcatggccatggcgctgccgctcgcccagtccgccatctcctgggtcgtctccttcttcaccaccaggagtcgtcggcagcaggaggaggaggagtcgtacggatacgactacgatgacgatcccgccttccaacgccgagaggaagacgacgacgacggcgactactatgatgccggggcatggcaatggcggagcaggagccaccagcaatcgaccgaatccggctccggttttggaggatgggatgacctcctctacgacgatgaggagaagaaggagcaggagagctcagggaagaagaggacgccaccggagcccgacacggcggcggctgctgccgcctccgatctgggactgggattgcgggcgaggagaggtccacgacgcagcaatggcggcatgtcgcgaggaagaagcagcagcagcatgaggtataaccaggcgccactgctgacgcgccttctcgtggcactcttccccttcctcggctcatggttcaggatactctaaatttgagaagaagaagaaaaactgagagatttcagcattcagaatggattgattcatcgtcagttcgtcagactcttatcacaatttccttctcc

SEQ ID NO: 3199 - DNA, 983 bp, Oryza sativa
  ref <308>: DATABASE ACCESSION NUMBER: AK060931
  ref <309>: DATABASE ENTRY DATE: 2001-12-06
gcaaaacaaaatacaaaccagaacagtctcaaagcttcgcccaagcagagaagaatggccgccggaggaggaggaggagacgagctgaagctgctcggattgtgggcgagcccgtacgtcctgcgagcgaaattcgcgctcagcttcaagggcctgagctacgagaacgtcgaggaggacctccacaacaagagtgagctgctcctgagctccaacccggtgcacaagaaggtgcccgtgctcatccacaacggcaagcccatctgcgagtcgcagatcatcgtggagtacgtcgacgaggcgttccctgacgccggcgagtcccttctcccctccgacccttacgaccgcgccgtcgctcgcttctgggccgcctacatcaatgacaagttcatgccggcgtggcagaaggcgtcgttgggcctcacggaggaggagaaggcggaggcggtgaagcagatgctcgccgcgatcgagaacctggagacggcgttcaaggagttgtccaaggggaagcccttcttcggcggcgacaccgccgggtacctcgacgtcacgctcggcgccgtggtcggctgggcgcgcgccggcgaggtcctgttcgggaggaagctcttcgacgccactaggagccctctcctggcggcgtggatggagcggttcgtcgcgctggacgctgtcaaggcggtgttgccggacaatgccgagctgatcgagtatggcaagatgaggatggcgcactacgccaagcttgctgccgccttggctgctgcgaacaagaagtgagccggcgaagcaaacctgtagttggtgtgtgtccgttctcgttgctcgtggtctcgtggaggatgaaagctggtgcaccatagtccttccacaccgtgaggttgagttgtgactttttttttcttccagtgatccgttcgatcggatcgtcatgtgattctggcgcatttaactcaataaaagaaaggaagaagttc

SEQ ID NO: 3200 - DNA, 1066 bp, Oryza sativa
  ref <308>: DATABASE ACCESSION NUMBER: AK104382
  ref <309>: DATABASE ENTRY DATE: 2002-08-28
tgctgtgaactttgcatatgaggctggtcttcaggaaaaattccccccagcccctcttttaaaagcctaccttgaagattcaaagaagataccctcaaattcagataacctgagtactagcactggccaatctgggagcaatgccaataagaaggagcagtctgcactgcgggctgttataaagtgtgttgaggaccacaaactcgaagctgagtttccattggaggatctccgtgagcggctggaagaactggagaaggccaagaccgagaagaaaaaggcggcatcaagcagttccagcggtggtagctctggtccagccaacaagcgcatccgggcaagcaccggaggaccgatgccccctgccaaggcaggccgtctcaccgactacaccggtacaccgtcttcgcctgccaccaccacgaccaatgccacattcattcgctccccgtcccatgcctcctacggtacagcatctccttactcttatgataggccagctgcacaccccctctactgtggccagaacacactggcaatgagggagccctatgcataccaccacccatctgaggtatccagcgtcggcctcggcatgtcatacccatcccctcccataacctacccggcctatgctggatacagcaatggaatcggctacagcaatgcaatggccccagcctttcaccaccaggcttactaccggtaggatcagtcgaagccgatgaaatgacaatgagctgaatcgctgatggtggcagggcggctcgccaccatggccatgttttgtagtgactgactacaacggtaggtgggtgggggcgtgtgttccttaatactagaagatgcttgtgttggttagttctccccgttattagctgctctcgctacttcgcactgaagaaactgaatgtaaattatggacgtgttgtccctggaccctcgtcgtcatcttgtgttgtaattcagtctaaaccactctaaaacccacaaaaaaaaatccggcatgtaatcttcaagcactgaactatctcggcttaattaatgactatcttatgttagttat

SEQ ID NO: 3201 - DNA, 1105 bp, Oryza sativa
  ref <308>: DATABASE ACCESSION NUMBER: AK060932
  ref <309>: DATABASE ENTRY DATE: 2001-12-06
tgaaggcgtagattttattgcagtttcgtttgtcaaatctgcagaagtaattaaccatctgaaaagctatatagctgcaaggagccgtggcagcgatatagcagtcattgccaagatcgagagcattgactctttgaagaacttggaggagataatccgtgcttcagatggtgccatggtagcccgaggggatatgggtgcacaaattcccttggagcaagtcccctcagtacaacaaaagatagttaaactgtgcaggcagctcaacaagccagtcattgttgcgtcgcagcttcttgaatcgatgattgagtatcctacgcccaccagggccgaggttgctgatgtttctgaagcagttcgtcagcgtgcagatgcgcttatgctttcaggtgagtcagcaatggggagatatccagagaaagctcttagtgtcctccggagtgttagcctaaggattgagaagtggtggagagaggagaagcgccatgaggaactggaacttaaagatgtttcatcttccttctctgacaaaatatcagaagaaatctgcatttcggccgctaaaatggccaacaaattggaggtagatgccgttttcgtctacacaaacactggccacatggcctcactgctctcgcggtgccgtcctgactgcccgatcttcgccttcacgacctcgacatctgtgaggagacgattgaacctccaatggggcctcatccccttccgcctcagcttctcggacgacatggagagcaacctgaaccgtaccttctcgctgctcaaggccaggggcatgatccagtccggcgaccttgtcatcgcgctctccgacatgctgcagtccatccaggtcatgaacgtaccttgagaatcatcatgctcccctctcgtgtttgtttgttctgcccaaaacggaacacggctttagttgacatcatcttaagggcggttttctggtttgaaatttattcgtttgttctccattgtgttagacgacagaaccagagaatgttacaacaataatgctgcaacttccagcgcgttgtaaactctatgctatttagcctgatgtataaggccatgaactgttttgtcgctt

SEQ ID NO: 3202 - DNA, 1271 bp, Oryza sativa
  ref <308>: DATABASE ACCESSION NUMBER: AK060933
  ref <309>: DATABASE ENTRY DATE: 2001-12-06
gcttctgtcatcacttgtcatggagcttctgactcatctttactaggaagggtcttttcaagcccttgttgtgtctgtcccttccttacatcacatccatccccatgcttgctttcctgatttcttaattcgcatcatttcggcatttccattgctagggtttcttggagatccaacccgggaagcaactggagagcatggtgaaggaggcgtcggtggacgacgtgatgaaggtgctgatggcgtcgcgcaagttcgagatgcaggagctgtgggcgacttgctcccacctcgtcgcgcgctccggcctctccgccgatctcctcgccaagcacctccccatcgatgtggtggccaagatcgaggagatccgcgccaagtcgccgctcgccgcggcggccgcgccgcgctcgccgttcctgacgcaccactacctccccatgaacccggcgtcctccgcggcggaccgcgacaacaagatccggcgcatgcggcgcgccctcgacgccgccgacatcgagctcgtcaagctgatggtcatgggcgagggcctggacctcgacgacgcgctcgccgtgcactacgccgtgcagcactgcaaccgcgacgtcgtcaaggcgctgctcgagctcggcgccgccgacgtcaactcccgcgccggcccgacaggcaaaaccgccctgcaccttgcggcggagatggtctccccggacatggtgtccgtgctcctcgaccaccacgccgacccgaactccaggacgctcgacggcgtcacgccgctcgacgtgctccgcagcctcacctccgagttcctcttcaagggcgccgtgccggggctgacgcacatcgagcccaacaagctcaggctctgcctcgagctcgtgcagtcggcggtgatggtgaccacgcgcgacgacggtgcgcctgtcaccggaggcgaggccggcggaagcgacggcggcaacttcccgcggagcgacgccgacgacagcttggtgagcctgacgatgaactcgacgctaatgtaccagggccaggaaatggcggcggccgtggccgccggcgaggggaggaaaagcaacaacggccgagggagcccgccgcccgccatgtacttccccaatggcttcgcataagtaatattattccctatccttctcttctactagccgtgttgagatttgtggggttatgcatggttgacaagatgagcagcaaatggtgtagctagctactatatagctaggataaatgggcaacaatttagtggt

SEQ ID NO: 3203 - DNA, 1111 bp, Oryza sativa
  ref <308>: DATABASE ACCESSION NUMBER: AK060934
  ref <309>: DATABASE ENTRY DATE: 2001-12-06
tccaaagtatgcatcggcgcagttctacattgacaatgtacttccgaggatcaaagataaaaagataatgtctatcaagccatttgttgataggctggggtatgataatgttccaatggagattaaccggctcagatgcagagttaattaccatgccttgaagtttttacctgaaatcgaagaaatggctgagaagctagcaacaaggatgaggaaccgaacgggcaatgtaaatccatacatggctcttcatcttaggtttgagaaaggaatggtgggtctttcattttgcgattttgcgggaactagagaggagaaagcaatgatggctgattatagacagaaacaatggccaagacgcttcaagaatggatctcacctttggtcattagcactggagaaaagaaaagaaggtcgctgccctcttgagcctggggaaataggtattattttacgtgcaatgggatatacaaaggaaactcagatatatgttgcatccggtcaagtttatggtggaagcaatagaatggctccgctaaggaatatgttccccaatttggttacaaaagaagatcttgcaagcaaagaggagatagaacacttcaagaagcatgtgaccagccttgctgcattggacttcctggtttgcctgaaatcggacgtgttcgtcatgacccacggtggcaatttcgccaagctgatcatcggtttccgccgctacatgggtcggcatcggctcaagtctatcaagccagacaagggcctcatgtccaagttcttcggcgatccctacatgccatgggcaactttcgtggaggatgtgatgatcactcaccagacacgaactggcctccctgagtccacattcccacactacgacctctgggaaaacccccttacgccttgcatgtgtagagcttaaactatagacagatattgattgtgcgtagatattctttgttcatatactgattgtaagtttatatagttctttgtatcacatccatttttcattttacctgttttcttaattgtatcttctaccctacaatgcaccaactgtttttactcatttttcattcttaaaatccaacgacacatatttgtctgc

SEQ ID NO: 3204 - DNA, 1083 bp, Oryza sativa
  ref <308>: DATABASE ACCESSION NUMBER: AK060935
  ref <309>: DATABASE ENTRY DATE: 2001-12-06
gtccaggcctcgcgttcctcggttcctcctcctccttgctagctgctgctgagtgctcggcgatgacgggcgtcgggtcggcggtgcggcggctctacctctccgtctacaactgggccgtcttcttcggatgggcgcaggtgctgtactacgcggtcacgacgctgctggagagcggccatgaggccgtctacgccgccgtcgagcggccgctgcagttcgcgcagaccgccgccttcttggagattcttcatgggcttgtaggtttggtgaggtctccagtctctgcaactcttccacaaattggatcaaggttgtttcttacctggggcatcctgtggagctttccagagacacattcacatatccttgttacttccttggtcataagctggtccatcactgagatcattagatattccttctttggcatgaaggagacattcggatttgccccttcctggctcttatggctgaggtatagcacctttatggtattgtatcctactggtatcagcagtgaggtcggtttaatctacattgccttgccttacatgaaggcaacagagaaatattgccttaggatgcccaacaaatggaacttctcctttgatttctcctatgcatccattctttctctcgccgtctacgtgcccggatcgcctcacatgttcacctacatgcttgcccaacggaagaaggcattggcaaaggctaaggctgcataatggtgatgctcaagagctttcttgaatttgtcacttgtggcttaaggatctgcctaaatagctcacatttgctactcttttagtagaagtctgtagatgaggacatgttggaaagaactactattacactgcccatcatttgttgtaactgtagtcttctaccaagaattctagattttacctggttaaattattgaatgattgatccaaaatttaccagcttgtttcaaattgcactctttttgcgtttgctgttagcctgttatgctgtatgttgcacactttgcactgcgtgctatagagaattggcatatttgcatatttactggtttgcaattatgagtcccattgtttc

SEQ ID NO: 3205 - DNA, 1118 bp, Oryza sativa
  ref <308>: DATABASE ACCESSION NUMBER: AK060936
  ref <309>: DATABASE ENTRY DATE: 2001-12-06
catgattctgaaccagctgcgcaacacgagcaacaaggtcgctgtgaaggacgggctaaacaaggagatcgccgtgttcgggctcgccgggggtagcagcggcggcgccggcctccagcgagcgaacagcgcgagcgcgttcggccagccgcacaatatttggcgcccacagagggggctccccgagcgcgctgtgtccgttttacgcgcgtggctgttcgaacacttcctgcacccgtatcctaccgatggtgataagcaaatgctagcaaaacaaacaggcttgacacgcaaccaggtatcgaactggtttatcaacgcaagggttaggttgtggaagccaatggtggaagaaattcacaacctagagatgaggcaaatgcacaagcactcggtggttgacaagggccagcatagcgtgcatcatcaggcccagcattcttcgcagtgcagcgggaatccctccgttccttcggactcccatcctggacagagcagcagcataactcggaaccacaacaccgctgcctcccagggcttcccggatgagctctcccagatgtcccagtccatccagggacaggtgagcttcgcatacaacgggctgacctcgcagcacaacattgcatcaccacatcatcagcaccagcaggtcggcggtgttggtatcggaggcggcaatggcggtgtctccctcacccttggtcttcaccagaacaacagggtctgcatcgccgagcctctcccggctgctctcccggccaacctagctcaccgtttcggactggaggaagtcagtgacgcctatgtgatgagctcatttggaggtcaggaccggcatttcgggaaggagattggtggtcacttgctgcatgattttgtcgggtgattgtggctgctgcctcaggttgctggtgatgcacttgtaatgtactgctagtatgatgttaggatggtatataagtcaatcacttggcgacatggcttgatgatcagtctgaatcaatttgttcggagggtgaaaaaacattgatcttcccttcatgtagatccaggtatgctgtcaaatatttgacaccttgcgggctatagagagattgacaataccttcccaaggc

SEQ ID NO: 3206 - DNA, 1104 bp, Oryza sativa
  ref <308>: DATABASE ACCESSION NUMBER: AK060937
  ref <309>: DATABASE ENTRY DATE: 2001-12-06
ctaattgaagtgctggactcgatggtagacacagagtattggtatgtggagagtggtagccgagctaatggccggggcaaaaagaatggtctgaggcagacgaagaagtggtggctcccatcacctcgtgtgccagatatagggttgtctcaatttcagagaaataggcttgtttttcaggctaagctggttcatcaaatcctcaaagctgcgatgtcaatcaatgaagaagtcctgcttcagatacctattcctccagctgtcacggatgctcttcctaagtctggcagagctggcttgggtgaagacttgtaccatgctataaccacagagtacattcccatagaggaaattttcctctctcttagtttaaaaacggagcataccgtgctcgagactatgaaccggttggagggtgcagtttttgcatggaatcaaaggatctcagaggaaaagagcaagaaatccccaggaaggcattcctggaatttcatgaaggatagttcatcagaactcgataagatgtccatgtgcatagaaagggttgaaacacttatgcagcttctgaaatccagattcccgagccttcctccaacttttatagaagttgtaaagatccaatacaatgtggacgtggggcatgccattgtggaggcctactcaagggttcttgttggggtggcattcagcatactgtccagggtagcagagattctgctggaagatgacctgatcaagaagcccaacacccctctggccacactcaagttcgacctctcctccgacgtgtacctcgccggcatcaccgagacgccgccgggccacatccggcggtcgctgatggaccagatcagcctggtcgacggcagcctcgacgcggtcgtcaggaagaagggggtgaagcagcttaggtggtgaaaaaggacatgaagctgtgaagtttttctttttggcagttgtacagggtttgtgatgatgatgcatgctgtgctgcgcgctggctggctacataaagttggttaagttcaccttgctaatacgtcctgtatggaacgggctaaatagtgtatgcatggtaaaagctactagcattggccgcatcgt

SEQ ID NO: 3207 - DNA, 1155 bp, Oryza sativa
  ref <308>: DATABASE ACCESSION NUMBER: AK060938
  ref <309>: DATABASE ENTRY DATE: 2001-12-06
aacgcgcgggccgcgatcgtgcgaggggcacttgcatttccccgcgagatttttacgatgaagaccgcatcgtcgtcgtcgtcgtcgtcgcacgggttcccggccaccgcctcgctctgcaccccgtatctcctgctggtgccgctcggcctcctcgccgtggtgctcgtcgtccccagcctcggctcctcccacgtccgctccgacggcctcggcgtcctctgccacgccggcccatccaccgccgacggctacctcgtcacgccgggtggagatgcagcttccgctgctgctgctgctgctgagacgaaggccgtcgtgcggccggagctccgtctgctggtgggggtgctgacgacgccgaagcggtacgagcgtcgcaacatcgtgcgcctggcgtacgcgctgcagccggcggtgccccccggcgtcgcgcaggtggacgtccgcttcgtgttctgccgcgtggccgacccggtggacgcgcagctggtggtgctggaggccgcgcggcacggcgacatcctggtgctcaactgcacggagaacatgaacgacggcaagacgcacgagtacctctcctccgtgccgcggatgttcgcgtcgtcgccctacgactacgtgatgaagaccgacgacgacacgtacctccgcgtggccgcgctggtcgacgagctccggcacaagccccgcgacgacgtctacctcggctacggcttcgccgtcggcgacgacccgatgcagttcatgcacgggatgggctacgtcgtgtcctgggacgtcgcgacgtgggtgtcgaccaacgaggacatcctgcggtacaacgacacgcacggccccgaggacctcctcgtcgggaaatggctcaacatcggccgccggggcaagaaccggtacagcctcaggccgcggatgtacgacctcaactgggacatggacaacttccggccggacaccgtcctcgtgcacatgctcaaggacaaccgccggtgggcggcggcgttcaggtacttcaacgtcaccgccgggctccagccgtccaacctgtaccacttcccatgatcgatcaatttttgttttgtatattctgattgtttttatttaatgttgttgaggcgacgttggttgattccgccatggtagcgtacgccattc

SEQ ID NO: 3208 - DNA, 1111 bp, Oryza sativa
  ref <308>: DATABASE ACCESSION NUMBER: AK060939
  ref <309>: DATABASE ENTRY DATE: 2001-12-06
acaccaaaacttcgaggcccccgtcgcggcaccctcctccgccgccggatctccaccggagtacggcgccggccaccccctcctcccccggatcttcaccgccggtgaagtactgaggtgatgactacatcagagtcagtacaagaaaccttgggattggatttccctcatcctagcaaacctcgggtcctccttgctgcctctggaagcgtcgctgctataaaatttgagagcctttgccgtagcttctcggaatgggcagaagtcagagccgtcgccaccaaggcttcattacattttattgatagaacgtctctgcctagcaatattattctttacactgatgatgatgaatggtctacctggaagaagataggggatgaagttttgcacattgaactgcgaaaatgggcagatatcatggtgattgcgccattatcagctaataccctagctaagattgctggtggtttatgtgacaacctcttgacatgcatagtgagagcatgggactacagcaaaccactctttgttgccccagctatgaacaccttcatgtggaacaacccgttcaccagtcgtcatcttgagacaatcaacctgctaggtatatctttggtccctcccattaccaaaaggctggcctgtggtgattatggtaatggtgcaatggctgagccttctgtgatcgattccaccgtcaggcttgcttgcaagagacagccacttaatacaaatagttcacctgtggttcctgccggcagaaacctcccatctagctgatgcggcaactattctgttcaagattaaactctggacctagttttctatggtaaagagtacttcgtgtcacaaaatgaaatgttaagtgatgtctatgtcggccaacatagcacctttattggccagttgttgtactactattagtgatatggtaggacgtggagattggagaaaggctattgtcccagcactttaatgttgcttttccaaatttcttgtgacataatgctaaggtgctgatgaatatgttcatgttgtagcactatttttttctgcaaatgtttgcaaagactcgtgatggaatcaaaatgtagcaggttgttctttc

SEQ ID NO: 3209 - DNA, 1176 bp, Oryza sativa
  ref <308>: DATABASE ACCESSION NUMBER: AK060940
  ref <309>: DATABASE ENTRY DATE: 2001-12-06
acagccatggcgacctcctccgccgccgccgcgctccggcttcccgcctcccagctccccctctccgcgcgcccctcctcctcctccaccctccgcttccctccccgccgccccgcgcgccggggaggcctcgcggtctccgccttcacgaagctctccgaggcgtcccccgtcgccatcccaccggagcccgcgcagccgttgccggacgaggaagccctgccccccaagcccggggtctacggggtgtacgaccccgccggcgagctgcagttcgtcgggatatcgcgcaacgtcagggccagcgtcgagggccaccgccggaaggtgcccgccgacctttgcggctccgtcaaggtttcaatagcagatgaggagacaccagatcgaactgtcctgactaatgcctggaagtcatggttggaagaacatataacagccaccggaaaggcaccgccggggaatgttgctggaaaccacatctgggttggacctccacagaggcctccggacttgcgattgacacctggccgccatgttcagctaaccgtgccactggaacaattgattgatcggttagtgaaggacaacaaagtggtcgcgttcatcaaaggatcaaggagcgcaccccagtgcggtttctcgcaaagggttgtgggaatcttggaatcacatggagtagattttgtaaccgttgatgttcttgacgaggagcacaaccatgggttgcgagaaaccctgaagacatacagcaactggccgactttcccacaggtttttgttggaggggagcttgtgggtggatgtgacattgtttcatccatggccgagaagggggagcttgctgccctttttaagaaataggactcactctggagtgcttaagtaatgccttgaactactgttacctgatgcgaatcgctagcttggcagctaccatcattttacatgctgcagtaatgcttcatttactgcaaggcacattggtttggatcagttatacatatacacgtttctttgattcagatgaggaaatgctgtaaattgtaatatggtggttgctttttgagagaggatttgcaagggcagagggctgtcagtattttgtggtcgtttcagattttgtacgtgaaaatttgtatcgttatgagaagtgaaaaattgtatcgttatgag

SEQ ID NO: 3210 - DNA, 1589 bp, Oryza sativa
  ref <308>: DATABASE ACCESSION NUMBER: AK104383
  ref <309>: DATABASE ENTRY DATE: 2002-08-28
atcatagacgattttatcgatgaacctgaaatagacatggcttgccacttgagattatttccctttactcaactactagtattggttctgtacaaaatcgccgccgtaggggcagatcctgcaaacgcagaactatccacaaagatcacccaacactctccattgtacaacccacagcctcaagactttccaaacgaggagctctaccgcaactatctagtcatccagcggttcaagaagacaatcacttccgaccccaagaacatcaccgccacctggaccggccatgacatctgcggcaacacgacctacctcggtttctactgtgcagcattgcctgggcgtactaagaagcccacggtcattgtggtgatctttaacggttatggcctgcgtgcaccgaagctggaaggatttattgaccatctccccgatcttgcacttttccatgctgcctccaacgacttcggtggtgacatcccctacctcacaggcctcgcctacaactacaagatcaatgtcgacagcaatctccaaatacaggatgattttagtcgtgacatggtcgggtcgcatgtaacaactaaagttcatggttattgcgttaatttagatctagatatcacatttcacctccggcccggaaaagacgacaagaaaggacgaagcatccccggtgccacagattctaaggcgctcctcctcaactacaatcacctgtccgggccattaccggtgaacatcggtttctccaagttaagctacctggccctcgccaacaacaggctcaccggcgcaatcccgccatcaatcttgcatttgcaagactccctcctcgaggtgctcctcctgaacaaccagctctccggctgcctcccccacgagctcggcatgctcaccaaggccgcagtgttcgacgccggcatgaaccagctcaccgggccgatcccctcctctttctcatgcctcaccagcgtcgagcagctcaacctgggcggcaaccgcctctacggagagatccccgacgcgctctgcaagctcgccgccgtcccagccggccgcctcgccaacctcacgctgtcgagcaactacttcacgtcggtcggaccggcgtgcttgtcgctgatcaaggacggcgtcctcaacgtcaggaacaactgcattccgggcttcgccaaccagcggcggccggcggagtgcgcgtcgttccacagccagccgaaggcgtgcccggcggcgagcgccacccacgtggcgtgccccgccggagctgccaacgctgcggcggcgccggcggacagggtggtcaaggactactccagctacgtgacgtacgccaccctgcacgagtgagcccggcgccacggcacgggcgcacgacgtgcgtgcatgcatgcagtaggggacagctagaagctagcgtctcggggtggtatttgctcttgtattcttgtgttcgtttgttgtgctcgtgagtcgtcattgtggtttgttttctctgcacgtgtggctagctatggctgtcacgtctagatctcacctcctgtactcttgtgtactgtactatgtgaaaatcattggtgattact

SEQ ID NO: 3211 - DNA, 1162 bp, Oryza sativa
  ref <308>: DATABASE ACCESSION NUMBER: AK060941
  ref <309>: DATABASE ENTRY DATE: 2001-12-06
cgatcttctaggcgaaccgttcgtggccgccaagtttgcattctttgacacggcgctgcagggcgcgacatcgcgtccaccgcgctcacaaacgtgcacagaaacgctgatcgcaaagtttcctgatctcgtcggcaagtactatttcgaaaagatgttcgacaacaaacggcagcgcagcgtgcaggacatgatcaagactatcgagaagactatgagcgagcacatcaatgcggtgacctggctcgacgaacccacgcgcgcggcagccctagccaagttggccaaggtctcgaacctcattggcgggtcaacgcaaaaccgcacgtaccctttcaagcttacgcgcgacaattacttcgccaatatccagacgatccagtccgccgagtggacgcgtcagttgggcaagattaacaagccggtcgacaagagccagtggccaatgtcacctgcgaccgccaactcgttctactcgtgggtcaggaaccaaatggtgtttccggcggccacgctgcaggtgcccttcttcagtgataatgtgcacccggtgcagaattatggcgccatgggctccatcatgggccacgagctgacccacggatttgacacggacggccgcctctacgacaacgatgggaacatggccgactggtggtccaattcgtctgcccaggcgttcgagactcgcgcgcagtgcatgcgcgaccagtacagctcgttcacggcgtacgcactaagtgggcctgtgggcaaggtggacggcgatctcacgattggggaaaacattgctgacaacggcggactgagtgtcgcgtacgacgcgttccacgagtgggcaaagactgcgtcaacgttcgatacccacggcgtgaccaatgacgaggtggacaagctcttctacgtctcgtacagccagatgtattgcgaaaagatgcgcgacgaaacccagaagcagaggatcgcctcgaacgtccatgctcctgggatgtggcgcgtgaacggtgtgcttatgaaccacgacccgttcgccaagacgttccagtgcaaggccggcagcaagatgaacccagccaacaagtgcaagatctggtagaggtagattacaggggaatactgggtgcgtgctgcaagttaagagaaggaaacaggattcaaatag

SEQ ID NO: 3212 - DNA, 862 bp, Oryza sativa
  ref <308>: DATABASE ACCESSION NUMBER: AK060942
  ref <309>: DATABASE ENTRY DATE: 2001-12-06
accggtgcgtggcccatctccaattctccagttgcttccttttcgttcccctccgcggcttcaccccgtgtccccgtcactctccggccagcgcctccactccactcccctccccacactcccccgcgtctccagcgccgccgccgcggtaatgtgacctcgcgcgcggcactccgggattatctaggaagagcacgaggaggaggcgccgatctgtagggctcgttgttagtcatctcgaccaagggaccggtgaagctgttggttcttgatttctttcgttgcttttattattgttctaaagagaaatcctcgttttcttcctgtgagatttatgcacatatctcttagggcactcttacctgggaatatttcgttgtttttgcagtgattctcgttagtgatttcgttgtttttgcagtgattctcattcgtttatgggtgcctatttttaggattattgggtgttttctaggttgttattgctagaaatgctaggttttttttggttcaactggataaggttgtttaagtttgttgtttaccttttcagcggctgtggtttggactggtgacgtatccagtcaactctagacatcttttgtcgactcatcagtaaacagattacgcccctttctataaatttgctgctgattcttctgtcttggatttttaacagctcataagctcatataacctgcaactgatttatggatccgttgaattgtttttattcccctagtctttactgttcactaaagtaaaaaaatgaatggcacatattaataatgataaactgctgcttattactgtttcatacaagggggaaattctacctagaaatgcacaccatggcatcaat

SEQ ID NO: 3213 - DNA, 919 bp, Oryza sativa
  ref <308>: DATABASE ACCESSION NUMBER: AK104384
  ref <309>: DATABASE ENTRY DATE: 2002-08-28
acactgctcttcccccccgcgcgccggccatggccaccgcgacgctgcccctccgcctcctcgcctccaaaaccctagccttcccctccgccccgtccctcccggcctcgcgatgctccctccccgtcgccgcgtccgcgccccgccgctgctggcggctcctcgcttccgccgaggagccggcgcccgcacccgtggaggccgaggccgaggcggaggtggtagaggaggaggaggttgaagaagaggaggctgcggtgccggagcctgtggaggcgcagatcgcagccgcgggcgccgggaaggacgccgacatcttcgccgttgtcatgattgggtcgagacagtacattgtgatgcctggaaggtatatatacacgcagaggctgaaaggcgccaatgtcaatgatcagataatattaaacaaggtattactggtatcaactagagacaaggcttacattggcatgccagtggtgaccaatgctgctgttcatgcagtggttgaggaacagggacgggatgataaagtgatagtcttcaaatataagaagaagaagaagtaccagaggaaacttggtcacagacagccaaacacaaggttaagaattaccggcataagtggatacgaggacttccctgctgacccgatacttgagtatgttccagcttaagagcaattgtaagttctgtagttacaaacaactggtagtacattagaatacgagtgctaccttttcttgtctggaagaacagtttttgaacaaaatttgctttgttcatgtgttcgagtgctgccagtcatccagttgttccatcctttgtttattccaccatctgttttgttcattctgatattgtgtatcctagccaactgtattattttcactgtgcttaaaaaaagagagagcattttacc

SEQ ID NO: 3214 - DNA, 1170 bp, Oryza sativa
  ref <308>: DATABASE ACCESSION NUMBER: AK060943
  ref <309>: DATABASE ENTRY DATE: 2001-12-06
ctccagaagtccagaggaagccaagagatgggctccgcttcgctggcgacgcagccttcgccggcggcgtgcctcccgtccctgcccgccggcggccgtctccgcctccgcctggctccaccaccccgcgctccgccgcgcctctgcaagcgcgccggcaaactccgggttgttaccatcagatcagctcatagtggtgtgagcaatgtatctgtagaaacccctcctgacaatgaggcatccgtgaccggtgctgcttacggcttcagaggagcaacaacatcgcttacgaatgagatgttaactttgtcgaagaagattactcttgtcaggcatggtttgagcacttggaatgcggaaagccgcgtacagggaagctcaaatctgtccgtgttaacagaaactggtgccaagcaggcagagaaatgtcgcgatgcccttgcgaacatgaaattcgacgtttgtttctctagtcctatctcacgggcaaagtcaactgccgaaattatatggaagggaaaggaggagcctcttatatttcttgattctttaaaagaggctcatctattcttcttagagggcatgaccaatgcggatgctaagaaggaatatccagagttgtacaccagatggcgggaggatccttcaaatttcaaggtcaatggcatatacccagttcggaagttatggggaacagcaagagaagcttggaaggaaatcttgcttactccaggagaaaatatgttggtcgttactcacaaatctattttgcgcgcactcatctgcaccgcgctaggtcttcctcctgagaggtttcgttccattgatgtgaacaatggtggcatgtgcgtcttcactgtaaacaagcgaggagaggctatgcttcaagcccttaacatgacagcacacatgtatagtgaccatacataccagtattagttatctgttcttctcttttttgggggggtgtctgcatttctgtcaagtatattagcagtttagcacaccctgattagacaaacttcattctcgatgaaatagcatggataggtcacacaaatcgaccctctctgatatagttgttgatgtgaatataaactgtttacaaggatcaactactcaactagtgatgcgctgaaaagtgaaaactgaacattttttaaccagtct

SEQ ID NO: 3215 - DNA, 1117 bp, Oryza sativa
  ref <308>: DATABASE ACCESSION NUMBER: AK060944
  ref <309>: DATABASE ENTRY DATE: 2001-12-06
actttgcttgctctccgaaaaaaaaaagggggaaaaaaaaagctcttttcctctcctcgcgtccatccgcgatccaccacctcctcctcccgtctccggcgaccgccgccgcgccattacacccagacgcgccggtctcctctcggcaccggccggcctagtcgaccgcagaagcggaggtgtgaccggagcggaggtcgtcggtcaaatccactccgggggtttcttgaattcttgggagcagagaggcaaaagtgaggcagcagccatgtccatcgagctcatcctgtggctcttctccttcgcctccatcatggtcctcatcggcctcaccgcctaccagcttatatgtttatctgatttggagtttgattatatcaacccatacgattcttcatctcgcatcaactcagtggtccttatagaatacgcactccaaggggccttgtgcgcttctttcctcttgacactgcattggttcccgtttctagttatggcaccagtagcatactaccatggcaaattgtatatggatcggaaacaccttgtagatgttaccgagatattccggcaactcaattgggagaaaaaatacaggatgatcaagcttgcattctactttagtttgtttattataacgatctacaggcttgtgatgacggctgtgacgttattcattgatgaggatgcaaatctggttgacactagaactatttagagtttgctaccaacttttcacacacagatggctaggaaaatgtgtaagatgcagtgaagtaaagcttgtggtgtgcatcattgaacagcaaaccaacactgccagcctctgagagaagaattcagtacatcgctctggctttcagagaaagaagattcaactccctagccggggtactgaatctagcatctcagcattatcattttaaccataaacaagaattggcaagtcagctgtacaatgtagttttatgcgttttgagtgtgctcgatgacatctgtctaaatttggtaggcgattgatgcaacttttggcaatcactgattcatacctgcatccaagtaatgctgttgtactcaattcaacactgaattgtctataaaactggctcatatatgg

SEQ ID NO: 3216 - DNA, 1121 bp, Oryza sativa
  ref <308>: DATABASE ACCESSION NUMBER: AK104385
  ref <309>: DATABASE ENTRY DATE: 2002-08-28
acacatttcagctcaccactgctagcttgggaagaggaggaggagcttgagcttggagagagacaacaatggcggctcaggctcttctctctgggaggcagctgctggggaggccattgcaatcttcagtctccaggtcttcttcctccaggaaggcacccttcatggtcagggcagaggccactccccctgccaagcaaggtgctgacaggcagctgtggttcgcatccaagcagtccctgagctacctggatggcacgcttccgggagacttcgggttcgacccgctggggctatcggacccggaggggaccggtgggttcatcgagccacggtggctggcctacggcgaggtgttcaacggccggacggcgatgatgggcgtcgtcggcatggtcgccccggagctcctcggcaagctgggcctcgtccccgccgagacggcgatcccgtggttccagaccggcgtgatcccccccgcgggcacctacacctactgggccgacccttacactctcttcgtcttcgagctcgccctcgtcggcttcgccgagcaccgccgcttccaggactggtacacgccgggctccatggggaagcagtacttcctcggcctcgagaagtacctcgccggctccggcgagccggcctaccccggcggcccgctcttcaacccgctcggcttcgggaccaagagcgaggcggagatgaaggagctcaagctcaaggagatcaagaatggcaggctcgccatgctcgccttcctcggcttctccgtccaggcgctcttcaccggggttggccccgtgcagaacctgcttgatcacctcgctgatcccgtccacaacaacatcctcaccagcctcaagttccattagagatgccatcaactacgtatttaattaattacgagtttttaattatgtatgtatgtacgtgcgtatgcgtatatgtgtgtacgtatgtatgtacgcaactttgtacgatcgatggtgcgtgtgatcgagaggggtatgtatgtacgtacgtatatacgatgtattattatgcatgggtgtagggtgtgggtgtaacatgtaaatttgtgctccaactgatttgcacgcatggtcgcatggatc

SEQ ID NO: 3217 - DNA, 1268 bp, Oryza sativa
  ref <308>: DATABASE ACCESSION NUMBER: AK104386
  ref <309>: DATABASE ENTRY DATE: 2002-08-28
atgcatccaagttgctataaaggttaggcaggcaggcccccgctcaccaggagaattagctagggagctaggtgagcacgagagcagcaatggcggcgacggcgagcaacaagagggtgatcctgaagcggtacgtgacggggctcctgtcggaggatgacatggaggtggtgacgacggaagtgccaccgttggccgtcgtcccagcagggtcggaggcggtggtggtgaagaacctgtatgtctcctgcgatccttacatgcgcaaccggatgacccgtcatgaggtgcctagctatgtctcagactttatcccgggagaggttttggcaaattttggcgtgatgagggtgatatcatccggccacccagatttcaaggcaggtgatcttgtttggggaataaccggatgggaagaatacaccgtgattaacaatccggaatcacttttcaggatcaatcaccctaaacttcctctgtcctactacactggtattttaggaatgccagggcttacagcctatgctggattctttgaagtgtctaagccgaagaaaggtgaatatgtctttatttcagcagcatctggtgccgtaggtcagattgttgggcagcttgctaagatcataggctgctatgtggttggcagtgctggttctgacgaaaaggtcagcttattgaagaccaagtttggctttaatgacgctttcaactataagaaggagccagacctcgaggcagccctaaggaggtattttccagagggtatcgacatctactttgagaatgtgggcggtgagacgctagatgcagtgctacctaacatgcgcctaggtggtcggatcgcggcatgtgggatgatctcgcagtacaacctagagcggccagagggggtgaaaaacttgttctatatcgtcaccaagcgtctgcgtatggaggggttccttgtgtttgacttctatgacaggtactaccagttcgaggatgaaatggctaggtacctaaaggaagggaaggtggcatacgtggaggacgtcgttgaggggctcgatgcggcaccggcagcactcattaagctcttcaccggccgcaatgtcggaaaacagctcgtcgccatcgcacgagagtgatacggtgccacactgctcggcacgcaaattagcattaccgaggagtactactgtagttgttcagatttcagaaatgggggcatcccgtttgtcttgtggggttcagaaaatagaaataaagaatagatatgttcaacg

SEQ ID NO: 3218 - DNA, 1190 bp, Oryza sativa
  ref <308>: DATABASE ACCESSION NUMBER: AK060945
  ref <309>: DATABASE ENTRY DATE: 2001-12-06
cactattcagcattaggcttccatcgttatgaaaatatagatgtatcattactcaagagagaatacaagaaaaaggctatgttagtccaccctgataagaacatgggcaatgataaagctgctgatgcatttaaaaaacttcaaaatgcatacgaggttcttcttgattctttgaaacggaagacatatgatgatgagctaaggagggaggagcttttgaactacttcagacggtttcagagtgcttctcaaaagaaaggaggaagtggtatttttcgacaagggtttagcccttctgaaggtgttgatgaaggaccttatggtttatcaagaagaatagcctgcaagaaatgtggtgacttccacctgtggatttatacaggaagagctaaatcgcaagctagatggtgtcaggactgcaatgattttcaccaagctaaagatggggatggatgggttgagcagtcttttcaaccagttctatttgggttgctgcacaagcctgaattgcctcatgcatatgtttgtgctgaaagcatcattttcgatgtcaccgagtggttcacctgtcagggaatgagatgccccgcgaacactcacaagccgagcttccatgtcaatgccagcttgttaaagcagaatagtggcaaggggagcacctcggcgcagaggggtggagggatccctaatggtgtaaacatggatggcggaatcgatgaagaggagttcttcgagtggttgcagaatgcactgcagtctggcatgtttgaatcgtttggcgcgcaaaacgagcccccttcccctggaagtggaagcaatgccaagggtagtaatagcagtagtaagaaaaagaagaagggcaagaagcaatggtaactgaagaaggtccgataatggcgattcttctttgtgagcagaaagaagtaaaacatatggtgtttgttcggtatagttatgcaggaaaacaccccaataataggggtcctagatgctcaaccatcctgactcgctttaaggcgatgccattcaaaatcatgattcatcttgctgtgatttttcatatggagaattagaaatcagaagagaagaaagggccatgtatgtggcaaagattgttggaatgtaaagcgcaaaatatgttgagcctacatgattgaattgtttggacaggtagcgcaagctacaatttc

SEQ ID NO: 3219 - DNA, 1151 bp, Oryza sativa
  ref <308>: DATABASE ACCESSION NUMBER: AK104387
  ref <309>: DATABASE ENTRY DATE: 2002-08-28
attgcaaagccaagacgagcagcgagacccaaagctgcacaagcccacgcccacgcctacgcccatggagaccgccctcttctccgccgcctccctcttccgcgacgccgacgacgaccaggatgagatgcaggtggacgccgatgagcaggtgcagtcggtgcagtacgaggaaagagcccacaagttccccggcatggaactgaaaataagggaattctcaagtcatcagctgaatgctaacatgctatggcctgggacgttcttatttgctgattggctggtaaagaataaatcgattctgcatggacggcggatcctggaattgggaagtgggacgggagctttggccatcttcctgcggaaggcatttcaagtagacatcacaaccactgattacgatgatggggagatccaggagaatatagcttacaactgcaaagctaatgatttgggtgtccttcctcatatccggcatacatggggagatcagtttccagttctcataccagattgggacattgttatcgccagtgacattttattgtatgtcaaacaatatccaaacctaaccagaacattatcctttctcctgaaagaatacaagggctgcagtcagaatgctggttcaagtgccagtacagccatcacgaacaaatcaggaactcaagtgcctgttaagtttcccatttttctgatgagctgccgtagaagaattggcaaggaccagtccctcttcttcgaagaatgcgaaaaggcaggcctggaagtacagcatctgggcgctcttgtgtacctcatctacaccaagcagtagcgaaaatccagtggatcatcattagggttagattgctcaaatggcaacaaaggcataaattcagtcacaagccagtaaaatggaattttctcaaatggcaacagaggaaggcctaaattcagtcacacgccagtaaaatggaaaggaaacatggatttttttggtagagcatgaaactggtatttcgtcttattttccgttgacattagttttgaccgagaatttatcttctatacaccccttgtcgctgatgggtttatactgctttcctgtacacattcttatatgtggagaaatggtgaaacactgaaatgctatacatcgagaattatgg

SEQ ID NO: 3220 - DNA, 1085 bp, Oryza sativa
  ref <308>: DATABASE ACCESSION NUMBER: AK060946
  ref <309>: DATABASE ENTRY DATE: 2001-12-06
catttattttacaatatatggtatctacaattgttgtttaaatttttctaataactgtttgaaattttagaattctcttctgtgagatgctgagcaaaaccacttgttcgtcgctagggcttaaacatagagttttcctattttaattgattgcatatgaattgatatacatagggatgcacttgacaagtactccgccgagatgacgaagctggctatgaggattgcgagcatcatggctaccgacctcggggtcgaccaggaggctttggttggcgcctttagggataaacagcagagcatggccatacaccactaccctccttgccgccacccagacaaggtgatcggcatcacgccgcactccgatggtctcggcctgacgctgctgctgcagctcgacgacacgcccggcctgcagatcaggaaggatggcaggtggttaccagtgcgacctcgcccgggcaccttcatcatcaatgtcgccgacatactcgaggtccttaccaatggcgcgtacaagagcgtcgagcacagagtactcgcggacgcagagaaaggccgaaccaccatcgtgacatttcatgaagcctatgtcgatggaatggtgaagccgatcccggaggtgctcaagctcaacggagcagaggcacgctacaagtccatagaaagaattgagtatatcaagggaaactttgtggcgctttctgaggggacacgatttctggagagccttaagatatagcttgtgaaagttacgcaggcaactagaagatctctatggaacccaattaatcatggatgctggaaaatactgcgcctcctatatattatccagttcaatgtaatgtggaggaaggattattatcgaaaaatgttaaatgtgtttgttaagaataaaccttgtgtgctgattagtagtagctctatatggttagctgttcatttttaggtgcatgtttgcatgtgtcggcctgattggaggctatgtctgctttccttgtaacagcttattttaagcaatggaatatagtctggaaaagctgtcaattcagcagcaaaaaaaaaaaaaaaaaaaaaaaaac

SEQ ID NO: 3221 - DNA, 1226 bp, Oryza sativa
  ref <308>: DATABASE ACCESSION NUMBER: AK060947
  ref <309>: DATABASE ENTRY DATE: 2001-12-06
actgcatttgcccttcaatagtcgaatccctttcccctcgcctccacgaacaagcgaaagtaaacgcgacggagaagaaccttccccacgttgggttggattggtcaaggcggcaacgaaccgaaggaaggaagggaagcatctgggctacaggtccacgcgatcgattgttcgatcgatctcggattgatcgctttgtgattgtgattaatctcgcggcgacatggcgacgtcgtgggctgcgccgccgccggggtacccgtacgcgcagggtcagggcggcgcccagccgccgcacccgccgcagtccacggccgtcgccgtcactccggtcagcaacggcgtggggaacccctacgtgatcgtcaccccggccagcgcgtccccctccacctgccagtcactaaggaaggcgctggagcggtacggcaggaagctggaggacggcacccgcaaggccgccgacaccaccggcaacatctggcaccaccttcggacggcgccgaacatggcggacgcggcggtggcgaggctggcgcaggggacgaaggtgtacgcggagggcggccacgacagggtgttcacgcaggcgttcggcgtcgtgccgggggagcagctgcgcaaggcctacgcgtgctacctctccacctcctccggccccgtcatcggcacgctctacatctccacggcccgcctcgccttctgcagtgacagccccatatcctaccacgcccccgccgtcgctgtcgccggcgccgccccagctcaccctcctgaggccatctacaaggtagtgcttcccctgaaccaagtgaaatcggtgaacccatccgccagcatgacgaacaggggcgagaggtacatccagatcatgacgacggacaaccacgagttctggttcatggggttcgtctcctacgacaaggcgctcaagaatctctacgaagccctgcagcgccgtgcgtgatcgtcgcccacggccaccgcagctaagcttcactctgatcctaatatacatatctgccgatttatattccattggtgaacttgtaagcttcagatcttgctctggaataagtgtgacacatcactaaaacaaaatctgatgccgtgtgcccgcgtgtatgatctgtaattcgctcatcagtgtagaatgtgctgaattcacttgttattgtagattgtgctgaactcactatcctttttataatgtactgaattacctg

SEQ ID NO: 3222 - DNA, 1221 bp, Oryza sativa
  ref <308>: DATABASE ACCESSION NUMBER: AK060948
  ref <309>: DATABASE ENTRY DATE: 2001-12-06
acctcgtctccaccgcacgagcagcagcagcagcggcggccgcagcgcgagctctctctctctctcgcggtgggcggcgggatgaaggtgtccgtcgtgtcccggagcggccgggaggtggtcaggggcggcgtcgagctcaaggactcggctaaggtcgcggatctgcaggatgccatctatgccaagactaagaagtattaccctgctaggcagcggctcaccctccctatccaacctggaaaatcaggaaagccagttgtccttagtgcaaaggccagcctatcagaatactgcgaaaagggttctggatccctgacagtggtctttaaggatttaggcccacaggtcttctacagcacgctgttcttctttgaatacttgggtcctcttcttatctaccccatgttctattacttgcctgtctacaaatatttcggatacgagggagagcgggtcatgcatcctgtccagacttacgccatgtactattggtgtttccactacttcaagaggatcatggagacgttctttgttcaccgcttcagccacgcgacttctcctgtatcaaatgtcttcaggaactgtgcctactactggacctttggagcttacattgcttactactgcaaccacccgctttacacccctgtgagtgaattgcagatgaagattgggtttggatttgggattctctgccaaattgcaaacttttattgccatatcctgctgaggaacctcagaagtccgagtggtaacggtggctatcagattcctcgtggcttcctgttcaacatagtgacatgcgcaaactataccactgagatctaccaatggcttgggttcaacattgccacacagactgtggcaggttacatcttccttgttgtggcagcgagtatcatgaccaactgggcacttggaaagcaccgccgtctaaagaagttgttcgatggcaaggaagggaggccgaagtatcctcggcgatgggtgattcttccaccattcctgtaaggagttggtgtcagcacgatggccacatgggattgaatctttggtctggtctcagtgttcggaagttgaagccttcagtgtaccacttctattctatgatctaaaatatctagtccacaatggaatccctcttagctattgttgaacttctctttgagtttgcattggccctgttgtaatggttaaatacaatacaagtttcatctg

SEQ ID NO: 3223 - DNA, 1028 bp, Oryza sativa
  ref <308>: DATABASE ACCESSION NUMBER: AK060949
  ref <309>: DATABASE ENTRY DATE: 2001-12-06
ctcgattcctccccttcacctctacgcgtaaaaccacaaccaaaagcaaagcacacgagagagagacccacccaccccaaccatcccggaggcggagagcttgacgccgccgccgacgagccgcagcggcggagcaagcgggagcgggaggtggggatggggtcgagcgacggggacaagccgctgcggcggatcgcggcgtcgttcgaggagctcgaggcggtggccaagcagcaggcccccggcccggccatggaggtgggctccttcgcccgcgcctgctccaacgtctccgtcctcttcggctgcctcggcatcgccttcaagttcgccgagatggactacgtcgccaaggttgatgatttgctggaggcatccaagtcaatctcaaaattgcctgagatggttgagttggacattcagaagggcaccgtcaggcaagctgggagccatactaggaatatgctgagggttaagcgtgggattgatatggttaaaattctgtttgagcaaatactggttacagagggcaactccttaagggatgcagcatctaaggcttatgctcaggtttttgctcctcaccatgggtgggccataaggaaagccgttgctgctggaatgtacgcccttccctcaaaatcgcagctcctgaagaaattgaatgaagatgaaaattcggcaaaggttcaaatgcagactttcatcagagcatctggaccagtaattctctacgttgaagatctgtttacctcaaggaatttaggcatggactggtgaaccaaagcctacttatccacttcgaatgtactaatccaattagacggtgtcaatacgcacgctttgtatgtactgatccaatatgatggtgtgctttgagctatgactacaatcagttgtatctggtttcgacctgttaaataagcttcagtctatgcgaatcagctcagtgattgacctgctgtgctgttctggatgctgtttttttaacaggtgaatgagaaattaagaattcgttgttagcacat

SEQ ID NO: 3224 - DNA, 1883 bp, Oryza sativa
  ref <308>: DATABASE ACCESSION NUMBER: AK060950
  ref <309>: DATABASE ENTRY DATE: 2001-12-06
cattcatagaggccatctcacacaaggcagagctttaatggccccataccttcctcagagtggtgctgcaagtggtggtagtccatattctgaaggtggtgccctttatgctctgggtctgatccatgcaaaccatggtgaaggaatcaaacaatttcttcgtgagagccttcgcaacactagttctgaggtcgttcagcatggtgcttgtctgggacttggacttgcagctttaggcacagccgacgaggaaatatttgaggatgtaaagaatattctttacactgacagtgctgtggctggtgaggctgctggcattggcatgggcttgcttatggctggaacagccagtgagaaggctggagagatgcttgcctatgcacatgatacacagcatgagaaaattattcggggcttgtcacttggaattgcattgacagtttatggcagggaagaggaagctgacaccttgattgaacaaatgactagagatcaagatcccatactccgttatggtggtatgtacgcattggctctagcgtacaggggaactgcaaataacaaagctatccaccagcttcttcattttgcggtgtcagatgtgagcgacgatgtccggaggactgcagtattggctcttggttttgtcctgtacaatgagcctgagcagactccaagaatcgtgtctctgctctctgaatcatataatccgcatgtccgttatggtgccgctttagctgttggaatatcctgtgcaggaacaggattaagtgatgccatctccttgttggagcctcttacatctgatgttgttgacttcgtgcggcaaggtgctctcattgcaatggcaatggtcatgatccaaactaatgaatcatatgactctcgtgttggaacattcaggcgtcagttggaaaagatcattctcgacaagcatgaggacaccatgagcaaaatgggtgccataatggctactggtatccttgatgctggtggtaggaacgttaccatcaggcttcagtccaggtcaaagcatgacaagctgactgctgttgttggccttgccgtcttcacccagttctggtattggtacccgctgacatatttcatcagcctggccttctctccgacggcttttattggcctcaactctgacttgaaagtgccgaagtttgagttcctgtcaaacactaaaccatcgctctttgattacccaaagccgacaacccaacaaaccacgactgcttcagttaagctgcctacggccatcctatcaacatatgccaaggcaaaatctagggcaaagaaggaagccgaaagcaaagctcaggagaaagcagaagcaccaccaagtgaagatgcttctacttcaatgcaggtcgatggtgtggcggagaagaaagcccctgagcccgaaccgaccttccagatcctgactaacccggcccgggttgtcccggcccaggagaagttcataaaattcctggagggcggcaggtacgagcctgtgaagctggcgccctccggatttgtcctcctacgggacctcaagcccaccgagacggaggaactagtcctcaccgacgccccggcaactcaggcgacgaacgccgcagccgccaccgctggccagcaaggctcaggcgccgccgccatggccgtcgacgaggagcccctgccaccccagccatttgagtacacctcgtgatcccttgatgatcccagggctaaacacttgtactgtttgtttctaacttggtagccatgatggaatcaaatgtttctttcacaaagcttatgaattgattctttccattgatttactggtttagtgtgtggaaaaattgttggtattagtcaccagagtaaaatatttcacctgc

SEQ ID NO: 3225 - DNA, 865 bp, Oryza sativa
  ref <308>: DATABASE ACCESSION NUMBER: AK060951
  ref <309>: DATABASE ENTRY DATE: 2001-12-06
ccctctctctctcgccctcgccgccatcaccatggagcatcatcgtcatcggggagcggtggttctcgtggtggcggcggcggcgatggcgatggcgatgtcggcggtgaggggggatttcgcggcggacagggcggagtgcgcggacaagctgatggcgctgtcgacgtgcctgacgttcgtgcaggacggcgcgtcggggggcgcggcggcgccgacgccggactgctgctcggggctgaaggcggtgctggcggcgagccgcaagtgcctgtgcgtgctcatcaaggaccgcgacgacccaaacctcggcctcaagatcaacgtcaccaaggcgctctccctcccccagctctgcaacgcccccgccaacatctccgactgcccaaggctgttgaacttgccaccaaactccaaggacgcgcagatcttcgaacagttcgccaagcagcaggctgccatgcagggcagccccagtgcatcccctggtgggtcaagcgcaccggccgcgggcgcgcagaagagcggtgcggccgtgttgcggtggttgggagtggacggagttggtggcggcggcgcacgcgcggtggcgctcctcctcttcctcctctcctccgccgtcgccgtcgccgcgcctctcctgctcgtattctgaatttctgatggccacagcttaaaattagcgtgtaacacacaaacgactaaaagtctctaattaagagcagtgagtggtctttgccgttggaaaatttggaattgtagtatatctcatgatcagctagctctagtagctacgcgtgttgtgtgtgtggtctcgaacgactttataatctcagtgtgatattgatttgatatagttgtaatc

SEQ ID NO: 3226 - DNA, 1331 bp, Oryza sativa
  ref <308>: DATABASE ACCESSION NUMBER: AK104388
  ref <309>: DATABASE ENTRY DATE: 2002-08-28
atcaccagctcgcagctcaagcacctctctcaagccgctttcctctacaggaccggttgcttggtcacataagcttttgggggaaacatgaggctgtcggtggccatcctctgcgccctcgtcgccgtgcaggcggcggcgctgctcctcgccggatcggcggccgcggccagcgagctcaaggtcgggtactaccacaagaagtgcaagggcgtcgagaacgtgatcaagtggcacgtcatcaaggctctcaagcagaaccgccgcaccggcgctgccctagtccgcctcctcttccacgactgcttcgtcaggggttgcgatgggtcagtcctgctggacaagtcgtacgagaacccacacccggagaaggaggcgccggtgaacatcgggctggcggcgttcgacctcctggaggagatcaaggcggccgtggagaagcggtgccccggcgtggtgtcctgctccgacatcctcatctacgcggcgcgcgacgccggcagcatcctcagcaacggccacgtccacttcgacgtccccgcgggccgcctcgacggcgtcgtctccagggccgacgaggcccaggcggagctcccggactccaccatgaccgtgcagcagctcaaggacaacttcgccgccaagggcttcgacaccgagcagctggtcatcctctccggcgcgcactccatcggccagggccactgctcctccttcaccggccgcctctccgagccgccgcagcagatcaccccggcgtaccgcgacctcctcaactacaagtgctcccaggccgccaacccggacgtcgtcaacaacgtccgcgacgaggacgcctccgtcgtcgccaggttcatgccgggcttcgtcagccgcgtccgcaagatcagcgacttcctcgacaacacctactaccacaacaacctcgccaagatcgtcaccttccactccgactggcagctgctcacggacgccacgtcgctctccaaggtccacgagtacgccgacaatgccaccctttgggactccgacttctccgactcgctgctcaagctcagccagctgcccatgccggaggggagcaagggggagatcaggaagaagtgcagcgccatcaaccacttgtactaaatgcattgcatgcatggacacaagacgaccacacagagacgatgatcaacgacgactatgcttgtagtagattgatttggctttcacacatccattcttttgatttccatttgttgtaatttgttctctgtaatttctcagccatgttaatctgttacataagttaatcatacaaatctggatataataaaaatataatt

SEQ ID NO: 3227 - DNA, 1208 bp, Oryza sativa
  ref <308>: DATABASE ACCESSION NUMBER: AK060952
  ref <309>: DATABASE ENTRY DATE: 2001-12-06
tggatgatagcatcgatgacgatgagaaattaaaagaaatttttgctgattttggtactattacctcttgtaaggtcatgagagatttgaatggtgttagtaaaggatctggctttgttgcatttaagtctgctgaagatgcttcacgagctcttgtggctatgaatggtaagatgattggcagtaaacctctctatgtagcacttgcacaacgcaaggaagaaagaagggcaaggcttcaggcacagttctcacaaatgcgtcctatggtgatgcctccttcagttgctcctcgtatgcccatgtatccccctggtgtccctggtgtaggccaacagctgttttatggccagccacctccagcttttgttaaccctcagcctggatttggcttccagcaacatctcattcctggtatgaggcctagtgttggaccaattccaaattttgtcatgcctatggtccagcaaggtcaacaaccacaacgtccagctggaaggcgtgcaggcactggtggaattcagcaaccaatgccaatgggccaccagcaaatgcttccaaggggtagtcgtggtggttaccgttatgcttctggtcgtggcatgccagacaatgcattccgtggtgttggaggtttagtgccatccccatatgagatgggaagaatgcctctcagtgatgctggtgcaccaccgcaggttccaattggagcattggcctctgcactggccaattcacccccagatcagcaaagactgatgcttggtgaaagtttatacccgcttgttgatcagctggagcatgatcaggcagcgaaggtcactggcatgcttttggagatggaccagactgaagttctccatctcattgagtcacctgatgctcttaaggccaaggtcgctgaggctatggaagttctccgtaatgctcagcagcagcaggcaaataccccaactgatcagctagctgctctcaccctgagcgacggcgtcgtttcttaacttggttggcatcttatatctgagactgcaagtgatgtagtatgtacttggtgtgttttggaacttgaacctgtggggaagtctgtctttatctttgttaaacggcagttcagttacttcagcattgtgtggatctggatttcagttcctatttgtgttttcttaaaatattgggattgcaatatgatttactcttggattgatgcc

SEQ ID NO: 3228 - DNA, 1171 bp, Oryza sativa
  ref <308>: DATABASE ACCESSION NUMBER: AK060953
  ref <309>: DATABASE ENTRY DATE: 2001-12-06
tggtgctggagagcttcaccttgaaatttgcttgaaggatctgcaggaagatttcatgggtggtgctgaaatcattgtttccccacctgttgtttctttccgtgagactgtccttgagaagtcgtgccgtactgttatgagcaagtccccgaacaagcacaaccgtctctacatggaagctcgccccttggaggagggattggctgaggccattgatgacggtcgtattggcccacgtgatgatcccaaggtgcgctccaagatcctgtctgaggagttcggctgggacaaggatcttgcaaagaagatttggtgttttggacctgagacaactggccccaacatggtggttgatatgtgtaagggagttcagtatctgaatgaaatcaaggattccgttgtggctggtttccagtgggcatcaaaggagggtgctctggctgaggagaacatgcgtggtatctgctttgaggtgtgcgatgttgttctccatgctgatgctattcacagaggtggtggccaggtcattcccacggccaggagggtcatctatgcttctcagctcacagcaaagcccaggcttcttgagcccgtctacctggtggagatccaggcccctgagaatgcccttggtggtatctatggtgttctgaaccagaagagaggacatgtgttcgaggagatgcagaggcctggtacccctctgtacaacatcaaggcttacctccctgtcatcgagtcctttgggttctcaagccagcttagggctgcgacatctggccaggccttcccccagtgtgtgttcgaccattgggacatgatgacctctgatcctcttgaagctggctcgcaggcttcaaccctggtgcaggatatccgcaagaggaagggtctcaaggagcagatgactcccctctccgatttcgaggacaagctctaaatttttggccgccgcatgtgttgtgccgttacccttacatgttctagttggtctactgctaagagaactgctttcgttgtcgtatttcatttcccttttgtcgaatgcatgtgtttcacatcaacaatcctatgttcgcgtgctactgagaaactatttttactctgtcgtgatgtaacggatgtggaacctggatcatctttttgctgtctaagttatagtgttcacatt

SEQ ID NO: 3229 - DNA, 1071 bp, Oryza sativa
  ref <308>: DATABASE ACCESSION NUMBER: AK060954
  ref <309>: DATABASE ENTRY DATE: 2001-12-06
ttttactcatctcgtgctgactacttttgtctgttgtcaggtcctgtgggtgaggacatgttccattggcaagctactattatgggaccctcagacagcccatttgctggtggggtattcttggtgaacattcatttcccaccggattatccttttaaaccaccgaaggtaatttctttgcttatgtgattcaacgccataccttacagtcattttcaatatcgtggtgtttagaactgcatttacatgataacatgagttcttggggccctcaataaaacattatctgctatctattttttcccttggattctaatgtttaggcgatgatcgaaataaacatatcagattcaacatccaaaaataaggtttatttcaatgttatgatgtttagagctaatgttatatgataacatgagttcttgggggtccccaaggacaacattttttgctctctgtattcttcacttggactctgactctgtatatatattatgatcttatttgccaggtctctttccgcaccaaggttttccacccgaacattaatagcaatggcagcatttgcctcgacatcctcaaggaacagtggagtcctgcacttaccatatcaaaggtaattatcagcatgacctgatttcaacattttggcccttctgtgacacctgatgaattgtgttatcattaattctaacaggtcctcctgtcaatttgttcactgctgacggacccgaaccccgatgatccgttggtgccggagattgctcacatgtacaagactgatagggccaagtatgaatccaccgctcgctcctggacacagaagtacgccatgggctaaagccagccaaactggtggacgtgtcgaaacccaacgacgttatcacctaaataaccatcaagtcaccactctccccccaacgaagtatgaatggacttttgagggctgttgtgcccagttgaactcatatgtaccctaccttgtgaagtccgtttcagtctggtagtctgttctacctgactgttctgttatttaagtcgtttcctaaatcatatttattattcgtgctt

SEQ ID NO: 3230 - DNA, 917 bp, Oryza sativa
  ref <308>: DATABASE ACCESSION NUMBER: AK060955
  ref <309>: DATABASE ENTRY DATE: 2001-12-06
acgcctcatcagtcatcaccctctcaacgcgcgactcactcgcgtcgtcgtccccttccgccgccggcgcgcactgaacgagaggcgaggtcttccccaccgctggagcttccccatccaccgcggccggccgcaggcggagacgacgtcgtccccatccgtcgcccggagccgacgtcgtccccaaccgccgccgccggagacaaggtcttcccgatgcgccgccgccgccgcagtccaccgctgcccatgaggtcgttcctttccgccgccgccgccgccgtcaccgcgcactgaaccggaggcgaggtcttccccagcccctgtcttcatcgtgcgcatccttgccgtgcgccatgtttagttgtcttcaccctcgacgcctcggagccggactcccgctgcccaccaccacaccaccggacaacctttatccctgccgccctcctctccatcgtgtgcttgccttctttgttatctacacgcccgaggagagaggattcctaccacgtctttctgttgtgccagtatcctcatcgatgaatgattttaccacagcagcaaagcggttgccatctgctggtattatcccagatgtgtagaattccatgccgccatcagtgatgcctcgcaagcaagccacaatgtctgcacctaggccttcagcggctccagctactgcgtgctgcagatggtacccttccattacagtgagggggtcttccagattagctatcacggtggttccttggtgtgcccatgggcatctcaccaactgtttgatgaaatgcatggtcgaggtgcactcctgttactgtttgaatccttattattatctcatatttactctattttgcactgtatgttgtgattgaaagctctgcctatgtaaactaaaactgaattgttccttggtc

SEQ ID NO: 3231 - DNA, 1865 bp, Oryza sativa
  ref <308>: DATABASE ACCESSION NUMBER: AK060956
  ref <309>: DATABASE ENTRY DATE: 2001-12-06
gtttgttgtattccccttccttacccccaaaatcgaaatccctaattcgacgccatggccgcgactggcggcgccgccggggagaagacggccagcagcctcctgctcggcgtccggggctacacgtccaccctcaagaacgcctccaccgccagctgcaggttgagcgccggccatcccatcgaggtgactttgtgggaggcgtccccgcctgccctctcccacttctccgtccactgccccgatctcccatccttcaatggcaatctgcttggcgcgcctaaagccatcgccgccgccgtcgacgacgccgacggccagctcctcctcctcctccgagtccccatcgatcagcttggtgccccgcatgacaacgactacttggtctaccatccggatcccccgtctccgaaactggatctgctccccaacccgcctccccctaccctcggtgaccaccagctcgccatactcagctgcggcgacgaccgctacgtcgtggccgccctccacgtctggagtgagttcacttccacgctgcgcctgtacagatcttcttgttcgtctgggagttggacatcggaggaggtgtccgtggaggagccggtgagggacaggctgtgcccgatcccggactcagccaagaggcagctgtaccacgtcaccaccaagaccatcacgctcggaggtgcgaagggcaccgtgggctgggttgatctctggcgcggcatcctcctctgcgacgtgctcgacgaaatgtctccaaggaagctccgcgacatgccgctgccgtggccggccaagggcaattggaggatgtacctcaatggagatgtgtccttttgtcgggacatcgccatcagccaacacaaggattccatcaagtatctggagatggagatcgtttcaccaagaacggtgaccaccaccatacccacctccacctctgcagatcctacttcataccttgaatgggttcgccgcagcagagaacctcagccgacacggcgacgctccgtgttccaccctggttcgtggagaatcactacatggagcatgcctatcccggtcacttcatgggacgactggcgccgtgactgcactgctgaatcgcgtgaagtccatcttgacaccaacccaagtcaccattacgagttgcttcatagcctcatgctcagcaacagcggtgatgaacacagggaggaggctcaaggtcaaggggcaacctcttccttgtccctaggtcgcctgcgtttgtgttacccggccttgagttgcatcgatgatgatgttgtttacctcttgggcaacgctgctggcaggggtgctaagacgggaggaatgatggtcgctgttgacgtcaggaacaaggagctgcgaggagtggccaagcttgaccccgaaaagaacaccctctactccatgcgatgctaccttgcaactgggatctccaaacgcctcaacactaccacagacacaagagttggacgacctgaggaggatgcagaagccgccgagtagaatgtgcgaacccagtgacatatatgcatcatactgcagcctgcctggatgcaaatattatcgtatcagtggtttgttggcttgaatgggggttaaggagttgtgctgttgctgggcatatatagttttgtgacaagaatcttatccaggttgcttactttgggttgatgataaaagtaggagtagacgtgaataacattaatatatgttggcttattttttgaggggatgttggcttatttatgtggcactaattgtctttatgcctttgagttaaacacaaaacaatgatccaactctttgaacctgtttgtttcaagtaatgagttgatgaatttttcacc

SEQ ID NO: 3232 - DNA, 1168 bp, Oryza sativa
  ref <308>: DATABASE ACCESSION NUMBER: AK060957
  ref <309>: DATABASE ENTRY DATE: 2001-12-06
gcgaaattcccccccaccattgccgcggtcgtctgctccgattccgctcgcggcagggatccctaccgctctcgtcgccgtcgccgtcgccgtcgccgacgagatcatccgccgcgatgcctcggtactattgcgactactgcgacacctacctgacccatgactctccatctgtccgtaaacagcacaatgctgggtacaaacataaggcaaatgttcgaacctactatcaacaatttgaggagcagcaaactcaaagcttgattgatcaaagaattaaagaacatcttggacaagctgcagctttccaagttggtgctcctttcaatcaacatcttctctcatttccaggaggtgtgcctcgtcctcgtcttccaattctgccaacacctggcatgccacttggtgttcctcaagtacctggtgcacctttgatgccaggcgttaggcctcctattttgccagctcctggtattccaggttatcctggtgctccaaatgttccaaccatgccacaaacaggcgccccacctggttccatgccgcctggctctatgccacctggttctatgcctatgcagatggcacctctcccaaggcctccgacactaccacctccaacatctggagccccaggggcccccatccccaacagtggggcacctccagccatgtatcaaacaaatccaccgcaacctgcaggcccaacttctggtgctccacctccggtttctgctccacctccagcagcacctccacaggctcctttctcctatgcacaacctcctgagggcaaccactgattgtgttctttgggcttttatttaagaagcatatgaagtatgcccagtctgatccattggaatatgatgctgctatcgtttaaatgagatcaactgtcacttaatttgagggattgttgaagaaggcttcttgtaactgtatctgtgcatctggtgatggtattttagatatgtaacgttaattttgtaatctgctgaagttagtattgatttcagaacacatttaccaaagctggtaacgggatcgttcctcaaatatttggcatggctctgtagtactagtttctgtgatgatttgttcttcggtttggtgaacattaccccgtgtaatttgtatgaaaaaaaaaaagattttggttaatatc

SEQ ID NO: 3233 - DNA, 1155 bp, Oryza sativa
  ref <308>: DATABASE ACCESSION NUMBER: AK104389
  ref <309>: DATABASE ENTRY DATE: 2002-08-28
tccgaccagtcccctcctttcccctcctcttgctactgtagctttccaatctctccccctccggcccctcttccccttcgattccggcggcttgccgccggtgagggttggaggaggggtccggccacctccccctagtagtattgtgtcaggtttgtcctgtagttagggtctgtcctgtgtctcttttgccggtgaggttctatggttgccggagttattgatggcgttggcgttggtcgatggcgagctgtggatgtttcctggcagcggcgtggtctcgtcgtcgtcgttgttggtgtcttgcagctagtggaagtggaggatatgctggatttgaagcttgaggtgatggggcggtgtctggtcttgccgccgccgtggtcattgctgctgcgcatggaggtgctgttggtgctctacgagaaggtttattgcttgtggtctctttccctctgtgccggctgtggtctgggatggtggtggtgctttgtgcctcttgctagtgtccgggatgatggcgtcgtcgccggagtcggtgatgtcgttgtccctgccaccgagctggccgaagcccttctccgacctcctccctcctcgggttcccagttggtgcttctgcttcaccttctgctagtccgctctttcccaacgttgtgcgtcgttccctctagagaacagttcattcgtcaatggttgtgctcttcactgcttcagggtggctggatctggggtccttctccctcttcgtttctgggcagttgtatccacgctgggtgggccattcgggttgagctcatgctcctcagattcaaaggcgaactccgtggtgaagtttggttaagtccggtgaagcttacaccaaaatctacggctcaacagcaaatctccaatttgtgcagactctgtgaaggcgtccgaagaggattaccggttcgtcaagcggtctgcatgtcaaaggagacccaaggttctaatcgtcgtggcttcgccgcagctcctgtcgattcgcgccttctacgctgcctagtttcaggaggttgtttgtactcttagtctagttttctctgatgtgcatcttgttggttctttctgttggcgatgtacggggcttgcccccttgatctgttgctctaatatatatgtttaagtttc

SEQ ID NO: 3234 - DNA, 1085 bp, Oryza sativa
  ref <308>: DATABASE ACCESSION NUMBER: AK104390
  ref <309>: DATABASE ENTRY DATE: 2002-08-28
atcgcagcggcgatttctcatctgaattgcaggccaattccagttgagtttctccacagaccacagatatggcttccggcaggatagctctgctctgccttcttggcttgctgctggtagcagcctcaccggctgccattgctgccaaagatgacaaaatcttctaccagattactttcatgtggccgggagcgtactgcgcgcagacgaaggccggatgctgcatgccgaagaccgacgtcgcgccggcgtccgacttctacgtcgccggcttcacggtctacaacgccaccaccaactcttccctgtccagctgcagcaacactccattcgacatgaaccaaattggggatgtcacgaggctgatgcagtactggaacaacatcaggtgccccagcaagagcggccagaagggctggaagaacgcgtgggagacgtccggcgtctgctccgacctcaccgagagcgcctactttgacaccgccctcgccctccgcgacaagatcaaccccctttctcgcctcgtcagcaacggtattaagccggactttgggctgtacagcgtgaagaagatcaaggaggtgatcgaggaggggatcggcgcgccggcgctgatccagtgcagcaagggcccgttcaacaagttccagctataccagatatacgtctgcgtcgcggaggacgccaagacgttcgtggagtgccccagcccgaggaagccgtacacctgcggcgacgacatcctcttccaccctttcaagaagtggatgctcaagaccaactccaccaaatcctacgccgccgccgacgccatcgaccagctgctcgaagcggtcatggaaatctgagctcgatcgatcgatcgatcaagaagacaaattaacccttgttgtgatatgcgatttgtgcgtgtgtgttgtctgtttcgatcgtgatgttttctgcgtgtttatttcgtgatgttctctcatcgcgcccgcgcgcggttgggtacgatccgggacacctacgtagcactgaatccgtctctgtgatgcattcagagaataagtccgaatatgtgcggccttgttaatgttttcatg

SEQ ID NO: 3235 - DNA, 1028 bp, Oryza sativa
  ref <308>: DATABASE ACCESSION NUMBER: AK060958
  ref <309>: DATABASE ENTRY DATE: 2001-12-06
aagctcgattgacgattgccatggttgatctgatccacgagacggacgacgcgatggccgaggcggagctgctgctggagcgcagccgggcgatcaccctgaacggccgagacaagcgaggccgcgccctcgtcaggatcgtcggcaagtacttccccggtaagctgagctcggcctcgctcgtcagatccccgcaattccgatgcttttgccggcggaaaagtgaccccgtttcctttgtcgcggcagcgcgcgcgctgggcgggcgggcggaggcggcgttgagggggtacgtgcggaggcgcgtgctcccggagatcggggagcgggagttcgtggtcgcgtacgtccactccctcgtcgaccgcggcgacaacttccccggcgtcgcagcgatccgcgcggcgtacgaggcgctgcctgccgcggccaaggagcggctgcgcgcggtgtacttcgtgcacccgggattccaggcccgcctcttcttcgccaccttggggcgattcctcttcagctccgggtatgtacatacaacgaatcactccgtgtgtgctgcactacgattcgtgggtgaggcgctggtgtttaccgtggtttccttggaattttggatcttgcaggctgtacgagaagctgaggtacatgagcaggctcgagtacctgtgggagcacgtgagcaagggggagatggaggtcccggaatgcgcgcgccggcatgacgaggagctcgagcgccgcccgctcatggactacggcatcgaggctactgaccgccggtgcatgttcgacgccgcgtccatggacacctcggcgtccctgcactcgctccggtgcatctcgtaatcgtggtggccgctcgactgtagcatccgtagctggcctcgccccggtcctatattcgtagctagcgaaggcactgccgcactgtcgtagtttgcaggccctgttgttcttcgttccatctgtacaaaatagtagtatttgtggaagtaaaagagataataaagagaaacagtttgaaatgc

SEQ ID NO: 3236 - DNA, 1021 bp, Oryza sativa
  ref <308>: DATABASE ACCESSION NUMBER: AK060959
  ref <309>: DATABASE ENTRY DATE: 2001-12-06
aactaaccacccctcccgtttcgtcctcccctctgcgttgcgtcctacttactctctccgattctctcccctccttccccgataggggagagatccagcagcggcagcagccaagcccaagctctcccaccgagatcccccgcgcgccgcgccccgtcggccgccgccgccatggaggcgtcttcctgggacgccctccgcaagcaggcaaggaggctagaagctcagttagatgaccaaatgagtgcttaccgtaaattgatttccatgaaatctgatggttctgagaatgatatcgagtccgatatagaaagatcgctgaagcaacttcagcaagtaaattctcaaatgcagacatgggtatcatcaggaggctcagaagtcctttctcatacattgactcgtcatatggagatattgcaagaccttacacaggaattctatcgcctccgatcaagccttagagcaaagcaacaacatgcttctcttcttgacttgagagattttgacagagcgaagtttgatgttgaagagggtgctgactctgatcaagctctgctcaaagaacaagctgcgatcagcaggagtactgggcagatggataccgtgatatcacaagctcaagctacattaggcacacttatgttgcaacgatcaacatttggtggtattactacgaagataagcaacgttagcagtcggctccctacgattaatcaaattctttcatccatcaaaagaaagaaatcgatggacaccattattctatccctggttgcatctgtttgtgcatttcttatttttatctattggatgtcaaagtaatcttgccaaataaaggcgttatagtgttgtatgtttggaaaagtagtagtatacatgcttgccgtgtttgtacaatatcgccccatgttatatcttacctgctgttctagctacattaactatcattctgattgagctacttcaaccccatctgtacatgtgagccgtgacgaagaaaaataagtttctggtattg

SEQ ID NO: 3237 - DNA, 1012 bp, Oryza sativa
  ref <308>: DATABASE ACCESSION NUMBER: AK104391
  ref <309>: DATABASE ENTRY DATE: 2002-08-28
cttctccccagatccgaagcgagaagcctcttttggatctatccattcgggtcaccgtggcagttcggtaattttggcggagaggaggaggaggacgacgacgacgacgacgtgatgggtctcctcgacaagctgtgggacgacaccgtcgcggggccccgccccgacaccggcctcggccgcctccgcaagcacgccgccgcccgccccgccgccgtcaagatcaacgacccgacaggggacgcggcgatggtggccgtcccgccgacgacgccggccggggcggaggaggcgccggtgaaggtgacgcgcagcatcatgatcaagcgccccgcggggtacccggcgtcgccgaggagcgcggccagcacgccgccggcctcccccgccggatccacccctcccatctcgccgttcgccggcgccggtggtcgcttcagaaggaaatcatcgtccgacgcatatgagagggcaacacctgggacaaccagtcaccctcctccctttgaagtgtgagcccccagcgtgctcacgctcgtttttgctcctaggccagcgtctactgcacacacaaggcagaggaggaggagagacatatcagagaccgaagcggatggaagtcgagtgttgtctacctatcttacctctactactgtgatataacgtagatgctactagtaattaagtacgcctgctgctgctcgccgtctactatgttgagtcgtgtatggtttgtgtagtaaggttgtcgtctgctgtgtcatatatgtacatatgtttgctctgggctgcgatggagcttgctgcagtctgcagccaagcccgcagttcatcgctgcgtcgtgttttcgcgtccttttaagccctctgcaactatgtcaaatggatgggcatgtggaggatggtggaatgagctttcaggctgtgatgctaaagatggaagcactgatggctggtgtgtgattttgcttgatgtattatctgaattctcaagtagtagatgctttgcttg

SEQ ID NO: 3238 - DNA, 1151 bp, Oryza sativa
  ref <308>: DATABASE ACCESSION NUMBER: AK104392
  ref <309>: DATABASE ENTRY DATE: 2002-08-28
ctcaccaagtttaatttggagcacacatttcagctcaccactgctagcttgggaagaggaggaggagcttgagcttggagagagacaacaatggcggctcaggctcttctctctgggaggcagctgctggggaggccattgcaatcttcagtctccaggtcttcttcctccaggaaggcacccttcatggtcagggcagaggccactccccctgccaagcaaggtgctgacaggcagctgtggttcgcatccaagcagtccctgagctacctggatggcacgcttccgggagacttcgggttcgacccgctggggctatcggacccggaggggaccggtgggttcatcgagccacggtggctggcctacggcgaggtgttcaacggccggacggcgatgatgggcgtcgtcggcatggtcgccccggagctcctcggcaagctgggcctcgtccccgccgagacggcgatcccgtggttccagaccggcgtgatcccccccgcgggcacctacacctactgggccgacccttacactctcttcgtcttcgagctcgccctcgtcggcttcgccgagcaccgccgcttccaggactggtacacgccgggctccatggggaagcagtacttcctcggcctcgagaagtacctcgccggctccggcgagccggcctaccccggcggcccgctcttcaacccgctcggcttcgggaccaagagcgaggcggagatgaaggagctcaagctcaaggagatcaagaatggcaggctcgccatgctcgccttcctcggcttctccgtccaggcgctcttcaccggggttggccccgtgcagaacctgcttgatcacctcgctgatcccgtccacaacaacatcctcaccagcctcaagttccattagagatgccatcaactacgtatttaattaattacgagtttttaattatgtatgtatgtacgtgcgtatgcgtatatgtgtgtacgtatgtatgtacgcaactttgtacgatcgatggtgcgtgtgatcgagaggggtatgtatgtacgtacgtatatacgatgtattattatgcatgggtgtagggtgtgggtgtaacatgtaaatttgtgctccaactgatttgcacgcatggtcgcatggatcgatttgct

SEQ ID NO: 3239 - DNA, 1430 bp, Oryza sativa
  ref <308>: DATABASE ACCESSION NUMBER: AK060960
  ref <309>: DATABASE ENTRY DATE: 2001-12-06
agatcgggcccagttatcaggtttgaatcaaaacgcttgagcggtggagccacagccgtacagccgtcggcggcggcggcggcggcgcgaccatctcctcgcggccagatgcgcgtgttccggcgccggagagcccaacgaatccgccgatgctaaagctccaagcttccctccctctcttccgcctccgtccccgccccagctcccctcctccctgcggcccccgtctccccttcgtcccaatttgcaagcggcggatgagcacccaggcgcagcccagtttcgcccctctccccacggcgcaatccgaatccgatgcaggggcagctgggtaccagttccggctggtttcctacaacatcttggcccaggtttatgtgaagagtgcgtttttcccgcattctccatctgcctgtctcaagtggaaaactcggtctaaagctgttctatcagaactcaagagcttcgaagctgacctcatgtgcatacaggagttggatgagtatgataccttctacaagaaaaacatggagaattctggatattcaagtatttacattcaacgatctggggacaaacgggatggatgtggcatattctataaaccaaaaagcatggaactggtccagaaggaagtactacattacaatgatttagtggaaaaatatgttcatactgatcatgtaaatagtgatacatcaaataattcttcaccaacagaagaagcaagcaagaaggtggataataacaagcatggagatccaaatgatccacgtttcagattgaaacgtgactgtgttggtttacttgccgctttcaagcttaatgatccttgtgatcatattttaattatggcgaacacacatatttattgggatcctgaatggattgatgtaaaattggctcaagcaaagtatattctttcaagagttactcagtttgagaaacttatctcgaataaatttaactgtaaaccttcagtcatgattgctggtgacttcaactcaactcctggtgacaaggtatacaactacctcgtatcagccaactccgattctacggacgaagctccgatcaaattacgcagcctttatgctgcgaatggaggggagccagagttcaccaactgcactcctggttttacaggaacactggactacatattcttgtcggacggcagttcagtaaaacctaccagtctacttcgtataccacgaggggattctgccgaagtccaaggagggctacccaactttcaccatcctagcgatcatttgccaatcggtgccgattttcaggtactcggcagcgaaggctgattgcattttgcacggcagcaacaaatgtcccctgggatcgttccccgtgatttgtttggatttattgtagaaacagtagcaaatttattaatatcaaccagaatttttgtt

SEQ ID NO: 3240 - DNA, 1717 bp, Oryza sativa
  ref <308>: DATABASE ACCESSION NUMBER: AK060961
  ref <309>: DATABASE ENTRY DATE: 2001-12-06
atttcggtctccattccgagaaaaacaatccactagctcactagcttcgccggcgtacggacgcgcgccgcggggactggaggagcgcgcaaaaatggcggcggcggcggcggtggctgacgaagtcaccgtgctccacggcggggtcgtcgtcagcatggacggcggcttccgcgtcttccaggacggcgccgtcgccgtcgccggggaccgcatcgccgccgtgggaccgtccgccgacgtcctctcgtccttccccggggccgcggcgacagtcgacctcgccggccgcatcctcctccccgggttcgtcaacacgcacgtgcacacgtcgcagcagctggcgcgggggatcgccgacgacgtcgacctgatggcgtggctgcacgggaggatctggccatacgagtcccacatgacggaggaggactcctacgcctccaccctcctctgcggcatcgagctcattcgatccggggtaacatgctttgcggaagcaggtgggcagtatgtttcagaaatggcacgtgcagtagagttgctgggattgcgtgcatgcttgacaaaatcaataatggattgtggtgatgggttacctccaaactggagctcttgttcaactgatgattgcattcagtcgcagaaagatctatacgaaaagcatcacaacacagctgatgggcgtatcaggatatggtttgggttgagacagatcatgaatgcaacggatcgtttactgcttgaaacaagagatgctgcacagaaactgaatactggaatccacatgcatattgcagaaataccctatgaaaatgagctggtaatgcagactaagggaattgatcatgggacagtgacatatttagagaaaattgattttctgaggagcaatttgctggctgctcattctgtttggttgaataagcctgagattgggcactttttaaaggctgatgttaaggtttctcactgccccgcatctgctatgaggatgttggggtttgctccaattagagaaatgctggattctggtgtttgtgtctctcttggtacagatggagcgccaagcaataacaggatgagcattgttgatgagatgtacctagcctgtcttattaacaaagggcgtgaggcgtacatcactggtacaacgaacccaactgctcttcctgcagagactgtattgaagatggctactattaatggtgcaaaagcagttctgtgggacgatgaaataggttcgctggaggttgggaagaaggcggacatggttgttgtgaatccacttatatggtccatggtcccagtgcatgactgcattgccaacatagtttactgcatgagaacagaaaatattgaatctgtaatgtgcaacggtcgatggattatgagggaaaagaagatcgtgaatttgaatgaggaggaggtaattgcttcagctgaaaaaatagcaagggaccttctagcgcgagctggcatcaacctacccaatcggatgaactacttgtgaatttgtgatgatcgtcttgcattttgttcatgtgccactgcttgaatctgtccagtattctgcacggattgtatgataatctcctggccaggggtggtggtacctcaacatgtaaagtaaataagaaatttgctgcagcagtgttataattgcaaatccccccagcggtacagccagactgacaaaagtataattggtttcctctcc

SEQ ID NO: 3241 - DNA, 1220 bp, Oryza sativa
  ref <308>: DATABASE ACCESSION NUMBER: AK060962
  ref <309>: DATABASE ENTRY DATE: 2001-12-06
gtagctgcctcctgagcctcacaaaatttggttggtcagagttgcatcccggccactggccagccacgacgacgaagcggcgagaagccgaggccaaactacaattcaacacctcttcctcttcttcttcttgctgcttcttcttcttcttcttctgccacttggttgctatatacaccaagctcgatcacgaaactatcttagctgctgctgctgctgctgcgttggagaagaagagagtggcagggtgaggatggccggggtgcaggtgatgccggcggtgggggcggtggcgacggcggaagggagctgcagggcggcggggcagaggaggggccgcggcgtgagcagcttgttcgccggagactggaggcggcggcctcgccgggcggcgtgcacggccagggtcaggggcaggaggcagcagcagcagcagcagggcctcgccgtcgtctgcaacctcggtggcacctacgatgaaggtttcgaggacatccacgtgcaactgattaatgtgttcacctacaaagccgtcaagaccgtgctcacgcagctctacgaaatgaacccaccaagctaccgatggttatacaacttcgttgctgtaaacaagcctaccgatggcaaagtgttccttcgtgctcttggaaaggagaagcaggagcttgcagagcgagtgatgataactaggcttcacttgtacagcaaatggatcaagaaatgtgaccatgcgatgatgtacgagaggatatctgacgagaacctggcgttgatgcgagagcggctcatggagacggtcatctggccaacagacgacaccaacactgagaagattggctgaaaaataatgcctgatctgtctgcctgacgcatacacttctttttgagttgctcaacttaattaaactttagctcgttaggtagagcattctaaattattcctgctcgatcgagtccgatgtatatgtatgtatattaagtgtacaattaatgtaccaagccagtgtaatgggtacaaattcaagatgcattcagggttaagtatagattaagatctagctgatagcgtgtggtttagtttggtcatttggtgagtgaagtgaagaagctgcaaactgtttggtccatttcatcgacagtgtacaagtacaacgtagcaactaatacttgtaatttgggtcaagttcgtcgacacagtttatttcatgagttacaactct

SEQ ID NO: 3242 - DNA, 1395 bp, Oryza sativa
  ref <308>: DATABASE ACCESSION NUMBER: AK060963
  ref <309>: DATABASE ENTRY DATE: 2001-12-06
attcgcacgcccgcgccaccacaaaaccctagccgccgccgccgccgccgccgccgccgccatggccacccaaacccgccccctcgtctccgtcaaggccctggagggcgacatggccaccgacaacagcagcagcctcgccctcgccgaggtgttccgcgcgccgctccgccccgacgtggtccgcttcgtccacaggctgctctcctgcaacaagcgccagccctacgccgtgtcccgccgcgccggccaccagacctcggcggagtcgtggggcacggggcgcgccgtgtcgcgtatcccccgcgtccccggcggcgggacgcaccgcgccgggcagggagccttcggcaacatgtgccgcggcgggcgcatgttcgcgccgaccaagacatggcgcaagtggcaccgccgcgtcaacgtccacctccgccgcgtcgccgtcgcctccgccctcgccgccacctccgtcccgtccctcgtcctcgcccgcggccaccgcatcgagaccgtccccgagctccccctcgtcatttccgactccgccgagtccatcgagaagacctcccaggccatcaagatcctgaagcaggtcggcgcctacgccgacgccgagaaggccaaggactccgtcggcatccgccccggcaagggtaagatgcgcaaccgccgctacatcaaccgcaagggccccctcatcgtctacggcaccgagggatccaagatcgtcaaggccttccgcaacctccccggcgtggatgtcgccaacgtcgagcgcctcaacctgctcgacctcgcacccggtggtcacctcgggcgcttcgtgatctggaccgagagcgccttcaagaagcttgaggaggtgtatggcaccttcgaggcgccgtcgctgaagaagaaggggttcatcctgccgaggcccaagatggccaatgctgatcttggcaggatcatcaactctgatgaggtgcagtctgtggtgaagccgctcaacaaggaggtcaagcgcagggagaagaggaagaacccgctcaagaatgtcgccgctgtgctcaagctcaacccctacttcggcactgcacgcaagatggccacccttgctgaggctgcccgcatcaaggccaggaaggagaagcttgactccaagaggaccaagcttagcccggaggaggctgctaaggttaaggctgcaggaaaggcatggtacaagaccatgatctcagacagtgactatgctgagttcgacaacttctcgaagtggctcggagtgacgcagtgagcgttgtcttgttttaagttttgagtagcagcgttaccggatcttatctcaaggatttatcaatctgtttttacctgaacatctccataagaagttatctgtgggattttgagact

SEQ ID NO: 3243 - DNA, 1114 bp, Oryza sativa
  ref <308>: DATABASE ACCESSION NUMBER: AK060964
  ref <309>: DATABASE ENTRY DATE: 2001-12-06
ataaacatcagtagacgacggcgatggcgcccaagcgacttgtctgcttcttggccgtggccgccgcgctagccaccacctgccacgggtggggcgccggcgccggcgatgtcgtgtcgtcgtcggcggcggcgctctcgttcgtggacaggctgaggcagatgatgatcccggcggccgtgggcgacggcgactactgcgacagctggcgcgtcggcgtggaggcgaacaacgtgcgggggtggacggcggcgccgcgcaagtgcgacaactacgtcgagaactacatgcgcggccaccactaccgccgcgacagcaaggtcgtcgtcgacgaggccgccgcctacgccgaggccgccgtcctctccggcgaccccgccgccgacgccaacgccacctgggtgttcgacgtcgacgagaccgccctctcccacgtcaagttctacaagaagcacggcttcgggtaccacagaaccgacgagccggcgttcatggagtggctgatcgccggcagagcgtcggcgttgccgaacacggtgacgctgtacaagaagctgctcctcctcggcgtcaagatcgtcttcctgtcggacaggccggacacgccggagctgaggaacgccaccgccaccaatctcatcaaggaaggcttcgactgctgggacgagctcatattaaggtcggagaactcgacggcgacgggatcggtggtggagtacaagtcgggggagaggaagaagctggaggaggagaaggggatggtgatcatcggcaacatcggcgaccagtggagcgacctgctgggctcgccggagggccgccggaccttcaagctgcccaaccctgcctactacatcgacaactacaagcgcgccggcgccgccgtccgcgccgccgtagccattacagcctcctcctcgtcgtcgtcgtgaagcaaacgatgcctagctagctatagtactcaactttgaattgcatttttttttcagacacataagttcagttaataatcggtcgtgtacgtacctgccgtgctgtgcactgttgtatctttttggtgagacgattgaaatatctttgggtttatcttttataattggttttaccgtgaatt

SEQ ID NO: 3244 - DNA, 1030 bp, Oryza sativa
  ref <308>: DATABASE ACCESSION NUMBER: AK104393
  ref <309>: DATABASE ENTRY DATE: 2002-08-28
aatttggactcttgcgcgcaaagtcctcacagttcaccgattttctcctcctcgcacaccgagacaggtcggagaaagaataggcgaaggaaatttccgtcgtcgtcgtcggagaagatgaggagcggcgaggggagcaccgcggcggcggcggcggcggaggaggagaaggtgaaggtggcggcgccgttcaggctggcggagctggggctccgggtgtgcgcggtgccgctcgccgtggcgtcggtgtgggagatggccaccaacaagcaggtggacgagacctacggggaggtcaggttctccgacctctccggcttcaggtatttggtctggatcaacgccatcacggctgcctactcggtggcctccatcctgctgtcatcctgcaggttcatcactcgctttgattggctcattttcctcctggatcaggcgtcggcgtacctgctgctgacgtcggcgtcggcggcggcggaggtggtgtacctggcgcgggagggcgaccgggaggtgtcgtggggggaggtgtgctcctacttcggccgcttctgcggcgccgccaccgtgtccgtggcgctcaacgccgccgccctcctctgcttcatggcgctctccctcatctccgccttcagggtcttcaccaagttcaacccaccatctcaatccaactccaagcagcagctgtcgcaggagcaaggcaagcctgtagtttcaggctagttagtggctctcccaagtctgaactttcagttagatggtacttttactgtgttcagctgtttacggtgtgttcaggtcttgctttgtgtagatgtcactacactctaatgcgtgttgtctgaaaagaaaaaatggttgtgtagatgtaacctgtataagtgctcaaaataccatgaactagaattactatacatttacaattttatttagatgtactgtatgtatgtatacttgaagctgatcttcagagttcagactcggggtcgatactgaagtgtgaaaaaactgaactactattctctttcag

SEQ ID NO: 3245 - DNA, 1729 bp, Oryza sativa
  ref <308>: DATABASE ACCESSION NUMBER: AK060965
  ref <309>: DATABASE ENTRY DATE: 2001-12-06
atggacgcagatgggtcgccgccgctgcgggttgtgatcttcccgtggctggcgttcgggcacctgctcccgtacatggagctcgcggagcgcatggcgtcgaggggccaccacgtgtccttcgtctccacgccgcggaacatcgcgcgcctcccggcgccggtggcgtcggcggtggagctcgtggcgctgccgctcccgcgggtggacggcctcgccgacggcgccgagtccaccaacgacgtccccgacgacgagcaggggctcctcatggaggccttcgacggcctcgccgctcctttcgccgacttcctggccgccgcgtgcgccgacgacggcggcggcggaaggaggaggaggcccgactgggtcatcgccgactcgttccaccactgggccgcccccgccgccgcccggcacggggtgccatgcgtggccctcctcccgagcgccgccgtcatggctgcgtgggtcgtcccgccgccggcgacgtcgtcgccgtcaccggcggcggctatgcccagctacgagtgggagaagctcaaggcaagcttcctcgccgccaccagccatggcgcgtcgtcgtcggcgtcgggcggcatgtcgcgggcgacgcgctgctccctgacgctcgagaggtgcacgctggcggccatgcggagctgcgtcgagtgggagcccgagccgttccgggcggtggccgcggggctcggcaagccgctcgtccccctcggcctcctcccgccatcgcccgccggatcccgccgccgccgcgccgtcgccggagaagaagacgacgactccaccaaccccctcctccgctggctggacgcccagccgcccagctcggtgctgtacgtcgcgctggggagcgaggtgccactgcgcgtcgaccaggtgcacgagctcgccctcggcctggagctcgccggcgcgcgcttcctctgggctctcagaaagccccgctcctcctccgccgcctccgccgccgccgccgccgccgccgccatcctccctcccggcttccaggaacgcacggcgagccgcggcgtggtcaccatgggctgggcgccgcagatcgccatactggagcacgccgccgtgggcgcgttcctgacgcactgcggccggaactcgctggtggaggggatctccgccgggaaccccctcgtcatgctccccatcgccggcgaccagggccccaacgcgcgcctcatggaggcgaggaaggtggggctgcaggtggcgagggatggcgcagacggctccttcgaccgccacggcgtcgccgccgcggtccgggccgccattgtagacgaagaaacaaggaaggtgttcgtcgccaacgccctcaagctgcgagaggtggtcgccgacgaggagctccatgagaggtacatcgacgagttcatacaccagcttagtttaagctctcctacgtacctcgccagctcatgaatgaaccccgtcttgggcccatggattgtaatccctacaaataataatgtccttcctccgtttcagaatataagtcattttagtattttccacatatatattgatgttaataaatctagatagatatatatatgtctagattcattaacatcaatataaatatgagaaatattaaaatgacttacattgtgaaacagagggagtacgtacgtacgtgtgtatgtgtgtctgtctgtcattttggatcatgccattgcaaatttattgtatt

SEQ ID NO: 3246 - DNA, 895 bp, Oryza sativa
  ref <308>: DATABASE ACCESSION NUMBER: AK060966
  ref <309>: DATABASE ENTRY DATE: 2001-12-06
agcgttggcacgagcatatccggcggcgcggcggcggcgtgctctccctaccctcctccggccatcgccggcggctcctccgaccaccgtagggctccgctccgccgctgcctaggggattcatggcgaggttggtgtcgaccgctctcatgagagggctcgtgagatcgagccgcgcgccgagagtagctgctgtgtcacaaccagctatccagcagtttaggaactactcaccaggacttggtggtgattctagaggaagtggggactcaagttcaacacgagtagctgctgatcctgatacacatcaagatttccagcctacaagcaaaagttccaacatgtcttttgatgacattgttgctcaggatatcaaagagaacccagtcttgatctacatgaagggttttcctgagtctcctatgtgtggattcagtgcattggcagttaaagtcctcaagctatatgatgtccctatcagtgctagagatattttgggagacctcaagctcaaagagtgtgtcaaagcccacaccaactggcctacgtttccacaaatatttatcaaaggagagtttgttggggggtctgatatcatattagatatgcatcagaagggtcagcttaaggatgtgcttggcgatattgcacaaaagcatgagcaaaaagaatcatcatgaagatgacaatagtacgccattttggtcacgtgagctttagcatcagtatgggagctggattcttcctttccaaattttcgttcccgtttatgtagtatggatttgctttctcctatcgtttgagcttttcatgtcaaagatggtggaagaagaataaccctctgttccagttgtatacaagctttttcacgataaataaatgccacttgtccttg

SEQ ID NO: 3247 - DNA, 1060 bp, Oryza sativa
  ref <308>: DATABASE ACCESSION NUMBER: AK060967
  ref <309>: DATABASE ENTRY DATE: 2001-12-06
tgttgtctagactgaggcacccaaacattgtgaggtttataggtgcatgtaggaagtcaattgtgtggtgcatcattactgagtatgctaaaggtggttcagtccggcagttcctggcaagaaggcaaaacaagtcagtgcctttgagattggctgtaaaacaggcattggatatagccagggggattctgctgctgcggaggagggcggcgggggttggggctgcaagctggtccgatcagcttttcctgctgctgaggtagcgggagcgacaaccagggcatttcttgtacaaggatgaacagcctgccccggctcaaataatatttgcggttggatttattttttttcgacatgaacgggcagccaaggtttcacgatatgataggcggtggtggcaagggaatgcaagataatgagatcaatggcctcttcaacatgccgtcttaccataagtttgtggagggctcccagatgtctgttgacagcgccgacggcttcaacatggccaactacgttgggggttccgttgccatgtcggtggacaacagcagcgttggctcgaacgagtcccgcacggttatacttaagcacccaggcctccgtgatgccccgacggcaagctattcggttggcaacagtgtcttccgccccaaccgtgtggctgcgcacacgctaaatgaggatgcgttagctcgtgttttgatggatccgagccatccgactgagatcctaagtaattatgaggaatgggccattgatttggggaggttggacatgggggttccttttgcccaaggggcctttgggaagctataccggggaacatacaatggagaagatgttgccattagtaccagctcatagggtctgtgtgcccacagaagttcctaggctttgagcttctgtgttattcgattctatcttgtgtgagttgcacagctcaagtaatctcttctggaatatagatgttgccttgtatgttaacaggatctaatggagctttcctatgttaataacatctgcttgttggtgtaaccaagcctgctctgttgatttc

SEQ ID NO: 3248 - DNA, 1417 bp, Oryza sativa
  ref <308>: DATABASE ACCESSION NUMBER: AK104394
  ref <309>: DATABASE ENTRY DATE: 2002-08-28
attgcctcatccatccatcaagttggtcatcgagctcgagctgaatctaaacctttgcaacaatggcggcgcgtgttgttgtggcgttcgcggttgcgtccgccatgttcgtggccgtctccggccagaagttcaacgccatcttcagcttcggcgactccatgtccgacaccggcaacctctgcgtgaacggcccccccgccggcctgacgctcacccagcctccctacggcgagaccttcttcggccgcgccacctgccgctgctccgacggccgcctcgtcgtcgacttcctcgcggagaagttcgggctgccgttgctgccgccgtcgaagaggggcggctccgacttccggcgaggcgcgaacatggcgatcatcggcgccaccaccatggactccggcttcttccagtcgctcggcatcggcgacaagatctggaacaatggccccctcaacacccagatccagtggttccagcagctcatgccctccatctgcggctcatcttgcaagacgtacctgtccaagtcgctgttcgtgctcggcgagttcgggggcaacgactacaacgcgcagctgttcggcgggtacacgccggagcaggcggcggggcagagcggcaccatcgtggacgggatcgggaagggggtggagcagctgatcgggctgggcgccatgtacgtcgtcgtccccggcgtgctccccgtcggctgcttccccatctacctcacgctgtacggcacctccaacgccggcgactacgaccagtacggctgcctcacccgcttcaacaccctctcctcccgccataactccctcctccaggccaaggtctcctccctccagagcaagtacccctgggctcgcatcatgtacgccgacttctactcccacgtctacgacatggtcaaatccccctccaactacgggtttagcacgaatttgagggcgtgctgcggggcgggaggagggaagtacaactaccagaacggcgcgaggtgcggcatgtcgggagcctacgcgtgctccaacccgtcgtcgtcgttgagctgggacggcatccatctcacggaggcggcgtacaagcagatcgccgacgggtgggtcaacgggccctactgccacccgccgatcatgccctagatcatcgccggcggcggcgacggcggccggaggatggccggctagctgctgctgatttgatttgtttagcagaagaagagaagaaaaatggatagcaagaggaagaagaagacatcttgcgatcgactgggaaatgaataagatggtgattagttgattttcgttgtgggtggttaatttgtttttgttttaggtaatgcacatttgtgtagtatgtatgagattgggaggcaatttaattatgtgttgcaattaattaattaaatcttagt

SEQ ID NO: 3249 - DNA, 1096 bp, Oryza sativa
  ref <308>: DATABASE ACCESSION NUMBER: AK060968
  ref <309>: DATABASE ENTRY DATE: 2001-12-06
acagcctcctcgatctcctctacagcagctcactcactgctcaacaatggcgacggcgaggttgatcctcctgctcacggtggcggcggcggcggcgggctcctgctgcttctgcagcgcccaggaggtgatcgtgggcggcgtcggcgagcagctggcgacggcgccgccggccgcgcccgctccctcgccgccgccgccgtactgcggcagcgtgaggacggcggtggaggcgcacaacatcatcggctggaagacggtgccggcggactgcgccgagtacgtctccgactacttgaccggcgagcgatacggccgcgactccgacgtggtgatcaacgaggccatcgcctacgccgagagcctcaagctctccggccatggcaaggagatctgggtgttcgacgtcgatgagaccgccctctccaccctgccctaccaggccaagcatggctatggaactaagccatacgaccacgcgagcttcgtccaatacgtggctggagggagcgcaccggcgctacagggaacactgcgactctaccgacggttgctgcagctcggcatcaagccggtgttcctgaccgaccgcaccgaggaccagagggccgtcaccacccacaacctcctctcgcaaggctactacagctgggagaagctattactccagcctgttgggctccagaccacgactcaggcgttcaagaccggcgagcggcagaaattggtgagcgccggctatgtcatcgtcggtaacatcggtgaccaatggagcgatatcctcggatcaccggagggctaccgcaccttcaaataccccaaccccatatactacgtcgcgtagtttggtgtcggcgccatcgctagctagcttagctatagctagctatatcgatggatcatagttcgcgtgcgtttcatctacttattttcttctcatgaactgtcgtttgtagttaatgtttgacgcgtttgctttgatttttcctcgttagttgttgatgagatgaaatttaaatttgtaataatgtttgtttggcatggcagttggccattcattgatcaatgcattgtgttgagcaagctggttgtattt

SEQ ID NO: 3250 - DNA, 1270 bp, Oryza sativa
  ref <308>: DATABASE ACCESSION NUMBER: AK104395
  ref <309>: DATABASE ENTRY DATE: 2002-08-28
aatgcaggtaattaagcagtacagcaccaattaagcaaagccacagcaacgagagagagcttgtgaagttgtgatatttcattttgaccatatgggttactcctactcttccgccgccgtggcggtgagcgttttggtggtggcgttggcggcggcggcgtcgggccagctgtcgacgacgttctacgcctcgtcgtgcccgaccgcgctgtcgacgatcaggagcgccgtgaacgcggcggtggccagggagccccgcatgggcgcctccctgctcaggctccacttccacgactgctttgtccaaggatgcgacgcgtcgatactgctggccgacaatgccaccttccggggggagcagggtgcgttccctaatgtcaactcgctgaggggattcgaggtcatctctagcattaagatgcaactcgaggcatcttgcaggcagaccgtctcctgcgccgacatccttgctgtcgccgcccgcgactccgtcgtcgccctaggaggtccatcgtacccggtggagctcgggaggagggacgggatgacgacgaaccaaaccatggcgaacaccaacctccatccaccgaccaccgacctgggtaacttcgtcactagcttcgccgggaaagggctcagccccaccgacctggttgtactcactggagcgcacacggtgggcgtggcgcagtgcaccaacttccggtcgcggctctacggcgagtccaacatcaacgcgccgttcgcggcgtcgctccgggcgagctgcccgcaggccggcggcgacaccaacctggcgccgctggactccacccccaacgccttcgacaacgccttcttcaccgacctcatcgccggccgcggcctcctccactccgaccaggagctctaccgcggcgacggctccggcaccgacgccctcgtccgcgtctacgccgccaaccccgcccgcttcaacgccgacttcgccgccgccatggtgcgcatgggcgccatcaggccgctcaccggcacgcagggcgagatcaggctcaactgctccagggtcaactgatctgtatatctctacgaaatgcgtcgatctactgtacctacgtggatagaatcgaatcgaataagactagactattaataagctaataagtgattagcgatatcgcgatatgtataagtgcgcaacgtgatattgaatttatgtaagggcttgtccggtttattgccattttcaacactatcgacttttaatattattattaaattttggtagaat

SEQ ID NO: 3251 - DNA, 1036 bp, Oryza sativa
  ref <308>: DATABASE ACCESSION NUMBER: AK060969
  ref <309>: DATABASE ENTRY DATE: 2001-12-06
gaatcgatcgcccgatggtggtggccatcgctaccgaagcgtgggcgctcgccggatgcggcgcggcggccaagtcggcggccgcggcggcgcaggaggcgccggtgcagctgcagcagcatagtctttctgcagccagggccaagaaaccgatttcgttcagagcggtggcggcggcggcggtcagtagccaatgccaccaagaacggcgcgccgtcgtcgtcgggagacgcagcggcatggcgtcctgcctgctcgccgccgtcgctgcctccctctccggcgccggtgaagcgcgggccgcggtcctggaggccgacgacgacatcgagctcctggagcgcgtcaaggaggacaggaagaagcggctccagaagcagggcgtcatcagctcctctggcaccgagacagggtacttgcaggatctcatctacaagctgagcaaggtagggcaagccattgacaagaatgacctccctgctgcaagcagtgtcctaggcccaaactctgacgctcagtgggttcagaacatcaatgtagctttcaccaagtttagctctagcccagaggagaagaacatggtcgatagcttcaattcctccttggcctccttgattacatctgtgaacaagagtgatgttgattcatccaagtcggcgtttgtgtcgtcagccacaacgctggagaaatggatagcttcagccggtttgagtggtcagctcaaaggattctaaatttctgacgccaattgaatctgaatcgcctgacaagtacatgatcggagtagcatttccttgaagcaatggtctatatataatgcgtcaataccagtaagaatgttttgtccaagaaaaagaatttgaagatatggattcggctgctgtgaatcttcgaagagggtattgtaactgaatcttcagttcagacagaatatgtgataatagccatggctctgttttttctctctctccgtgggaagtaaattgcatcatttcgtatatcacgagattctttgcaatgcagaagaaaatttagc

SEQ ID NO: 3252 - DNA, 1106 bp, Oryza sativa
  ref <308>: DATABASE ACCESSION NUMBER: AK104396
  ref <309>: DATABASE ENTRY DATE: 2002-08-28
aattgcgagcgatgtcggctgcgagtgcgagtgccactgcctccctctccgcggcggcggcggtggcggtggcggcggccgctctccgccccacgcagcagcgacgcctgcgcgttgtcgcgccaccgcgccccctcaggctcaccagtctcaacccccctcgcgcggcttccgccccctctactcctctgtgggaggccggcgtccgagctgagtcgtccgactcgcccggagccggagccgggggtgacgtcatgggcctcctcctccgggagcgcatcgtcttcctcggcaacgagatagaggacttcctcgccgacgcagtcgtcagccagctcctcctcctcgacgccgtcgaccccaactctgacatccgcctcttcgtcaactcccctgggggatcactcagcgcaacaatggccatctatgatgtaatgcagctcgtgagggcagatgtttccactattggattgggcatagctggttccactgcttctataatccttggtggtggcacaaagggcaagcgattcgccatgcccaacaccaggataatgatccatcagcccgttggaggcgcaagtgggcaggccttggatgtcgaggtccaggccaaggagatattgactaacaagaggaatgtcatccggcttatatcaggtttcacaggacgcactccggagcaggttgagaaagacattgatagagacagatatatgggtcctcttgaggctgttgattacgggctcatcgacagtgtaatcgacggagacagtatcatcccacttgagcctgtcccggagagggtgaagccgaaatacaactacgaggaactgtacaaggatccacagaagttccttacacctgatgtcccagatgatgagatatactaggtaatgagcctgcctgcctgtcgtttgcatttcgcacggcaagggggctgcttgcaatcaaagacgatgctcctagtcctagcactagttgatttttcctgtcacatgttaaccaactagtgccatattacgattgttgagcacgcagttagacttattggttgtgtttgtcgttgaaattgcatgcgtttggtgtgcgaatgtggatggatt

SEQ ID NO: 3253 - DNA, 989 bp, Oryza sativa
  ref <308>: DATABASE ACCESSION NUMBER: AK104397
  ref <309>: DATABASE ENTRY DATE: 2002-08-28
atgcgccgcgtccacagctcgatcgctagccctactcgctagctagatcggcggccatggtgaacggctacttgttccgggagtacatcggcgcgcagttcaccggcgtgcgcttctccgacgtgcccgtcaacccgggcctcagcttccacttcatcctcgccttcgccatcgactacttcatggcgacgcagtcctccaagccggcgccagccaacggcgtgttcgccccgtactgggacacggccaacctgtccccggccgccgtcgccgcggccaaggcggcgcaccccaacctcagcgtcatcctcgccctcggcggcgacaccgtccagaacaccggcgtcaacgccacgttcgcgccgacgtcgtccgtcgacgcgtgggtgcgcaacgccgccgactccgtctccggcctcatcgacgcctacggcctcgacggcgtcgacgtcgactacgagcacttcgccgccggcgtggacacgttcgtggagtgcatcggtcgcctcctcaccgagctcaaggcgcggcacccgaacatcgccacctccatcgcgccgttcgagcaccccgtggtgcagcgctactaccagccgctgtggcggcgctacgccggcgtgatcgactacgtcaacttccagttctacggctacggcgccaacaccgacgtggcgacgtacgtgatgttctacgacgagcaggcggcgaactaccccggcagcaagctgctcgccagcttcaagaccgggaacgtcaccgggctgctctcgccggagcaggggatcgccggcgcgaaggagttgcagcggcaggggaagctgccggggttgttcatctggtcagcggatagctccatggtcagcagctacaagtttgagtacgagaccaaggctcaggagatcgtcgccaaccactgatcgtccatcgaacggtcgtgataatacttatgaaataagagcaaataaattgcgaaataatggtcgtattat

SEQ ID NO: 3254 - DNA, 1032 bp, Oryza sativa
  ref <308>: DATABASE ACCESSION NUMBER: AK104398
  ref <309>: DATABASE ENTRY DATE: 2002-08-28
atccatctctacacatcagcaatatttagctacacagagctagctaggattagctcagcaatggcaggtgctcctcgaggactagttctcatcggcgtttgtgccgtcttgatggcggtcgccgtcggcggtgaggcggcgtcggttgtcgtcggcacggccaagtgcgccgactgcacccggaagaacatgaaagctgaggatgctttcaagaacctccaagtggcgatcaagtgcaagaacaccaacggtgagtacgagagcaaggctgccggaaagctcgatggcaccggcgctttcagcgtccccctcgacgccgaccttgacagctccgactgcatcgctcagctccacagcgccaacaacgagccatgccctggtcaggagccatccaagatcgtgccaatgtcggagggcacctttgtcgccattgccggcaagacacactacccatcagcgttgtgcgcgtcagcgaccatctgcggtcccatcaagaagaagatcatagaccacttccacaagaagccggtgccacccaagccggagccgaagccggagccacccaagccgaagcctgagccggaacaccccttcctcgaccatatccacaagaaggagaagcacttcttcgaccacttccacaagaagccagtgccacctaagccagagccgaagccagagcccaagccagagcccaagccgcagcctgcgccggagtaccacaacccgagccctccggcaaagaactgatgaatatgatccgcactggacgtttgatcatgccgtcctgccccctgtcagattgtctgcataataacagtttgagatcgaagtcatgcattagctttcatcgacaggagttttaatttgtacttgtatctatttcttctctatcaaatgcagttatatatggtaagataatttatttatatttaatcagtactgttgtggcggactattcactgtatcagccaaagccattggatcgtaagaggttagcattggttaaagaaaaagttatttttatctgac

SEQ ID NO: 3255 - DNA, 1168 bp, Oryza sativa
  ref <308>: DATABASE ACCESSION NUMBER: AK060970
  ref <309>: DATABASE ENTRY DATE: 2001-12-06
atcccccttttctagcactcaccaagtttaatttggagcacacatttcagctcaccactgctagcttgggaagaggaggaggagcttgagcttggagagagacaacaatggcggctcaggctcttctctctgggaggcagctgctggggaggccattgcaatcttcagtctccaggtcttcttcctccaggaaggcacccttcatggtcagggcagaggccactccccctgccaagcaaggtgctgacaggcagctgtggttcgcatccaagcagtccctgagctacctggatggcacgcttccgggagacttcgggttcgacccgctggggctatcggacccggaggggaccggtgggttcatcgagccacggtggctggcctacggcgaggtgttcaacggccggacggcgatgatgggcgtcgtcggcatggtcgccccggagctcctcggcaagctgggcctcgtccccgccgagacggcgatcccgtggttccagaccggcgtgatcccccccgcgggcacctacacctactgggccgacccttacactctcttcgtcttcgagctcgccctcgtcggcttcgccgagcaccgccgcttccaggactggtacacgccgggctccatggggaagcagtacttcctcggcctcgagaagtacctcgccggctccggcgagccggcctaccccggcggcccgctcttcaacccgctcggcttcgggaccaagagcgaggcggagatgaaggagctcaagctcaaggagatcaagaatggcaggctcgccatgctcgccttcctcggcttctccgtccaggcgctcttcaccggggttggccccgtgcagaacctgcttgatcacctcgctgatcccgtccacaacaacatcctcaccagcctcaagttccattagagatgccatcaactacgtatttaattaattacgagtttttaattatgtatgtatgtacgtgcgtatgcgtatatgtgtgtacgtatgtatgtacgcaactttgtacgatcgatggtgcgtgtgatcgagaggggtatgtatgtacgtacgtatatacgatgtattattatgcatgggtgtagggtgtgggtgtaacatgtaaatttgtgctccaactgatttgcacgcatggtcgcatggatcgatttgct

SEQ ID NO: 3256 - DNA, 1426 bp, Oryza sativa
  ref <308>: DATABASE ACCESSION NUMBER: AK060971
  ref <309>: DATABASE ENTRY DATE: 2001-12-06
aaaaaaaaaaaccatcgccagtcgccgcccgcgcggagcatccatcctcaacctcccaagttcggcgcccaatcccggcgatggagatcgccgacctccccatcgccacctcccaccgcgccaacctcctcgccgccggctactcctccctcgccgcgctctccgccgcctcccctccccgcctcgcccgagatttgagcattgaggtacatgaggctgaagaaatcctcaaggttgccgtgggcgccaacaagtccaagggagcagatgggcctagcaccagcagtgttctcaaaggtgtgcaaaatgcatgggatatgctatctgatgagcaatcacggaggcacatcaatactggatctgctgacctcaacaacatccttggtggagggattcactgtaaagaggttactgagattggtggtgtcccaggagtcggtaaaactcaactggggattcaactagcaatcaatgttcaaattccagtggagtatggtggacttggtgggaaagctgtttatatagatacagagggaagtttcatggttgaacgtgtctaccaaattgctgaagggtgcatcagtgatatactggagtactttccacactgccatgacaaggctccagccggacaagaaaaactgaagcctgagagtttcctggctgacatctactactttcgaatatgcagctatactgaacaaattgcagtcataaactatctggaaaagtttcttggggagcataaagatgtaagaatagttattattgacagcgttactttccactttcggcaagattttgatgatatggcactaaggactagagtgcttagtggattatcattgaagttgatgaaactttcaaaggcatataacttggcggttgtcttgttgaaccaagttactactaaattcacagaaggatcatttcagttaactcttgctctaggtgacagttggtcccactcatgcaccaatcgactaattctgtattggaacggcaatgagcggtatggattcctggacaagtccccttcactaccagtagcatcagcaccatatgcagtgacagttaaaggggtgagagatgctgtgaattcaaacagcaagcgagtccgggtaatgtagcaatcttggtgttgaacccttttaccattagtagccatcgaccgtcatgtctaaactgtgcagcattctctgatctttctaactaagctgattgaaatttggatcatgtgtaacgctgtcttatttgcttctgccggtagctaattgtacaaaggtaactgaagcaaaagagggtgcttcattttggttgatccaaacatgtaacagctaacaagtactctacaggcctgttacaaacttacaaacagaatgatgccggatgtgttccgatgccaggaaattatcctcgttttttc

SEQ ID NO: 3257 - DNA, 1023 bp, Oryza sativa
  ref <308>: DATABASE ACCESSION NUMBER: AK104399
  ref <309>: DATABASE ENTRY DATE: 2002-08-28
ctcttggactctgccggcgccggcgttggtagggtagccatggcggaggaggccaccctgagccacccgtcgcggtacgtgaagctgagcagggagcacgacgcccccgcccccgccgaggacatccgccccggcgagctcaaccagccagtccacgtcccgcagctcgagggcaggaggtgcagcgagtgcggccaggtcctgccggaatcctacgagccccccgccgacgagccctggaccaccgggatcttcgcctgcaccgacgatccacaaacctgccgaactgggttgttctgtccttgtgttctttttggacgcaatattgaggccctcagagaggatatcccttggacaacgccttgtgtttgccatgctgtctttgttgaaggagggattgcgcttgcaattctcaccgcaatatttcatggtgttgatcccagaacgtctttcctgattggagaaggtttggtgttcagctggtggttgtgtggtacttatacgggcatctttcgccaagaacttcagaggaaataccatctcaagaattctccatgtgacccttgcatggtccattgctgcttgcactggtgcgcgaattgtcaggagcaccgtgaaaggacggggcggcttgcagagaacagcgcggtgccaatgaccgttgtgaatccacctgcagtgcaagagatgagcatggcagaaagccgtggtcctgtttcccccggtatggagaacggagcaccatcaaactcaaagggtgagcatgaggaacccaagagtgatcacgatgatgtggaggtgatacctctatagggtgaatgaaagaaagatattctttctgataataggatagcaagaggaatgaatcgatgtgacgaattcatggacgcttggcgacgatgttcttgtgtcatctggaactggaatcatcataaaacacacagggcgatactctttcttttttttttgtactagtattaaaacttcaaatataattaactggagagcaggggctgcctgagt

SEQ ID NO: 3258 - DNA, 1371 bp, Oryza sativa
  ref <308>: DATABASE ACCESSION NUMBER: AK060972
  ref <309>: DATABASE ENTRY DATE: 2001-12-06
atagacgattttatcgatgaacctgaaatagacatggcttgccacttgagattatttccctttactcaactactagtattggttctgtacaaaatcgccgccgtaggggcagatcctgcaaacgcagaactatccacaaagatcacccaacactctccattgtacaacccacagcctcaagactttccaaacgaggagctctaccgcaactatctagtcatccagcggttcaagaagacaatcacttccgaccccaagaacatcaccgccacctggaccggccatgacatctgcggcaacacgacctacctcggtttctactgtgcagcattgcctgggcgtactaagaagcccacggtcactgtggtgatctttaacggttatggcctgcgtgcaccgaagctggaaggatttattgaccatctccccgatcttgcacttttccatgctgcctccaacgacttcggtggtgacatcccctacctcacaggcctcgcctacaactacaagatcaatgtcgacagcaatctccaaatacaggatgattttagtcgtgacatggtcgggtcgcatgtaacaactaaagttcatggttattgcgttaatttagatctagatatcacatttcacctccggcccggaaaagacgacaagaaaggacgaagcatccccggtgccacagattctaaggcgctcctcctcaactacaatcacctgtccgggccattaccggtgaacatcggtttctccaagttaagctacctggccctcgccaacaacaggctcaccggcgcaatcccgccatcaatcttgcatttgcaagactccctcctcgaggtgctcctcctgaacaaccagctctccggctgcctcccccacgagctcggcatgctcaccaaggccgcagtgttcgacgccggcatgaaccagctcaccgggccgatcccctcctctttctcatgcctcaccagcgtcgagcagctcaacctgggcggcaaccgcctctacggagagatccccgagcgccacccacgtggcgtgccccgccggagctgccaacgctgcggcggcgccggcggacagggtggtcaaggactactccagctacgtgacgtacgccaccctgcacgagtgagcccggcgccacggcacgggcgcacgacgtgcgtgcatgcatgcagtaggggacagctagaagctagcgtctcggggtggtatttgctcttgtattcttgtgttcgtttgttgtgctcgtgagtcgtcattgtggtttgttttctctgcacgtgtggctagctatggctgtcacgtctagatctcacctcctgtactcttgtgtactgtactatgtgaaaatcattggtgattact

SEQ ID NO: 3259 - DNA, 1178 bp, Oryza sativa
  ref <308>: DATABASE ACCESSION NUMBER: AK060973
  ref <309>: DATABASE ENTRY DATE: 2001-12-06
agcggcgcctctccaccgggaaccgctcaccggccgccacacacgagtgcaggatgctccccctcgccgccggcgccggcgccgcgagaccctgcctctcctcctcaccggcgccgccggtatcctcgcccggggcgattcctctccttcgccacactcctatccctcaccaccgcaggcgccccctcgcggcgctccgaacccgcatcatgctcctccggcctctcagagccgccgcctcgccggggccggcggcgtcctcgcgcccggcaagggaccgcgtgattgacttcgggaagcacaaggggcagatgctgggcacgctcccgccgtcctacctgcggtgggtcgtcgccgagctcgactacggggacaccgcggcatgggcgagcctcgcgcgggaggtgctcgacgacccggtctacgtcgaccgcgtcgagtgggagcacgcgcaccgcttcctccgcggggacaccgactacgacggcgacggcgaggatgggccgctccatgagatggccgaccgcttcggctgggacctctccgacgaggaggggtggagccgcctcgacttccgcctcctcggcacctcctacggtggccgcatcccgcgaaagggcggccggaggcaaaccaccaccagctccctgttcgacatcggggctgaaacggacggcccgcgagggaagcgggacgagaggagggagcggatgcggctgaggagggagacgcaggtgaggggtgccaagttggatatgctcggggtgaacgccggcgtcaaggacggcggtgttctagggacgccgaggaaggcccgtactaggacgacggccaagacggacattttgggattgggtcggcgcaggagccgcggcggtgaggtgctcggcgagaaggtgttgcctggttccggcggtcagggagggaacccgttccccggccggcaagcattcctcgacaaggtcaggaagctgaaagatgatagctagtttggcgacttcaggagatcagaacaatagggtgaattgtacatgtaaatcttgattttggctgaggattattagtttacgattgactgaacgatttgtgagaggttggttatgctgaatttgtgcagttggttgcgagtttgcaattgtgtatcattgcgccctgtaattgtgattcacatttcttac

SEQ ID NO: 3260 - DNA, 1175 bp, Oryza sativa
  ref <308>: DATABASE ACCESSION NUMBER: AK104400
  ref <309>: DATABASE ENTRY DATE: 2002-08-28
aaggcagccagccgcccggcctcccgccgcctctgctgtctcagtcccgagtcgcgagtcgcaacgccaccacgaggagccgaggaggaggaggaggaggaagaagaggtgttgtccgggcgtgaggaggatcggaggaagggaagctatggggatcgtggaggaggcgcacaacctgcgggtggtgggggaggggaagcgcggggtgatcgtgctggcgcacgggttcgggacggaccagtcggtgtggaagcacctggtgccgcacctggtggccgactaccgcgtggtgctcttcgacaccatgggggcggggccgaccaacccggactacttcgacttctcccgctacgccaccctcgagggctacgcgctcgacctcctcgccatcctccaggagctccgcgtcgcctcctgcatctacgtcggccactccgtctccgccgtcatcggcgccatcgcctccatctcccgccccgacctcttctccaagctcgtcctcctctccgcctcgcctcggtacctcaatgatgtcgactactatggaggatttgagcaggaggatcttgatgagctctttgaagccatggggtcaaactacaaggcctggtgttcaggctttgcgccactgtgcgtaggaggggacatggaatcagtggcagttcaggagtttagccgcacactcttcaacatacgtccagacatagccctgagtgtcgcccagacaatcttccagagtgatgtgcgaagcctcctaccacttgtcaccgtaccatgccacattgttcagagcaccaaagatcttgctgtgccggttgtggtgtctgagtacctgcacaagcacctcggtggcgactcaatcgtcgaggtaatgccgtctgagggccatctaccccaacttagctcaccggacatagtcatccctgtcttgcttcgacacatccagcatgacattgcggtctaggtggtgcaaccattccgcctagagctgttcatcagaagttgtataatttcagtatctgtactccactgaatcacccgacttaggatccatctactgttgttgtaataagattctccatatgttgtaaattgatggcggtggagaagtagtctatggtgtttgtaaaccactgcacgtatgatgttcattataatgttggatgttttaacgt

SEQ ID NO: 3261 - DNA, 951 bp, Oryza sativa
  ref <308>: DATABASE ACCESSION NUMBER: AK060974
  ref <309>: DATABASE ENTRY DATE: 2001-12-06
aatgcctccatttcttcctccaactcaaataacccaataatacatatagtccccagcccagcctgctccatccgaaggcccaaccccgctcgcgccagatccccccaaacccaatcgatccccatcgatcaccgcgctccccccggcgccgccgcggcgagaggtagggtttgctcgacgacgcgagggggagcgaccaccgcccgcgacccgataggagggatggcggcggccgagggcgagaagaagatgaccagttttatcgcgaagagctccggcgccgaggagttcgaggcgggggccatccgccgcgcgatcgaggacgactgcgacgacgacgacagcggcatcctgccccccgacgtcctctccggcgagggcctcgataaccgcgacgccggcttcccgccttcacaaagaagcgcctccaagatcacgggagatcgcgcggcggtgaacccggcagccgctgatccaccaatgcccgttccagggttgcaccatcatcctaacatccccgctgcaaaccgccagctccctcctgccgctagactactgatcaactgtggcatcttcctcgtcgccactgccgggtcctccatagttttccacactgctggagacccttccgccatcgacggtcctgcatatgcccttgttgcattcttcttcgtcctcctcggcttgtggtttgtgctgcttggacccgtcgccggccagttccctggagccacgagggtcgccgttgccattgcgaaagcgctcaagggttacctgctcggcggcggcaattgatcaaatatttgattcattctttatataggtatagctttgctagctcacagtagttttctgtttgtttgtatgtcgtgtctataggcgttgtagcccataaactcactgtaaagtgtgaagtgtatatacgtgttcttgtaaggccctgtttctttc

SEQ ID NO: 3262 - DNA, 1115 bp, Oryza sativa
  ref <308>: DATABASE ACCESSION NUMBER: AK060975
  ref <309>: DATABASE ENTRY DATE: 2001-12-06
gtcgtcaatgctctgactgcatcttgttgcaatgtgatggttcttgggcttctggcaccatgccgctcatatgggagcacatcccgatttgacttccagaatgcaattgagaaacttcccaacaacatttttgagaagagttatcctttgagacagtttgatctacaaaaacgaatcagtgctttcttttacaaagcggcagagcttagcttgttaggggtagttgctggttctattcaaggtggtctctcaaaagccttgtctgcaagaaaggaaaggaggttatcggttaccattccttctgtcagcacaaatgcccttggctatggagccttcctaggactatatgcaaacttgcggtatcaactattgtgtggactggatcagtatatggtcaggcgatttgatgttcttggtgtggcaatcttcttcagcacagcactaagattgacgaatattcagattggtgaatcatcgagacgcacatggcttggggaggaagctgatccacagtactcagatcggctgctgagagcatataaaagaccagtcgaggttgctggagaccaacaagattcaaggtggtttatatcgaaggatgcgattgtatctggccttggtcttctcggcatcaagcaaggtggaacagaagctgcattgtccaagccccgcaggaagagagttgtccgaaagaaagttgcctcaacctgaatttagttggatgttgtctaatgctggaacaattttgctttagttccactacgccgtattgagttctacccagcaaggcgaacgagggaaaccgtagttggcagccagccttgcagtctgtcgtggaaggcatcgaagcggtggtggtggtcataactgggagggttcagaactggaggccctttaccattttgtatcttttttcttctcgctttctgataagaattgacatcccaatttcttgtactgttgtgagccaagtagactcggcatagttgtagtcctggagattgttaaagatacagtcgttaatatgagcaaaaccattccatttttgatttaggtcatgtagttgcccgatgtattgcttgtagcattacaaagttggatgcctctttatcgtc

SEQ ID NO: 3263 - DNA, 1059 bp, Oryza sativa
  ref <308>: DATABASE ACCESSION NUMBER: AK104401
  ref <309>: DATABASE ENTRY DATE: 2002-08-28
accgatggcgcctcctcctatctcctcctccctctcgctcatggcctccaacccaatcccgtcgcctccggtcgccaaaccgggcaggccgctcaccgtcgcggcgtgcagcaacagcagcagcagctcctcctcctcctccccgtcgtcgacctcgtgctcggctgcctggagtctcccggtggcgacgtcggccggcaggagggggctgctcgcgctgggcgcggggttcctggcttcccctgggcttctgtgccccgccggcgacgccggagcgacgcgcatcgagtactacgcgacggtgggggacaagctgtgcgacatgaacgtcgtcaagtcggggctcggctactgcgacgtcgaagtcggcaccggcgcccagcccccgcgcggccagctcataaatgtacactacactgcaagatttactgacgggatagtgttcgacagcacctacaagcgaggacggccactgacaatgcgccttggcgcaggcaagatcctccgagggcttgaacagggaatcagtggtggcggtggtgtgccacccatgctcgttggtggaaagcgcaagcttatgatacctgcaactttggcatacggacctgaaccagcaggttgcttctcaggagactgtaatattcccggcaacaccacactcctatacgacatcttcctggttggattttacaagtgagcatatgatgaaaaggaatatgcatgacttgagcagactaggtgcaaacaagattttcgagtaaattttggcgtttcatacaagaggcgggactacggacagatgaagagaaagggtgcgacatgcctaagcccagacgccgaaagcaaatgcgtcaccggagctccttgggtctccaatacgcagagtactacatttgcaatctgtaccaagaagtgaaaggatatataacaaaccggtcctctgatatactatcaaattggtcttatgttttctagagaagaaaagtcttgtgtttgtgtaagtataacgttgtaaagacatgtctcattattcatactgtcattggtacagccaaacac

SEQ ID NO: 3264 - DNA, 1400 bp, Oryza sativa
  ref <308>: DATABASE ACCESSION NUMBER: AK060976
  ref <309>: DATABASE ENTRY DATE: 2001-12-06
ctagctaccacttccaaaatactccacagagatcaatcacatatagatatagctagattgctatagacagagagatcatcaaagaaatttagcaggtgatagccacatggggttgagggacatcgagctgacgctgcctccggggttccggttctacccgagcgacgaggagcttgtctgccactaccttcataacaaggtggtgaaccagcatcgcttcgccggagttggaggagccgccgccgccggcggcggcaccatggtcgaggtggacctccacacccacgagccgtgggagctaccagatgtggcgaagctgagcacgaacgagtggtacttcttcagcttccgcgaccgcaagtacgcgacggggctccgcacgaaccgcgccaccaagtccggctactggaaggccaccggcaaggaccgcgtcatccacaaccccaagctgcacgccgccgcccaccgccgcgcctccatcgtcggcatgcgcaagacccttgtcttctaccgcggccgcgcccccaacggcgtcaaaaccaactgggtcatgcacgaatttcgcatggaaaaccctcacacccctcccaaggaggattgggtgttgtgcagagtgttctacaagaagaaggcggagacggagacggagtcgtcgtacagcatggagaacgagcaggaggcggtgatcgccatggcacggagcgccgcggccatcaaggcgggtggatgctactccaactcctcctcgtctcacgacccagccgccgccggccatcactcgcccccgccattcccggcgtcgctcgccgcctgcagcagcagccaccactacagcagccacccaccgccgcctcccgatcaccaccaccaccaccacatgcccgtcaccggcggcggcggcggctccctcaacgagttcatccccaccaccagcatggcgctgtacagcagcatcttcgacttcagccagcatctcgacggcggcgccgtggcggcgtcggcgtcggcggcgggatcgagggtcgacggcggcgagcagtgcggtctgatggagctagggctcgaggagcactacaattacaacggcctgatgccgatgtgacgatccaccataggtgtcggtgctgctagtgctagcttagctagcttacacacactcccagctgctagctagctgcagttctgcagcgcagctagctagcgtttattattaataacctcttttcacctcgattgtttgatctgatttgtttcgtggtgatcgattccatcgatcagcttgtgcagatttcgttgattgtgcatgcaaacatgcgcacctgtgtatagggtatagtggtacgtcgtatagcgctgttgcattgtttggaggtaaattatatatcttagcctttaatttg

SEQ ID NO: 3265 - DNA, 1012 bp, Oryza sativa
  ref <308>: DATABASE ACCESSION NUMBER: AK060977
  ref <309>: DATABASE ENTRY DATE: 2001-12-06
atgcatttcatcgaacaccttgcgatcaccctctcaccaccgctacagatcaccattgtgaggctccccggccggagctggaggttggagggagtggaggaagagccgtgctgccgccgtcgccataggggaagccgggtagccgctggacatcaagaaaagccgtcaagcaccttacgtcgccgctgtctgcccctgtcctgcaccgtgtcgagctccactttgccgcgttttgccatctcgccgtctcgcggtacaccctcgtgcccgtagcgtcctccatacatctaattgctagcgccggctccaaaatcggcgattagcgcccatggccgtgccgccccggccgccgtttcgtcgccggcgagccctccgtgggtaggctatcccgggagctcccctctccatatagtttgtgaaatcgaatccccatacgccgtagatgctcccgcacccttcaattcggccggaggatgtccctagcaccgaagccccttgtagccgagctcgggcatggcgtcgcctgatggcgccgcgcgtccccgtctcctcgcgcgccggctgccatcggcgggagatcgtcggagctcctctgcgcctcaccccggccgtcgccgagccgcccgctgccgtcccggctcgggccggccacgccggctgcgccgagccgtgcctctgcctcgctcggtaacgggcgagaggaagaagaagatgaggagagagagaaaccgtgtgggacccacatgtgattagcgcacagtaatcctatccctaacggtgattatcccactcaatggcaggtggggtccctatagttaaaatctaagaaaacacaattatatattttgttcctatgacaggcgggacccaatggtaattaaacaagcaggtttgaccctaagtcaaccagggccggtcccacatgtcaaccacagtgggttttggataatgtttccgattaaaaataaatcatttatgaacagtgcatttttacaatttctcggattaactc

SEQ ID NO: 3266 - DNA, 1462 bp, Oryza sativa
  ref <308>: DATABASE ACCESSION NUMBER: AK060978
  ref <309>: DATABASE ENTRY DATE: 2001-12-06
ctcttccccaatccacgccgccgccgcctccgctcctcccctcgagagtcgcaacctgccctttcccaatctcgccgccaaattctccggcgagacggccatggaggtcccaccttttgctcgccccaatcgagcctcgccgttggcttgggaagcggatttcctcgagaggacaaatctcaccatgtcgacggtggagtacgcgcttcctaccgcaatcatgacgtcgccatccttcgtcgcggaaggcgctggaggaagccagatttgcgccatgtattcctttcaagccttcagtgaaatgataaacgagaggaacgctgagcccgggatgatcgacgtcttcctactcccccatcttcccctcaatgacgtctccgatgtgtacgaccagatcggcagcggcgacgccccctaccgcatctcaaatggccccatgcttctcaacaaggtcaatgcttatcgcgagctgattcgcgtgggtaaagagctggcgcctctggagggtctcatgaaaagccttgaggacgagctgcttgtccgtcttaatagcattgtctctatactcaaatcagatggtgaagacatcccgttgccacttgacatgtctgcagcaactcagcttctattcaagtgggaatctgattttgtcgaggcctgtgagatggcaacgaaggccagacgccgcctcatgctggcaactcttctggcaatgttctggtcctccagtgacgactttgtggagaatgaattctcagtcagggagggtgatgcaatctccatgagtcatgtacaagagactctccaaaggttggctccagatctttaccagaatgtgtttggcgccctcaatgaggtacactatacagaggatggaaggccaccgaagagtgtagttgtttcgctcaagaggctaattacagagatcacatccgagatgacacctactgagttcgtagcattctcactggagacgagtcgcagggacttgattcaccagctaagtgatgtgtcccaccaggaatttcgcttgaaggtcttgaggtctcttcagtctgtggcatctgctttaatccacctccacatgctggataaagagatgttggagccccacctctcacggccaacactcttggggtgcaaagattattcaccgctaaaccaggatccatattggccccattttcaagttttatcagatgaggaattaagtgttgaagtccgtcgaggctccctgccaatgttctgaggtttgatttttgtgcaaaaggaggtgaagaactagaggaaagtgaagaggagagaaaagtcgatgttgtttgaaagcttcatgccatattgcgccccttccttctaaggcggatgaaggtggatgtagagcaaatgcttccatgaaagaaagagataatcatttatgctaacatgactgacaatcagaaacaaatccaaaatcacttggttg

SEQ ID NO: 3267 - DNA, 1187 bp, Oryza sativa
  ref <308>: DATABASE ACCESSION NUMBER: AK104402
  ref <309>: DATABASE ENTRY DATE: 2002-08-28
gtgctcagtttcactcttatcagtgaattagatcatatacttgtgtccttgacagctcgttaattagcatggctaggtctctcgctgccctccttctccttctggtcgcagccgcgggagccagccatgccgcgtcgccggcggagatgtactggaagatcgcgctcccgacctcgccgatgcccggcgccattcgcgacctcatcagcccggcgagctcagcggcctcagcttcgaaggataaggaggatacggtgggctccgtgttcttcctcgagaaggacctcttcccgggctccaagatgacgctccacttcacccgcgccaccgccggcgccgcgctgctccctcgcggccgcgccgactccgtcccgttcgcctccgaaaagctcccggagatcctctcccagctctccatccccgccggctcgccgaccgccgacgccatgcggtccacgctcgccgtgtgcgaggccgcgcggatcgccagcgagacggcgcccaagcacaagcactactgcgccacgtcgctcgagtccatggtcgagctcgtcgcctccagcctcggcacccgcgacgtccacgccgtgtccacggaggtggtcaacagggccgggccgacgccgaggcaggcgtacagggtggaggccgtgaggcccgtgccggtgcccgggggcgacatggtggcatgccacaggatgccctacgcgtacgccgtgttcggggtgcacgggatcaagggcgcggcgtacacggtgacgctggccggcgccgacgggaccatggcggaggcggtggcggcgtgccacggggacgtggacgggcacggcgtggcggtggcggaggcgtacaagaggctcggcgtggcgcccgggaaggtggcagtctgccacttcctgcctcaggacgacatgctctgggtgcgcaactgaatgaagcagctacctgcgcgccatccatggctaattaagctccttcctatattttcgatctacctgccggctggctatcatgttatcatcgcgtgtgtgtgcgcgccgatccgacatgcccacactacacgtcgacactacacgtgttttattttgttaattaataagtctggacaaccaggtcatcttgtacggcacttctcccctctgtcccgaaataaaccaacttataaagattgaagtttgtcgcaaaat

SEQ ID NO: 3268 - DNA, 1609 bp, Oryza sativa
  ref <308>: DATABASE ACCESSION NUMBER: AK060979
  ref <309>: DATABASE ENTRY DATE: 2001-12-06
gaaaaggcccaaatcctcgcctcctcctgcctgcaaccaccgcctccgtcgtctcgtctcccccggcagaggaatccccaacccggaagctttcgggagtcggacgagctcgccttgactcgcgtccccctccctcgcgcgcgcgcgcgctcgtcgcctcctaaacttagcggccgcgcgggacgcggaggggcgctcccctccagaaataggcggggtgggtggcgaggaggatggggtacctgccgtcgtcgctgggcagcaaggcggcgcacttcgtgtccgacctcaccaccgtcatcctcaacccaatctccgagcgcgagccttcctccccactccccgaggtggacaaagacgaagaaaaatcagaggatgacaaagattctgagcaaaattctgacacccccgatggccctgacacatcttcctttagagcattcttgatctcattcctgtcatcatctggttctagtaatggttccatggagataattcctgatcagaatggggaattgggatacccaactttaacaccaatggggaagtcaaaaaagggaaagtctgggctcctaagtagaggaaaacattccattggaaaaatcattagcaaagcggctagaattggtggtttcaaacaaaatgtggagcctaagattgatagagaggtggtagatcatgttgaatcagtttcacctgtattggagcttgaagaatcaaaggaagttgcttccttcattaatttgccagctatgtcagaaccatctgttcttttgtcagaagtgatgaggttcaatatttatgcatcttttcctgttcttgccaaaggaatgaactgggtcttgctatacagcacatggaggcatggaatatctttgtctactctatacagaaggagcatgctttgccctggttactctctcttggtagttggggataaagaaggtgcagtttttggcggtttagttgaggctccattgcagccaaccagtgcaaagaaatatcaggggagcaatagctgctttgttttcactaatttacacagcaatcctagtatatatcgaccgactggtgctaataactatttcacagtgtgctccaccgactatttggcattaggaggtggaggtcatttcgcactttatctagatgccgacctgttgagtggttcaagttccaattcagagacttttaacaacatgtgtttatctcattccccagacttcgcggtaaaagatgtcgagctgtggggtttcgtctatccttccaagtacgatgagacgctcgccctctgccgtactgagaaaccaggaatttgccggtggtgatttggtggtccttgaaggcttgaattgtgctgaatctgcgaatgatgcatctgtacagtttttcgtagacttgagagaattttagtgcacaggatcgtgtaggattgtaggagtgatggaaacttgcgtttctcatgcgagcttgctcagagctgtacatatttgtaattttcttgctactgttagcgaaacatggacgcgctggttatttgtttcagtgttgtcagcttgtcattatatgagaacaatattactggcgaatcaggagataaatgacctgc

SEQ ID NO: 3269 - DNA, 1115 bp, Oryza sativa
  ref <308>: DATABASE ACCESSION NUMBER: AK060980
  ref <309>: DATABASE ENTRY DATE: 2001-12-06
ctccccagatccgaagcgagaagcctcttttggatctatccattcgggtcaccgtggcagttcggtaattttggcggagaggaggaggaggacgacgacgacgacgacgtgatgggtctcctcgacaagctgtgggacgacaccgtcgcggggccccgccccgacaccggcctcggccgcctccgcaagcacgccgccgcccgccccgccgccgtcaagatcaacgacccgacaggggacgcggcgatggtggccgtcccgccgacgacgccggccggggcggaggaggcgccggtgaaggtgacgcgcagcatcatgatcaagcgccccgcggggtacccggcgtcgccgaggagcgcggccagcacgccgccggcctcccccgccggatccacccctcccatctcgccgttcgccggcgccggtggtcgcttcagaaggaaatcatcgtccgacgcatatgagagggcaacacctgggacaaccagtcaccctcctccctttgaagtgtgagcccccagcgtgctcacgctcgtttttgctcctaggccagcgtctactgcacacacaaggcagaggaggaggagagacatatcagagaccgaagcggatggaagtcgagtgttgtctacctatcttacctctactactgtgatataacgtagatgctactagtaattaagtacgcctgctgctgctcgccgtctactatgttgagtcgtgtatggtttgtgtagtaaggttgtcgtctgctgtgtcatatatgtacatatgtttgctctgggctgcgatggagcttgctgcagtctgcagccaagcccgcagttcatcgctgcgtcgtgttttcgcgtccttttaagccctctgcaactatgtcaaatggatgggcatgtggaggatggtggaatgagctttcaggctgtgatgctaaagatggaagcactgatggctggtgtgtgattttgcttgatgtattatctgaattctcaagtagtagatgctttgcttgaaccttgtatatttgcaatgctcgaggcttcttggctagaagatgttttgcttgaaccctgtatatttggaatgttccaataagctaactggcctgtcttttgtgc

SEQ ID NO: 3270 - DNA, 1597 bp, Oryza sativa
  ref <308>: DATABASE ACCESSION NUMBER: AK104403
  ref <309>: DATABASE ENTRY DATE: 2002-08-28
aagcgttgattctgctcgtttagctagcccgcctctgacgctgcattatggagggagtaggcttgtagctagcccgcctctgcacgctatatttcaaggaatcagagatccatacagacagagacgttcagccatcagacctgcagaggcaatccatccatggcatctatcgttcctgtactcctgcgcctgctgctcctgctgctcccgcttcccctgatccgagaccacctctggccgagccaccgccggccaacgccgcaggacgatgcgggtgagctccacccgatcttcctggtgcccggggcgagctgcagcgacctggaggcgcggctcaccgaggcgtaccggccgtcgacggcgcactgcggcgcgatgaaggggaagggatggtttgggctgtgggagaacaacacggagctgctggtccacgactacgcggactgctcactggagcagatgaccctggtctacgaccccgccgccaacgagtaccggaacctgcccggcgtcgagacccgggtgcccaacttcggctccgcatggtcgttcggctacaagaaccctgttaaccgtctacagagagcacaataccttggaaagctcagagactggctggaagaattgggataccgtgatggggacaccatgttcggagctccctatgattttcgctacgccccgccggtacccggccaaacatccgaggtgtactctcgctacttcagcgagttcatggcgctcgtcgaggcagcgaccaagaagaagcagaagaaggccgtcatcctggggcacagctacggagggatggtcgcgctcgagttcgtcaggagcaccccgcgggcgtggcgggacgcgcacatcgagcgcctcgtcctggtcgcgcctacgctccaagatgggttcgtaggctcggtgatgaagttcatcacggggacgggcataattttcgtcccgacagccacgtccacgaggcccatgtggaggagcttcgagtccgccatggcgagcttcccgtccccggccgtgttcggccgcgagccgctcgtggtcaccaagaggagggactactccgcgtgcgacatggaggatctcctagccgccctcggcttcggcgagggcgtcgagcctttccggcgacgggccgtccccaggatgtacagcctcgaggcgccgatggtgcccatgacgtgcatcaacgcggtgggcaacaagacgccgctgcaactggtgttgtgggacgacgacgacgatgacttattagacgcgtcaccggaggtggcagcgtatggtgacggagacggcgagatcaacctgatcagcatgttggcgtttgacacggagatgggtcggcagccaggacaggagaagcgattcaaatccgtcaagatagctaatgctaaccattccacgattgccatttatgattttgcactaaagaggatcattcaagaaattattgaggtgaatcaggtacgttagtagacactccgtacgttgggtttcacgtatatatgttgggtttcactgtgcgcggtaatcatatatatcacgtgtggaattctgtgtaataaatgaatcccatgcagctttgtgt

SEQ ID NO: 3271 - DNA, 801 bp, Oryza sativa
  ref <308>: DATABASE ACCESSION NUMBER: AK060981
  ref <309>: DATABASE ENTRY DATE: 2001-12-06
acttgggaggcagtgagttgttgtaaagttgcaagagagagatcagttgttgagtgcgtggaagcagagatcaggaagatgctggagaagctgtgggacgacgtggtggccgggcctcgaccggagaccggcctggagaagctccgcaaggccgctacaacccgcccccttgtcatcaacaaagatggcgacggcgaggcgagcggggcggcgtacaagcggacgcagtcgatgccgacgaccccgacgacgccggtgacgccgtcgtcttcgtctccgacgacgacggcgacgacgacgccgcggggcagcaacgtgtggaggagcgtgttccacccggggagcaacctcgccaccaagagcctcggcgccaacctcttcgaccgcccgcagcccaactcccccaccgtctacgactggctgtacagcgacgagaccaggagcagccatcgctgaactaaataatcccattgatcggaggctggtcgatctctctgtcacgccacgtttgctggtccttgtggttatctaatacgtaattaattatctagtatgttgctatcttatcttgttactctgttcctagtagcttgctgtctctgttagtactaccagagaccggtacgtgtcagctagcctgctggctcctatcaagggctagcgacaacccaaagaagtgtgtttgtgtgtaaacatcttccatgtgtaaatactgccatgtgtttccctactttcagcgtttaattacctttgatgtgataataccaataccagcttgagatatttcttcttggttgcaat

SEQ ID NO: 3272 - DNA, 1762 bp, Oryza sativa
  ref <308>: DATABASE ACCESSION NUMBER: AK060982
  ref <309>: DATABASE ENTRY DATE: 2001-12-06
aaaagaaaaatcccctccgcctcctcccccaatccttaacctaaactccgatcccctccgccttccatggctgccatgggaagaactgtactaccttcctatgttcttctggatcgcatcgttcgatcggaggagaaagccgtcgaggaggagtcggagtgggcggccatggagtgcgcggactggaagtcgtacgggtgccaccccggtgacaaacgctaccccaggaacgccgctagggtgaagggcatgctgctcctggcgcgcctcgcggagcccccgggtctctccgagctctccatccgcctctccgccgccgccgccgtgcccaggccgccgccggccagcttcccccccggcgccgccgtcccgcccatccccaacttgcccgacgcgtcaccggcgccgctcacctacgtcgaggcggcaggcgacggcctcatcgccctcacctcgtgcttccgggatggctgcagctgctacctcgtctacgacgtcgtcggcaagtcgctctccatgatcccgggcctgcccgagtcctgcctcacctactgcagcatgcggcctctccccctgcgcaccgccgccgccggtggctacgcgctgcgcagcagctactcgctggccatcgtggctaaggacttgcggtttgacatggaagcggggggagacgtctaccgggatgttctctgcctgtgcccaccgcggccatcatcatcctcaagttccagggggggcatcacgccatggcaattcaaggacgccatcttcccatcacagatgccgcgttccttccacggtgacaaggtgttctcgttcggaggccacgcgttctgggccgacctcgcaaagggcgtcctcttctgtaggtgcgacgacgctctctccggccgcaatgatgatgccgtgcaattccgctacatcccgctgcctgtagagtgccatcttaacatcagtttcgccatgaggggtgacctccagctatgccgcacaatgagctgtgtcgacggcggcggtgactctatcaagttcgtctgcatcagtgacggcggatccagctctgcgcacaccggcgatcgtgcgataacgatgtggacactgaccctcgcaaccggggagtggctgaaagatgcacaactcatggtggcagatctgtgggagctggagggcttcgacaaggcgaggttgcccaaggccataccaattagccctgtcctgaaccctcaggaagatggtgtccttagtttcatgctcaacgatgccgatgcagagctgtacatggtcagccttaacatgcacagcaagaagctcctctcgtccttgaccctctcatcctgccctgatgacattgttcctcctttgggtttggatctttccaaagaccttcagaatctgtctcttcgccctattgctgctgagtctgttccagccaagacacagggacgcccaattgcaaccaagaggaggaggtcgtcattaccgtagtgacatctttgtcagtggacggctcgtgatgctggagcagacttcattttgccaggctgctgcttacttggtagggtagggatcgtattcttcgtgccgtcttgctgttttgcaagctgactctttaggttttatattgttgccgccaccgttatgaaatcagatgatgaacacaaatgttgaaacaacctctaatttgtcatcagctgtcaacctatatgtggttgcttgttgattttggttcactcaagaaaacatctgttacttaacggttact

SEQ ID NO: 3273 - DNA, 1347 bp, Oryza sativa
  ref <308>: DATABASE ACCESSION NUMBER: AK060983
  ref <309>: DATABASE ENTRY DATE: 2001-12-06
aaaaaaaaaaaaaaaaaaaaaaaaaattagcttagctagtgttagcgagctccactgccagatcaagaagaagctagagagagagcagaggagcaagcagatcaagaagaagaagacgaggaagatgcacgccaagacggactcggaggtgacgagcctggcgccatcgtcgccgccgcggtccccgacgtcgcgcggcgggcggccggtgtactacgtgcagagcccgtcgagggactcgcatgacggggagaagacggcgacgtcggtgcactcgacgccggcgctgagccccatggggtcgccgcggcactcggtgggcagggactcctcgtccagccgcttctccggccaccccaagcgcaagggcgacaagtccagctccggccgcaagggcgccccggcggggaaggggtggcaggagatcggcgtgatcgaggaggagggcctcctcgacgacgaggacgagcgcaggggcatccccaagcgctgcaagtacttcctcatcttcgtcctcggcttcgtcgtcctcttctccttcttcgccctcgtcctctggggcgccagccgctcccagaagccacagatagtcatcaagagcatcacgttcgacaacttcataatccaggcggggacggacgcgtcgctggtgccgacggacatggcgacgaccaactcgacggtgaagctgacgtaccggaacacgggcacgttcttcgggatccacgtgacggcggacccgttcacgctgtcgtacagccagctgacgctggcgtccggcgatctcaacaagttctaccaggcccggagcagccggaggacggtgagcgtgggggtgatggggaacaaggtgccgctgtacggcggagggccgacgctgacggcggggaagggcagcggcagcatggctccggtgccgatgatcctgaggacgacggtgcactcgagggcgtacgtgctgggggcgctggtgaagcccaagttcacacgcgccatcgagtgcaaggtcctcatgaaccccgccaagctcaacaagcccatctccctcgacaagtcctgcatttacctctgaatccatcatattcattcattattatcacctgctcctcggatcacctccattcctgctgcttctttcttcctttctctctacgatctgatctgtgcattcttccttttcttttttcctttttgcggatccaacaacagccataaatatgtatgtactgtatttcccagtcagattcgttattataccaaacgatcaattcgttgcagattgatgagatcgatcgatcaggtggcagaaaatgaaatacacagagctgagtatgcttatctttcgag

SEQ ID NO: 3274 - DNA, 1229 bp, Oryza sativa
  ref <308>: DATABASE ACCESSION NUMBER: AK060984
  ref <309>: DATABASE ENTRY DATE: 2001-12-06
aaaaaccagcacattcgaccatctcactagctaatcgctggtactggaagcagtagtagcagcttgccaaaaatggcgccatttcttgttgtgttcgccgtcatggccgcggcttttgcgtcggcctccggctccggcgagctcaccccggacttctacagcgagacgtgcccgcaggcgctgacgaccatcaagctcgtcgtcggcgccgccatcttgaaggagccgaggatgggcgcgtccttggtccggatgcacttccatgactgcttcgtcaatggttgtgatggctccgttctgctggacgacaccgacgacatgatcggggagaagctggcgaagccgaacaacatgtcattgagagggttcgacgtgatcgacgccatcaaggtggcggtgaacacggcctgcttggggaatgttgtctcctgcgctgatatcttggcagttgctgctcgtgattcaatcgtcgcgctcgggggaagctcgtacgaggtgctcctggggcggcgcgacgcgacgacggcgagcatcgacgacgcgaacgacgacatcccgaacccgttcatggacctcccggacctcgtcgacaacttcgagtcccacggcttgtcgctgcaggacctcgtcgtgctctccggcggccacacgctgggctactcccgctgcctcttcttccgcagccgcctctacaacgagaccgacacgctggacccggcctacgccgcggcgctcgaggagcagtgccccatcgtcggcgacgacgaggcgctcgcctcgctggacgacacgccgaccaccgtggacaccgactactaccagggcctcacgcagggccgcgcgctgctgcacacggaccagcagctgtaccagggcggcggcggcggcgacagcgacgagctggtcaagtactacggcgagaacccggacaagttctgggaggacttcggcgccgccatggtgaagatgggcaacatcagcccgctcaccggcgacgacggcgagatcagggagaactgccgggttgttaaccagtgagtgatcgatcgatcctggtgtggtcaagcgacacacgacacgagtcatcgccacgaatttgcatggcacctgtggtagctgctgatttcttgaagggtgtgcttgcatgtacttctgattttgtgatggcctgctcttgtatttgaattgttttgaaaattatgttccatttcaaccaaaaatttaatatc

SEQ ID NO: 3275 - DNA, 972 bp, Oryza sativa
  ref <308>: DATABASE ACCESSION NUMBER: AK060985
  ref <309>: DATABASE ENTRY DATE: 2001-12-06
aaaccacctcgccgcagatctgcttccgcctccgccatggcgtcatcggcattgccctgcgccgccgcgctcttcctcgtcctcctcctcgcgccgctgctcgcctccgccgagtcgcccatctcgctgccgcctgcgtccgcgcccaccgcctccaccccggctgcagacgagcgcctccaccccgccgacgccgccctcgctccgtcgcagccgccttccgaggcctcctcctccgccgccgcgctctcccctcccgcgcctcctgagacctcccctctccccgcgccctcccactcgccccccgtcccgcattccgcggcacccgagccgtcgcccatggagcattccgccgcgtccgcgccggccccctccgccgccaaggccaagcagggcggcgacgacgaggaggacgacgacgataaggagaaagacaaggaggagaagccgtcaacaccgtcgcctgcccccgccgccgaggagataaaggccgccaccgcgggcgacaaggcgggggaggaggacggggagacggagaggcacgagttgaacggcggcaagaaggccggcgtcgtggtcggcgccttctcggccgccgcggtggtgggtctagccgccgtcgtgtggaagaagcggcaggccaacatccggcggtccaggtacgccgactactccgcccgcctcgagctcgtctgatcgttcgccggagctcctcaccggagtagtacactacatctacatctacagtagcatcagcagtacaaccccaccatatacgttcgtcgtctcagtgcagcagctccgcagatacacagattcgatgcatgccttccatggccgcgcttcaaattgctcctgtgatccgcgagatgttagattcttcatttcattcttgtgttaattattcttggtgttgaaaccattaaaattctttttctgtgaaaaaaaaaagaggaataacgtaatggagtg

SEQ ID NO: 3276 - DNA, 1280 bp, Oryza sativa
  ref <308>: DATABASE ACCESSION NUMBER: AK060986
  ref <309>: DATABASE ENTRY DATE: 2001-12-06
acccctaccgcccactcccccggccgccgccgcatctgcgctcttagggcctctccttccccatccccaaatttcccctccggccatggccaccgacggcacaggcgtcgtcaccgtctacggctccggcaccaacggtgccgccttgctcgagccctccaaccacaagtccgccaccttctccgtcaaggtgggcctcgcccagatgctgcgcggcggcgtcatcatggacgtcgtcacccccgaacaggcgcgcatcgccgaggaggccggtgcctgcgccgtcatggccctcgagcgcgtccccgccgacatccgcgcccagggcggcgtcgcccgcatgtccgaccctggcctcatccgcgacatcaagcgcgccgtcaccatccccgtcatggccaaggcccgcatcggccacttcgtcgaggcccagatcctcgaggccatcggcgtcgactacgtcgacgagagcgaggtcctcaccctcgccgacgacgcccaccacatcaacaagcacaacttccgcgtccccttcgtctgcggctgccgcgacctcggcgaggccctccgccgcatccgcgagggcgccgccatgatccgcaccaagggcgaggccggcaccggcaacgtcgtcgaggccgtccgccacgtccgctccgtcatgggcgacatccgcgcgctccgcaacatggacgacgacgaggtcttctcctacgccaagcgcatcgccgcgccctacgaccttgtcatgcagaccaagcagctgggccgtctaccagtcgttcagtttgcggccggcggtgtggccacccccgccgacgctgccctcatgatgcagctcggctgcgacggcgtcttcgtcggctccggcatcttcaagagcggcgaccccgcgcgccgcgcccgcgccatcgtgcaggccgtcacccactacagcgaccccaagatcttggcggaggtcagcagcgggctcggcgaggccatggttggcatcaacctctccgatcctaaggtggagcgcttcgccgcccgctccgagtagcccatccatcatcattcatatccgccttatccttctttcgctatatatatatgctccttccttcgattaagtaataattacatctactatcatcgtcgtgataagaagaaaatgaattagacaccagccagccaggactttgttggcttggctcacttcccttcccttcccttcttggtgatgatgtaacatggaacagcacatgtatcgattaggagcatgtattgttatttttgct

SEQ ID NO: 3277 - DNA, 1068 bp, Oryza sativa
  ref <308>: DATABASE ACCESSION NUMBER: AK060987
  ref <309>: DATABASE ENTRY DATE: 2001-12-06
ctcgatcaccacacgcgcacacgacacgacgcaccaatggcgctcgtctccgcctcctcctccaccaccgccgtcgcggcgctccccggcgccgccagggcctcctccttcctcggcggcgccggcaggagcggcaggctgctgctgaggcaggccgagtcgtcgtccgcgcgggcgtcgttcgccgtgcgcgccgcggcgcccgacaggccaatctggttccccggcagcaccccgccgccgtggctcgacggcagcctccccggcgacttcggcttcgaccccctgggtctcggatcggacccggagagcttgcggtggaacgtgcaggcggagctggtgcactgccggtgggcgatgctgggcgcggcgggcatcttcatcccggagttcctgaccaagatcggcatcctcaacacgccgtcgtggtacaccgccggcgagcagcaatacttcaccgacaccaccaccctcttcatcatcgagctcatcctcatcggctgggccgagggccgccggtgggctgacatcatcaagcctggctgcgtcaacaccgaccccatcttccccaacaacaagctcaccggcaccgacgtcgggtaccctggtggtctgtggtttgacccgctcggctggggcaccggctcgccggagaagatcaaggagctgcgcaccaaggagatcaagaacgggcggctcgccatgctcgccgtcatgggagcttggttccaggcagagtacaccggcaccggccccatcgacaacctcttcgcccatctcgccgaccccggccacgccaccatcttccaggccttcacccccaaatgaggagttcttcaggtgttggagtgttagcaatggctgccaatggaggaagatgaaaagactgttcgtcgacgcgacttacctctcttttttgggatcggagtaggctgtgaatggtggtggtgtattgggatgtaattgtggatggagcactgcatgccttgttgattgtgtacctgtactatgatgtaaccgatgtaaaaaacaagttgatactcttttagaagtgaagttctcttcatc

SEQ ID NO: 3278 - DNA, 1682 bp, Oryza sativa
  ref <308>: DATABASE ACCESSION NUMBER: AK104404
  ref <309>: DATABASE ENTRY DATE: 2002-08-28
gagctgcggcgccccaccaccatacctctccgactccgcgcgagcatcgccaccagcccaccaccgcaccagtagtagtgagtgctcagtgcgttccactccactccgagctaagcagcgaacagctcgccgccgacgctctctctctctgtagatatggagctgctgctgcggcggctggcggtggtggtggcggtggtggcgttgacggcggcgacggcggcggaggggtacaacatcaccaagatcctcggggaccacccggagtactcgcagttcaacaagctgctgacagagacgcggctggccggcgacatcaaccgccgccgcaccatcacggtgctggtggtggccaacggcgacatgggcgcgctctccggcggccactacaccctccccacgctccgccacatcctcgagatgcacatcctcgtcgactactacggcgccaagaagctccaccagctcgcccgcggcgacaccgcctcctcctccatgttccaggagtccgggtcggcccccggcacgacggggtacgtgaacatcacgcagcaccgcggcgggcgcgtgtcgttcacggcggaggacgcggcggacagcgcgacgccgtcgagcttcgtcaagtccgtgaaggagatcccctacgacctcgccgtgctccagatcagcaagccgctgtcctcccctgaggcggaggcgcccgtggccccgccggcgccggtgaacctcaccgagctcctgtccaagaagtactgcaagaacttcgccggcctcctcgcctcgaacgccgacgtgtacagcaacatcaacgcgaccaaggacaacgggctcacgctcttctgccccgtggacgccgccgtcgacgccttcctgcccaagtacaagaacctgacggccaaggggaaggcggccatcctcctctaccacgccgtgccggactactactcgctccagctgctcaagtccaacagcggcaaggtcagcacgctcgccaccgccagcgtcgccaagaaggactacagctacgacgtctccaacgaccgcgacagcgtcctgctcgacaccaaggtcaactcggcctccgtcaccgccaccgtcaaggacgccgacccgctcgccgtctacgccatctccaagttcctgcagcccaaggagctcttcaaggtcaccgaggacctggcaccggcgcccgcgccggagggccccaagaagaagaccaagaagaagaagccgtccaccacctccgccgctgccgccccctccgacgactcctccgccgccgactcgcccgacggcacccccgcggacgacgtcgcggacaaggccgccgccgcgccgtccgtgctcgccaggtgggttaccgccgccgccacggtcgccgcggcgttggcgttggcagcttgaggtggtggtttgagcttagtgcattttgtgttgagttcttcagctcctctccctcttcttcttttgtccaattcgtgtccctcgttggtgcaaaaaataagaagggctatttatttttatatttatcgctgcagttcccagggaaaaaattgaaacaaaaaagaagaaacttaattagaggtgtgattctagagtttttcattttcttttgtttattgggtttgtggtgatcattttgtaatgatagtggtcaatgagattggacagtgtgtttatat

SEQ ID NO: 3279 - DNA, 1113 bp, Oryza sativa
  ref <308>: DATABASE ACCESSION NUMBER: AK060988
  ref <309>: DATABASE ENTRY DATE: 2001-12-06
aggactgttgaacagaaaaatagtggaagcattcgcagactacgctgagttttgcttcaagacatttggcgacagagtgaagaactggatgacatttaacgaaccgagagttgttgccgctctaggatacgatgatggaaattttgctccaggaaggtgcacaaaatgcacggctggaaactctgccaccgagccttacattgttgcccatcacctcattctttcccatgcttctgctgttcagagataccggcacaagtatcagcatatacaaaaggggaagattggaattcttctggattttgtctggtatgaaggtcttaccaattcaacggcagaccaagctgcggctcaaagatcaagagacttccacgttggatggtttcttcacccaatcatctatggtgaataccctaaatcgctgcaagtgattgtcaaagaacggcttccgaagttcacggccgatgaggtccacatggtgaagggatcaatcgactatgttggcattaatcagtatactgcttattatgtccgtgatcagcagccgaacgccacgactctccctagttactcgtctgactggcatgctgcacctatttatgaacgcgatggcgtgccaattggaccaagggcgaattctgactggctttacattgtaccgtggggtttgtacaaagctgtcacctatgtcaaggagaagtatggtaaccccacaatgtttctatctgaaaatggcatggatgatcctggcaatgtgaccattgctcagggggtgcatgacaccacgagggtcgcctactacaggagctacatcaccaagctgaaggaggcgatcgacgacggcgccaactgcataggctacttcgcctggtccctgctggataacttcgagtggaaactcgggtacacgtcgaggttcggcctggtgtacgtggatttcaggaccctcaggaggtaccccaagatgtcggcctactggttcagggaccttgtcagcagcaaaaactgagctgggctttcaaccttgatataaccaccttttcgtttgcaaaaatgcacaaataagaaggtgggccaaatgagtagctaataaatacaagtagggttcttaac

SEQ ID NO: 3280 - DNA, 1626 bp, Oryza sativa
  ref <308>: DATABASE ACCESSION NUMBER: AK060989
  ref <309>: DATABASE ENTRY DATE: 2001-12-06
ccagcccagtgagagtaggactggctcggctcgctcactcggtcagctgcacacacactgcacttcggctcactctctccactgttcttcttcctcggcgaggggggaaggaggaggcgagagctcgaggcggctaggaggaggagatggagggagattcggcgaggaggctcgcattgctggggctgtgcctgggcctgcttctgctggcgccctcccatctggcctcggccgctgcggtggaggatggcttgctcagcaatggtgactttgagacagcaccagctggtggttttgtcaaatctgcttcagttgctgaaggtgcatcatcgatccctggctggacgatcaatgggacagtcgagctcatctcagcaggccagcaccagggtggcatgattcttattgttccacagggggatcatgctgtacgtcttggaaacgacgcaagtatagggcaggtggtgcaggttgagaagggctcagagtatgctatcacgttcagtgctgcccgaacgtgtgcacagctagagtcactcaatgtgtctgtgctcggtggtgcatcacagacagtggacctgcagacattgtacaacatagaaggctgggatgcatatgcattggcttttcaggcaacagatgagcaggcgagccttgagttcaggaaccctggtatggaggatgatccgacttgtggacctatccttgacaacgttgccataaagaagctcttcactccagacaaaccaaaggatactgtggtgtcaaatggagactttgaggagggtccatggatgtttccaaacacgagctttggggtgcttctcccaaccaacctcgatgagcagacgtctgccttgcctggctggatgattgagtcaaaccgagctgtccgctttgtcgactctgaccaatacaccgttccccaagggaagcgcgccattgagcttctatcagggaaggaaggcatcatctcacagatggtcgagacaacccctcagaaagagtacagcctgacattcacattgggctcagcaggggattcatgccagccaccaatggctgtcatggcattcgcaggtgaccaggcccagaacttccactactcgcccatgggtaatgccacaagccaggctgcgaatgtgacattcacagcacgagctgagaggacgcgggtagcgttctacagtgtgtattacaacacgagaagcgacgaccacagctcgctctgtgggccagtgatcgatgatgtgcgcgtctggggcttgaatggagctgctgggttgaaggcaagtattgggctgctgcttggcattgttagcattgtcagtctgatgttgttctgaatctcttagtgattgtggtcgaaagatatataaacctcttctgtaagtatgaggaggccactagttttggtagtaagcttgaagtttctattaggttgagtaatgtgagattgtgagcttaggctaaagctacctgaagctatgtatggctgtttctgttgctttcttttgtgattcagaaagtaacatgccattgtgggaagtgtgtggtggttagtgtgccaagagcttgtaatgttcaaatatcatcccttcaatatattagaaatttcaggagttg

SEQ ID NO: 3281 - DNA, 1697 bp, Oryza sativa
  ref <308>: DATABASE ACCESSION NUMBER: AK060990
  ref <309>: DATABASE ENTRY DATE: 2001-12-06
atcacacatgcacctaattattagtagcatacacacatataccataatggcactgtcactgacgccctccctgcaagatctcgtatcatcactgatgatactccttgttctcttgtacatatcgtactggagatcaaagtatcagtccttgttcccagtggactggccgatagtaggattgctccctaccctcgtcgccaacctgcaccgcttgcatgacaaaatcaccgaatacctcgccgcctccggccatagcttcacggggaacggcccggcggcgagcaacatgcgactgttcgtcacatgtgaccctgacaatgtccggcacatcttcaccaccaaccatgacaactaccccaagggccacgagttcgccgagatcttcgacatcatggccggcgccttcttcaccatggacggcgatctctaccgccggcagcgtgccaagacccatagcatcctcagcgacccgaggatggttgcctcgatggcgtcgagctgtgtcgacaaggttcgggatggtctcctcccgttattgacatccatggcgagcacccggacaccgttcgagttgcaggatctggccacgaggctcatgttcgacgtgacggccatgacggtgttcggcgtggaccctggccgcctgtccccggacatgccgtcgatgcatgtctcggctgcgatggacacgatcatggaggtggggctgttccggcacaccgtgccgccgtcctgctggaaggcgatgagacggctcaagattggacccgagaggaagctcgccgcggcgcacgcggcgctgcacgtcttcgtctccgagatgatggagaaggcgaggaagcaagaggcagcgccatcctccatgtccatggacgttctctcctcctacatcaacgacccggactacgtcggcctcctgcactccatcctcatcacctacatggtcgccgggcgcgacacggtgggcaccaccttgccgtggttcttctataacctcgccatgaacccgcgcgtcgtgtccggcatccgcgaagaactggcacacaatattgcaacaagcacctgcaatggcgatggcgtgccggtgatgttctcaccggaggacacgaaatccctcgtctacctgcacgccgcgctgttcgagacgctcaggctgtacccgccggggtggatcgagcggaagacggtggtcgccgacgacgtgatgccgagcgggcacgaggtacgtgccggcgacgccgtgctcatctcgatctactccatgggcaggatggagagcctgtggggggaggactgccgggtgtaccggccggagaggtggctgtacgactcccgcggcggccggaaaatgcgacacgtgccgtcgcacaagttcctgtcgttcaactccgggccgaggatgtgccccggcaagaacatcgccgtgatgcagatgaagatcatcgccgccgccgtggtgtggaacttcgacttggaggtggtggaagggcaggccgtggtgccgaagctgtcgtgccttctgcagatgaagaacggggtcatggtgaaggtgaagaagcgtgctgtgtaaccgagttattactacgttctcaggaaggcatgcgtgcgagtgcgacaggctcagtgtcttttatcatccgacagtatatatatgtatgcaaagatttcctacttgaataaaggatgtgttcaaatat

SEQ ID NO: 3282 - DNA, 1129 bp, Oryza sativa
  ref <308>: DATABASE ACCESSION NUMBER: AK060991
  ref <309>: DATABASE ENTRY DATE: 2001-12-06
tttcgacgagttattgttttcgggttgagctgcatcgtttcgattttcaactagaggtaaacttgtcatgacggtttgcgttctcgagattagtacttccatctttatggtattctaatcttgtttatgtaattcgtcgagttatcgtatatactttataatctctgttaattgtgcttgttggtgacatgggaccgggggtatcttgactagaggtttggggcagctgcagtcacccacgtggcctgaccccctcggggggggggggggtcgggcccgagggtgatgtggccgcccctccctctgtcttcccgaggggtcgggccgctcccgtttcggccccgagggctggggcgccccgaccccctgtgggtttggcgccacgtgtgtgggttaggtgagcacagcggcgctcacctaaccgcgttaattgcgggttggacgagcgccccacgccgcatttaatgcagcgcagcacactcgttcggtccgtgacaggtcacagtgtgtgaccggtcacagaccggtcagatcgcgggttaggtggcaacaggcggcctgacacacgtctcgccctgtcccgtcggaatgatgagagcctccaggcactcgtccttagccggagccggcgtgggaactcctggagttggcacgtcagccccggccagatacattccaggcttcatcgcaaccattgcaaggaagtcattgtatgaagaagggcagacgtgtagcatgctgaactgacacgtggtggacaagaatgaccggtctgtgactggtctgacgccggtcgcgtcatcggcagacaaccgtgctcccacgatgcatctgcctccggtggagtggaggtaggtatgacccatctcgtcggatggtcatttggaaagcagccatggtaaatctccgcccattaatgagggagtaacagggagatccccggtgtcaggcgagagacggcgctgagcctcactcaaggacaagttgtgatttagcttccaggcgaaggtgcaagccaagttttggtcaagagagggtaggtccccacccagaagaaaagtaggtagaagtggtgcatgtagtatccccttgagatataaaaggaggaccttgcccaccaaagagaaag

SEQ ID NO: 3283 - DNA, 1213 bp, Oryza sativa
  ref <308>: DATABASE ACCESSION NUMBER: AK104405
  ref <309>: DATABASE ENTRY DATE: 2002-08-28
gcaaccacctgaaaactcctctcctttttttctttttttttctcttctctctccgcctcgcagagtcgcagcggaggagttgcatagacgaagcggaggaggaggcagcgaggcgaggcgagcccaatcggaaggcatggatagataccaaagggtggagaagcctcgcaatgagacaccaattagtgagaatgagatcaggatcactgcacaggggaggatgaggaactatatcagctatgggatgtcgttgcttgaggaaaatgggcatgatgagattgtcatcaaagctatgggaagagccatcaataagacagtcatggttgttgaattgatcaagagaaggatcggtggtcttcatcagattacatctactgaatcaattgacatcacggacacttgggaacctttggaagaaggccttctccccctagagaccacccggcatgtatcaatgatcgccataacattatccaagaaagcactggatacgttatctccagggtaccagccacctatcccagctgaagaagtgagacccgcttttgactatgaacacgaagaatctttccccactaatcgtggaagaggccgtggtggtggcagaagaggcaggggcagagccatgagcaatggtccccccgcttatgattatggcgaggagtgggaagaggaaggagattattacaactacagaggcagagggagaggccgatttagaggacgaggacgtggaagaggccgtggtggctactacggaggtggtcgacgtggtggatatggctatgattacggttatggcggcaggggggactattatgaagatcagggcgaatactttgaagaaccagaggactacccccctccaggccgtggacgtggcaggggaagaaggggcggaggaccgggaccattccgtggtcgcggccgtgggcgtggtcgattctaagatgaaatcaggaggaggtgcccttgaagcttgagaactcgtgtgcttaaattatctgataatgctgttctgtatgggggtttcgacatgaatccgtatgccccatcagtatgtttttacttcccgtggcggtgtgactgattgggcaaattttgtggctggatcttggttttgtagctaggcctgtcctgtcagcaaaagcaacaacaaacaaacaaacaccctgtgctgctgtttatttatcaacaacctaggtttccttcc

SEQ ID NO: 3284 - DNA, 1480 bp, Oryza sativa
  ref <308>: DATABASE ACCESSION NUMBER: AK060992
  ref <309>: DATABASE ENTRY DATE: 2001-12-06
acagccacaggcaccacgcgcactctatagtactccatccatccatctctcctgcagctgcagtgcaggcgaggctgcctgctagctcgatcgttaaatactcagcttgcgctagattataaattcaacaagagagaggtagcgatcgatctatctcatcaacaagatcgagccaattaattaagggcgcatgacgatgaagatgaagcagcagatgatgaacaagctcggcctccttgtggtggcggtggcggtggcgatggcgcctgcagggagctttgcgtcgtcgtcggggaggggggctccgatggtgccggcggtgatcgtgttcggcgactcgatcgtggatccagggaacaacaacaacctaaagacgcagataaaggcgaaccatgccccctacggcatggacttcgccaacagtgaacccaccggccgctactccaacggcctcattcccaccgacttcatcgtccaggggcttaacgtgaagcagctgatgcctccatacctgggcgtggagctgagcccggaggatctcaagacgggggtgagcttcgcgtcaggcgcgacggggtacgacccgctgacgccggtgatcgtgagcgtgataaccctggaccagcagatcgaatacttccacgagtacaggaagcggctggtgggggttgtgggggaggaggagacggcgaggatcatcgacggcgcgctcttcgtggtgtgcgccggcaccgacgacatcgccaacacctacttcaccacgcccttccggagcgtggagtacgacatcccctcctacgtggacctgctcgtctccggggccgccaagctgctggaccaggtggcggcgctcggggcacgccggatcggcttcgtgggactgccccccatcggctgcgtcccctcccagaggacgctcggcgggggccctcaccgccgctgcgaggagaagcgcaactacgccgccaagctgttcaactcccggatggaggaggtgatcgccgccaagaccaatccggccaccaccaggatggtgtacgtcgacatctacaccatcctgcaggagctggtcgagaacggggacaagtacggcttcacggagaccacgcgcggctgctgcggcaccggcaccatcgaggtcaccggactctgcgacgcccgcttcgtcgacatctgcgacaacgtctccaaccacgtcttcttcgacagctaccaccctacgcagcgcgcctacaaaatcatcgtcgactacatcttcgacaactatctccagttcctcctcgcctagccgccccgcccgcccgccaatctgccattccttccttcttaattaatctgcacctacctacctaccaccaccgctccatccatttctatattatatatattgatcaatcgactcgactgtacgtattttcgacaacaattttccccttcttttttcccgcacaaattaattaagctgctgattatatttctc

SEQ ID NO: 3285 - DNA, 1050 bp, Oryza sativa
  ref <308>: DATABASE ACCESSION NUMBER: AK060993
  ref <309>: DATABASE ENTRY DATE: 2001-12-06
aaaagttctcctgtcgccggggtcggcggcgaggcggcgacgccatggccgcacggcccacaggtcgccgccgccgcggcctcgccgtcgtcgtatcaagtaacatcgcgctctttgcgggcggcgacgaagccgacgatggtcccggattctccggggggagatcgaatgcttctctccgccgccgagcgccgcggcagggcggctctgaacgagggggagctcggagcccttttgattgggagtgcggaaaccctcggtggcggctcgtaactcgtagcccctggctccgaccacgtctccgcctgatggaggtggcatccagagagagaacatcgagcacgtacctgctgatgcagcctggaagttgttacccctggaatccctgacatggagaaccaaccttgttctgtagtttttatgcgatgcatagaagtcctccacagccattgagatgctggtccttgcttccttgccaactaacgatcccaggtccaggatcaccccgacgtggaattcatctgctccagggtcgttcgtcgcattcagagctacggcacatgaatgggcgaagagcatcagcaagaggatggctccaggaggtgctttctccattacaggactacctgctgaaaacttgagaagactttaccgtctctgcaagactacaatggtcaagaactcaagatcactatcatgtatatcatagtatgatacttggaagtatttgaaccgtctaatttgatgcgtttcatgacgcgtttatcgcagatggatccaaaaccatatatggaatgattcgtaggtggtttgtagaatgaacagtccatggaatagattccagaaactgttaatgactaattggcgccgttaggagcaaatcctgattgttcagcatctgggaatttctctttaattgcctcgagcaagcgatggcaagtcaactctactgattatactgaattggtcagtacaattactgtattctaacgacttgtattaatccttgactcgtccgtgaaaatcgactgctcatactctttaatatgc

SEQ ID NO: 3286 - DNA, 1017 bp, Oryza sativa
  ref <308>: DATABASE ACCESSION NUMBER: AK104406
  ref <309>: DATABASE ENTRY DATE: 2002-08-28
aagccctcctcctcccgcgccgccgccgccgccatgtcgtccgccatcgccgcgccggtcgagcacatcgtgctcatcaaggtccgcccggaggcggcgtcgtcgggcgccgccgcggcgatggtgtcatcgctgcaggcgctgtccacggcggtgcccgggctgtcgtacatccacgtcggccccgtgctccgcctccggtcgccggcggcggaggcgctgggtccgacccacgtcctccactcccgctacgccaccaagcccgacctggcggcgtacgcggcgcacccggcgcacgtcgccgccgtgcaggggcacgtcctccccaacgcgctcgactccaccgccatcgactgggtcaacgccgccctggtgccgtccccggtgaacccgggctccgccgtgcggctctccctggcgaagttgaaggagggtgtggaggcgcaccagctcgcggagaagctcgccgcggcgacggcggcggccggggaggcgaagggcgccaaggtgagcttcggggagaacttctcccccgcgcgggccaaggggtaccagttcgggatggtggcggtgttcgacagcgtggaggggctcgacgcggtggacggggacgggaaggtggaggcggccaaggccatagtcaggccgctgctcgacgacgtgctcgagctggaattcgtcgtcggacctgccgccgcggaggctccggcgccggccaacctctgagaggtttgcctttggttcgaaaactctagttgccttgtttgatcggttgagaataatacaatccttgtgattgggtgtgctgtggcctgtggttagcaatggcaattgattttgaaatgaataagaattgtacctgactacctgaactaggaattaggatggccgctcttgcttggacgtctaccgaacaagagcttgctgtcttcagtgttcatcttttcttctcgctctgcaactgcaaatttgtatgtcagataattttaagactcgcaactcggtgctatgcctctc

SEQ ID NO: 3287 - DNA, 1620 bp, Oryza sativa
  ref <308>: DATABASE ACCESSION NUMBER: AK104407
  ref <309>: DATABASE ENTRY DATE: 2002-08-28
gctacttaccccgcgatttctcttcctcttattactcttcctctcggctctcgctcgctcgctccccgcgcgatttctccacgccgcacgccgctcgcgagttagggatcgatctcgtcgggggcgggcgggagagggagagggaggagagatggcgggggatggtgtggactgggagagcgtggcggaggccacgtccggggcggtgggcgcgctcgtcagcaccaccgtgctctacccgctcgacacctgcaagaccaagttccaggccgagctccagacgcagccgggcgcgcacaagtacaggaatctttcagatgtcttttgggaagctgttcagaaaagacaaattctatccctatatcagggccttaagacaaagaacatccaatctttcatttcacaattcgtttacttttatggctatagctactttaaaagactctacttggagaagagtggagcaaagtctatcggcacaaaagcgaacttgttagttgcagctgctgctggtgcttgcacagttgttgttactcagccactagatacagcatcttctagaatgcaaacaagtgcctttggaaagtccaaagggctgcgggcaactcttgccgaaggcacttggcttgaggcatttgatggcttgggaatttctcttatactaacgtgtaatccttctattcagtatactgtatttgatcagctcaagcagaagctaattcagagacagagacgtaaaaatgcagaagcagggggtggttcttcaccagttgctctttctgctttctcagcatttctccttggtgccatctcaaaaagtgttgctacaatattaacctacccactaatcaggtgcaaggtcatgattcaggctgcagaccctgatgaggatgatgacgatgaatctgaaaggccaggaaaatcaaaatctcccaaaacaatgttgggcgctttgcatgccatgtggagcaaggaaggcatcccaggcttcttcaaaggattacatgctcagatactcaagactgtcctgagttctgcattgctgctgatgataaaggagaagatttcaagatttacttggatttcactgcttgccctgcggcgatatctctttgtttctcagaagagaatcaagagtgcataacttttatcattatcccttcgtaaagaaaatgtaatccatgtggtattgcggtattttgagatcctgtaccaaagaataagtctcaggaataaggaacagatacagaaaagcaaaacatcacgtcatacatgtggggtctttttaatagcgtcagggaatgtttctgaataaattcgtttgtttcttcttttacccctgaatgtctacagctattgaaatgaaataggtgttccacagatcgaattagttgtagtgactacgtatagtatgtagcgtgtaaacatatcagttctgttcatattccttctttctttgctggaaatgaatcagttgcaataaatttatcttgtaatgtcagatgtctagtgtagagtactagagttctgccagaactcagcagccgaaggcattgtatgtgcaccaaaaaaaaaatgaaagatggtgtttacacttcttgcagttgcaggagtggtggt

SEQ ID NO: 3288 - DNA, 870 bp, Oryza sativa
  ref <308>: DATABASE ACCESSION NUMBER: AK060994
  ref <309>: DATABASE ENTRY DATE: 2001-12-06
accacacaggcagccacacacacaccactccatttctgagctcttctagtttgagtgagagagcagcagaagggagtagtgcaagatgccgatccgcaacatcgccgtggggagccaccaggaggtgtaccacccgggtgcactcaaggcggcgttggccgagttcatctccaccctcatcttcgtcttcgccggccagggctccggcatggccttcagcaagctgaccggcggcggagcgacgacccccgccgggctgatcgcggcggcggtggcccacgccttcgccctgttcgtggcggtgtccgtcggcgccaacatctccggcggccacgtgaacccggccgtgaccttcggcgccttcgtcggcggcaacatcaccctgttccgcggcctcctctactggatcgcccagctcctgggctccaccgtggcgtgcttcctcctccgcttctccaccggcgggctcgccaccggcaccttcggcctgaccggcgtctccgtgtgggaggccctggtgctggagatcgtcatgaccttcggcctcgtctacaccgtgtacgccaccgccgttgaccccaagaagggcagcatcggcggtggcctcgccggcgtcatctacgaggtcctcttcatctcccacacccacgagcagctccccaccaccgactactaagctcatcgccgccgccgccgcttgtccatgatcgcctcgtctccgactccgatccaaccgtttagtttctcgcatcagtgcatcatcaaacctgtttcatttgcttggatcagttgtacgttgaacgtactgtaagtgtggacctttgggaacccgttgctttgcttctgtaaaactgtgcatgcatttgcctg

SEQ ID NO: 3289 - DNA, 1207 bp, Oryza sativa
  ref <308>: DATABASE ACCESSION NUMBER: AK060995
  ref <309>: DATABASE ENTRY DATE: 2001-12-06
aagatgaagtaccgcttcctcggcaacagcggcctgctcgtctcgacgctctcgttcggctcgtgggtcacgttcgatgcgcagctcgactttgagaaggcctactccatcatggagcacgcctacaagaacggcgtcaactttttcgacaacgccgaggcctacgccggcggcaagtcggaagaaatcatgggcaaggtcgtcaaggccggcgtcgagcgcggcgtctggacccgtgaggacctcgtgatctcgaccaagatcttcattggcacgcgaccgggtcccaactttgtgggtctcagccgcaagcacattatcgagggaaccaactcggcgcttcaacgtctggacatggagtacgtcgacctcatcttctgccaccgcccggacccgcgcacgcccattgaggagactgtgcgcgccatgagctggctcatcgaccagggcaaggcgttctactggggtacgagcgagtggcactcgggcgacattatcgaggcctgtgagattgccgaccgcctcggtctgcaccgtccgatcatggaccagccgcagtaccacatcctcgagcgctcgcgcgtcgactacgactacgtcaacctgtacaaaaagtacaagtacggtctcacgacgtggtcgccactggcgtcgggcatcctcacgggcaagtacaacaacggcatccccgagggctcgcgtctgtcgatcgaaatgtacaagaacatgttgtccacgggcctcgacgagaagatcgccaaggtcgtcaagctcgaagccgtcgccaaggaagtgggtatcacgctcgcgcagctcgcgatcgcctgggtcgcgtccaacgaacacgtctcgaccgtcatccttggcgccacgagcattgcgcagcttgacgagaacctcaaggccattgagctcgtggacaagatcacgcccgaggtcaaggccaagatcgacgagattgtgcagttcaagccggtcaacgtgccgcagtacgaggagcgcattatcgcgcttcgctccaagtggctgtgagctgtagaagagcggccgcgctccagttgttggcgctcatgatgcccaactgcaaatcatcttggataacactgtgaatgtcatagcccttcgctccaagtggtcgtgagctgtagaagagcggccaggagttgctggtaaacacgacgcctgtctggggatacagtgtaaactg

SEQ ID NO: 3290 - DNA, 1054 bp, Oryza sativa
  ref <308>: DATABASE ACCESSION NUMBER: AK104408
  ref <309>: DATABASE ENTRY DATE: 2002-08-28
aacagcagcagcagcagcagcagcaacttccactgaaacaacccaccgaggcagcagaagaaaggaaagaatcaagaaagcttcatcgtcttcatggggaggtcaccgtgctgcgagaaggcacacaccaacaagggagcatggaccaaggaggaagatgaccggctcattgcctacatcaaggcgcacggcgaaggttgctggcgatcgctgcccaaggccgccggcctcctccgctgtggcaagagctgccgcctccggtggatcaactacctccggcctgacctcaagcgcggcaacttcaccgaggaggaggatgagctgatcatcaagcttcacagccttttaggcaacaaatggtctctgatagccgggaggttgccaggaagaacggacaacgagatcaagaactactggaacacgcacatcaggaggaagctgctgagccgtggcatcgacccggtgacacaccggccgatcaacgacagcgcgtccaacatcaccatatcattcgaggcggccgcggcggcggcgagggacgacaaggccgccgtgttccggcgagaggaccatcctcatcagccgaaggcggtgacagtggcacaggagcagcaggcagccgccgattggggccatgggaagccactcaagtgccctgacctcaatctggacctctgcatcagcctcccttcccaagaagagcccatgatgatgaagccggtgaagagggagaccggcgtctgcttcagctgcagcctggggctccccaagagcacagactgcaagtgcagcagcttcctgggactcaggacagccatgctcgacttcagaagcttggaaatgaaatgagcacctcctcctctgtagtttcttctttcgttttgtcacttggatattggttagcttttcttctaggtgaaaacacacagagagagagagagagagagagagagagagagataacatctcctctgctgctcttgctgctccattttgtctctgttgtaattaccatatattgactaatcatgacaaataatacttgatgctaagt

SEQ ID NO: 3291 - DNA, 1385 bp, Oryza sativa
  ref <308>: DATABASE ACCESSION NUMBER: AK060996
  ref <309>: DATABASE ENTRY DATE: 2001-12-06
gcaatgtggactggggcagcgggcggagtggcgcgacggcggccggagcagcggcgcgctgaacggcggcaatccgccgggcctcacgggcgaaggatcgtggccaccaccaccgccacgggccccctccctccgcggcgttcaggtcgtcgtcgtggccgctccctcgcgccgcagccgcatggggacctcgtcccttccgccaccgcgccgcgtgccggaatcaaaccttgccgatgtgcggcgcgaggcggtcgattcagggctccgggaagggcgtgccgttgtcccacaccagctcgatagtaatacccgttggctcagcatcatctccatcagaaggcatatccttttctgcagttgactcctcggtagcttcattcacatacttcgaagttacaacaatgcctggttcctcatcttcacactcatctctagtcatgctcgcatcaaatttgggagataatgattctgatagttgtagcatgagcctcctatttgcagtgccctggtttggaaatgcggagttcgactgtaactgccaagacatgggaaatccagtcccctggaggaatggctgccggcggggaggcccatgccggcgcggtggagcagtaggaggttgactggaggtcggacgaggagttcaagaggttcatggggaacccgtccatcgaggccgccatggctccatcgagctggagaagaagcgcgccgaccggaagctccgcgagctcgatcgcgagcccgacgccaacccgctcgccggcctcctccgcggcctcgccagggactagcttgccgagaacaccgcggtcagcctccctgccattcccacctcacgcttgctctcggatctgcgcgtgcgggggtgacgtcgtctggtgtgcggttgtgctcgtcggcggcaggtgtggggggtgacgtcgtctggtgtgcagacgcaggagtgtaggtgggccttcacattgtggcgagggaactgaggatgacatgtgggtcccatcattttttattattatgtgtgcgaaactgacatgtgggtccaatgggttttattatttttctgaattaaattgccacgtaagcgccacgtcagatgaagaccgagtcaaattagctatgtaggcgccacgtcatccaaaaccgccatctaaaccgccgagggacctcatctgcaccggttttaataattaagggacccgttgtatctggtttttcggttgaaggacgaaaatcggattcgttgacaagttaaaggaccttagatgaacttattcctctacgttgtatacttgtacggaataagttcacctgccatccctcaattttacaccgactttgtatgatatcccttatcattaatatcagaaatcttcacccct

SEQ ID NO: 3292 - DNA, 1686 bp, Oryza sativa
  ref <308>: DATABASE ACCESSION NUMBER: AK060997
  ref <309>: DATABASE ENTRY DATE: 2001-12-06
accactcatcccacatcgatcgacgccaaactagctagctactagcaaattgaagccaagatgaagaagaccatggtgctctaccctggcctctctgtcagccacttcctcccgatgatgaagctcgccgacgagctcgtggagcacggatacgccgtcaccgtcgcactcatcgacgacccgctccaaaagcaaatcgccttcacggccaccgtcgaccgcgtcatctcgtccaagccctccatatgcttccacaggctaccacgcgtcgaccaccttcccgccgtcaccaccaacgacggcgaattctacctccccgggtatctggacctcgtgaggcgacacaacgagcccctccatggtttcctctcttcccatttccgcggaggcatacaggccctcgtcgtggatatgatgtccgtcgaagcgctcgacatagctgagaggctcaaggtccctggctacctcttccacccatcgaatgcaagcctttttgccttcttcctccagattccgtccatctgtgcagagagtaaacggagcttcagtgagctaggagacacccctctcgagatccctggcctccctcccatgccggcctcccacttcatcgacaatcggcccgaggagccgcctgagagtgaagtgtacaaggccgtgatggatttggttcgcaggtacactaataaatgctccaatggcttcctcgtgaacactgtcgactcgctggaggcacgggtggtgaacacgctcaggcacgcacgccgtcaaggcggccgggcgttgccgccgttctactgcgtcgggccgttggtcaacaaggccggcgaaaggggagagcgacccgagaggcacgagtgcctcgcatggctcgaccggcaaccggaccgcaccgtcgtgttcctctgctttggtagcaccggcattggcaaccactccacggagcagctcagggagatcgccgtcggcctggagaaatccggccaccgtttcctgtgggtggtgcgcgcccccgtcgtcagcgacgatcccgacaggccggacctcgacgcgctcctcccggcggggttcttggagcgaaccagtggccaaggcgccgtcgtcaagcaatgggcgccgcaggtggacgtgctccatcaccgggccaccggcgcgttcgtgacacactgtggatggaactcggtgttggaggggatcaccgcgggcgtgccaatgctgtgctggccgctccactcggagcagaagatgaacaaggttctcatggtggaggagatgggcatcgccgtggagatggtcgggtggcagcagggccttgtcacggccgaggaggtggaggccaaggtgaggctggtcatggagtccgaggcaggcgtcgagctcagggcgcgcgtcacggcgcacaaggaagccgcggccgtggcttggaccgacgttggctcgtcgcgcgctgcgttcacagagtttttatctaacgcagacagccgacagacatcgtgagttcgtggccgtatcgtgaactccggacatgggtggaggcataagtctaacgggtgaccgttcgagcgcagcccggacacgctagcgcattcggcccagtccacatgcattaggccaatcatgatatgctattccaagaaaaacgtactacctccgttttttaatagatgacaccgttgactttttctc

SEQ ID NO: 3293 - DNA, 1408 bp, Oryza sativa; identical to SEQ ID NO: 2605
  ref <308>: DATABASE ACCESSION NUMBER: AK060998
  ref <309>: DATABASE ENTRY DATE: 2001-12-06

SEQ ID NO: 3294 - DNA, 942 bp, Oryza sativa
  ref <308>: DATABASE ACCESSION NUMBER: AK060999
  ref <309>: DATABASE ENTRY DATE: 2001-12-06
atcgcatctgatcggcatcggcatcgtcctcgtcctcggcatcagcagcagcaagggaagggaaggattcgccgcccgcgaggtcgtcgcctccccttccggcttccgtccaggattttccatggacggcgcggccgactccggcacggcgggcgccgcggcggcggcggccaagtggcggaccgatgcctcgcgggcgttccagtactacctggaccgctccaccccgcacgccacggggcgctggatcggcaccctcgccgtcgccgccatctacgccctccgcgtctacctcgtccagggcttctacatcgtcacctacggcctcgggatctacctcctcaacctcctcatcggcttcctctcccccatggtcgaccccgaggcccacgccgctgcctcctccgacggccccgccctccccacccgcggctccgacgagttcaagcccttcatcaggcgcctccccgagttcaagttctggtatgcaatcacaaaagcttttcttatagcttttgtgatgactttcttctctgtatttgatgttcctgtcttctggccgatacttctctgctactgggttgttctttttgtcctcacgatgaagcgccagattgtgcacatgataaaatacaaatatgttcccttcagcgttgggaagcagaaatatggcgggaagaagagcgcaggcagcagttcttcgaaagactgattggcagcctacccactctggtaggaaaaatggaaggggcaagaagatacagtcgatgatatttgatgtgctacataccaattgtaatatttcattcatatctagagctagaaggatattcacttgtatttcagactctggttcacggtttaaattgatattgtggtagaatgctttcttggatgggtatatagtgtgactcgttaaaaatatgacaaaacggttcagct

SEQ ID NO: 3295 - DNA, 1277 bp, Oryza sativa
  ref <308>: DATABASE ACCESSION NUMBER: AK061000
  ref <309>: DATABASE ENTRY DATE: 2001-12-06
aaggcagcgtgcacccaccaagatagcgggatgatccagtgagcgcgtggaggcggtgtttgattctagattgttctagaaccgaacgagcgagcttagctagctagctagctgctgctgcttcgatcgatcggtcgttgcctcatgcaggagttccagtccatcccggggctcgccgggcggctgttcggcggcgcggcggcggctgacatccggcgcgcgcaggcgcagcagggcccggcgtcgcggtgcggcgggataccgtcgccggaggcggtgaagtgcccgcggtgcgagtcgaccaacaccaagttctgctactacaacaactacaacctctcgcagccgcgccacttctgcaagagctgccgccggtactggaccaagggcggcgtcctccgcaacgtccccgtcggcggcggctgccgcaagaccaagcgtagcggcagctcgtccgctgcgtcctcggccccgtcgacgccgacggcggcaactgacaacgccaagaaccagcggcgcgcctcggcgtcgtccccacgatccagtagcggcggtagcggcaacacgagccccacggccgccgcggcgacgaccccgacgacaccggccacgccgtcgtcgaacaccatcgccgtcataaaccacgcgacgacgacgacgacgacgacgaaccccttcccgacagacgtgccacctccggcgccgattttcgccgaccaagcggcagcgctcgcgtcactgttcgcccctcctccgccgccgcctctcccggtgttcagcttcgcagcgcaggcgaagaccgaggacgggattgcctccgttctactcgccggacagacgacggcgcccactgccgccaccgttgccgacatgacgccgttcacgtcgctggacgcggggatcttcgagctcggcgacgtgccgccggcggcgtactggaacgccgggagctgctggacggacgtcccggacccgaatgtctacctaccctagctcggtgtagttactcatcacgatcaccttgattaagtctttgattaagctgtggttaaaacgcttcttaaggacgaccactagctaccactagtatgtcttttactactacattcatctactctactgttctccctgtaagtttttttcttcttttccttgtcttctctagctgcacttctgctgctgcaaaggtacgtgtaactgtccaagaaagctaacatttgtgtatctactgcacgcgtgaaaaaaaaaatctgaattggatcgatcattgttgcaac

SEQ ID NO: 3296 - DNA, 1291 bp, Oryza sativa
  ref <308>: DATABASE ACCESSION NUMBER: AK061001
  ref <309>: DATABASE ENTRY DATE: 2001-12-06
gatgcatgctccgatcctacgtacaatcaagctaggagctgtaatttgatcgatcgatcgatccaattggtacctaataaagtaagaatggcaagaggtggtgttgtgtggttggctgtggccctcctgtgctgctgctttgtgaggcattgtgagtcggcccgcgtgttcaccatcatcaaccagtgcaagacgatggtctggccggcggtgacgcccggcgagagcttcggcggcggagggttcgcgctgaagccggggcaatcgatggtgttcacggcgccggtggggtggtcggggcgcatctggggtcggacggagtgcgacttcgaccaggcgggcaacggctcctgcgccacggggtcctgcgggtcggagctcaagtgcggcggctccggcgccaccccggccacgctcgccgagttcaccctcgccaccaaggacttctacgacgtcagcctcgtggacggcttcaacctccccatggtggtgcgccctctcaacggggagggcaactgctcggtggccgggtgcgacggcgacctgcgggacagctgcccgtcggagctgtcgaagaaggtgaacgggaggacggtggcgtgccggagcgcctgcgacgtcttcgacaccgaccagtactgctgcagggggatgtacggcaacccgtcgacgtgccagcccaccttctactccaagaagttcaaggccgcctgccccaccgcctacagctacgcctacgacgatcccaccagcatcttcacctgctccaacgccgactacaccatcaccttctgctccaccaggaagcgacctgtgtgcacgtaccacaacaatcgccttatctgcagcgcctccacccgatcttggcctagtgtcatttctgcgctgctcttcacttttctggctttgcagttttcgctctaattaattaattgattattggcatggatgagaaaaccaacctgacatatatgctagtactctagtcttcttgcctggacgatccatctgagaagcaaacggtacgcgcgcgctacagctggtgcttgcttgtacgtttcatcacatcacacgcatgagatttgttcattcacatgtgaatacagtactactgtatatatatacgtatatcattcagtagagagagacaacagtagtagcataagtggatgtgccttttcctctgtttttttctcaatcatatatatgtaccctgcgggccagtccaatggagacaacagtacgcacccctcatgaatcatgatatgatatgatccatttctccgagtcc

SEQ ID NO: 3297 - DNA, 915 bp, Oryza sativa
  ref <308>: DATABASE ACCESSION NUMBER: AK104409
  ref <309>: DATABASE ENTRY DATE: 2002-08-28
atcaccctttcacctcacagcattttccaccttagagctcaccaacacagcagctgatacttgtttagggtaagacaagatgaacaggaagccaggagactgggactgcagggcgtgccagcacctcaacttcagccgccgggacctatgccagcgctgcggcgagccgcgtggcgccgctgatcgcggcagcggtggtggcggtgactacgccaacttcggcggccgtggtggttcctccttcggtggaggctttggcactggctctgatgtccgcccaggtgactggtactgcaactgcggcgcgcacaacttcgccagccgctccagctgcttcaagtgcgctgctttcaaggacgatgctgccgtcaacagtggcggcgctggtgcctttgatggtggggacatgtcgcgctcgcggggctacggcttcggcagcggcgccgtccgcgccagccgccctggctggaagtctggcgactggatttgcaccaggtctggatgcaatgagcacaacttcgccagcaggatggagtgcttcaggtgcaacgcaccgcgggactccggcactgaggtgtaatttgccgtacgtgtccgatcgatctggatccgatgaggcttgcagcagtgacgacgagcagcagaagcagcgttaagagttgtgatgtctacataagaagaagaagaaagtagaatgcaaaagaaatctccccatggttttactagttttgtttcttcccgttttagatttggttctgattcccatttgggaggacccgtcgacccctgattatctatgttttacccgttttatttcctgtttctttcggcatgtttgctcttcgatcgagtcgtgtaacccgaaacgcttgcgcttgagaagtattattattattaactagtatgttgcttctt

SEQ ID NO: 3298 - DNA, 858 bp, Oryza sativa
  ref <308>: DATABASE ACCESSION NUMBER: AK104410
  ref <309>: DATABASE ENTRY DATE: 2002-08-28
atctcaaagcaagcaagacgtccatgaagatgaagcgcaccatggctgctacttccatcctgttcttcttcctcgccggcctcgccgccgcccacggcagcacagcggacgacaccacgaccaccaccaccaacaccatacgcctcccgatcgacggagcagtggcggcgcgaaggaggacgaggccgtggaagtgctgcgacaacatcgtgaggctgccggagaggatcaacccgccgttctggcagtgcgacgacgagctggagcccgggcagtgcttccgccagtgcgaggcgtgccgggatccgccggggcggccgttccccggccggccgctcatctgcgacgacgtcttctggggcgacgacccgggcacctcgtgcgcgccgtcgtcggagtggccgtggggcccgtgctgcgacatcgccgtctgcaccaagtcgctccctcccatctgccactgctccgacgaggtggagtcgtgcgccgccgcgtgcgggcagtgcgagatggtggactcgtggtcgtggcgccctctcttcgtctgccgtgactccttcaccggggacccaggccccaggtgcacacctgaaatgcacaactaagaagagaactacttctctgtataacaagcagagaggctcatcgtacgtattctctgctagcttgaacatgtctctgtgttcatgtacgtgttggtatatgcatagcttgaacatgtctctttgtgttcatatacgtgttggtatgtatgcatagcttgaacatgtctctgtgttggtatgccaacatgcatcttgtctttgtgatgatgcataaataaatgaataaaagataaataagagatgagatctaccc

SEQ ID NO: 3299 - DNA, 1202 bp, Oryza sativa
  ref <308>: DATABASE ACCESSION NUMBER: AK061002
  ref <309>: DATABASE ENTRY DATE: 2001-12-06
gcgcacgacatcgcccccgtcaccctctctgcgctgctgctgctgcttccgatggcggcgcctccgcttccccgcgcccccgtctcctcctccgccgccgccgcgtcgccggggggccgcgctctcctcctcctccgcgtcggcggaggaggttccggaagatgcgctggcgtggcggcggcggcggcaccgggttggcggcggccgttcccggctgcctccgtcgcggcgcgctcggctggtaccacgccgggagaggtcgccgtcgatcctaaggtcgaagcaatactagacagtgtgaagtgggacagtaaaggcttggctgttgctattgcccaaaatgtggatactggagccattctcatgcagggttttgccaacaaagaagcccttgcaacaactatatcaaccaggaaagctacattctatagccgttcacggtcttcattgtggacaaaaggggagacatcaatgaatttcatcaatgtgcatgacattttcttggactgtgaccgtgattctataatataccttgggaagccagatgggcctacttgccatacaggggcagagacttgttactatacttcagtctatgatgctctacaaggttcgaagcccaatcaagataggcaggttgtctcaactctgtactcacttgaagatacaattagtagacggaaggaagagatagttactgaaggaagtggcaagccatcatggacaaaaaaactaatacttgataaccggctgctttgctcaaaaataagcgaagaagctggagagctaaaccaaacactgcttgagaacgaggacgagagccgcacaatcagtgagatgggtgatttgctataccacgcgatggtgctgcttagggtcaagggcgtgaggatggaacaggtcttggaggtcctcaggaagcgattctcgcagtctggtattgaggagaaggccagtcgcaacaaatcttaggatattactcacagagtggatgggtttaccagtttgcttatgtcgtatcggcattggtgccaagtgtgtaccattgagtagtttggtcttcttaattagaccgaaggttgtgaattgtgattatgctttaattgttctccaataagacactgagcaaatacatgtctggaatttgcagtgctgttcttgctgtcgccaataaaataataaaatcagctcataagtaaagc

SEQ ID NO: 3300 - DNA, 1377 bp, Oryza sativa
  ref <308>: DATABASE ACCESSION NUMBER: AK104411
  ref <309>: DATABASE ENTRY DATE: 2002-08-28
agagcatccatccttcgttcgctcatcgcgtctcgactccactactgtggttgcatatactactacacttgcagttgcatccagagcccgccccgcgtctctactcgctccgccgcgccgtcgtctctcccgacttcggcgacaagcgagcgacgcaggccaccgcgcgcggttcgttttcgcgagggaggccgccgccgaccagccgccatggtctcgccggacaccatccgcacggccatcggcgtcgtaggcaatggaaccgccctcgtgctcttcctctccccagtgccgacgttcatacggatctggaagaaggggtcggtggagcagtactcggcggtgccgtacgtggcgacgctgctcaactgcatgatgtgggtgctgtacggcctccccgcggtgcacccgcacagcatgctggtcatcaccatcaacggcaccggcatggccatcgagctcacctacatcgccctcttcctcgccttctccctcggcgccgtccgccgccgcgtcctcctcctcctcgccgccgaggtcgccttcgtcgccgccgtcgccgccctcgtcctcaacctcgcccacacccacgagcgacgctccatgatcgtcggtatcctctgcgtcctcttcggcaccggcatgtacgccgcccccctctccgtcatgaaaatggtgatccagactaagagcgtggagtacatgccccttttcttgtccctggcgtcactggtcaacggcatctgctggactgcctacgccctcatccgcttcgacctctacatcacgatccccaacgggctgggagtgatgttcgcggtggcgcagctgatcctgtacgccatctactacaagtcgacgcagcagatcatcgaggcgcgcaagcgcaaggaggccgaccatgtcgccatgaccgatgtcgtcgtcgactccgccaagaacaacccctcctccggcgccgccgccgccgccgccaacggccgctactagctcacgccgccctctttacttcaccagctagccagtcactcaggaggcatggccaccgatgaggccttcatgacttactagcaaagtggagtactacctttagctaagccgtcccaaagggatattactacatgtctcaaattaattagctaatctaatcaccatcaccctgcctaatccgctgctgttaattagtatggcagagagcaaaagaagaacaaattgagctgcacttcttatatgtactctcaagtgcagtgctactattgtcagtcccattgggggtaatttactgtcttatttacaggaggagggcctggctgctcttgttaaaaacagctagccctgccttttcttttttcaatatcatcatcatgccgtgctttt

SEQ ID NO: 3301 - DNA, 1222 bp, Oryza sativa
  ref <308>: DATABASE ACCESSION NUMBER: AK061003
  ref <309>: DATABASE ENTRY DATE: 2001-12-06
ctgcacagtgcacacgatactagctagcccgatggccccaacctccagcgttcaccgcgaaggcggcagcgccgccatggacatggccgagctcatccccacgctgccgctggagacggggagcccgccgttcccgctccggcaatacggcggctactggctgccggagtgggtcctccctgggctcgaggccgtgcacacgcgcttcgagccgaggccatccgacgtcttcctcgccagcttccccaagtccggcaccacctggctcaaggcgctcgccttcgcaaccatcaaccggaccacctacccgccgtccggcgacgcccacccgctccgccatcgcggcccgcacgactgcgtcaagttcttcgagtccaccttcgccatctccggcgagggcggcggcggagacgtggacgtgttcgccgccctcccgtcgccgcgcgcggttgctcgcccggggacgtgttcgccgccctcccgtcgccgcgcgcggttgctcgccactcacatcccctactccctcctgccggagcgcatcacgtcggcggcggcggacgacggcgactccggttgccggatcgtgtacgtctgccgggaccccaaggacgcgttcgtctccatgtggctgttcaccatgagcaacatggtgaagggtgtcacaacgaccacggacgaacaccacccggcggcggcggcggcggcgccatcgatcgagcaggtgttcgacctgttctgcgacgggcggagcatcgctgggccgcagtggcaccacgtccgcgagtactgggaggagagccggaggcggccggagaaggtcctcttcctccggtacgaggagatgctgcgcgagccggcgcgcaacgtggagaggctcgccgagttcctgcggtgcccgttcaccgccggcgaggtggcggccggggtggtggacgccatcgtcgacctatgcagcatcgaccgactcaggaacgtgcaggcgaacaagaccggggtgaccgacctggcggtgaagaaggagagcttcttccggagaggggtggccggcgactggagcaaccacatgtcgccggagatggcgtcgcggctggacagggtcgtcgaggacgcgctgcgaggctccgggttcacctttgccgccgctgccggcgactccgaatgagatcgcatgtgtcaagctagtatctatcttctatctattatctatctatctatctattat

SEQ ID NO: 3302 - DNA, 1142 bp, Oryza sativa
  ref <308>: DATABASE ACCESSION NUMBER: AK061004
  ref <309>: DATABASE ENTRY DATE: 2001-12-06
gtctgcttcgtcgccgatctcgtctccgccgcccgcgagcgaatcgcccccaaatcgggagggcggctgctctcgcctgcagatttgcgccgtcgttgcggcgaattgatgaggtagaagtgtccaactactcgcccctggttcgcgatgctgcggaaggtggccgtcgccttcctcgcttgcgccgccctctacctcgccttcgccgcctactcccgccgcgagagccttggagaggttcgattacctgcagttactaacagggtatacttggatgtggaaattgatgggcaacatataggtagaattgtcattggcctttatggagatgttgtgccaaaaacagttgcaaattttagggctctttgtacaggagaagagggcattgggcacaagggtaaatctcttcactataaaggatcaagatttcatcgtattatcccaggcttcatgattcagggtggggacatagttagaggtgatggaaaaggaagtgagtctatatatgggggcaccttcccagatgagaatttcatagtaaaacatacacatccaggtgttattgccatggcaaattctggacctgattccaatggatcgcagttttacattaccacaatcaagacaagctggttggatggggagcatgttgtgtttggcagggtgattcagggaatggattatgtgtacgccattgaagggggtgctggaacttacaatggcaagcctaggaagaaagttgtaatcaccgactctggtgagataccgaaggagaaatgggctgaagaagtgtaggctgttttgtactttggtttgccctgtactttttgggcagcaggtgcagttttacattaccacaaatcaggcaaggcgtctaaaatgttgtacattgtagttagttcatactcaatcgaatcccacttgctgacactgattactcagtgaattctgcactgtgatgaagatgaacacacatattctcagtttctcatgatggtttagcaaggtagaactgtcttttgtaatgcttcatttttttaaggcaatctgcaatgctttgtttggtattgcagtggtttataactatccctgtaaatttctatttttgatgaaaatagttagtgctgttatttttgggaact

SEQ ID NO: 3303 - DNA, 1134 bp, Oryza sativa
  ref <308>: DATABASE ACCESSION NUMBER: AK104412
  ref <309>: DATABASE ENTRY DATE: 2002-08-28
acctcgcttcacactagccgaggagacgcgagcgcgagctgctctcctctcctcccgccccgcgtcgccgatgtcgaggcggcggtcgacgtcgacgtcgccggggatggccgggcagcagccgcagcagcagggcccaccggaggacgactttttcgaccagttcttctccctgaccagctccttccctggcgccgcgccgggcggccgcgccgccggtgaccagcccttctccctcgcgctcagcctcgacgccgccgcggcggccgaggcgtccgggagcgggaagaggctcggggtcggcgatgacgccgagggtggcggcagcaaggcggatcgggagaccgtgcagctcaccggactcttcccgccggtgttcggcggcggcggcgtgcagccgccgaacctccgccccaccccgcctacccaggtgttccacccgcagcagtcgaagcagggcggagcagccgtcgggccgcagccgccggcgccgaggccgaaggtgcgagcgcggcgtgggcaggcgaccgacccccacagcatcgcggagaggctaagaagagagagaatagcagaaaggatgagggccctacaggaattggtccccaatacaaacaagacagatagggcagctatgctagatgagatccttgattatgtgaaattcctgaggctgcaagtaaaggttttaagcatgagcaggctgggtggcgcgggtgctgttgcacagctggttgctgatattccactttcagttaagggggaagcaagcgatagtgggggcaaccaacagatttgggaaaagtggtcaacggatggcacagaaagacaggtagcgaagctgatggaagaagacatcggggcagcgatgcaatttctccaatccaaagcactctgcatgatgccaatctcgctcgccatggcaatctatgacacacaacaaacacaggatggacaaccagtgaagcacgaacccaacactccttcctagtatagtaatagcaactgtaagtctgtaacatgaatcgttacaacccctagtagacatcaacctatcaaagtgtaagataaaacagctcgttttgattcactaacaaggaggcaggaaaagacctaagagatcctctccacttg

SEQ ID NO: 3304 - DNA, 900 bp, Oryza sativa
  ref <308>: DATABASE ACCESSION NUMBER: AK061005
  ref <309>: DATABASE ENTRY DATE: 2001-12-06
attaaaacaaagcattgcgatggtcctcgcggatgctgacgcaatgtgatttctgcccagtgctctgaatgtcaaagtgaagaaattcaaccaagcgcgggtaaacggcgggagtaactatgactctcttaaggtagccaattgcctcgtcatctaattagtgacgcgcatgaatggattaacgagattcccactgtccctgtctactatccagcgaaaccacagccaagggaacgggcttggcggaatcagcggggaaagaagaccctgttgagcttgactctagtccgactttgtgaaatgacttgagaggtgtaggataagtgggagccctcgggcgcaagtgaaataccactacttttaacgttattttacttattccgtgagtcggaagcggggcctggcccctccttttggctctaaggcccgagtccctcgggccgatccgggcggaagacattgtcaggtggggagtttggctggggcggcacatctgttaaaagataacgcaggtgtcctaagatgagctcaacgagaacagaaatctcgtgtggaacaaaagggtaaaagctcgtttgattctgatttccagtacgaatacgaaccgtgaaagcgtggcctatcgatcctttagaccttcggagtttgaagctagaggtgtcagaaaagttaccacagggataactggcttgtggcagccaagcgttcatagcgacgttgctttttgatccttcgatgtcggctcttcctatcattgtgaagcagaattcaccaagtgttggattgttcacccaccaatagggaacgtgagctgggtttagaccgtcgtgagacaggttagttttaccctactgatgaccgtgccgcgatagtaattcaacctagtacgagatggatgtg

SEQ ID NO: 3305 - DNA, 1118 bp, Oryza sativa
  ref <308>: DATABASE ACCESSION NUMBER: AK061006
  ref <309>: DATABASE ENTRY DATE: 2001-12-06
agagcaccagacgcgagccgacggattttcccagaatggcgcacgcgcgcgcccaggcgatccgcgcgctgctcgccaggtgctcgacggaatgcccccgccgcgccgccgcctcgtcctgcatccgccgcgcttctctcccttattgttccccaggttcctatccccggagcctcctccctgcggtgcgcgcggctggcgcggattggacgcgctctctcgcgagcagggcgcagggcggcgctggcgcaggcgaggccggcgccgaggagggtgaggcgcaggagtggatggcggagtgggaggaggaggaggaggaggaggaagatgtcgagcccgagatcggtgacggtggcgacggcggtggggtcgccctgaggggcgtcgagtgggggaagcgcgctctggcggcggccgaggaggttcttggcgagcacttcggcgacgacgttgcgatgttcgccttcaaggtgtcgcccaagggatacgtctacgtcaggcttgacaagctcaccaacagatatgggtgccctggtatcgaggaaatcgagagttttaataaactctacaagcagaaactggacgagctaatcgaacaaggcgaaataccgctggacctggcaattgaggtctcatcaccaggagccgaacgacttctcaaggtgcccaaggatctggatcgttttaaagatatggccatgagggtgcaataccttgttgaaggcgatgatgtcgtcccgaagcagatcctgcagaaggatggaatcttcttgctcgagtctgttgacattcaggcagaacattgcatctggaagctggcagatgtcaaggagaaccgagctgcagctgggaaaggaaggccattgaacaggaaaaaaagggactggaggctgcaaacttcgttccaagcagtgaagaaggcaacactatacttggactaaaccatgatggcatatgtttggacagaactgatttagaaccaaatccagtattagtttaaattggaacggaatctcgcatactctctgtaatacttgcaatactggcaaaggatgttcagttctgcagttagattagcgtctactttatttgtggaactgaatgaattttctggaggc

SEQ ID NO: 3306 - DNA, 1295 bp, Oryza sativa
  ref <308>: DATABASE ACCESSION NUMBER: AK061007
  ref <309>: DATABASE ENTRY DATE: 2001-12-06
aatcaagaaatccacatttctcctcggaaagtcaaaggcaagaaacaccatggatgccactgccatcggcaacggcgccctgcactccaatggcgccggcgccgacaccaaagggaagccgatcaaatgcaaagcggcggtggcgcacggccccggcgaggcgctggtgatggaggaggtggaggtggcgccgccggcgaggatggaggtgcgcctcaaggtgctcttcacctctatctgccataccgacctcagcgcctggaaaggagagaacgagcttcagcgaaagtttcctcgcatattgggtcatgaggcagcaggggtggtggagagcgtgggagagggtgtggaggatcttgcccctggagatcatgttgtccccatcttcaccggcgagtgtggtgcgtgcacctactgcgagtccagcaagagcaacctatgcaaaacctaccgtgtcaacccattcaagagcaccatggtcaccgatggtggcacgaggttcaccatgatcgaccgctcctccggtgcacgcaacccggtctaccattttctcaacacttccacctttgctgagtacactgtgattgactccgcttgcgctgtcaagatcaaccctaaggctcccttggagaagatgagtctcctcagctgtggggtctccacaggagtgggagctgcatggaacactgcaaacgtctccaaggggtccacagtggcaatatttgggcttggtgccattggtcttgcggttgccgaaggtgccagattgagaggagcatctcgaatcatcggagttgacataaaccctgaaaaattctccaaaggtgcgtattttagccacgtatatatttccgctgttcctttttttactttttttttcctttagttggccaatttttacgtctttgtcatgcaccgcagaaaaaaaattgtcgttcaatttgtgccagcgtgaatttaattaatacattggtctcgttagaacatgatgtgaccgaactaatttctggccccattttcccgatcagtgatcagttgattgagatagaaaaatttgcataatcacgaaattataaatgcaatagtaattttgacaactgatgaccatcatgtcactttccaagtgatgcatccagagcaaaagaactcttgaactttccacgtggtatgagttgttaattgctcaaaggtacatttgttatccaatatcctagtgagtattttgctagtcaatttcaagttagtggtagattaacccgagtaaactgagacacaagtcacacaatgccacttcc

SEQ ID NO: 3307 - DNA, 1478 bp, Oryza sativa
  ref <308>: DATABASE ACCESSION NUMBER: AK061008
  ref <309>: DATABASE ENTRY DATE: 2001-12-06
atacttccctttcccctcggccgcctgcgccgatccccatccctcccgcggccgcgagcgaccaggggagggccgcagccgccgcccccggcgccgttcgtcccgcttcttccgccgcatcgcatactgaaaaaaaaattgtgccatgttatagagactgctaaaaacatcacatggaatcgctgtggaagctgagctacttgctcgagccagcgtcgcttgccctcatcttgaccgccgtctccgtcgcctacgcgtcggcgtcgcgcgcgctggaccatggcagggagatggagaggaacctcgacttctccgaggcctccatcacgctcgaccggtcgcaggcgctcatgatcccgctcgcgagctcctgcagcctgctgctgatgttctacctgttctcgtcggtgtcgcacctggtcaccgccttcaccgccgtggcgtcggcgatggcgctcttcttctgcctgtcgccgtacgtaaactgcgtcaggtcgcgcctcggcgttggggacccgttcgtgtcgaggtgctgctcgaagccgtttacccggttgcaggggttgctggttgcgatctgcgtcggcacggtggttgcctggttggtatcggggcactggttgttgaataacctgctggggatatccatatgcatagcgttcgtcagccatgtgaggcttcccaacataaagatctgcgcgttgctgctcgtctgcctgtttgtgtacgacgttttctgggtattcttctcggagaggtttttcggagcaaatgttatggtgtccgttgccactcagaaggcatctaacccggttcacacggtagcgaacaagctcagtctgcctggattgcagctgattacaaagaagctagaacttccagtcaagcttgtcttccccaggagtttgatgggtgggcttgctccaggaagcagtcctggggactatatgatgctcggccttggagacatggccattccagggatgcttctagctcttgtactctcatttgatcaccggaagatcaaagacatgagtgtttcacaagacatgcctccctcgaaacagcggaaatatgtatggtatgcgctgacaggttatggtgttggcttggtaacggctttggctgctgggatcttatcccagtctccccagcctgctttactgtacctggtaccatcaacgcttgggcctgttatgtatatgtcatggttgaggaacgagctatgggagctatgggaaggatccaggccaattataaacgacaaagctcatttgttggaggtttaaaattcaacaggacgtgaaaaaaggtctcgacgtccttgatgtaatctgattacaatttatttcagccatagtctaaaggagaatatttataaggtagaatgcagtgatgtaaggttataccctattgttctcgcaagagggaacaagatgtatcacttattagcaataatataaaggtgtctttcatct

SEQ ID NO: 3308 - DNA, 1612 bp, Oryza sativa
  ref <308>: DATABASE ACCESSION NUMBER: AK061009
  ref <309>: DATABASE ENTRY DATE: 2001-12-06
aacgaacgctaaaaaagtaacagtttctgtactttattggaagaccgcttctaaccatgggcaaggacaagcagcatctctccctcgtcgtcatcggtcacgtcgatgccggtaagtcgaccgcgactggtcacctcatttataagtgtggcgggattgataagcgcacgatcgagaagttcgagaaggaggcaagtgagatgggaaaggcctccttcaaatacgcttgggtgctcgacaagctgaaggctgagcgcgagcgcggtatcaccatcgacattgccctctggaagttcgagtcccccaagtccgtcttcaccatcatcgacgcccctggccaccgtgacttcatcaagaacatgatcaccggcacctcccaggctgacgccgccgtgctcatgatcgcctcgccccagggtgagttcgaagctggcatctcgaaggacggccagacccgcgagcacgccctgctcgccttcacgctcggcgtgaagcagatgatcgtctgcacgaacaagatggacgacaagaccgtcaactactccgaggcccgctatgaggagatcaagaaggaggtcggctcgtacctgaagaaggtcggctacaacgtcgacaaggtgcgcttcgtgcccatctccggctgggccggcgacaacatgatcgagaagtccgacaacatgccgtggtacaagggccccaccctgctggaggccctcgacctcctcgagcccccgagccgcccggtcgacaagcccctgcgcctgcccctccaggacgtctacaagatcggcggtattggcaccgtgcccgtgggccgtgtcgagaccggcgtgatgaagcccggtgacgtcgtgaccttcgcgccgtccggcgtgacgactgaggtcaagtcgatcgagatgcaccacgaggccctccccgaggccgtccccggcgacaacgttggcttcaacgtcaagaacatctccgtcaaggacatccgccgtggcttcgtctgctcgaacacgaagaacgaccccgccaaggagtgcgagaccttccaggctcaggtcatcgtcctgaaccaccccggccagatcaccaacggctacgcgcccgtgctggactgccacacttgccacatcgcgtgcaagttcggcaccctcgagtccaagatcgaccgccgctctggcaaggagatcgagaaggagcccaaggccatcaagtccggtgatgccgccatcgtcaccatggtgccgtccaagcccatgtgcgttgagaccttcactgactacccgcctctgggccgcttcgccgtccgcgacatgcgccagaccgttgccgtcggcatcatcaagtccgtcgccaagaaggaggccaccagcgccaaggtgacgaaggctgccgtcaaggccggcgccaagaagtaagcaccacgctttgctgttggcaccccacccacactaaccgccgcaagcgccgaacctccgccatgtgacgcaagctcccgttcgttcgatcttttccaagaacgcaacactgccgccacttcgccgtccttccccttgcattccttaactgcatccattaacaccaccacatggtcaatcagctccaataatggcgccgatgg

SEQ ID NO: 3309 - DNA, 1083 bp, Oryza sativa
  ref <308>: DATABASE ACCESSION NUMBER: AK061010
  ref <309>: DATABASE ENTRY DATE: 2001-12-06
ctgcaccacacaaaaccactctctcgttgctcgatttgggagctactacctttcttgaagggagctgcgcaatggattcgagcagcagcgagatcctcgtcgacgccggtagcttccgattatacaaggatggccacgccgaccgtaccggcgacatggagaccgtgcccgccggcttcgacgccgacaccggcgtcacctccaaagacgtcgtcatcgacgctgtcaccggcgtcttcgtgcgcctctacctaccactcatccaggctgctaccgatgacgacggcaagacgaagctccccatcctcgtcttcttccacggcggctacttcgtcgtcgggtcagctagctgccctaagcgccaccgcaacatcaacgatatcgtcgccagggcccgtttaatcgctgtctccgtcgactaccgcctcgctcccgagcacctgctcccggcggcgtacgacgactcctgggcggcgctcaactgggcgttgtccggggccgacccatggctgtccgagcacggcgacaccggccgagtcttcttggccggcgtcagcgctggcgggaacatagcccacaacatgaccatcgccgtgggcgtgcgtggcctggacgccgcggtaccggcgcgcatagagggcacaatcttgctccacccttcgttctgcggcgagacgaggatggaaggggagccggaggaattctgggaaagcgtcaagaagaggtggtcgatcatcttccccgacgcgaagggcgggctggacgatccgcggatgaaccccatggcggccggcgcgccgagcctgacgaagctggcgtgcgagaggatgctggtctgcgcggcgtcggaggacccgataagaccaagggaacgtgcgtactacgacgccgtgaagcgaagtgggtggggcggagaggtggattggttcgagtcagaaggcgagggccacgccttcttcgtccgcaagtacggcagcagcaaggccgtcaagctcatggatcgagtgattgctttccttgctggccattaactgtactcccaagagaaatattatcgctatattagtcatccgtacttctctg

SEQ ID NO: 3310 - DNA, 1065 bp, Oryza sativa
  ref <308>: DATABASE ACCESSION NUMBER: AK061011
  ref <309>: DATABASE ENTRY DATE: 2001-12-06
caatgtggtgttgttctttgcagtgtgttggaggcgcttgatgccgtcttgagcggcgcgcaggtgctcgccgtccctctccgctccggcggccggaggaagcagctcggcggcggcggcggtggcggcggcggcggcgactactgctggttgacgcaggaggacctcgtccgctacttcctcaactccatctccctcttctcccatgtcgccggccgctccgtctcctccctcggcctcgtgcgcgccgacgacctcctcacggtgcggccccacgaggcagccctgtccgccgtgcccctcctccgccgcgccatcgccacggagaccgcggtcgccgtcgtcgacgacggcggccacctcgtcggcgagatctcccccgcgctcctcgcgtcctgcgacgagacggcggccgcggccatcgcgacgctgtcggtggccgacctcatggcgtacgtcgactacttcggcgcgccgccggagcacatccttcgcgcggtcaaggccgggctgaagagcaagggcctcgacgccatgctcgagctggtggagaacgaggcggtgtcctccttcgcgttctcctcctcctccacctcgtcgtcctccgacgacgaggcccacggccgcgccgcgcggctgaggcggccgtcgtcggggagctacgggcgccgctcgacggaggagccggtggtgtgcagcccggcgagctcgctggtggccgtgatgatgcaggcgctcgcccaccgcgccagctacctgtgggtgctcgacgaggacgacgactgccgcctcgccgggatcgtcacgttcgccgacgtgctcacggtgttccgcgagcagctgcagtgaaggccgctgccgcggcgacgccaagaaagagttctttttttttttctgttgcggcgatcgatcgatggatcgttgtgcatgcctgcatccttgttctgaaaacattttggagtgtttgttttgaagcgttttgaactctgaactctgaagtatttgtctctgccttggcctggtgctgatgaacaaactgagactttttggatatgccttccaaat

SEQ ID NO: 3311 - DNA, 1165 bp, Oryza sativa
  ref <308>: DATABASE ACCESSION NUMBER: AK061012
  ref <309>: DATABASE ENTRY DATE: 2001-12-06
acagaaaccggcgaaatggggcacgagaaggagcaagaaacggccggcgacgagctccggcggcccgagccgccggcgttgccgtggacggtgcggctccagctcttcgccctcgtcaccgccgtcgacatcgtgcagcgcggcgacggcaccgtcaaccgcttcctcttctccctcgcagaccgccagagcgccgccgcggcgcgcccggacgcccacggcgtccgctccggcgatgtcaccgtcgacgcgtcccgcgggctgtgggcgcgcgtgttctcccccgcgagcagcagcgccgtggaatccccgccgctccccgtcgtcgtctacttccacggcggcggcttcgcgctcctcaccgccgcctccagccagtacgacgccttgtgccgccggctctgccgcgagctccgcgccgtcgtcgtctccgtcaactaccgcctcgcccccgagcaccgctaccccgccgcctacgacgacggcgtggacgtgctccgccacctcgccaccgtcggcctccccgccgacgtagtagcggccgtccccgtcgacctcacccgctgcttcctcgtcggcgacagcgccggcggcaacatcgcccaccacgtcgcgcaccgatgggccgccgccaccacctcctcgagccgccgcgtccgcctcgccggcgtcgtcctgctgcagccgttcttcggcggcgaggagcggacggaggcggagctgaggctggacggcgtggggccggtggtgagcatggcgcgcgcggactggtgctggagggcgttcctgccggagggcgccgaccgcgaccacccggcggcgcacgtcaccggcgagaacgccgagctggcggaggagttcccgccggcgatggtggtggtcggagggtacgacacgctgcaggactggcagcggcggtacgccgggatgctgcggcggaatgggaaggcggtgcaggtggtggagtacccggcggcgatccactccttctacgtcttcccggagctcgccgactccggcgagctcgtcaaggagatgaaggcgttcatggagcgcaacgcgccgcccaaatcgaatgcttaattagaagcgttttatttacctttggcatttcaaaatgttaacctggactgctatttcatatatattttgctgaaatttgatc

SEQ ID NO: 3312 - DNA, 1496 bp, Oryza sativa
  ref <308>: DATABASE ACCESSION NUMBER: AK104413
  ref <309>: DATABASE ENTRY DATE: 2002-08-28
acattgcacctcgagtccagaggctgagagagctcacggggagaagcaaaccaaaagcccaaaggacttttctaccatggcgtggcaactcctcgccggcgtgctgctgctgcagctcgcggcgagcgcggcggggcagcagcagtgcctgtccgcgacgttccagaacgggcagacgttcctgaagtgcaacccgctgccggtgctcggcgccagcctgcactggacgcaccacgccgagaacggcacggcggacgtcgcgttccgcgccccgcagcagagcagcggctgggtcgcctgggggatcaacacccgcggcaccaccatgcccggcagcagcgtgttcatcgcctcgcaggacggcagcggctccgtgtccgtcctcatgaccgtgctggagaacaccagcccgagcctgaccaacggcagcctcagcttcgacgtgctgtccccgcccaccgccgactacaccaacggcgtgtacaccatcttcgccaccatcgcgctgcccaacaactccacgacgcagaacaccgtgtggcaggccgggccagggagcaccgggaacgtcggccagcacgcgacgtccggccccaacgtgcagagcatgctgaggctcgacttcagctccggccagagcaccggtaccgcctccaactccaggctgcaccgccgtaacatccatggcatcctgaacgcggtgagctggggcatcctgatcccgatgggcgccatgatcgcgcgctacctccgcgtgttcgaggccgccgacccggcatggttctacctccacatcacctgccagctctccggctacatcctcggcgtcgccggctgggccctcggcctcaagctcggcagcgagtccaagggcatcacctacagcgcccaccgcaacatcggcatcgccatcttctgcctcgccacgctccaggtgttcgcgctgctgctgaggcccgacaagaagaacaagtacaggttctactggaacatctaccaccactccgtcggctactccgccatcgtcctcgccgccgtcaacatcttcaagggcctcgacatcctcaagccggccagcggctggaagaggagctacattgccatcctcgccacgctcgccggcgtcgcgctcctgctcgaggccatcacctgggtcatcgtcctccggcggaagaagagcgacaagtcgtcgtcgccgtacggcgccaccaacggcaacgggcgcgcgtagtttgatcagcatctgatcgacgtgtgccttgcgctacggcctacgggtgtgtagttttgctgcgatgtgtgtgtgtatttgtcttctgctagctgtgtatcttccattttttgttactgcttctgtagactacgtagaggttcagagattatttcttttcctttttttttttacattttcaggtctcacgatgacacatttgtatacattttttttcaccttgatgtatgattacctttatttatgcatacgtttgattacgatt

SEQ ID NO: 3313 - DNA, 1084 bp, Oryza sativa
  ref <308>: DATABASE ACCESSION NUMBER: AK061013
  ref <309>: DATABASE ENTRY DATE: 2001-12-06
cggagaggtgcccgagggcggaggaggtggtgagggaggaggtgcggaggctgtacgaggagcacggcaacacggcggtgtcgtggttgagggcactcttccacgactgcatggtctactcctgcgacgcctccctgctgctccacaccaccaccaccacaggcgtctccgagcagtcctcccaccgcagcttcggcatgcgcaacttcaagtacatcaccgccatcaaggccgccgtcgagcgtgagtgccctgccaccgtctcctgcgccgacatcctcgccctggccgcccgcgacggcgtggccatgctgggtgggccctcggtggccatgcggacggggcggcgcgacagcagggagagctactacggcgtggtggagcagtacatccccaaccacaacgacagcgtgtccaccgtgctgtcgaggttcgcggccatcggggtggacacggagggagcggtggcgctgctgggcgcgcactcggtggggcgcgtccactgcttcaacctggtggggaggctgtacccgcaggtggacggcagcatggaggcggcgtacggggagtacctgcgggggaggtgcccgacggctgcggcgacggaggacacgagagaggtggtgtacgcgcgcaacgaccgcgtcacgcccatgctcatcgacaacatgtactaccgcaacctgctcgccgggcgggggctcctcctggtggaccagcagctggcctccgacgcccgcacggcgccctacgtccgccggatggccgccgacaacgactacttccaccagcgcttcgccgcagcgcttctcaccatgtccgagaacgcgccgctcaccggcgcacagggggaggtcagaaaagactgcaggttcgtcaactctagctaagctcgactagctagtagtacacatatacatacatatatgatcgatgtaaaaataattgaggtacgttctatgagatcgatcggtctgtgaactaatcgatcggcggcctctatctgttggcatcgactcctccattggatctttgtatttttctcaacttgtatgtacgtacgtatgtatgtggggttccgtcg

SEQ ID NO: 3314 - DNA, 1232 bp, Oryza sativa
  ref <308>: DATABASE ACCESSION NUMBER: AK061014
  ref <309>: DATABASE ENTRY DATE: 2001-12-06
acaatccccttgacagcacagaggcaacagcaaaacacactctcatcagtgtcaggtctccacaccacacccaagtacaggtacacacaagacaatcctcccactgaactgaatcccatccactcctttatcatcatcaccatttccctccttcccttttcctcccctcatttccatttccagttgcagcaagagctgcctcctagctctcttcctgccatccatggcaaatgcttccctccaatcctttcttcttcaccaccaccattctttccttagcaatggtatccatgagggctcctccccttctataattctcaagctcacaacaaacagcaacagcagcatttcattcaagctcttctccaacaccacctcctcctcatcatcatcagtgaccaccacagcatcaacccccaactcaccggtgacccctgctccggtaacagcctcgtctccgccaccgccttcgctggagctcctgggcgcccagctcgccgagagggattaccggcaggccgacgagaccacccgcgcgctcctcatcgagctcgcgggcgagccagctcggcgccgagggtacgtcttcttctcggaggtgcagttcatctccgccgatgacctccgggccatcgacgcgctctggcaggagcacagcggtggccggttcgggtacagcgtgcagcggcggctgtgggagaagtcgcggcgcgacttcacccgcttcttcatcagggttgggtggatgaagaagcttgacaccgaggtggagcagttcaactacagggccttccctgatgagttcatctgggagctgaatgatgacacgccagaggggcatctccctctcaccaatgccctcagagggacacagctcctgggcaacatctttacacatcctgcctttgaagaggagcaagaagatgaattagcagcagaggagaatgacacacctgataacactggtcagagtaaggatggcagcaaagggaaggagaggccaaagttcatgagagatttcttcaagcctgactactccttttgagattggggggtaattaaaaagcatgggagtttgtgatgcagagatgctggtcatggtgcaattgatttagaaaaaaaaaaaaaggaaacatgtatccgtagttcatctggattgttatgtcctgtaaacatgcgtgggaaactgcacaatatattatgaatataattgtttgagatgtttgctctgc

SEQ ID NO: 3315 - DNA, 1151 bp, Oryza sativa
  ref <308>: DATABASE ACCESSION NUMBER: AK061015
  ref <309>: DATABASE ENTRY DATE: 2001-12-06
gagatgcaaacgcaaatttcgccatggccaccaccaccaccaccaccaccaccatgggcggcctccaccggctaataagcaggagcagctgcagccggagaaccttcgccgcctccacgccgccgcagcgacccagagcgatagccgtccgagtccgaagcagcagcgccggtgtaacgaagagccagaggcagaggcagaggcaggtgaagctgacatacctggagatcaacagctgggtgtgggaggtcggcggcgcgcgcatcctggtcgaccccatcctcgccggcaacctcgacttcggcgcgccatggctcttcgacgccgccaagaagcgcctcaagaacctgggcgtccaagatgtgctgcagcctccgggggtcgacctgctcctcatcacgcagagcctcgacgaccactgccacgcgcgcaccctggcccagctcgccgccgccgcccccgaccttcccgtcgtcaccacccccaacgcgcgccccgtcctggccgcgctgcccaccccattccgcgacgtcacctacctggagcccgggcaatccaccaactgcaacggcggcggcgtccgcatactggccacccctgggcccgtgctggggcccccatggcagcggccggagaacggctacatcatgttcctcctccaggaagaagaggaagacgccaaggggcttgtgtactacgagccgcactgcgtgtacgaccggtccttcctggagaaggaggcgctgcgtgccgacgtggtaatcacgcccgtcgtgaagcagctcctcccggccaacttcaccctcgtcgccgggcaggaggacgccgtggagctggccagcctgctgcgggcaaggtacgtggtcccaatgagcaacggcgacgtggacgccaagggcctcctcaccgccgtcgtcgccaccgagggtacggtggaggccttcaaggacatgctggccgacacgctcccggaggctcagctgctccacccaacgcccggcgtcccactccacatccacctcccccaccttacttgattcattccaatccatgcatgccctccctccatttaatttcctacacataacaacatggactatatagggcgactgtagctgtatatctcaataaattttcaactgatgatgatt

SEQ ID NO: 3316 - DNA, 1074 bp, Oryza sativa
  ref <308>: DATABASE ACCESSION NUMBER: AK061016
  ref <309>: DATABASE ENTRY DATE: 2001-12-06
gcgatgcgtcgtctgctgctcacgggcttccctgcatcctccgccctgaccttccgcccacgcatccgcttcttcccccgcgcgaaccctagaagcatggcggccgcaggacctgcctgctgtgccccagccgccgccgccgccgccgcctcctcgtcggcttctgcttctgctgctgctgcggctggcgatggcggcggaggagcccagaagccgtggctgctcatcgggctcgggaaccccggcaggatgtacaaggggactcgtcacaacgttggatttgagatgatcgatgctattgcagaagctgagggtatttctgttagcagcaagcaattcaagtcaatggttggtaaaggccttattggtgatgtcccagtaatgcttgccaagccacagacttacatgaatgcaagtggttgcacagctggtttcatattttaagataccactcagtcaagttcttgtgatctatgatgatctagacataccctttgcaaaattgcgcttactgcctaaaggaggacatggcgggcataatgggatgagaagcattattaaccatttgaaacagagccgtgatttcccacgccttaggattggtattgggcgccccactgggaagttggatgctatcggctttgttctaaggtcattcaccaaggaagaacaagaagagcttaatttgacgatcaataggagcttgcaagcagtaaggataatgctactcgaaggattcaacaagggtgcaacttttgtgaacactccacagccatcagaaatgctaaataaatgaaagtgcctcccttcagaggttcagattgcttagggattcaaatgaagagtgtacaatagctgttgttgttagaagcacccagaatagctgcacaaagcacaaggaccattctccttgagcatatgtatcccaattgatttgtaaaggtgttcatttacaacacacaacaaaatgttgctcatcgcaactctacttatacatgattcattgttaacaaatatactactcgatcaattcattggcttcctatcttgcctgttttcaaaaaaaaaaaaaag

SEQ ID NO: 3317 - DNA, 1496 bp, Oryza sativa
  ref <308>: DATABASE ACCESSION NUMBER: AK061017
  ref <309>: DATABASE ENTRY DATE: 2001-12-06
gatgccgtgatcgatcgatcgatctgttggcgcagcgtgtatataagggcgggaaggggagtgagagagagcagcagctagctagccgcggtcggtcgatccagctgctggggatgagtacttagttagctcggagctagctactaatggatgatatacttatgctagttagttaaatacagttattagttagttgtaggttgcatctatcatatctccatcggttaattaattgattgatagctagattatcaacaattaatgagcatggtggtgcagcaggagcaggaggtggtgttcgacgcggcggtgctgagcgggcagacggagttcccgtcgcagttcatatggccggcggaggagagccccgggtcggtggcggtggaggagctggaggtggcgctgatcgacgtgggggcgggggcggagaggtcgtcggtggtccggcaggtgggggaggcgtgcgagaggcacggcttcttcctggtggttaaccacggcatcgaggcggcgctgctggaggaggcgcaccggtgcatggacgccttcttcacgctgccgctgggggagaagcagcgggcgcagcggcgcgcgggggagagctgcggctacgccagcagcttcacggggcgcttcgcgtccaagctgccgtggaaggagacgctgtcgttccggtactcatcggctggagatgaagagggcgaggagggcgtgggtgagtacctggtgcggaagctcggggcggagcacgggcggcggctgggcgaggtgtactcgcgctactgccacgagatgagccgcctgtcgctggagctgatggaggtgctcggggagagcctgggcatcgtcggagaccggcgccactacttccggcgattcttccagcgcaacgactccatcatgcgcctcaactactacccggcgtgccagaggccactcgacacgctgggcaccggtccgcactgcgaccccacctcgctcaccatcctccaccaggaccacgtcggcggcctggaggtgtgggcggaggggcggtggcgcgccatccgccctcgccccggggcgctcgtcgtcaacgtcggcgacaccttcatggcgctctccaacgccaggtaccgcagctgcctgcaccgggcggtcgtcaacagcacggcgcctcgccgctcgctggccttcttcctctgcccggagatggacacggtggtgcgcccgccggaggagctggtcgacgaccaccacccgagggtgtacccggacttcacgtggcgggcgctgctggacttcacgcagcgccactacagggccgacatgcgcacgcttcaggccttctccgactggcttaatcatcatcgtcacctgcaaccaacaatatactcctagctcctagtcctagctatatactcctattatccatccatccatccatcttacactactataccattagcatcgatcgatcatccattaattaattaattaattactagttccggctt

SEQ ID NO: 3318 - DNA, 1268 bp, Oryza sativa
  ref <308>: DATABASE ACCESSION NUMBER: AK104414
  ref <309>: DATABASE ENTRY DATE: 2002-08-28
gtgccaagttgtgtgtgtgtaccgcggcatggcggaccagctcatctccacggcagaccacgacacgctgccgggcaactacgtgcgccccgaggcgcagcgcccgcgcctcgccgacgtgctctccgacgcctccatccccgtcgtcgacctcgccaaccccgaccgcgccaagctcgtctcccaggtcggcgccgcctgccgctcccacggcttcttccaggtgctcaaccatggggtgccagtggagctgacactgtcggtgctggcggtggcgcacgacttcttccggctgccggcggaggagaaggccaagctctactccgacgacccggccaagaagatccgcctctccaccagcttcaacgtccgcaaggagaccgtgcacaactggcgcgactacctccgcctccactgctacccgcttcaccgctacctccctgattggccatccaaccccccttccttcagggagatcataagcacatactgcaaagaagttcgggagctcggattcagactgtacggagcgatatccgagagcctgggcttggaacaggactacatcaagaaggttcttggtgagcaggagcagcatatggcggtgaacttctaccccaagtgcccggagccagagctgacgttcggactgccggcgcacaccgacccgaacgccctcaccatcctcctcatggaccagcaggtggccggcctgcaagttctcaaggaaggcaggtggatcgccgtgaatccacagcccaacgcgctggtgatcaacattggtgatcagctacaggcgctaagcaacggaagatacaagagcgtgtggcaccgtgctgtcgtcaactctgacaaagcgaggatgtccgtcgcatcgttcctgtgcccctgcaacgacgtgctcatcggcccagctcagaagctcatcaccgatggctccccggccgtctaccggaactacacctacgacgagtactacaagaagttctggagcagaaacctcgaccaagaacactgcttggagctcttcagaacaacacctacagacacatcttgaattcttgatctagtcgagaactggtttgtagtactcggttgtaggtgtaggtggtgtttgggagagggggtggtgtttgggagagagcccgacttattgttttgtgagaggatctcccaaacacccccgtagtttctcggttgaagttgtttgtagtactcggttgtaggtgtactggaacgagccgttggaatgagtaatcaatcaaatc

SEQ ID NO: 3319 - DNA, 1144 bp, Oryza sativa
  ref <308>: DATABASE ACCESSION NUMBER: AK061018
  ref <309>: DATABASE ENTRY DATE: 2001-12-06
ctatgcaatctcgaaggatttggtttcttacatattaatcaatcagggtgacatttcaatcctgttccacacaaatatgctaatgaggatgtatcattaggagcttcgcttatcggtctagatgtcagtccaacacatcggcgatgtaggctttgctgtggtactcaaccagtcacagatcacatgcacgatgctgatcctgccacttgccctggtggacgcggtcgtctttgcggccgcgcactgcttcactaagcatatgcgcaagctgcagtgtgctaccgtcaccgtccgcgcgcggtgccaggccgatggccgcctcaccttctgacagctcctcgacctcgtggatgagtcccgcagctgttttgtccccgcatcctgatcgatgtctcgaagatcgacatgtccgcaattgttcttgggttcgagatatcaatgcccgtaatgattgctcccagtgccatgcagaagatggctcaccctgacggagagtatgcaactgccatggcagcttcagcaggaggaactataatgacagtcatcttgggctacttcaagtgttgaggaggtcgcctcaactgggccttgaatctgtttcttccagctatatatgcagccgtacaggtacaggaatgtggttgagcagttcgtcagaagagccgagagagctgggttcaaggcgattgcactgaccgtggacactccgtggctgggacgtagggaggctgacatcaagaacaggtttatatactaatagaacggtgattccaaacaatgcttgctaccacttggttccttgcataattttcaggcggctagacttcaattatgggtaatgcgcctcggttgagcccatagtctggcgtagaactattgccaccaatgtgtatatacaatctttttagaaaatgagataaacctggcctctacatccaaccgaatgtacacgaccaaatgtgtatgtacagtctaccagcctctgtagtcgtattgattttgaaattgtcttatgctatatccgatgtatgtgcctgtttaattatactagcattgttgtacatgaccaaccatatgtacattagaaagtacgaacaagatgtgcacattatccttatcgtcgcgtttgactatagcttttgtc

SEQ ID NO: 3320 - DNA, 1076 bp, Oryza sativa
  ref <308>: DATABASE ACCESSION NUMBER: AK061019
  ref <309>: DATABASE ENTRY DATE: 2001-12-06
aaaaaggccctcgccgagataccaatcgagactagacaggacaggcggacgcgagcgtcgtcctcttcgtttcgcttctcctcctcctcctccgcctccgctctcgcgagatctcctgatcgactcgctccgccatggctggagaagctgatggaaaagccccactgggatcaagatacccccctgctgctctcaacgagcgcatcctttcttccatgtctcaaaaacatgttgctgctcatccatggcacgatctggagataggtccaggagctccagcagttttcaactgtgtggttgaaattcctagaggcagcaaggttaagtatgagttggataaggcaactggtctaattaaggttgatcgtgttctttactcatctgttgtttacccacacaactatggtttcattccacgcacactttgtgaggacggtgaccccatggacgtcctcgtcctgatgcaggaacaagttgtccctggatgtttcctgcgagctcgtgctattgggctcatgcctatgattgatcagggtgagaaagatgacaagatcatagctgtttgtgctgatgaccctgaataccgccacttcagggacatcaaggaaatcccccctcaccgccttcaagagatccgccgcttctttgaagactacaagaagaatgagaacaaagaagttgctgtcaatgagtttctcccagcagaagatgccatcaacgcaatcaagtactcaatggacctctacggcgcctacatcattgagagcttgaggaagtgatctccagctgatcaactgcagaggctacatgattcactgaacagtttctcatcaatagtacgacatatgttaacatacatggtctaaaaccagtacttcggggatatataccttctactattcatgttaagacaagaagcagcaccttttctttccatgtatgccatgtcagatactcgggtcccaagcacctgacccctttgctgaactctctgctgcccaaaccgacagtttgctgaacggttacctaatagaaatcaaccatttacataaaggctcattggaatcctttttgac

SEQ ID NO: 3321 - DNA, 1497 bp, Oryza sativa
  ref <308>: DATABASE ACCESSION NUMBER: AK061020
  ref <309>: DATABASE ENTRY DATE: 2001-12-06
ctgccgctgtggcttcttcttctccaactcgccaagcccaaagccctcgaaggggatctcgccattgatagcccgcaagacatcggggacctccccctcgtaccgcctcacgtacgccttcatgaaccgtgcgaggctggccacgagcacatggggcacgcggtgctgcccctccggcttcccttccctcctcagcacggcgagcaccgcgcacctccgggcgtgggagtccaggctccgcgacagcaggttcgggtacgcgacgatgtcctcgcggcgcagccccgccttgccggtcaagaagccgacggtcctcttcagcctctcctccgagatccccgccgcgttcgggagccgccgcagcatcacggcgatgtcgtccttgccgaagccgaggctgcggtagatcgcgaacttgttctccagcgtgggggccttcagcttggagaaggcggcgaagatgtagacgaacatggggcttcctggctcgacgccggcgtccttgacggcctggacgatctccccggcgcggccggggcccagcaggatgaccccgggctggctggcgacgagcttggacagctcgctgggcgtaaggccgtggacgtcgcggagcacggggagcgtccggaggaaggtggccttggggctgcagcgcatggcgaacggcatctggcggagcgcggtgacgatgcgcgagtcggagccgaggacctcgcggagggaggcgatgagcggggcaaggtgggactcgatgctgcggtggaggatgacggggctgagggagacgacccgggggaggagcggcgccgtgatgccgacggagcggaggtagtcgagcttgggctggagggtccgggcggggtcggacgcgaggatcctggagaacgcccggacggtggcggagatgtcggcgtcggtgaacccgtagcggcggaggagcgcgacgacggcgtcggcgttgctggcgaagtccggagaggcgagggggagccagggcgaggtggcggcggcgcgggcggcggcggcaggggtgaggccacaggaggatatcaggtaggatacgaccttcgggtcggtggtggtggaggcggcggcggcggcggcggagaagaagcggagaggcagcgggaggaggagtaggcggcggcgccggacggcggccaacatcgcggaagctcgcgcctcgcggcgtgggggattgacaggggcaagaccgtaaaaatgaggtttgttaggggtttttgggggctttaggcatgggcttttcactttcgggcctttggttgagtactcgcgggccgtaacacaagcttacacggcccagagtgcaaacgcagggcagcgtaagcactgtctgtcttggcgtttgctccgcgagtttggctgtacccgtcaggccgtcacgcattccatgcattgaaaccagtatcgatgcgtcgtcactcaagatcgccaccctacgtgccacgtacatgcagcgggtgttacacactg

SEQ ID NO: 3322 - DNA, 1111 bp, Oryza sativa
  ref <308>: DATABASE ACCESSION NUMBER: AK061021
  ref <309>: DATABASE ENTRY DATE: 2001-12-06
gaccgcctcccgttccccttccccactccgtcccggcagctacctccgctttccaccacgccggccgatccgcctccccaaccctatcgccggcaggcgcgccacgccaggttccgggctcggagacaccgcacgctccgcccgatgggcacccccgggccggagctcgccgctctcgcgattcgccgcagcggcggctgcctgttcgagcggtagggagggactcgtctccccgcctctccttgtcgtggactcgtggtagcgggggtgggaggagccagagaggctgggggcagggagggaggatgctggggtcgggcctgaatctcgtcagcgcggcgctcggcttcggcatgaccgccgcctttgtcgcgttcgtctgcgcgcggttcgtctgctgccgcgcccgccgcgcggacgctagcgcgtcacggccacacccctcgccggtggacttcgacgcggacttcccctcggatttcgatcgcccgatagagcattcccgcagtgggttggaaccattggctgttgctgcaattcctacaatgaagtataactgtgaagctttccattcggaagatgacacccagtgctccatatgtttaagtgaatacaaggagaaggacattctaagaattgtacctatttgtcatcataactttcacctttactgcttagatgcatggttgctgaagcagactacttgcccaatatgccggatctcattgaaagaactgcctgatggaaaatcgaccgtatcctctgctcctaccatgtctcaaccccccaccctccctgagagttctgttaatccaacatctcatttcctcccagttcatcaagaacacagaagccaccaggatggcccagatatgccagaatctgtagaggtggttattgaaatccgacagtgactacggcggaatagtgcaagacaagaatttgcagtttaaattctttgtacgcccttcattgcattgtttgtcgcagtttcaaaatgtttgaagtcaaaattatatgtggtccctttgcaagttgtagactagagaagtcagtcatacaatccacattatcatatgttctttttaatatatgttgtatattgcaagct

SEQ ID NO: 3323 - DNA, 1478 bp, Oryza sativa
  ref <308>: DATABASE ACCESSION NUMBER: AK061022
  ref <309>: DATABASE ENTRY DATE: 2001-12-06
aatcacttcaccttcttcattcagttcatccaatccacgatcacttcctagcaattaagatcatggtgcagcgcacttcatccgattcggcggcgtcggctgaggccatggtcatggacctgagtcccaagcgtcccgccaagtcctacggcggcgaaggcggctcgtactttgattggtccccctccgagctgcccatgctccgcgccgcctccatcggcgccgccaaactctcgcttgccgccggaggcctcgccctccccttctactccgattcggctaaggtggcctacgtcctccagggcaagggcacctgcgccgttctcctccccgagaccccctccgagaagatcctacccatcaaagagggcgacgcgctcgcccttccattcggcgttgtcacctggtggcacaacctgcacgccgccaccaccgaactcgtcgtcctcttcctcggggacacatccaagggccacaccgccggccgcttcaccaacatgcagctcaccggctccaccggcatcttcaccggcttctccaccgagttcgtcgcccgcgcctgggacctcccgcaggacgccgctgcctccctcgtctccacccagcccggcgccggcatcgtgaagctcaaggatggcttcaggatgcccgagggttgcgacaaggacagggagggcatggtgctcaactgcttggaggcgccgctggacgtggacatcaagaacgggggccgcgtggtggtgctgaacacgcagaacctgccgctggtgaaggaggtggggctgggcgccgacctggtgaggatcgacggccactccatgtgctcgccggggttctcgtgcgactcggcgtaccaggtgacgtacatcgtgcggggcagcgggcgcgtgcaggtggtgggcatcgacgggacgcgcgtgctggagacccgcgccgagggtggctgcctcttcatcgtccccaggttcttcgtcgtctccaagatcgccgacgacaccggcatggagtggttctccatcatcaccactcccaaccccatcttctcccacctcgccgggaggacctccgtctggaaggccatctcccccgccgtgctccaggcctccttcaacaccaccccggagatggagaacctcttccgctccaagaggctcgactccgagatcttcttcgcccccaattcgaattcgatttgatggacaatatccatcctccatctccagcacctgcccacctagcagcatcagcagattcagcttccttccttttatttagatcatgtcagtcgttagatttaattcggttctttggttgttagcatcacctacctcttttatttgataataacaataagctcgagatggagtggaatttgatagtcctatcatgcatatgtcctctttatttttttaaaactctgttttaaagtcaacagccgttcgattcgatctgccatgcatgaacgaactggttttatc

SEQ ID NO: 3324 - DNA, 1096 bp, Oryza sativa
  ref <308>: DATABASE ACCESSION NUMBER: AK061023
  ref <309>: DATABASE ENTRY DATE: 2001-12-06
tgatgcattggctgactcagttggtaatgttgtgattggtggaattatggagcatattgagcaggctggtatccattctggtgattctgcctgttcccttcccactagaacagtctctgcaaagtgtttagatataatccgttcatggaccacaaagctggcaaagcgtctcaacgtctgtgggctcatgaactgccagtatgctattactacttctggtgaggtattccttcttgaggcaaatccccgagcctcacgcactgtcccttttgtctcgaaagcaattggacatccattggcaaaatatgcatctctggtcatgtctggtgtgaccttgccagagcttgggtacactcaggaagttgttcctaagcatgtttctgtcaaggaggcagttcttccatttgagaaattccagggctgcgacattcttctgggaccagagatgcgcagcaccggagaggtgatgggcattgactatgagttttctggtgcattcgcaaaggctcagattgccgctggacagaagctcccattaaatggaactgtcttccttagtctaaatgacctgacgaaacgccaccttgctgaaatcggacgagggttcagggaacttgggttcaacatcattgccacatctggaacagccaaagtacttcagctggagggcatcccagtggagccagttctgaaaatacatgaggggcggccaaatgccagggacatgcttaagaatggtcagatacaggtgatggtgataactagctcaggtgatgctcttgactccaaagatggcctccagctccgcagattggccctggcctacaaggtcccgataattactaccgtggatggggcgcgtgctaccatcgatgctatcaaaagcttgaagaacaaatcaattgagactctcgcattgcaagattacttccagactacagatgcatcccagaacttgcaagcagcgcaaagtgcctcttagggtcatgcccttctattgtcatttttctaatgctattgtagtatcaactatagacttctgttctgtaggattttgtttaccttctgcatgcgcaagcataaacatgttgactgc

SEQ ID NO: 3325 - DNA, 1647 bp, Oryza sativa
  ref <308>: DATABASE ACCESSION NUMBER: AK061024
  ref <309>: DATABASE ENTRY DATE: 2001-12-06
acttgccctcctcactgaaaacagtaaacaggacacggttcagtgaccacacgaggttcacgagtacagtgacgcatacagagacatgggctccatcgcggccgacggcgacaagccgcacgccgtgtgcatgccgttcccggcgcaggggcacgtcacgcccatgctgaagctcgccaagatcctccaccaccgtggcttccacatcaccttcgtcaacaccgagttcaaccaccgccgcctcctccgctcccgcggcgccgccgcgctggacggcctcccggggttccgcttcgccgccatcccggacggcctcccgccgtccgacgccgacgcgacgcaggacgtgcccccgctctgccgctccaccagggagacgtgcctccctcacttcagccgcctcctcgccgacctcaacgccaacgcctcccccgagtccccgcccgtcacgtgcgtcgtcgccgacgacgtcatgagcttcgccgtcgacgccgccagggagttccgcgtgccgtgcgcgctcttctggacggccagcgtctgcggctacatgggctaccgctactaccgttccttcctcgacaagggcatcttcccgctcaaagaggagcagctgacgaacgggttcttggacgcgccggtggactggacgccggggatgagcaagcacctgcggctcaaggacttcccgtcgttcttccgcgcgacggaccccgacgagtacatgttccacttcgcgctccacgtgacggagcggctggcggaggcggacgccgccgtactcaacaccttcgacgagctcgagccggaggcgctcgacgcgatgcgcgcgatgctgccgccgtcggtgtccatccacaccatcggcccgctcgggttcctcgccgagcaggtcgttcccaaggggagccccctcgacgcgctgggctccaacctgtggaaggaggacgactcctgcttcggctggctcgacggcaagccgccccggtcggtggtgttcgttaactacggcagcgtcacggtgatgacgaacgaggagctggttgagttcgcgtgggggctcgccaacagcggccacgacttcctgtggatcgtccgccccgacctcatccacggcgatgccgccgtgctgccgccggagttcatggagtccgtcggggggcgcggcctgctggcgagctggtgcccgcaggaggcggtgctgcggcacgaggcggtgggcgtgttcctgacgcactccggctggaactcgacggtggagagcctctgcggcggggtgccgatgctgtgctggccgttcttcgcggagcagcagaccaaccgccggtacagctgcaccgagtggggcgtcgccatggagatcgacgacgacgtgcggcgcgacgcggtggaggccaagatacgggaggcgatgggaggagacaagggccgggagatgcgccgccgggcgggcgagtggaaggagaccggcctccgcgcgacgcgccccggcggccgcgcgcacgccagcctcgacgcgctggtcgccgacgtcctcctctccggtggcaaggctcggtaggacaacgtgcactagtgccgcctgttgcatgctactccctccctcccataatacaagagattttgagtttttgcttgtaacgtttt

SEQ ID NO: 3326 - DNA, 1174 bp, Oryza sativa
  ref <308>: DATABASE ACCESSION NUMBER: AK104415
  ref <309>: DATABASE ENTRY DATE: 2002-08-28
aactgcatttgcccttcaatagtcgaatccctttcccctcgcctccacgaacaagcgaaagtaaacgcgacggagaagaaccttccccacgttgggttggattggtcaaggcggcaacgaaccgaaggaaggaagggaagcatctgggctacaggtccacgcgatcgattgttcgatcgatctcggattgatcgctttgtgattgtgattaatctcgcggcgacatggcgacgtcgtgggctgcgccgccgccggggtacccgtacgcgcagggtcagggcggcgcccagccgccgcacccgccgcagtccacggccgtcgccgtcactccggtcagcaacggcgtggggaacccctacgtgatcgtcaccccggccagcgcgtccccctccacctgccagtcactaaggaaggcgctggagcggtacggcaggaagctggaggacggcacccgcaaggccgccgacaccaccggcaacatctggcaccaccttcggacggcgccgaacatggcggacgcggcggtggcgaggctggcgcaggggacgaaggtgtacgcggagggcggccacgacagggtgttcacgcaggcgttcggcgtcgtgccgggggagcagctgcgcaaggcctacgcgtgctacctctccacctcctccggccccgtcatcggcacgctctacatctccacggcccgcctcgccttctgcagtgacagccccatatcctaccacgcccccgccgtcgctgtcgccggcgccgccccagctcaccctcctgaggccatctacaaggtagtgcttcccctgaaccaagtgaaatcggtgaacccatccgccagcatgacgaacaggggcgagaggtacatccagatcatgacgacggacaaccacgagttctggttcatggggttcgtctcctacgacaaggcgctcaagaatctctacgaagccctgcagcgccgtgcgtgatcgtcgcccacggccaccgcagctaagcttcactctgatcctaatatacatatctgccgatttatattccattggtgaacttgtaagcttcagatcttgctctggaataagtgtgacacatcactaaaacaaaatctgatgccgtgtgcccgcgtgtatgatctgtaattcgctcatcagtgtagaatgtgctgaattcacttgtt

SEQ ID NO: 3327 - DNA, 1080 bp, Oryza sativa
  ref <308>: DATABASE ACCESSION NUMBER: AK061025
  ref <309>: DATABASE ENTRY DATE: 2001-12-06
aatctatgcgggcatcatctctcttcgcggaatcggtgttcactacatctgctgctgctggtcgtcgtcgttgtcctcgtctcgccgccgttcccgttaccctcttcttctccaccggtcgcggctcgccggcgatggccgaggaggcgcagcagccacgcggcgtgaaggtgggcggcatccacgacgcgccggccgggcgcgagaacgacctcaccaccgtcgagctcgcccggttcgccgtcgccgagcacaacagcaaggccgtaagatttaagaacacccgcccccctttcttttttccccttgttaattgcgtggatcgccgtgtggattgtggtaaaaatataaaatacaataagggcatgtttagtttccacgtaaaaattttacaataaagtattaaatataaagtattaaatataggctaaaagaataattaattatatagattgcgattaatttatgagacgaatcttttaagtctaattgcttcatgattcgtccatgtgaccgtaaatatctactaatgactgattaattaggcttaataaattctggtttactgacgtattttataattagttttttttagtgcccgaacacctcatgcgataccttacataatacttgatgtgatatgctaaaattttacacccttaacctaagcaccccctaagctaattgcagaacgcgatgttggagttggagagggtggtgaaggtgaggcagcaggtggtgggcgggttcatgcactacctcaccgtcgaggtgaaggaacccggcggcgccaataagctgtacgaggccaaggtgtgggagagggcgtgggagaacttcaagcagctccaggatttcaagcccctcgacgacgccaccgcctaaacgtacatagatcatcgtccggctgctgaatcatcggcttaaagcagagccatccagtgatccaattatctgctactagaacatgttactggtcttgctggaaggtgtaatatgatgaataaaacctgctgctttgccgggtcataatagacatatcacttctgtatttcctagtgcaatacacaacattttcgc

SEQ ID NO: 3328 - DNA, 1248 bp, Oryza sativa
  ref <308>: DATABASE ACCESSION NUMBER: AK061026
  ref <309>: DATABASE ENTRY DATE: 2001-12-06
aatgcaaatcagtgacaacaactaactaagatgacctcacagcaattaggctactgctgggtcctcctaattgccttgctatcgtgcagcgcagccactgccagcgaggtcccggcgatcatcgtgttcggggactcgacggtcgacgccggcaacaacaactacatcctcaccgtcgccaagggcaatttcccgccttatggtcgcgacttcgacggcggcgtcgccaccggccgcttctccaatggccgccttgtcaccgacttcgtgtcggaggcgctggggctgccgtcctctgtgccggcctatctcgactccacctacaccattgatcagcttgctactggtgtcagctttgctccaggcggcaccgggctcgatagtctcactgccagagttgtatccgtgataccactgagccagcagctggaatacttcaaggaatacatagaaaagctaaagcaagccaagggcgaagatgtcgcgaacgagatcatcaccgaagcgctctacgtcttcagtatcggcaccaacgatttcatcatcaactactttaatctgcctctccggcgcgcagtctacaccacggcggagtacaccgcttacctcgttggcgaggctgcagccgccgtccgcgacacccacgagctcggtgcccacaagatcatatttgccgggctcgcgccgatcgggtgcttgccatcggcgaggacgctgaaccacgatgcgccgggggagtgcaacgaagagcacagccaggtggcggtggcattcaacaccgcactgacggaggccatcggcaagctcaacgacgagctcaccggattaagggtggtatattcagatacttacagtgttttgtccgccatcctgtccaacccgtcatactacgggtttgtgaatatagctcaaggttgctgtggcacaggacttattgagacatccgtcctttgcggcttcaacgatcatttgacatgtcaagatgctaattcttatgtgttcttcgattcagtccatccgtcggagagaacatatcagattatagctaacaaaatcattaatacagatcttaaattagtactatgatatgtatgttccgagtttacatgtaatgataattgaaatctatactgagatataagctagttgaactttactacagccatccacgaaaaagtgtacgcgatcattcctgaccatctgatctcaagattcaatggccaaaatcgattccatgctcttctggtg

SEQ ID NO: 3329 - DNA, 1115 bp, Oryza sativa
  ref <308>: DATABASE ACCESSION NUMBER: AK061027
  ref <309>: DATABASE ENTRY DATE: 2001-12-06
agcagccacagtttggggataatccgattctctactccccaagtgactcactcaccgatggcgcctcctcctatctcctcctccctctcgctcatggcctccaacccaatcccgtcgcctccggtcgccaaaccgggcaggccgctcaccgtcgcggcgtgcagcaacagcagcagcagctcctcctcctcctccccgtcgtcgacctcgtgctcggctgcctggagtctcccggtggcgacgtcggccggcaggagggggctgctcgcgctgggcgcggggttcctggcttcccctgggcttctgtgccccgccggcgacgccggagcgacgcgcatcgagtactacgcgacggtgggggacaagctgtgcgacatgaacgtcgtcaagtcggggctcggctactgcgacgtcgaagtcggcaccggcgcccagcccccgcgcggccagctcataaatgtacactacactgcaagatttactgacgggatagtgttcgacagcacctacaagcgaggacggccactgacaatgcgccttggcgcaggcaagatcctccgagggcttgaacagggaatcagtggtggcggtggtgtgccacccatgctcgttggtggaaagcgcaagcttatgatacctgcaactttggcatacggacctgaaccagcaggttgcttctcaggagactgtaatattcccggcaacaccacactcctatacgacatcttcctggttggattttacaagtgagcatatgatgaaaaggaatatgcatgacttgaacagactaggtgcaaacaagattttcgagtaaattttggcgtttcatacaagaggcgggactacggacagatgaagagaaagggtgcgacatgcctaagcccagacgccgaaagcaaatgcgtcaccggagctccttgggtctccaatacgcagagtactacatttgcaatctgtaccaagaagtgaaaggatatataacaaaccggtcctctgatatactatcaaattggtcttatgttttctagagaagaaaagtcttgtgtttgtgtaagtataacgttgtaaagacatgtctcattattcatactgtcattggtacagccaaacacaac

SEQ ID NO: 3330 - DNA, 1177 bp, Oryza sativa
  ref <308>: DATABASE ACCESSION NUMBER: AK104416
  ref <309>: DATABASE ENTRY DATE: 2002-08-28
aaaaacgtacccttgtgactacacccgcttcgcttcctcccctctctaagccggggaagctaagccatggcgtccgtcaccgcccgcaccccggtcgcagccctccgctcgtcggcgtcgctcaagtctaccttcctagggcaatcctccacccgcctcgcccgcgcaccgactacgaggcgtaatgttcgggcggaggccaagggagagtggctccccggcctcccttctcccacctacctcaacggcagcttgccaggcgataacgggttcgacccgttgggtctggcggaggacccggagaacctgcggtggttcgtgcaggcggagctggtgaacgggcggtgggcgatgctgggggtggccgggatgctgctgcctgaggtgctgacgaagatcgggttgatcgacgcgccgcagtggtacgacgccggcaaggccacctacttcgcgtcgtcgtcgacgctgttcgtcatcgagttcatcctgttccactacgtggagatccggcggtggcaggacatcaagaaccctggctgcgtcaaccaggaccccatcttcaagagctacagcctcccgccgcacgagtgcggctaccccggcagcgtcttcaaccccctcaacttcgagcccaccctcgaggccaaggagaaggagctcgccaacgggaggctggcgatgctggcgttcttggggttcctggtgcagcacaacgtgacgcagaaggggcccttcgacaacctgctgcagcacctgtctgacccgtggcacaacaccatcatccagacgctgtcaggctgagcgtgtgatcgatttcatcagggccagggcatctcaaggagcttgatgagttcaggctggtgaaaccgatgattgggcgatggaagatgttctcttcttgtttcttcttttttttttgtggagtatgcatgtataagatgttaatgaattggggggaggagagagagagagatggatgtgatgagattcagacttactgtgtgtgttgtggtaattgtttcctgcatgcatggatctggatgcatgggtgagggggtgagttgagtggtgaatttctgatgtacagtactacagggggataaactatctcatggtagcagcagtgttctagctatctcatggtctcgatcttaattatggtggataaactacgctt

SEQ ID NO: 3331 - DNA, 1447 bp, Oryza sativa
  ref <308>: DATABASE ACCESSION NUMBER: AK061028
  ref <309>: DATABASE ENTRY DATE: 2001-12-06
ctagcagcctcgctctcgcctccctcgtctcctcgacgcgatgccgccttcgccctctctcaaaccctagcctccgcctccgcctttccctcccctccccgtcgcgggcgcctccgccgccgcgtcccccgtccccgtccccatccccatcctccgtccgctagcgccgccgctccgtccttcccatccagatcgcgccaccccgtccgcccgcgcgtcgtacgcctccaccagctgccggtcctccgcctcccggtcaagatccggcaccgcgccgctttcctccgtcgccgccatcctccgtcgcctccgcctcccgttcgagatctgcagccccttctctgcacgtcggtttctgcgctgccgccaagaaggtttcaattttggtaggaacaccatctcaagtgcttatttagcagatatttgcttgtggcgagacagaaattggccctgtttgtgcaactaattcctttcttctgtaaccaagacagttcgcatttggcaagagagcgagggtggaaaatataattgcatccacacattgaaagatcatactgctgaggatattccgccattcgccaccatggctaacatcagaaccgtctccagcctcggggaggtcaacggtgccctgcaagagatgggtatcaatacgattgatcaagctcatcaagttcaatttcgtttacacaagcaaacatcccttaaagaagcaacagaaataaagatgatgatccaaactggaaggcatggattcagacgatcagattccacatattggacctgaagttcaccacaggaaccgtggagtgcaacaaatgctctacccaaaccctccattcccgatcgatcctgattatgagtttggtactccgcaacaacgagtcccatatcaagcggcatacactacagatgcagagagaaatgacgcagtttctcgtgacaagcgtgctcagagggcggtttggaatactaatctccgtcttctagaggtgaagaaatccgccctggagaagaagaagactgagctggagagacgtctgaaggcggagttcaagaaagtgaatgagcagcaatctgacttgggggttggatatgcgaactaccagtctccttaccaggcataaagaggagcatccgtggtgctgaggttggtcaggttgcacagacgaagatggtggtggcatgccattgccgggcgctcatggaacctgtggggcatgtggcatgccattgccgggcgctcatggaacctgtggggcaaacatgccccatcaagccactagctagtgtcatgcttgctacccaaccattgcaatatggtgttggctataattcttcttgtcacatcccacaagtttggatgataaataaaacttgggaaatgatgtacgaactaaaatgaacaagtacttttgcttataattttaaacttgtatgtttgtgc

SEQ ID NO: 3332 - DNA, 982 bp, Oryza sativa
  ref <308>: DATABASE ACCESSION NUMBER: AK061029
  ref <309>: DATABASE ENTRY DATE: 2001-12-06
atcacccaacgataaacacaacctgttagctagctagcttctcagccaccagagaaacagcaaataattcagtagagaagagaacagaaaaccaaagccaaatggcttcaccatcttccttctgcctcctcgctgttcttcttgcgttggtctcgtggcaggccatcgcttctgatcctagccctctgcaggacttctgcgttgccgataagcactcacctgtgcttgttaatggatttgcttgcctggacccaaagtacgtgaatgcagaccacttcttcaaggcagccatgctcgacactcctagaaaaacaaacaaggttggatcaaatgtcacactgatcaacgtcatgcagatccctggacttaatacactcggcatctcaattgcacgcatcgactacgcacccttgggtgagaacccaccgcacacacacccccgtgcaactgagatcctcacagtccttgagggaaccctctatgtcggctttgtcacatctaatccaaacaacacactattctccaaggtgctcaacaagggtgatgtgtttgttttccctgaggggctcatccacttccaattcaaccctaacccccatcagcctgcggttgcacttgctgcacttagcagccaaaaccctggggctattaccattgcaaatgcagtgttcggatcaaagccaccgatctcagatgatattttggcaaaggcattccaggttgagaagggcaccattgattggctccaggctcagttttgggagaacaaccactactaaatctaaacaaagtatatgtgttgttatactatgtataagtttctattctgcaatatataaaataaatttgtatttctagtcggcttaattatgtgtgcttgcaagcacatcaacaatacattattttgttgggaaaaggctttgtatgttgttctagtgtggtatcccctgttataaaggtaataaaggaaaacattggtatt

SEQ ID NO: 3333 - DNA, 1111 bp, Oryza sativa
  ref <308>: DATABASE ACCESSION NUMBER: AK061030
  ref <309>: DATABASE ENTRY DATE: 2001-12-06
gaaacctcgcccttcgtctccgcctccgtcgcctccatctcgccgcgatccctctccccggcgatggccgccgccctccgctcctcctgcgccgccgcgcgccgtctgctccggatctccccggccgcgctgtccaccctcaccgccgcctcctcccgccccgccgcggtggcgcccctcgcgcgcccgatcgccgccgccgccgtctcaggtggcaacaatgccttttcatggaacttgaggcgcttgttcagctcaaatgaaaagcatctgccggcgatatctgacccagaagttgaatctgcgtttaaggatttgatggctgctagctggactggacttccagattctcttgtaattgaagcaaagaaagctgcatccaaagctacggatgataaggctgggaaagaggctttgctaaatgtatttcgtgcagctgaggcatgtgaagaatttggtggagttctagtcaccctaagaagggctctagatgatctttgtggtataactggtgagaatgtgggccccttgcctggttatatagaagatgctgttaaatctgcatataagcgttacatgaaatatctggaatcatttggcccggaggaaaattatctacgtaagaaagtggagaatgagttggggactaaaatgatacacctgaaaatgcggtgcagtggtgtagggtccgagtggggaaagatcaccctgattggcacctcaggcatctcaggatcctatgtcgagctaagggcatgaggaaagtctgcagatcataaccatggcagaacatcgttttctgagggaaggatgcatatcagaacaaggtgttccgtttctcttttcttcttactgtgtagctaccttgccaataacaaggagatcatcaaacagatgtgcacttaaagtaattcagtgtgctccagaccttcctgctgtaataagaacgtgtttctggggttcacgtcgatttgtttttgctccagtcatggtggtgcgtgaagcatgtagattcagttgattccttgcatgagccgtgaattgtttgttcaagctcctactctgtatggctctattgaactcagaagtagcttaatcggtgttcagattc

SEQ ID NO: 3334 - DNA, 1053 bp, Oryza sativa
  ref <308>: DATABASE ACCESSION NUMBER: AK061031
  ref <309>: DATABASE ENTRY DATE: 2001-12-06
aattgtgcacaaagcaagaaactcaagtagctacctcctctcctaatctatatacgctcatcagcttatgtgcactccagataccgacctagcagcttgctatctagagtatatatcaactcaactcaaggaggagaagaagaagaagaagaagaagtgagccatgaaggatggagtagcaggaggaggaggcgagaggccatgcatgtgctacttccacccgcgggaggaggtggtgggcgtgtgctcgcaatgcctccgggagcgcctcctcctcctcctcgcctccaagacctcgcctgccgctgcccacctcctcgccgaccgaccgctccaccgcaagaacagcagcatctctctccccaaggtgttcgcgctcggctcctccttcctccagcgcctcgactcctctcgccaccaccttcgccccgccccccacgactccgacgccaactccgacgccgacaccgcctccatcgctagcctcgatgattccttcatctccatcaagttcgaggacaacggcaaggctacgtgggacagccagaaggccgccgccggcgagaaaaagacagatacgacgaccacggcggtggtggagcacgtgaagcggggcggcgtaacccggtggcggaagcaggtggtggggcggctgctgcagctggcgcggtggaagaggtccggcaacggcaaggcggcggcgtgccaccagctggggatcgacggcaagaagacggcggagcggtcgtcgtccaaggggacgacggtgagggggagggggagggggaggagctggatccggaccctcaccatcaccaggcgcccacccgccatgcctctcagctaggagtagcttcttacctccctcactctcttcacgtactcttaatctcgtcggattgctctgaatatagtaatactcttcatttgtttactgtaactacatgcatattactacctagtactccgtagtagtatatgatatgatatccacggaggatcggattggaggtacatgtatatggactgacgaatgaatcacagctagcagac

SEQ ID NO: 3335 - DNA, 1047 bp, Oryza sativa
  ref <308>: DATABASE ACCESSION NUMBER: AK061032
  ref <309>: DATABASE ENTRY DATE: 2001-12-06
aagaaaacgcggccgcgcgggaggaggaggatggaggagaagaggcagcggctggtgatctctctctcggcgctctgcctcgccgtcgccgtgatgtccgggttcgactactacgtgctggcgctgcagtggccgggcaccgtctgccgccagaccagccattgctgcagctccaatggctgctgccgctcacatccgctcaaattcttcacgatccatgggctgtggccgcagtacagctatgggggatggccatcctgctgcaggccaaccacattcgacggcaacaaggtggctgccaaccacccatcttatcttcagaatgggatattgatctcgaggttgaagacgatactcgaggagtactggccgtccttgtactgcggctctttctcaacctgctttggtgggaaaaggccattttgggtgcatgagtgggaaactcatggaacatgtggttaccctgaaatacaggatgaatacgactacttctctacagcactgtacctttacagcaaatataatgtgacgaaagctctgaagaaagcacatatttatcctagaggaggcaggaaatacttagttggtcatatcgtctctgctattgaattttcctttggggcaatgccatctattgtgtgtaaaaacggctcagttcaagaactgaggctctgcttccacaaggattatcagcctcgcgattgcttagttgagggtgagaactctgttagaagaaaccattgccctcgatacgtcactttaccatcatataaaccacacgcatttggcaattctacagaaggaatcagtaaccaagtcaacgttgagcaccaatcatatcagtagatctcacatctcactgtgagtattctacaatataaacacggctctgatgactcaggaatgagatgtacagcaagaaacccactaggcacacatacagtaacgtctgcatctgtaattctataatgcaattcaattgattataaagcaactgaaaatcccatgctgagttatgcagaacttttactgcatctcagtttctgt

SEQ ID NO: 3336 - DNA, 1019 bp, Oryza sativa
  ref <308>: DATABASE ACCESSION NUMBER: AK061033
  ref <309>: DATABASE ENTRY DATE: 2001-12-06
taactcgacggatcgcacggccctcgtgccggcgacgcatcattcaaatttctgccctatcaactttcgatggtaggataggggcctaccatggtggtgacgggtgacggagaattagggttcgattccggagagggagcctgagaaacggctaccacatccaaggaaggcagcaggcgcgcaaattacccaatcctgacacggggaggtagtgacaataaataacaataccagacgctctgccagaacatcgccgccgccaagaacgccaagaagtcctctgtctccgcctccgccgccgcaacatcctccgcgcccaccagcaactgctcgtcgccgtcctccgacgacgcgtcgtcctgcctggagtccgccgactcgtcgccctccctgtcgccgtcctccgccgccaccacggccgagacgccggcgaccgtgccggagatgcagcagctcgacttcagcgaggcgccgtgggacgaggccgccgccttcgccctcaccaagtacccgtcctacgagatcgactgggactccctcctcgccgccaattaacaccaccaccacttcttggctagtactcacgccgtcgttagcctaatcgtcgccgccgccgccgccgtgcagatgggattttagacattctgcaccgcacggacgggcatggattagcagttttatagtccctaatccttttggtttggttcgtttgtgtacgtagatcgatctctctccggacttgtttcctctgtagatgctagggttggttggtgttcttcctcaaccggagacgccgatgctaccggcagccggcgtttttgtgtccggcgtgcgtctccggtggccggtcactggtcggttactccggccgtggcgtccattgctcttctaaagtctgttattaccttctactgctgatcttacaggttgtaaacagtagtagtagcattattattattattatgtcttgtaatattattagcgtgttataagaacttgtaatgtgaattacctctact

SEQ ID NO: 3337 - DNA, 1035 bp, Oryza sativa
  ref <308>: DATABASE ACCESSION NUMBER: AK104417
  ref <309>: DATABASE ENTRY DATE: 2002-08-28
aaaaccccgaatccaatataaatcgcagcgttccccgtccctctctctcctttcctcctccctccgccgccgccgccgccgccgccgccgcctccgcctcctctttgtttctcctcttaggggctagggcttggctttcgagaggcagcaccgccgccggggcaatcgagcaggcggaggggaggagctaatcaaatcaagtcaaatcgaatcaaatcaaattcaaattcaaattcgactagggcagcaggaggaggatggtttccctgtcgacgtggtttcgctacgccgcgcacaagttcgagtactccatctccctctcatggaagaagtataacgttggccagatcaacagcacccagttaaccgatgccgtctggaagaacttcttccaaggcaagctcacctacatgcattggaacaaggggggagaagccatggcccccatcgaatctactacgggaggaaccctccttgttagaaagctcgtcaatttgtctccaacacaagtctttgttggtgatgttgtcttactaaaagacccagagaaatctgatgatttaatcgttcgacgattggctgccctagaaggttatgagatggtctctaatgatgagaaggatgagccgtttgtacttgacaaggatcaatgctgggttctggcagacaaccaatcactaaagccaaaggaagctagggatagccgcttgtttggaccagtccctatgactgatatccttggcagagtgatatactctttaagaacggctgtcgaccatggcccagtggagaacagccgaatggccatgaaccaggattcaccagttctggcagtagagcttgatgtggaagagatggcgaagaataataaagtgtagataattagtgcttttgacgtgctgtggtgtaacttttcccttcgatggattttgttattcgagagattagttgcttcaagtagaacattattctgaacttgttcactatttactcgtggagaagtcaataatcataagaataaccatacgggttgct

SEQ ID NO: 3338 - DNA, 919 bp, Oryza sativa
  ref <308>: DATABASE ACCESSION NUMBER: AK061034
  ref <309>: DATABASE ENTRY DATE: 2001-12-06
acctaccgcacttctactcgcgccgccccccaaacacaccaccacccaacactatcggaattggttcgggagcaggtcaagcaggaggcatggcggcggcggcggcggcgaagatagcgccgtcgatgctctcgtcggacttcgccaacctcgccgcggaggccgaccgcatggtccgcctcggcgccgactggctccacatggacatcatggacgggcactttgttcctaatcttactattggagctccagtgattcagagcttgaggaagcacaccaaggcatatttggactgccatcttatggtgaccaatccttcggattatgtagaaccattagcaaaagctggtgcctcaggtttcacattccatatagaagtatccagagacaattggcaagaactcatccaaagtatcaaagcaaagggtatgcgaccgggtgtatcattgaggccaggcactcctgtggaggaagtttttcccctggtggaggcagaaatgatggaaaaggtgcgtgccctgagaaagaagtacccatcccttgacatcgaggttgatggtggtctgggtccttccaccattgatgtggctgcatctgctggggctaactgcattgtcgctggaagctcaatatttggagcagctgaaccaggagaggtcatatcggcactaaggaagagcgttgaaggatctcagaacaaaagctgatctgtggttttgtactcggtttctattgtaaactagggccactctgcacgtcttctttacagagatccccagattgcactacgtgagctgttgagagataataaaatgtgcccttggcagttggcactgattccagtgttactaaatgttaaaactcttgggtccgtttttgatggacaagtcacaagtaaagcttaatgatactttgcatg

SEQ ID NO: 3339 - DNA, 1138 bp, Oryza sativa
  ref <308>: DATABASE ACCESSION NUMBER: AK061035
  ref <309>: DATABASE ENTRY DATE: 2001-12-06
gtgctggaaatttcctaatatcccctacttccgatctcaacgccggcatcgtctcgccgtgaactcgccaagacctccgccgccgccgccgcctcatctcccaagctcctccgcggccgcgtgacgggaagcggagcgggaaaaggaggatccatccgtccggtacacgagctcctcgtcgacgccgccgggggagggagggagggggaggatgatccttccgctggcgaagctggggacgctggcgctgaagacgatgtcgaagccgatcgccatccgcctcaagacggaggccagccgccaccctcagttccgccagctcatcatcaacctcgcccagacaaatcatcgggtctccacaaatatccagagaagaatatatggccattcaactaaggttgagattcggcctttgaacgaggagaaagctgttcaagctgctgctgatcttattggggagctctttgttttctcggttgctggggctgctgtaatctttgaggtgcaaagaagcgcaaggtccgaggcccgaaaagaggaggctcgtagaaacgaagttgaggcgttgaggcaaaaggaggatcagttggctcgggagatagagattgtgaagcagaaacttggcgagatagagcgccaagctaattctcgaggtctctctggagttcttttcagaagcagcagtgctccagaccaaacaaaggcctcatgagtttgattaactaggacaaaggcaagacttcaatggcagcatcacaaccaagttaatcgattactgtcctgcattgcttgtgatattgcacatggatgtgcagatttttgaagcacacatcttgtagcttgtgtttttcctgccaatcaccatgggaatgggcccatagcttgaggtttcgaacaacttgtcgtatttgaggctattttaactcgaaagcgttggagagcagttccaagaagggaacatctggcaagtgcaaagcagaattgtgctatgtgtgtgttgtctggcaattctcgcgagttgtcaacttgcatcataagataactgtatgccatgaacttgtcaacatgggaagcagattgctgccaaagtacttctggtttgtaactcgatcatgttcatatcagtgtattacaaggt

SEQ ID NO: 3340 - DNA, 1297 bp, Oryza sativa
  ref <308>: DATABASE ACCESSION NUMBER: AK104418
  ref <309>: DATABASE ENTRY DATE: 2002-08-28
gaagaggaggcagttgctcgtttttgtgtgtgagagaggggagaggccggcggcgatggggaggacgctggacgtgttgctggggcggacgacgaagcagacggcgaggctcaagtcgatgctggggctggcggtgacgcggctcggcgtgctgcgcgggcacaggcaggtgcggtgcgcgcaggcgcgcggcgacgtggagcagctgctccgcctcggccaccccgaccgcgccctgctccgcgccgagcaggtcatccgcgagcagaacacgctcgacgccttcctcatgctcgagtcctactgcaatctcatcaccgagcgcgccgccctcgtggactcgcacagggagtgtcccgaggagctgcgtgaggcggcagcgggtttgatctacgcggcggcgaggtgcggtgacgtgccggagctgcaggaggtgaagcgcctcatggcggccaagttcggcagggagttcgtctcctccgcggccgagctccgcagcggctgcgggatcaatgccaagatcgtgcagaagctgtcgaccaagcagccgagcctggagagcaggcagatggtgctccaggagatcgcggcggagaaagggatcgccggcgtcgtggtgcacgtcgtccacgagccttcttcccacgacgaggactcgggcctcagccacaggaggcggcggtgcgacggcgagaggcggcacagggtccatcaaccccaggtcgacctggaggaggacggctcttcgaggtacaggaacgtggaggccgcggcgcaggccgcgttcgagtcggcggccaccgcagcggccgccgcgaaggccgccatggagctctcgcgaggcgaatccgggggccgcgacgacgacaggagacggccgggaggcgcgcagttcgacagggccgacgaagagacgctcgccggcggcgaggtttcgggtgatggcaagaaatctggcaggatcagacgtgccagcctcggccggaactacagttcagagatcgaggattcagctgaggatgatgaagtggtccgccatgagatcactgcagagagcgaggtgaaaccgcggggtctgaccaggagcgtgccggtatcagtcagaacaaagagggtgagttagctgcaaccagatggcaacaagagtgatgggagatgatttcttgaattcgtgatattagcagctgctattatatttttgcagattcatcgttcgttagatcctaggcctgtaggccattgcatgcatgtaattaaatggagccaaacaaaaaaaaaggaaaaaaaaacttgattc

SEQ ID NO: 3341 - DNA, 1070 bp, Oryza sativa
  ref <308>: DATABASE ACCESSION NUMBER: AK061036
  ref <309>: DATABASE ENTRY DATE: 2001-12-06
acgatgtcataatatccatatccgaaatgaccaagcatgaccacgaacacccgctctcccatatctcgtctttcacatagtttcatcttctcctatccacaggtataccttagcgttccattcagagatttggcatgttctcttccatgcactgctgcctcccttgatgtgcagcaggagctgttcatctttactcctttaggagttcttcagattgatcagaggcagtagccagcccattagacaaggttacgcattcaggcgccatggccacctcctcctcgccgctcacagccctatactcctcgttcctctcatatactccttccacgccatccatggcggcgctgccccggcggcgaagggccggctgccgctaccctcgtatccaggccgtcgatctcgaccagaacacgatcgtggcgatatcggtcggcgtcgtcagcgttgccatcggcatcggtatcccggtgttctacgagacacagatcgacaatgccgcgaagagggataacacacagccgtgcttcccctgcagtggctctggggcacaggtgtgcaggttttgcaccgggaagggaacagttactgtagtgatcggcggaggcgagactgaagtatcaaactgtgtcaactgcgatggggttggctcgttgacatgcaccacatgtcaaggctctggaattcaaccacgctatcttgaccgcagggaattcaaggatgacgactaagggttttgttattgctaatgatggtatgccatattattgtctgatctgacaacgccataatctggagaggtgcacatttgagaattgatctgatagttttgtgttgtattatatgtccatttttggtaaatatgtatgtatgtcttctgaagcgtctgaaaaaaatggaggccctttataattccagcagagaaaaatggctgttctccagtggacaatgccgatgactcaagttgtagtgttaaacattctgcaaggtactgtctgttttgacatgtctttatgagtgttagcctacaacaatagtgcaatacaaccttttgatgccttctttttttt

SEQ ID NO: 3342 - DNA, 1151 bp, Oryza sativa
  ref <308>: DATABASE ACCESSION NUMBER: AK104419
  ref <309>: DATABASE ENTRY DATE: 2002-08-28
gactccgttttaaccgccttcgccgccgccgccgcgatatcgatcccctccctctcgccgtcgacgccgtcggcatccatggcgccagggctctacaccgacatcggcaagaagaccagagatctgctttacagggactacgggacgcaccacaagttcaccctcaccacctgcacccccgagggcgtcactatcacagctgcaggaacaaggaaaaatgagtctgtctttggtgagctccaaacccagcttaagaacaagaaattgactgttgatgtcaaagcaaactcagagtccgatcttttaacaacagtcacggttgatgagtttggaactccagggttgaaatcaattcttagtttggtagttccagaccagaggtcagggaagcttgaactccagtaccttcatgaatatgctggcatcaatgcaagtgttggcctgaattccaatcctatggttaacctttctggtgtctttggaagcaaagagctctcagttggtgttgatgttgcattcgacactgcgactagcaatttcaccaagtacaatgctgcattgagtctaaccaattcagaccttattgcttctctgcatctgaacaatcatggtgataccttgattgcatcctactaccacctggtaaagcaccattcgaacactgccgtaggagctgagctgtcccacagcttctcaaggaatgagagcacactgatctttgggtcccagcactcattggaccctcacacgacagtgaaggctcgcttcaacaactatggcatggccagcgcgctcgtccagcatgaatggcgtcccaaatcgctaatcaccatctctggtgaggttgacaccaaggcaattgagaagagcacgaaagttggcttgtccttggtgctcaagcattgagtatgttttgcatcctaggaatttttcttcagttcttgtggattggaataacatggaaaaaacatggccacagctaccattgtggcttcattttgatcttgagttctttccccaccattaccctaggcaaacattagcattggctatatatttttatcctcggcgcctgttgttaataattttgggtgatttgagacctattgctgaatactgtcaaatatgatggagatatctctgtgttccac

SEQ ID NO: 3343 - DNA, 1241 bp, Oryza sativa
  ref <308>: DATABASE ACCESSION NUMBER: AK061037
  ref <309>: DATABASE ENTRY DATE: 2001-12-06
accaccacacccctcgtctccgcaaactcgacgcgccactcgacagcgaccccgcagccgatccatcccgccgccgaagcagcagcaaccgccacggtgcgccgccgccgccggtaccgatgtcgacgagctccggcgccgactcgtccccgcccgtctcgggcctcgactacgacgacaccgccctcaccctcgccctccccggctcctcctcctcctcctcctccaccgccgaccccgaacgcaagcgcgccgcccacgccgaccacgccgacgccaagccgccttccccaaaggcgcgggcggtggggtggccgccggtgagggcgtacaggcggaacgcgctgcgggaggactccgcgagggcgaagctggtcaaggtggccgtggacggcgcgccgtacctgcgcaaggtggacctcgcggcgcacgccggctacgcgcccctcctccgcgcgctccacggcatgttcgcctcctgcctcgccgtccgcggcggcggcggcggcgacggcgagggtacaaagctcgtcgacttggtcaccggcgccgagtacgtgcccacctacgaggacaaggacggcgactggatgctcgtcggcgacgtcccctggaagtaagcaacgcgtgtacacatctcaatcagttcttgccgattaattcaccgaaatcaaatgcaaaatctgatccgatcaatcaacacaggatgttcgtcgagtcctgcaagcggatccgtctcatgaagagctccgaggccgtcaacttatcgccaagacgatcatccagataatcgatcctaccacacgcaacgatgcaatgccgcaattgatctgtctgtctgtctgtctgtctgaattagttcgtctgaaagtgtgtgcaatggaagaggcttggctgtacaggtcctccatgcatatgtacctataccgtagtaggatcagtgatcgatgagccaaattggtgtgtgtactgtacaggccacaagaacgaaaatatcctctctctttaattcaggtgtgctccctgctgccggatcacggccggcccggtttggtttttggacgacggcggcgaggatcgatccaagggaggcgccgccacgccgccgcggcggtgtactttaattttcaagttgtcagctactttctgtaatttgtttcatgatggttcggtttcctgtgacagccagcacttttgttgtatgtcaaatgcaatgtatacatgatataccggttgttatc

SEQ ID NO: 3344 - DNA, 1241 bp, Oryza sativa
  ref <308>: DATABASE ACCESSION NUMBER: AK061038
  ref <309>: DATABASE ENTRY DATE: 2001-12-06
accactcgcagccgtttccacttcaccattcaccaacgcaaacgcaaacgcaacgcagcggcggtagacgaagcagcagcaggtagcggttcttggtcggttcgccatggcagcggcggcggcgaggtacgacgtggagaagggagggaggaagagggagggggaggaggagaggtgcggttcgccggcggcggtggcgcagtacccgcagcgggagggggagagggagtgggtgccgtggctcgtcccggccatcctcgtcgccaacgtcgtcgtcttcgccgttgccatgtacgtcaacaactgcccctcccacgcctctcgcggcggcgcgtgcgtcgccggattcctccgccgcttctccttccagcctctctccgagaacccgctcctcggcccctcctccgccacattgcagaagatgggagcactggtatgggacaaggttgttcatgagcatcagggatggaggctagtgacctgcatctggctgcacgccggtgttgttcatctgcttgccaacatgctaagcctcgtgctcatcggactcaggctcgagcagcagtttggatacatgagaattggcatcatctaccttgtttctggcattggaggcagcgttctttcatcgctgttcatcagaaacagcatctccgtcggtgcttctggcgctctctttggtcttcttggagccatgctgtcggagcttttcaccaactggaccatatacacgaacaaggctgcagctctagtgacgctcttgatcgtcatcgcgatcaacctcgccatcggcatcctccctcacgtcgacaacttcgcccacatcggagggttcttgactgggttcctcctcggattcatcttcctgatgcgcccacactacggatggatgcagcgatatgtcctgccttcctctgtcaagtacacctccaagaagtacctggcttatcaatggatcttgctggccgtggcctcggtcctagctgtcatcggattcgccgttgggctgtcgatgctcttcagaggggtgaatgctaatgaacgctgccattggtgccactacctgagctgcattcctacctcgagatggacctgcgggaactgaagatttagtagaaacgcaacaaactgaagacattaaggagatttattgaaagtgtttgatgcacagacatacaattttactgtatataacttatacagacataccctcccaggggtttagtcagttcacttgattg

SEQ ID NO: 3345 - DNA, 1397 bp, Oryza sativa
  ref <308>: DATABASE ACCESSION NUMBER: AK104420
  ref <309>: DATABASE ENTRY DATE: 2002-08-28
acaagccacctcgatcgatctccattgaaatcaaggcaccttaataatttctagtaccatattaagctaagaacagtagtgtacatggcttctcgtagaagtgcagcagctagtccggccatggcagcagcagctgcggtagtagctgtatctgtatacttgctggtgtgcagtgctccggcggcggcgacggcggcggcggtggcgaagaagccgtcgtacccgccggtggcgaaggggctatcgttcgaccactacaagaagagttgcccgcaggcggaggccatcgtgttcagcttcctgcgcgacgccatcggcaaggacgtcggcctcgccgcggcgctgatccggctccacttccacgactgcttcgtccagggctgcgacgcctccatcctcctcaccaagacgcccggcgggcccgacggcgagcagcaggcgatacccaacgagtcgctgcggccggcggcgttcaaggccgtcaacgacatccgcgccctgctcgacagggcgtgcggccgcgtcgtctcctgctccgacatcgtcaccctcgccgcccgcgattccgtcaaactggccggtgggccgtcgtacaaggtgccgctcggccgccgtgacggcctcacatcggcgacgccgtcacaggtgctgggcgcgctcccgccgccgacctcccacgtccccgagctcatcgccgcgctggccaagctcaacctcgacgccgccgacctcatcgcgctctccggcgcccacaccgtcggcatcgcccactgcacctccttcaccgggcggctgtacccgaagcaggacggcaccatggacaagtggttcgccggccagctcaagctgacgtgcccgaagaacgacacggccaacaccaccgtcaacgacatccggacgcccaacgccttcgacaacaagtactacgtcgacctgcaaaaccgccagggcctcttcacctccgaccaggacctcttcgtcaacgccaccaccaggccgctcgtcgccgagttcgccgtcgaccagtcggcgttcttccaccagttcgtcttctccgtcgtcaagatgggccagatccaggtgctcaccggctcgcagggacagatccgggcaaactgctccgtccgcaaccccggcgccgcctccgccgacgaggagctcccgtggtccgccgccgtggagaccgtcgtcgaggcggccgagagcatcgtgctctagacacacaattgtgcgcgccatggacgcgtacgtcagtacgtgtaccgtacgttgaatgtggaaagagacgacgacgactgtggatatatgttggttactgccatgtcgaataaatgcatgacgtcatgacaacctcctttatgatcaatatatatggatgtggattttcatcttgcagg

SEQ ID NO: 3346 - DNA, 1154 bp, Oryza sativa
  ref <308>: DATABASE ACCESSION NUMBER: AK104421
  ref <309>: DATABASE ENTRY DATE: 2002-08-28
acgccctctgaccccgatagaaagggaggaaaaaaaaaagagaaggcgaaaccccaaatccgccgcgatggccgccgccgccctcctccgccgctcgccggcggcgcgcgccctcctctccccggcgctctcctcccgcctcgtcgcctccaagccccactcgtcgtcccccgcgccgccgccgccgccgtcgaaggcgggggcgaacaccaagacgttctcgatctacaggtgggatcccgactcgccgtcgacgaagccccacctcaaggactacaaggtggacctctccgactgcgggccgatggtgctcgacgtgctgctcaagatcaagaacgagcaggacccgtcgctcaccttccgccgcagctgccgcgaggggatctgcgggagctgcgcgatgaacatcgacggcgacaatggcctcgcctgcctcaccaagatctcgtcggcgtcctcggcctccacgatctcgccgctccctcacatgttcgtcatcaaggacctcgtcgtcgacatgaccaacttctacaaccagtacaagagcgtggagccgtggctcaagcgcaaggacgcgccgccgcagcccgggaaggagatcccgcagaccaaggccgaccgcgccaagctcgacggcatgtacgagtgcatcctctgcgcctgctgctccacctcctgcccctcctactggtggaaccccgaggagtacctcggccccgccgcgctcctccacgccaacaggtggatacaggacagccgtgaccagttcactaaggagcgcctggattccatcaacgacgagttcaagctgtaccgctgccacaccatcaagaactgcacacacgcctgccccaagggcctcaacccagcgaagcacatcgacacaatcaagaagctccagctcgaggcctgagtgagcagtatatctctcttcatgagatgaaactctgtcgaaaaattgtaatcagccagcctcttgtttctctgcctttttagtccatcgcctgacgaataattgctggaacgcaggattcccttctgggcctccgatctgatgacttccatttccatcagatggagggagcattgtagggagtgaataatttgctaccgtattttacgttttgttctgtatctaattcggtttgttgttc

SEQ ID NO: 3347 - DNA, 1221 bp, Oryza sativa
  ref <308>: DATABASE ACCESSION NUMBER: AK061039
  ref <309>: DATABASE ENTRY DATE: 2001-12-06
aagcaggcggcagctagggttggagtcgccgctgttcctcccctcgcctcgcagcctccgcctctcctcgtctttccggctcaatctgcggagagggtggaggcgcgcgcgggccactgccaccgtgaggcagccgcactcgggcaccgggacctcgggaaccctagccggctggccccggtttattgcctgccccttctggctgctagcggccgggctgcttgacgatttgtgggtttccctttcccatttgctcagacactaaatcatcaaatagaggaagcaatttagtgccacggtggtcaagatggctgggcagtctgaccctcatctttctatcttctcaccctcagaggtggagttcgtggcggaggatgagattgtcgagatcgtccctaacattcgcatggaggccctcaacatgatatgcggggattttgggcccttcttcccgcaaattgcaagcaaagtgcctctttggctcgcggttgcactcaagaagcgtggcaaatgtaccatacgcacacctgactggatgactgttgaccgcttgacgcaggtattagatgcagaaagagagtcacccaaagaatttcagccattgccgttccactatattgaaatatctaagcttctctttgatcatgctcgtgatgacatctcagatgcatacctggtaagatctttgattgaggacatccgagatgtcagattccataaggttgagactggtctggagacaatatctggccgtactcatgctgtaaagctaaaaaatctctctgcaatggaagtgaatatcgtgcgtcctttcatggtgagaactttacaagcattctataagcatgatagcccacagatgattcagcaggcagataacacaggtagcagaccaacaccagttacagaccgtggtccaagaagagatctaaggcgcaggtaacaagcaggatgtgtatctatcccttgaaaattttactgtgtgtagattgcagtaaatgaaggtacttgtgatctgtatctcactagctagaagccaactgcgtttccccaatttgttgtgtgtgtaccaaaattttataggactaataacatttgacatggttttgtttttgaagaagcgaagatagtaagatacatcaattatctgtcacaaaagggagattcctcatgtattctggatggatgtaacttatgtgatgtatttttactatttctggc

SEQ ID NO: 3348 - DNA, 1132 bp, Oryza sativa
  ref <308>: DATABASE ACCESSION NUMBER: AK061040
  ref <309>: DATABASE ENTRY DATE: 2001-12-06
aaggccccccatcacctgcaacctcacacttgtgcttttgctagcttgtccctcctcagaaatggccatcctggcgtccatggcggcaatggcgttcttgctgctgatggaggcaatgagcgtgtcacacggccagcttcaggtcgggttctactccgactcctgccccgacgctgaggacatcgtcaccgccgccgtccaggacgccgccggctccgaccccaccatcctccccgccctcctccgcctccagttccacgactgcttcgtccgggggtgcgacgcgtcggtgctgatccggagcgcgcggaacgacgcggaggtgaacaacaacaagcaccaggggctgcgcgggcaggccgtcgtggacgcggccaaggcggagctcgaggaccagtgccccggcgtcgtctcctgcgccgacatcatcgcgctcgccgcgcgcgacgccatcgccatgacgggcgggccgtcgttcgacgtgccgacggggcggcgcgacgggctggtctccaacctccgcgacgccgacgtgcttccggacgtcgtcgattccatccaggtgctccgctccaggttcgccgccagcggcctcgacgaccgcgacctcgtcctcctcacagcggcgcacacgatcggcacgacggcgtgcttcttcgtgaaggacaggctgtacaactaccgcctccgcggcggcggcgtcgggtcggacccgtccatcccggcggcgttcctggcggagctcaaggcgcggtgcgcgccgggcgacttcaacacgcgcgtcgcgctggaccgcggcagcgagcgcgacttcgacgactccatcctccgcaacatccgctccggcctcgccgtcatcgcctctgacgccgcgctcgacgccagcaacgccacgcgcggcctcgtcacggcctacctcggcgccgcgtcgcgcaggttcgagcgggacttcgtcgccgccatggtgaagatgggcaccatcggcgcgctcaccggcgacgacggcgaggtcagggacgtgtgctcccagttcaacaccgactgattgatcgatcgatcgatccatcggtcgaacactgtacatttcttctgaaagatcaaatcgattcaagaattcaacaacaaatgaaat

SEQ ID NO: 3349 - DNA, 1029 bp, Oryza sativa
  ref <308>: DATABASE ACCESSION NUMBER: AK061041
  ref <309>: DATABASE ENTRY DATE: 2001-12-06
agatgcagattatgctattaagattttgaatatgatcaagctatatggaaaaccaataagagtaaacaaggcttcacaagacaagaagagccttgatgtaggggcaaatctttttattggcaatctcgatccggatgttgacgaaaagctcctgtacgataccttcagtgcgtttggagtgattgtgactaatcccaagataatgcgagatcctgaaactggaaattcacgaggctttggctttgtgagctatgactcctttgaatcatctgatcaagctatagaggcaatgaacaaccaacatctatgtaaccggccaattactgtctcttatgcctacaagaaagacacaaaaggagaacgccatggcacacctgcagagaggttgctagcagcaaataaccctggttctcagaagaataggccacacactatgtttgcaagtggcccgcctacgcaagggcttgcaaatggtgcacctgtgcctcgacctttttccaatggggcagtgccacctcagattcaacatgttcgaccgccgccacctcctatgcaacaattccctccaatgcagatgaatggtcagcctgtttggcctccgcagaatacacagctaccaccccacatgccacctcaaatgcattacaggcctgcagtgagaccacctccaccaaacatgatgccaccccctcctcttggcatggtaaggcctccgccgcctccttccagtatgccagctccacctatgtggaggccacccccacccccacaacaagctggtggtatgccaccacctcctatgtccatgccaccgccgccaccaccaccttctggttaaacatatgctggtgaaggttccataccatatggcacattgtagctgtagactgagaatgttggtacctttcttatatttccatgtaacttgcaaacactaggagaggatcagaattcagtgagtttagctgacactgatacaaattctcgaggttaactgtattttgttggaaatacatgaattttgtggtt

SEQ ID NO: 3350 - DNA, 1217 bp, Oryza sativa
  ref <308>: DATABASE ACCESSION NUMBER: AK061042
  ref <309>: DATABASE ENTRY DATE: 2001-12-06
atcactgcaactcagcagcaagcaagctaactccattttgctttgcattgccaccatgagagcgctcgccgtggtcgtggtggccacggcctttgcggtggtggccgtgcgcggcgagcagtgcggcagccaggccggcggcgcgctctgccccaactgcctctgctgcagccagtacggctggtgcggatccacctccgcctactgcggctccggctgccagagccagtgctccggcagctgcggcggcggcggcccgaccccgccctccggcggtggcggcagcggcgtcgcctccatcgtgtcgcgctcgctcttcgaccagatgcttctccaccgcaacgacgcggcgtgcccggccaagaacttctacacctacgacgccttcgtcgccgccgccaacgccttcccgagcttcgccacaaccggcgacgccgccacccgcaagcgcgaggtcgccgcgttcctggcgcagacgtcgcacgagaccacgggcgggtgggcgacggcgcccgatggcccctactcgtggggctactgcttcaaggaggagaacaacggcaacgttgggtccgactactgtgtccagagctcgcagtggccgtgcgccgccggcaagaagtactacggccggggacccatccagatctcctacaactacaactacggcccggcggggcaggccatcggctccaacctgctgagcaacccggacctggtggcgtcggacgccaccgtctccttcaagacggcgttctggttctggatgacgccgcagtcgcccaagccgtcgtgccacgcggtgatgacagggcagtggacgcccaacggcaacgaccaggcggcggggcgcgtgccgggctacggcgtggtgaccaacatcatcaacggcggcgtggagtgcggccacggcgcggacagcagagtcgccgaccggattgggttctacaagcgctactgcgacatgttgggcgtcagctacggcgccaacttggactgctacaaccagaggcctttcaactcctaatagctcgttctagcttcaagctttgcactgataaccactgatcggatgctttacatcgatgaataagaattcatccgagcagacaaataatacaatcatcagtaatgcccacaatggctgatggaaaatatattgtgcttccgattattaataattaatacttctacataataaacaagatacgctctcc

SEQ ID NO: 3351 - DNA, 1279 bp, Oryza sativa
  ref <308>: DATABASE ACCESSION NUMBER: AK104422
  ref <309>: DATABASE ENTRY DATE: 2002-08-28
accgatccagtaatcgagctccagacatccatcaatggccatggagctctctaacctgacgaggtgccatctgccactgctcctgctcttcctgctggcaggatcctcctccatggctttgccagtgcatcctgcaatggacagggtgagatggcaggtcgacaaggtcaaccggcggggccattccatcgggctcgtcatgtcgtacatcgatgaggccactgctcttgaatcctccggctacttcagaccttggcatgtcctccccttcgttgacctctacggacgaaggtatcacatcgggagtattagaggtgtcaatgttatatatgcactgacaggacaacgcaggttaaatgcggctgtgactgtacagactctcatcgacgtctttactgtgtctggcattgttcattatggcacagcaggaagttctaatgattcaatgtcatttggcgatgtcagtgtccccaaatttgttgcttatacaagtgcttggacatggaagaagttcaaatcaccaaaagagtcggatacagaacttagctttggagattttactgtcccaaatggaggagagaatcttctaggagctctgaaattcagaaatgaggagctatactcagtgggtaagcctatgaaagaagttttctggttacctgtagattcagcatggttcaaaatcgcagaaggacttaaggtttcacttgaaagatgtaacgacactttctgcttgccaacaactccaaaagtagtctgtgggctaaaaggatcgtcagctgatatgtttctagacaatgcagaatataggaagttccttttcagagaatttggtgtatcaacagtagatgaggagagtgcagcagtggtgatgacaacaacatctcctggcatacctgtgattgtattccggggagtttctgatttggctggaggggagccaacatggtcgtcaacaagcctgatgaacctggcatctattaatgcactcaaagtggcagtggagtttattgctacagtcgggaaacagaagtcaacaatgtcagcaggaagtgctaataactgaaggaaaaagatcacatccatgctgatccaataatgccctggaataacattttacagcagtagctgcattcagaataagatgctttcctgagcttcaagtgcatgtcctctcccataaaggatattagtgttgaattattttgttgaaacttgtaagcatgcatgtgcgatcattttattgcaaatggaatagcagatgatgttgctttttacg

SEQ ID NO: 3352 - DNA, 1008 bp, Oryza sativa
  ref <308>: DATABASE ACCESSION NUMBER: AK061043
  ref <309>: DATABASE ENTRY DATE: 2001-12-06
atggacgtgtcaagatgtggcagggcagcaacaagatctccatcctaagttcagcagttggcctccctaatgttggcaaccattttgagaactggaatgtcggagtgctcggaccggtgaccctctccagcctaaatgggggcacaaaagacctcagccatcagaaatggacctatcaggtcggcctgaaaggcgaaacgctgggtctccacaccgtcaccggaagctccgcagtcgaatggggtggccctggcggctaccagccactgacttggcacaaggctttcttcaacgcgccggccgggaacgacccagtggcgctcgacatgggcagcatggggaagggccagctctgggtgaacggccaccacgtcggccggtactggtcgtacaaggcctccggtggctgcggcggctgcagctacgccgggacgtaccacgaggacaagtgccggtccaactgcggcgacctgtcccaaagatggtaccatgtgccgagatcatggctgaagccgggcggcaacctgctggtggtgctggaggagtacggcggcgacctcgccggcgtcagcctggcgacgagaaccacatgaacgaattgcagcgagagatcatcaccaccatttgatacagtcgtcgacggccgcgtgaacagcttcctcctgtagcacgcagaattcgtcgatggtatttacacacacagacgaacaccttacaagtaaaaaaaaaaaacacaggagcagcagcaacaggtgtgtatttattggggagtcggagaggtggttgtctcgctcgccggtggccttcactgcggctgcagcgacggcagtggcatcaccggccaccggccggcatgcagacgctgttcagttgtttgcgttgctcgggaatttgttacggtgcatagagcatttgttattgtaacttgtaatctttgtcgacattataaattactagtattactagttgtgagaattgattatgcaggaaatcacaaatagttttgtc

SEQ ID NO: 3353 - DNA, 1078 bp, Oryza sativa
  ref <308>: DATABASE ACCESSION NUMBER: AK061044
  ref <309>: DATABASE ENTRY DATE: 2001-12-06
atccccttcttctgccgctcgttttccattgccgacgcgcagcacgcagctgcgcagccacacctttgcggctgtcttatcttgttcttgagttgtgttcttggttggggaggaggaggaggagatgaagatccagtgcgacgcgtgcgagagcgcggcggcggcggtggtgtgctgcgcggacgaggcggcgctgtgcgcggcgtgcgacgtggaggtgcacgcggcgaacaagctggccgggaagcaccagcggctgccgctggaggcgctctcggcgaggctcccgcgctgcgacgtgtgccaggagaaggcggcgttcatcttctgcgtggaggaccgcgcgctcttctgccgcgactgcgacgagcccatccacgtccccggcacgctctccggcaaccaccagcgctacctcgccaccggcatccgcgtcggcttcgcctccgcctcgccctgcgacggcggcagcgacgcccatgactccgaccaccacgccccgcccatgggctcctccgagcatcatcaccatcatcagcagccggccccgaccgtcgccgtcgacacgccctcgccgcagttcctgccgcagggctgggccgtcgacgagctcctccagttctccgactacgagaccggcgacaagctgcagaaggagtcgtcgccgccgctcgggttccaggagctggagtggttcgccgacatcgacctgttccacaaccaggcgcccaagggcggcgccgccgccggccggacgacggcggaggtccccgagctcttcgcttcgcaggcggccaacgacgtggcgtactacaggccgccgaccaggaccgccgccgccgccttcaccgcggccaccggcttccgccagagcaagaaggcccgcgtcgagctccccgacgacgaggaggattacctcatcgtccctgatcttggttgaatcttgaagaggagttcgttccagaggagaagatcctcctcctgtgttcttgggttttgccatgtccttgtgttttctgcttgtatgctagcttttgtgtttaacgttagtcctgctcaactgtgacatatttgagcc

SEQ ID NO: 3354 - DNA, 1319 bp, Oryza sativa
  ref <308>: DATABASE ACCESSION NUMBER: AK104423
  ref <309>: DATABASE ENTRY DATE: 2002-08-28
ctcgtcagctcccatctctcctcgactcctctcttctcttctcctctcctctcctctccaaccgatggctctcgtccgccagcgacgccacctgccgcacctcaccctcccgctcgatcacttcgccctccgcccgccgccggcgccgcagcagcagcagcagcccgcagtcgcgccgtccacctcctctgacgtccgcctctcggacttcgagaggatctccgtcctcggccacggcaacggcgggacggtgtacaaggcgcgccaccgacggggttgccccgcgcagcagccgctcgcgctcaagctcttcgccgccggggacctctccgcggcgcgggaggccgagatactcaggctcgcggcggatgccccgcacgtcgtgaggctccacgcggtggtcccgtcggccgccggtggggtggaggagcccgccgcgctggcgctcgagctcatgcccgggggttccctggctgggttgcttcgccgtctcgggcgcccgatgggggagcgccccatcgccgccgtggcgaggcaggcgctactcgggctcgaggcccttcacgcgctccgcatcgtgcaccgcgacctcaagccgtcgaacctgctcctcggcgccgacggcgaggtcaagatcgccgacttcggcgcgggcaaggtcctgcggcggcggctcgacccctgcgcgtcctacgtcgggacggcggcctacatgtccccggagaggttcgacccggaggcctactccggcgactacgacccgtacgccgccgacgtgtggagcctcggggtagcgatccttgagctgtacctcggccacttcccgcttctccccgtggggcagcgccccgactgggcggcgctcatgtgcgccatatgcttcggcgaggcgccggagatgccggccgccgcgtcggaggagttccgggacttcgtgtcgcggtgcctcgagaagaaggccgggcggcgcgcgtcggtcggcgagctgctcgagcacccgttcatcgccgagcgggacgccgccgatgcgcagcgctcgctcgccgcgctcgtcgccgaggcggagcagagcggcgatctatagccaatcgagccgccggttaaattaactctgcagatttaggaaccaatcagagatgacgtgtacataatctctgccacgtggacgaacagctttgtcccgtgtgtttttttcttcctctcttttcacttcttgccatccaaggatttgtttgttttttaagttcgttcttggccaaattacaaattgcaagacacaattttgtgcaatcgtaatgagagactaaagagtctagttc

SEQ ID NO: 3355 - DNA, 1401 bp, Oryza sativa
  ref <308>: DATABASE ACCESSION NUMBER: AK061045
  ref <309>: DATABASE ENTRY DATE: 2001-12-06
acaatcaagcatcaattcctcattagcatcgctggttgatactaaactaacagtagccataatcatgggaaggccagtggcaacgctgctggtgctgtgcttcatctctgtcacggcgcgcgccgccgcgttccgcgtgcacggccgcctcctcgccgacgccgcgacggagggaggcgccgtcgtgcccatccactggacccaggcaatgaactacgtcgcgaacttcaccatcggcacgccgccgcagccggcgtcggcggtcatcgacctcgccggggagctcgtctggacgcagtgcaagcagtgcagccgctgcttcgagcaggacacgcccctgttcgacccgaccgcgtcgaacacctaccgggcggagccgtgcggcaccccgctctgcgagtccatcccgagcgacagccgcaactgctccggcaacgtgtgcgcgtaccaggcgtccaccaatgccggggacaccggcggcaaggtcggcaccgacaccttcgccgtcgggacggccaaggcgagcctcgcgttcgggtgcgtcgtggcgagcgacatcgacaccatgggcgggccttccgggatcgtcgggctagggaggacgccgtggtcgctcgtcacccagacgggcgtcgccgcgttctcctactgcctggcgccgcacgacgccgggaggaacagcgcgctgttcctcggctcctccgcgaagctcgccggcggcggcaaggccgcctcgacgccgttcgtcaacatctccggcaacggcaatgacctgagcaactactacaaggtccaactcgaagggctgaaagccggcgacgcgatgatcccgctgccgccgagcggcagcaccgtcctgctcgacaccttctcgccgatcagcttcctcgtcgacggcgcctaccaggccgtcaagaaggcggtgacggccgccgtcggcgcaccgccgatggcgacgccggtggagccgttcgacctctgcttcccgaaatcgggggcgagcggcgcggcgccggacctcgtgttcacgttccggggcggcgccgccatgacggtgccggcgacgaactacctgctcgactacaagaacggcacggtgtgcctcgccatgctgagctcggcgcggctgaactcgacgacggagctgagcttgctgggaagcttgcagcaggagaacatccatttcctcttcgacctcgacaaggagacgctctccttcgagcctgcagactgcactaaactctcctagctaatcaatggctgctgtgctgctacttaattactttcaggaagcaggagagtgcaggctatatgtatgtgtacttctgaataacgcagccatatatgcggcatgagctgcacgctgctcatgttggtgaaaataatacccccattcttatt

SEQ ID NO: 3356 - DNA, 1039 bp, Oryza sativa
  ref <308>: DATABASE ACCESSION NUMBER: AK061046
  ref <309>: DATABASE ENTRY DATE: 2001-12-06
gctcaacgacaagtggtcaacacacatcaatcaattaaccatcggcgagcagaagaagagcagaggctcagctagcaggcgagagagatcagcgagcaggatggctggggctgcagggtcgtcgtggtcctctctgctcctcgcagcggtggcggtggcgctcgccgtcgccgcagcgccgtcgctcgccggcgacccggactacctccaggacatctgcgtcgccgacctcaactccgaggtgaaggtgaacgggttcccgtgcaaggcgaacgcgacggcggacgacttcttctccggcgtgctcgccagccccggcgccgccgccaacaccaccaccggcgccgtggtcaccggcgccaacgtcgagaaggtcccgggcctcaacaccctgggcgtctccctcgcccgcatcgactacgcccccggcggcctcaacccgccgcacacccacccgcgcgccaccgaggtcgtcttcgtcctctacggcgagctcgacgtcggcttcgtcaccaccgccaacaagctcctctcccgcaccatctcccagggcgacgtcttcgtcttcccccgcggcctcgtccacttccagaggaacaccggcgacaagcccgccgccgtcgtctccgccttcaacagccagctccccggcacgcagtccatcgccgccacgctcttcgccgcctcgccggcggtgcccgacgccgtcctcgccaaggccttccagatcgacgacgaggaggtggacaagatcaaggccaagtttgcccccaagaagacctagacgatataagattataaggcgacgtatacattggagagatttgaggtttcaaacttatcttaaaatttgaattgatttgtctgtgatttgatgattaactatatgtacttgtcgatgatataatgccatcttgatgacacttatttgtgtaagagcgacatgcaaaatgtagtagtaatagagaagttttttgtaataagttgctggggagaacgatgatgatttgttaatgattagtacaatcattttggctgg

SEQ ID NO: 3357 - DNA, 1417 bp, Oryza sativa
  ref <308>: DATABASE ACCESSION NUMBER: AK061047
  ref <309>: DATABASE ENTRY DATE: 2001-12-06
atatctaatgtgtgttaatagtttattagctctccaagaacaatccaatcttcagtagtacaaatatatgagagagcacaaagcttcaagcctccttcagactacaagccattaaacagagacgaccaacgacttaaccacacttcttctttgtgctgtccaacctccattgttgggtgtgaaagctttggctcatctgccatgtgtggaggatccattctcggcgaccttcacttgccggtgcggcggacagtgaacgccggtgacctgtggggagacgccggcaagggtagagatggtggcgacggcttgaagaagaggaaggggagttcttgggatttcgatgttgattgcgatgatgatgatgatgatgactttgaggctgattttgaggagtttgaggatgactatggcgatgatgatgatgtgggtttcggggacgacgaccaagaatccgacatgaacggtctcaagctcgccggattcagcaccacgaagctcggcctcggcggcagcaggaagaggaagacgcgataccgagggatccggcagcggccatgggggaaatgggcggcggagatcagggacccccgcaagggcgtccgcgtctggctcggcacgttcggcaccgccgaggaggccgccatggcgtacgacgtcgaggcacgccgcatccgcggcaagaaagccaaggtcaacttccccgacgccgccgccgccgccccgaagcggccacggcgttcttcggcgaagcattcgccgcagcagcagaaggccaggtcgtcgtcgtcgtcgccggcgagcctgaacgccagcgacgccgtgtccaagtccaacaacaaccgcgtcagctcggctgggagcagcaccgacgccaccgccgccgccatcgccatcgacgacggcgtcaagctcgagctgctctcggagacggatccttctccgcccatggccgccgccgccgccgcgtggctcgacgcgttcgagctgaacgatcttgacggatcaagatgcaaggacaacgcattcgatcaccagattcacaaggtagaagcggctgtcgctgatgaattcgcgttctacgacgatccgagctacatgcagctgggttaccagctcgatcagggcaactcgtacgagaacatcgacgcgctcttcggcggcgaggccgtcaacattggtggactctggagcttcgacgacatgccaatggagttcagagcttattgagcatttgattctatttaggagggagtgaattatttgggaggaagaatcgatgttgtaacttgtaaaatctctgatgatgatctctgcatcatatgatcaatttgagtgcagttttgtttttgtaaatacgaattctttattatgatgttaggttcttaatttgcccttcttcatcagggatttgttc

SEQ ID NO: 3358 - DNA, 1212 bp, Oryza sativa
  ref <308>: DATABASE ACCESSION NUMBER: AK104424
  ref <309>: DATABASE ENTRY DATE: 2002-08-28
agcggcaaagcctccccgtcgtccagcccacgcagcgcaccgcagcgagcgaagccgccgcaatggccgcctcctccgtggcctcgactctcctcctctcgctctcctcttcctcctcgcccttcctctcccccacctcggtctccttcctcccatccgccgccgccgccgcctcctcctccccgcgcgtcgccgtcgccgccggcaagcagaaggcggctatctccgtcctccgcgcccttcgcgccgaggcggccaccctcccggttctctccttcaccggggagaaggtcggggaggtcgccctcgacctcaagtcggcgccgccctccaccgcgcgcgccgtcgtgcaccgcgccatcatcaccgaccgccagaacaagcgccgcggcacggcctccacgctcacccgcggcgaggtcaggggaggcggcaggaagccctaccagcagaagaagacggggaaggcgcggcgcgggtcgatgcgcacgccgctccgccccggcggcggcgtcatattcgggcccaagccccgcgactggtccatcaagatcaaccgcaaggagaagcgcctcgccatctccaccgcgctcgccagtgccgccgtggccgacgatgcattcgtcgtggaggagttcgacgaggagttcgccgcgggtcccaagaccagggacttcgtggccgcgcttcagcggtgggggctcgaccccaaggagaaggccatgttcttcgccacggattttgcagacaatgtgcggctcagcggaaggaacattggctccctcaagatgctaacccccaggactctcaacctatacgacatcctcgatgcccgcaagctcttcttcaccccggccgccattaactatctcaactccaggtatggtgccaccgtttttgatgaatatgaggatgataccaatggcgaggatgatggtgaggaggaagcagaggagttgcaagaaggagaagggagcgcagaggaggctgctcaagatgaggctgcagagactgaggctgatagcaattcctagggaaggaggtgtagatcgcgtgtttttcgtttgttggtctggtaattgcttccctgatgcagaagctttttggcttacttttgttgtaagtttataatgtttttttttcactgatgcagtatattagatcttcaaactgcacatatattttcaaatacaatgtcgtgtcaaccactgc

SEQ ID NO: 3359 - DNA, 1068 bp, Oryza sativa
  ref <308>: DATABASE ACCESSION NUMBER: AK104425
  ref <309>: DATABASE ENTRY DATE: 2002-08-28
aacaaagaatccgtccagccttgagaagcagagaagaggagagaaacaagagacagacagacagagatagagtaactgagtaaacgggttcttgcctgacatttgtcttgtccgggtggccattcatggccaccgtggggcagcctgatgccatgagaaggatcaccgttcactacgtgaatccgccgccgatcgccggcgccggagaagcacacgtcgatggcctcgacgacgaggttcttgattatgtgattggtgatgttcttcaggatcaggagggtctgtatcaatcgatattgtatggcaaatacggggatgacatgagaggggcaagaaacactgctcttgcccaatctgatggtttacattactactatcacggagagaacagcagtggtgaagcaacaacctcgagaaattcagaaatcgaccaacagattgagtatgacttggtgttcgctaggcagctgcaggcaatggataatctgacaattgagacacctgcagatgaagatgatgatataagctgcgtaccctctccatctgactctgaaaccgatgaaccggcagaaggcaacaacgaagaggctgccacacaggatgataacgatgatccagacaacatgacatacgagcaaaggcaggcacttgtggaatctgtaggaaatgagaacagaggtttatctgatctgcttatctcctacttggagacatggaagtacaaatcaggctttttcccaaggaaggcaaaccatgataactgtcctatatgtctatccgctttcagacgccgagaaacactcattacattggcttgcaagcatagttaccatgaaggttgtattgctagatggctcaagattgacaaggcctgcccagtttgcaaatatgaagtgtttggaccttcctagcgtgtgaggaggcgatcaacaaggctgaccaactatgactcgatgagacggcatatagtggttgcagcatctgctctgcagtattaattaaaaagggaaaccttaactcccaaaaaaaacagagaagggaagaaaaagaaagcaaaaaggaaaaagg

SEQ ID NO: 3360 - DNA, 1102 bp, Oryza sativa
  ref <308>: DATABASE ACCESSION NUMBER: AK061048
  ref <309>: DATABASE ENTRY DATE: 2001-12-06
atctcctctcctaataaatcacaacttcgcttctcggttggcagcagcgatttcatccaagcaccacgccgccgccgccgtcgaagccgatctcctgcgcgcggagcggatcgcctctgtcagtcaccagctatacagtatgagttcactggagagtgcaagagcagatcttgctctgcttattttatacctaaacaaggctgaagcaagagataagatctgtagagctatacaatatggctcgaaatttgtgagtaatggacaaccagggcctgcacagaatgttgacaagtcgactagtctagctcgtaaagttttccgactttttaagtttgttaatgatctgcatgctttgattagtcctcctgccaaaggaactccactacccctgatcttacttggaaagtcgaagaatgcactgctatcaactttcctctttctggaccaaattgtatgggctggaaggacaggaatatacaagaacaaggagcgagcagaattcctcagcaagatagcattttattgcttcctgggttctaacacatgtactagtattattgaggtagccgagcttcagcggctatccaagtcgatgaagaaactagagaaggagcttaaacaccaggagctgttaaagaacgagcaataccagatgaaactgcagaagtgcaacgagaggcgtctcgctctcatcaaatcgagcctcgacatagttgttgctatagggctgcttcaactggctcccaagaaagtgactccgcgtgtgacaggggcgtttggatttgctagctcactcattgcttgctatcagttgctcccagccccagccaaatccaagtgatccacctgaaggggtgtcagtgggcagttccaatgttgcaaccagtaagaaataaaagtggagctgcttgattgactcatgtggacttgaaaatcctttgtgggttatggttaatatgatgatctagtggattgctgcagctgtaattttaaggtgcagtacttgtgacaaaaaataagaaacttagcatgggaaaaatgttgcattgtttgccaatggtttagtgttgggactagctaataagaacattgccattatatc

SEQ ID NO: 3361 - DNA, 1558 bp, Oryza sativa
  ref <308>: DATABASE ACCESSION NUMBER: AK061049
  ref <309>: DATABASE ENTRY DATE: 2001-12-06
aaaaaaaaaaaccgcttccaacccgagaccacgctccccgccggatcgagcagctagggtttcgacccttttttttcccaccaggagggcgacgagatgttcgggcgcgcgccgaagaagagcgacaacacgcggtactacgaggtgcttggggtgcccaaggatgcgtcccaggatgacctcaagaaggcgtaccgcaaggccgccatcaagaaccaccccgacaagggcggagaccccgagaagttcaaggaattggctcaggcttatgaagtcctgagtgaccctgagaagcgtgaaatctatgatcagtacggtgaagatgctctcaaggaggggatgggtcctggtggtgggatgcatgacccatttgacattttttcctcattctttggaggtggctttggaggtggtagcagtaggggcaggagacagcgtaggggagaggatgtggttcaccctctgaaggtttctctggaggaattgtacaatggcacatcaaagaagctctccctttctcgcaatgtgctctgctccaagtgcaatggcaagggctcgaaatctggtgcttccatgaagtgctctggttgtcaaggttctggtatgaaggtccaaattcgccagttggggccaggaatgattcagcaaatgcaacatccctgcaatgagtgcaagggaactggtgagaccatcagcgacaaggatagatgcccaggctgcaagggtgagaaggtggcgcaggagaagaaggttcttgaggtggtggtcgagaagggcatgcagaatggacagaagatcaccttccctggtgaggctgatgaagcgcccgatactgtcactggagacattatcttcgtcctccagcagaaggagcatcccaagttcaagagaaagggagatgacctcttctacgagcacaccctgaacctcactgaggccctttgtggcttccagtttgttctcactcacttggacaacaggcagctgcttatcaagtccaagcccggtgaagttgtcaagcctgattcattcaaggctgtcaacgacgagggcatgccgatgtaccagcggccattcatgaaggggaagctctacatccacttctccgtggaattccccgactctttgaaccctgaccagtgcaaggccctggagaccgtcctcccgccaaggccggtgtcgcagtacaccgacatggagctcgacgagtgcgaggagaccatgccgtacgacgtgaacatcgaggaggagatgaggaggcggcagcaacagcagcagcaggaggcatacgacgaggacgaggacatgcacggcggcggcgcccagcgcgtgcagtgcgcgcagcagtaagcagcaagcagcgccgtgcatacatatctgcacggctttgacggcggcgacaaattgtttctttccgctctaggggcgataatactatcaagttttccatgttaggcatatgatgatgtgatactacttttggtcttttatactgcgtattaatgacgtacatcaaccggacctactggtccatgaaacaaaatctctactgcttctc

SEQ ID NO: 3362 - DNA, 1269 bp, Oryza sativa
  ref <308>: DATABASE ACCESSION NUMBER: AK061050
  ref <309>: DATABASE ENTRY DATE: 2001-12-06
atcaactcatcatcgccccccttcaaaaggccacccccctccccctcccttctcgcctcattccccacagccgccgcctccttcctctcctcgatctccctattcgtcgtagcctcctccctcgttcgctccgcccgcaaccatgtcggcctactgcggcaagtacaaggacgagctcatcaagaacgctgcctacattggcactcctggcaagggtatccttgctgcggatgagtccactggcaccattggcaagcgcttcgccagcatcaacgtcgagaacgttgaggagaaccgccgctccctccgcgagctcctcttctgcacccctggcgccctccagtacctcagcggcgtgatcctcttcgaggagaccctgtaccagaagaccaaggatggcaagcccttcgtcgatgtcctcaaggagggtggtgtcctcccgggcatcaaggtggacaagggcacaatcgaggttgccggcaccgagaaggagaccaccacccagggccatgatgaccttggcaagagatgcgccaagtactacgaggctggtgcccgcttcgccaagtggcgcgccgtcctcaagatcggccccaacgagccgtcgcagctcgccattgatctgaatgcgcagggcctcgctcgctacgccatcatctgccaggagaacgggctggtgccgatcgtcgagcccgagatccttgttgatggccctcacgacatcgaccgctgcgcctacgtctcggaggtggtcctcgctgcgtgctacaaggccctcaacgagcaccatgtcctcctcgagggtaccctcctcaagcccaacatggtcaccccaggctctgacgccaagaaggtgtctcccgaggtcatcgctgagtacaccgtccgcaccctccagaggaccgtccccgctgccgtgcccgccatcgtcttcctgtccggtgggcagagcgaggaggaggcgaccctgaacctcaacgccatgaacaagctcagcaccaagaagccgtggtcgctgtccttctccttcggccgtgccctccagcagagcacgctccgagagccttcacgtcaaggactacaagtactgatttgccttgggaggtgctggctaccattggaacattctgcggctgttgcttaatgtggttttgatatctagagggcaatctatggttatctaaaatgtcttgtcgtaataattctggaacctttttgtgtaacacattaccaaatatcaattgcctggattgaaatatcgtttttatc

SEQ ID NO: 3363 - DNA, 1084 bp, Oryza sativa
  ref <308>: DATABASE ACCESSION NUMBER: AK061051
  ref <309>: DATABASE ENTRY DATE: 2001-12-06
ctcgccgccgccactcccctctcgccttcctttccccaactaaaccctaactcctcgccgccgcctccgcctccgcctcctcgtcggagcagcgagccgctgctccttctcctccaccaccagccatggcgacccagatcagcaagaagaagaagttcgtgagcgatggcgtgttctacgcggagctgaacgagatgctgacgcgggagctggccgaggacggctactccggcgtggaggtgcgcgtgacgccgatgcgcacggagatcatcatccgggccacgaggacgcagaacgtgctcggcgagaaggggcgcaggatcagggagctcacctccgtcgtgcagaagcgcttcaacttccccgagaacggcgtcgagctctacgccgagaaggtcgtcaaccgcggcctctgcgccatcgcccaggccgagtccctccgctacaagcttcttggaggcctcgccgtccgcagggcttgctatggtgttcttcgctttgttatggagagtggtgccaagggttgcgaggtcattgtaagtggaaagctcagggcccaaagagccaagtccatgaagttcaaggatggttacatgatctcatctggtcagccagtcaatgagtacattgactcggctgtgagacacgtgctcctgagacagggtgttcttggcatcaaggtgaagatcatgctcgactgggaccccaagggcaaggttggcccgaccacccctctgccggatcttgtaaccatccatgctcccaaggaggaggaggagctgcgccctccggtgttgatcgctgaggcttaagcttatgatgatatttcacatctttttgaagccttgggcatgtttgacagtaccctcttaaaactccagtttggccagttctagctaggtctctgtcttcagtaagggcaatgcaacagtcggttacttcagttttattatggacaaaagctatgtactggtgtcattttatttttttttaaactaagttttgccgagacaaaagttccagtcatatgtatgccaaatcttggtttgtagcctcaaatgcatcccatcttgtttgtgagcgc

SEQ ID NO: 3364 - DNA, 1314 bp, Oryza sativa
  ref <308>: DATABASE ACCESSION NUMBER: AK061052
  ref <309>: DATABASE ENTRY DATE: 2001-12-06
agctggacgagaggtacaaggagaaggtgatactgaagaagatcaaggtggggacggcgggggcgaaggagtgcggcgactacgaggagtggttcaactaccgggtggcaagggcggcgccggagtcgtgcgccgagttcctcggcagcttcgtcgccgacaagaccaagtccgagttcgtcaagggcggcaaatggctcgtctggaaattcgagggtgaccggacgctgggcaactacatgagcgaccgcaacttccccttcaacctggagggcctcatgttcgggcgcgccgtgcgggggctcgacgacggcagccgcgccgcgctggtggtgaagcaggtgatgcggcagctggtgacctccctgaagcgcatccacggcaccggcatcgtccaccgcgacatcaagccgtccaacctcgtcgtcacccggcgggggcaggtgaagctcatcgacttcggcgccgccaccgacctccgcatcggcaagaactacgtccccgaccgcgccctcctcgacccggactactgcccgcctgagctctacgtcctccccgaggagacgccccagccgcccgccgagcccatcgccgccatcctctccccgatcctctggcagattaacagcccggacctgttcgacatgtactcggcggggatcgtgctgatgcagatggcgtcgccgatgctgaggtcgccgtcggggctcaagaacttcaacgccgagctcaaggccgccgggtacgacctcaaccggtggcgggagaccacgcggcggagacccgacctgcagatcctcgacctcgactccggcagggggtgggacctcgccaccaagctcatctcgcagcgcggcgccgacaagcgcggccgcctcaccgccgccgccgccctgcgccacccttacttcctcctcggcggcgaccaggccgccgccgtcttgtccaagctgtcactcagcaagtaggttatacaaaacaactcaatgcacaaaattaagaacacatgcagtgatcaggtcaccactcaccaatggcattagcatttttgtttatgatccattggagagatcaagaactcaagattgatccaagagagagggaaaaggaggaggaagaaacaatatggtaatatataattacattgttttgtatgaggttaatcactttgaacagtgcggtgcagagtttgcagacactagctaacttaacttaattactgcccgtattcggactgaactctactgagaaatccctacttctgttggtcagcttcttgcaacctatgtagatttctgaactgtttcttcagcc

SEQ ID NO: 3365 - DNA, 1131 bp, Oryza sativa
  ref <308>: DATABASE ACCESSION NUMBER: AK061053
  ref <309>: DATABASE ENTRY DATE: 2001-12-06
aactagaacccccacgcactcacgcgcactgcacgccgcaacacaacgcgctcgcctcgcctcgccccgatcggtggtggtgctcgccgtcgccgggcggcgctagggtggccggagaggctccggagagtaggaggaggaggaggagccggagatgagggggtcgaggaggccggtggccgtggtgctgagctgggtgcggaggcagccgcccaaggtcaaggcgttcctcgccgtggtcgccgggatggccgcgctcgtcttcatccgcttcatcgtccacgaccacgacaacctcttcgtcgccgccgaggccgcccacgcgctcggcctcggagtcctcatctacaagctcaccaaggagaagacctgcgccggactctcactcaagtctcaggatttaacagcactatttctggctgttaggctgtactgcagttttgttatggagtatgacatccataccatacttgatacagctacactagcagctactctctttgtcatctacatgattcggttcaaactgaggtcaacttatatgctggacaaggacaattttgcattgtactacgtggtgttaccttgtgctggcctagctctcctggttcatccttcaacatcgcataacatcatcaacaggatctcctgggctttctgtgtttatttggaagctgtttcagtgctgccacagttgcgtttgatgcaaaacacaaagattgtggaaccatttacagctcattatgtgtttgcattgggtgttgcaaggtttcttagctgcgcacactgggtccttcaggttttggatacccgtggtcgcttgttgactgctctgggctatggtctctggccttcgatggtgcttctctctgaaatcgttcagacgttcatccttgctgatttctgctactactatgtgaagagtgtttttggtgggcaacttgtccttcgacttccgtctggagtggtgtaaaaatgcagcaggatgcaacatgttatgggctttgtgcacgtttagtacatcgtcggataccagagccttgtttgcttgataatttttttcagttacaaattgctcatgtgaaaaatgtacctaccagagaccgtgatgaaatctagagactagttttt

SEQ ID NO: 3366 - DNA, 984 bp, Oryza sativa
  ref <308>: DATABASE ACCESSION NUMBER: AK104426
  ref <309>: DATABASE ENTRY DATE: 2002-08-28
aatcaaccatcacctctttcacaccatatcctataatggcgaactcaccgacgccgacaatgctggcgttcctggctcttgggctagcgctcctcctctccgccaccggccaggcgagcgcgcagaactgcggctgccagtcgaacatgtgctgcagcaaatgggggtactgcggcacgggcaaggactactgcggagatgggtgccgctctggcccgtgctacggcggcggcggcggtggaggaggaggaggcggaggtggtggaggcggaggcggaggcagcggcgtgtctgtagagagcgtggtcaccgaggcgttcttcaatgggatcaagaaccaggccccgaacggttgcgccggcaagaacttttacacacgacagtcgtttcttaacgctgcccactcctactcgggcttcgccagggaccgcaccaacgatgactccaagcgtgagatcgctgccttctttgcccacgtcactcatgagaccggacatatgtgctacatcaacgagataaacggggcgagcatggactactgcgacaagaacaacaagcagtggccgtgccagccggggaagaagtactacgggcgcgggccgctgcagatctcgtggaactacaactacgggcctgcggggcagaacatcgggttcgacgggctgagggacccggacagggtggcgcaggacccgacgatctccttcaagacggcgctctggttctggatgaacaacgtgcaccaggtgatgttgcaggggttcggcgccaccatccgggccatcaacggtgcgctcgagtgcaacggcaagaaccccggcgccgtcaacgcaagggtaaactactacaaagactactgccgccaattcggcgttgacccgggtggcaacctttactgttgagttacatgcacacatgctgcgcggctcatcgatcaggactgaataataaacaaagtaataacgaataaaacgtttggtgtgt

SEQ ID NO: 3367 - DNA, 1162 bp, Oryza sativa
  ref <308>: DATABASE ACCESSION NUMBER: AK061054
  ref <309>: DATABASE ENTRY DATE: 2001-12-06
tccaaagaccggcaatggcaggacggtccatgacctggcctactactggcctcagtacacccccatcaccaagcgtgcttcccatgacatcatgctcttcaccgtctccaagagcaccggccatgccgggaccaggatcgggtgggcgttggtgaaggaccgggcgatcgcgaggaagatgacgaagtttgtggagctgaacacgatcggggtgtccaaggactcgcagatgcgggcggccaaggtgctcgccgccgtctccgacggctacgagcggcggccggagcagacgaaagagacgatgaccactcctcttcgcctgttcgactttggtcgacgcaagatggtggagcggtggagcatgctccgcgctgctgccgccgcctccggcatcttcagcctcccggaggagacctccggcttctgcaacttcaccaaggagaccgccgcgaccaaccctgcgttcgcgtggctgcggtgcgatagggaggatgtggaggattgtgcggggtttctccgtgggcacaagatcctgacgaggagcggggcgcagttcggggcggatgcgaggtacgtgcgggtgagcatgctcgacagggacgacgcgttcgacatcttcatcaaccgcctctcgtcgctcaagtgaaagaagacggcggagagagagaggacgctgcagcgtgttcgtccgtgcgctagcaagcaaagcatgcccatgactcatgagagcatgagtagaaccgttaactgtgtatctgtatcagtatttggagagcctttttggtagagcttcagagcataaccaaacggtttcagctttactcgaaatgggagtgaggttgattgaagtgctatcacagaatgatctagagatgtagagttggatttagactattttacagctacactttagaaccaactcttgaagttaaatttgtaagttgaagtcctgccaaataggttctcagtagtagtagtaggtagaagaagaggagcttgcttttctctagcttttctttttctcttaaatatttgtttctcgatgttgtgttttatggttaagaatggcctgcaatgtagatcagtgcctgcgtgatttcacatacggaaaataaataaataaatgttcttgttcttccttttttggaagatctaatgtttc

SEQ ID NO: 3368 - DNA, 960 bp, Oryza sativa
  ref <308>: DATABASE ACCESSION NUMBER: AK061055
  ref <309>: DATABASE ENTRY DATE: 2001-12-06
gaaacgagacgatgctgctgaggagctcgtcgacgccgttcctgcactccttcctctcgccgtcgtcggcggcggctgcgccgtcctctctccagctgcggcgagccttctccgacggccacctgccttccctccacccgtcctccgacggtggtggtggtagcaagaacaataccaccggcctccacacggagctctccttctccatctacaacaccttcaacaagatggcgccgccgccgccgccggtgcaggagcaggaggaggctgagcagcagcaggcccccggggagccgaagctgccgctgttcttggcgagaggcctcgggatcgaccgcatcgcttccggcctgttcaccgccggcggcggcggcgacggcgacggcggcaacggtggcgctgggaggatgagcgccgtggaggaggagcacgccgagaaggtggcggcgctcgacgcgcagtacaagaggatgatggacgagcagccgggcgacgcgctgttcctgcgcaactacgcgcagttcctgcacgaggtgaagggcgacgcgaggagggcggaggagtactactcgcgcgccatgctggcggatcccagcgacggcgagatcatgtcgcagtacgccaagctggtgtgggaggtgcaccgcgatctggacagatccctcacctacttccacaagtccgtgcaggccgcgccgcacaacagcaatgtcctcgccgcgtacgccagcttcctgtgggaacaggacgacgacgacaacgacgacctcggagaaggcgagcaggacgtggccgtggcggcgcagccggggcatgtgaggcagctggcttccgtggccgtttgatccgtgcgagacgggctgacaacgtgctaaatgcgctgtgctttctactactaaatgcgctggtgcttacaaaccgaagaataaataataccgcggttggaagttggatgtaact

SEQ ID NO: 3369 - DNA, 1327 bp, Oryza sativa
  ref <308>: DATABASE ACCESSION NUMBER: AK061056
  ref <309>: DATABASE ENTRY DATE: 2001-12-06
accacagcaaccgcttgctttgcttcgcccatctgagctataattagctcgaggagagagccctaacccgccgcgccatggcgagcagcagcggcgaggggaagggtgccggcggcgcggggtaccagtacgcgccgtacggcgggtcgtactacgacgaggagcggcggtggtggccgtggctcgtgccgaccgtgctcgtggcctgcatcgtggtgttcctcgtcgagatgttcgtcaacgactgcccccgccacgggagcccgctccgcggcgagtcctgcgtcgccggcttcctccaccagttcgccttccagccgctccgggagaacccgctcctcgggccctcctccgccactttggagaagatgggagcactagactgggcgaaggttgttcatcagcaccaagcatggcgtctcattagctgtatctggctacatgctggcctaatccacctgattgtcaacatgctaagcttgctattcatcggactccgtcttgagcagcaatttgggtttgtgcgtattggaatcatctacttgctatctggctttggcggtagcgtgctgtctgtgctgtttttacgtaataactacatctccgttggtgcctctggagctttgtttggcttacttgggtctatgctctccgagcttattatgaactggactatttattccaacaaggcagcggcaatcataactctcctgtttataattgcaatcaatttggcgatcgggatactacctcacgctgataactttgcacacattggtggatttgtgactggattccttcttgggtttgtcctgctggcaagacctcaatttggttggatggaacgtcatgagttgcctcagactaatcaaccacgaaagtacagagcataccagtatgttttgtgggctgttgcactcttcttgctgctagttgggtttgtgattgccctggtgatgcttttcaaggggaagaatggaaacgatggttgtcactggtgccactacctgaactgcataccaacatccagatggaagtgcagtacttagatgcttcagaattccgttagctcttctccaaattacaaatattcttcgggaaccattttcaagcttgtgtgcttgtagatatctacaagaaatttgccacagagtcgaattctgccctttccaaagtgtagtacaattttctgctttgtaatttgagattgtaacagctgtttatttcagcccaactccatactgcattgctcaaaaaatttgtgatgttcaattggattctcttatatcatctaaagttcgaaacaatgttaatggttatggagtct

SEQ ID NO: 3370 - DNA, 959 bp, Oryza sativa
  ref <308>: DATABASE ACCESSION NUMBER: AK061057
  ref <309>: DATABASE ENTRY DATE: 2001-12-06
agctatgcaggcctctcaaatgtttgccaagaagtagtaaagattaatttactatcagaatactcttacaatattagagtacacggccatagaaaacggccacatcaaccaatgtacccatgccatcgctgccgctatcagctctacatataggattctccccctctttctggtggagaaatgatctttgctaggtcgatccaaaaccataatagtctcgattccaaaaaaaaccgggattaaaaatgatctttagtcccggttaaagatcctactaaaaatgtcagatgtatgtcgggggccgaggatctttagtcctggttggtgtcacgccaactgggactaaagatcaccactttagtcttggttggtaataccaaccgggactaaagatcatctagactctcggttggtattaccaaccagaactaaaattaaacgcgtaatatataatccctatcacttatcctctcctctacaatcgcaactcacacagatcaaatctctccccctcttccctttcctcctcctctcctctcctacagtctatcctctcttcctcatcccctctcctccacctcctgcccttcctcctctcctccccctcctccccttcccatccggcgggccggcggccgtggcgagcagtggcagcggctttgtttgtctttttttatataatctgtgattcactaagatgtttaaatttgtgattcaatgcatggatctgagatgtataatctgtaatgtatttgatttgtgtgtaattttttaggatttgtgatgtatttgatttttgtgtataagtaactttaagatttatgatgtagatttgggatgttacattgatttggggatttagggtttgatttgatttggggatttggggtatgatttagggatatgcatgccacttgattcgggagaaaataaaaaaagaaaaaaaagaaaaggggatc

SEQ ID NO: 3371 - DNA, 1073 bp, Oryza sativa
  ref <308>: DATABASE ACCESSION NUMBER: AK061058
  ref <309>: DATABASE ENTRY DATE: 2001-12-06
gtcgactcgcgggaggctggactacgtaaccatacgtgatacacctcctgtaccacccatggcggacggcaaggtagcttgcaagcacctcgtcctggtccacggcgcgtgcatcggcggctggacctatttcaaggtggcgacgcggctccggtcggccgggtaccgcgtcaccgcgccggacctcggcgcgtcgggcgtcgacccgcggccgctgcgcgaggtgccgacgttccgcgactacaccgcgccgctgctgggcctcctcggctccctccctccaggggagaaggtggtcctcgtcggccacagcctcggcggcatcaacgtcgcgctggccgccgagctgttcccggacaagatcgccgccgccgtgttcctctgcgccttcatgccggaccacacgtcccggccgtcgcacgtgctcgaaaagttcatcgaggggaagtggctggactggatggacacggagtttaagccgcaggatgcagagggcaagctccccacttccatgttgttcgggccgcagatcgcccaagaaaggctgatgcagctgtgctcgccagaggacgtcactctcgcgggatctctgctgagggtgagctcgatgttcgtggaggacctgcaaaagcagcagccgttcaccgaggggcgctacggctcggtgcggaaggtgtacgtggtcgtaaaccaggacctcgccataccggaggggttccagcggtggatgatcgggaacagcccggtggatgaggtgaaggagatcgatgcggcggaccacctcgtgatgctctcgaggcccgacgagctggcgcggtgcctcgccgacatcgccgaaagctacgcttgagctcgatgtcaacctgctgttaatgaagtcaatctgctgttagtgttactgccgttttagctgtcgcgttttgctgctgtagtctcttttgcgtgcctgcgctgcggtgttcgtcgcaacatactgttgggagcttggaataattcggtcttcttttcccaccaaatttgtttcgggacttctcttatattcagagaattgcaataatggtaaatggtatatt

SEQ ID NO: 3372 - DNA, 949 bp, Oryza sativa
  ref <308>: DATABASE ACCESSION NUMBER: AK061059
  ref <309>: DATABASE ENTRY DATE: 2001-12-06
ctctcttccgctcttgcagccggcctgcacatccccttctgtcaggagatcgatcgccggcgaggagtcggagatggagtgccggcgtggtcccccaggttgacggcggtggaggtgacgacgatggcaccggtccgaagccgcgaggtcgaggaagagcagatcgggaggagacatggtgtccagatctagaaaagacgttccacagcgaggccgatggtggagggggtcgtcaaagatggctagggctagagatgttcgcaccggcgctgtcgcccgtgacgaagaggcccgcctctaactcgagcggctcaccaatgtctggctgagcgccgcccgctggtggagggaaggttgacgggtccaaggagcgtgaccacggtgccgagcaccacgctcagctccgtcaccaccagcaagccccgcgccgacattacgtcccctcgagcggtcggccgcttcgccggatcagtggaccatcgctggcgtctgtccccctgtcggctgcctcctcaccgttgctgatgcctcctgagcagctgagctctatctcctccgccgattagggatggcaggtgtagaagcacaaatactaggttcgatgagatcttggatggaccacggaaatggcacagtcgctgccatattcacctgcaactcctccgttgcaattcgagatgaacagagaaattgcaatccccgatatggttccttcttgtcggtaagagatggccctctctgtcttagtgtcatggtttccattgattggtgtcaggcgcaatgcaaggtagccagatcagaatacattagatggcaaggcaaggcagccacatcagaatgcatactctgttttttctcctttttctgtgacagcaattcatgttgaatgtggacccaagttcaagaatgttatgtatcatgcttttagttcaataaatatcaataatcc

SEQ ID NO: 3373 - DNA, 1001 bp, Oryza sativa
  ref <308>: DATABASE ACCESSION NUMBER: AK061060
  ref <309>: DATABASE ENTRY DATE: 2001-12-06
gtgccgcgcgtgcagctgccgttgccgacctcgcgctcgccgcaggccaccgcgccgccgctcgccgccggcgccgcacgccgtactgggggggagagggattcggagagatgcctccgaagcggcagcggtcggcggcggggccgtcgggggaggcgccggtcaacagcctggacgacggctgcctcatgcacatcttcagcttcctcagcccaatcccagatggcgcttccttgcatgccatcctcgactgtggttgcgtgttgagaggccaatcagaaatacaatagagccaggagtctatccaaatcttgagtctgctgtttctgcagctaggcctggggatactattctaattgctgctggtggcacacatgttgcacgtaatatccaaataaagaagcctctctgcattattggcgggggtgagcttcctgacgacacagtgttaacatgttcgcgtggctctgacaatgcgttggagttccattccacctgcaagattgcaaatctcactattagagcagagcttgggtgttgtttgcttcatcgaagtggtagattaactattgaggagtgcttgctccagtgcgagcaaaatcctctggattatttgtccttccctataattagcacagcgattgagtatgattcgttctcatcactcaaggagcaaggacatggtgtaactgttgttcgcacccgcattgaggggggtgcgaaggccgtcaggactaatggaacactggcgctgcaacatgtgcgggctatctattctcgcagttctgttttcttctggttcgaagtaggagaaaggtaggaattcatgtaaacctgtaaggccatggccatgtatcctatccagtatcaactcttggcattgtctgcctcctgtttgttgtaacatatgataaatattttctatttggatcaacagggacactagttacaagttaactgcataaagtttgataatttcataaacttagctgtcacagatc

SEQ ID NO: 3374 - DNA, 1167 bp, Oryza sativa
  ref <308>: DATABASE ACCESSION NUMBER: AK061061
  ref <309>: DATABASE ENTRY DATE: 2001-12-06
gttgcgtctcccgccgcggtgacctcacctctcttcctcgccgccggcggccgcgcgtccatcgcgtcgccgtcgccgccatggccgccaccgcactccaactcccagtggccagctcgcaacgtctgacgctgaggcgtttccccggcagcggctcgttgggtcggtactctgggttgcggtggcccgtcgcggcgcaggcgaggagggcggcggaggaggggtttcgtctccgtgtcgcgttcaacccctccgggaacttcgacctctccctctccaccgaccaagacgatgccccacaagttgagcctccaccaccacctacagaaggtcgctttgagattgtcatcaacaccgatatcatccggacgctcgacctttcgcctgttcatgaagtacttggtgacttgaattccctgacaccagctcaaacaagaaatctcttggatcgaacggtcgggtttactataaactatgagagggaggatccatatgatgtgagggagctgtcagagttccctgatataaggctatggtttgtgaggcttgatgcttgttacccttggttccctgttgtgcttgattggagagctggtgaacttgccagatatgccgcaatgctggcccctcaccagatgagcatgaggcttggtgtggtcttcaacccggaggcgctggagctgtttgtgatgaagaaggtgttcattgtttactcatggctaaagcagcaggaacatcctaaacctggactcaagacggctgacatggccaggatgcttggtttcggtataggagatgaattattcgacttgattgagaagtatcctgctggtccttcatgaatctatctccataacctagagaattttgtcaataataggcatcacatcatacctttttctttttttttttaagcatcacccggggcgaaatgctcacctgaatatggattacatcatactgaatcaaatgataactgttttcagtcgtctgggctttgctatatgttgttgttgtctacaggaaacaattcaatgtgtaaatagtgccaaagaaatcaaattttagctcaggagtacagtttgagattttgcttctggtgctagtaactttgtaagctcctgcaactgtgatatgaatataattttgccactaacgccttgcttg

SEQ ID NO: 3375 - DNA, 1207 bp, Oryza sativa
  ref <308>: DATABASE ACCESSION NUMBER: AK104427
  ref <309>: DATABASE ENTRY DATE: 2002-08-28
acagagaccaaacgggccaaggagagaggagcagcagcagcgccaccgctcgcgagatctcctactcctcgtcgccgacgagccgcctcctcctcgtcgtcgccggcggcagagcaccggagcagccaccccatggcgtccccggacctcctcttcaacctgcgcaacctcttctacctcggcgcctaccaggccgccatcaacaacagcgacgtcccgggcctcgacgccgacgccgccgccgagcgcgacgccatcgtcttccgctcctacgtcgcgctcggctcctaccagttggtgatcagcgagatcgactcgtccgcggcgacgtcgctgcaggccgtgaagctgctcgcgctgtacctctccggagacaaggaaagtgcgattgtcagtctgaaggaatggttgagtgattcggcggttggaagcaatcctgttctacgattgattgctggaattatatttatgcatgagcaagactacactgaagctctcaagcacacacactctggtggaactctggacctgcatgcattgaatgtccagatcttcattaagatgcaccgttcagactatgccgagaagcaattaaagatcatgcaacagattgatgaggaccatacactgacacaacttgcaaacgcatggctggacattgctgttggtggctctaagatccgtgaagcttacctcatattccaagactttgctgaaaaatacccgatgacaggaatggttctaaatggcaaggcagtttgctgtatgcacatggggagctttgatgaggctgagactcttttactcgaagcattgaacaaggatgcaaaagatcctgaaactcttgctaatcttattgtgtgtaatctccaccttggcaaaccgtcatcaagatacctcagccagctgaaactatcacaccccgatcatgtgctagtaaagcgtgccgtatcagcagaagataacttcgagagagctctccaagccgtcgcttgaacacgtccgcggaaaacgcttgccagattgcagataacacaattgatcccccatgttccattttgagtgccttaacacagcgaaaattatgttgcatttgctcagtctgttttgctcaaatggtgatatactacccggccaatcttgtactctgaacccctgctgtataaacaaatataatgtagaatcttgaatggtgacgtttgtggtc

SEQ ID NO: 3376 - DNA, 1681 bp, Oryza sativa
  ref <308>: DATABASE ACCESSION NUMBER: AK061062
  ref <309>: DATABASE ENTRY DATE: 2001-12-06
aaaaaaagatcagtggatccagcattgcactgaaaacttgctcccatcgattaaacgctctcgcgtcgccctcccccgggcgactcgggaggcgacgccgccgccgtcctcctcctcctcacgtctcctccccccgcctcaccgccgcctgagcgggcaccggcaaagccttgcgcccacaagctaggacggcggcggtggggcctcatctcgcctccacgcgctcggcggctggtgttggacgcgtcgacgctcgtgctgacggtgtcgacggcgaggtcctccagatctgcgggtgccggtggttgcagcgcggccggtggcagcggcggcggtggatgccgacggcagctggcgacagcggcggcggggactgcggtggcgggcggcagctggcgacagcggcaacggctatggcggttcgggcgcgtcggcgctcgtcctggcggtgtcggcagcgaggtcctccagatctgggggtgctggcggttgcgatgcggctggtggcagcggcgacggcggctggcaacagcggcggcggtgattgcggtggcagacggcggctagcgacaccgacggcggctatggcgacaacgctgatggcggctgtcagcgacgcgacgcccgtggacggcgcggcggctgtggcagacacggctctagcggtgactggcggatgcggcagtgattgcggcgttggcatcgaccggcaatggcagttggtgggcagtggcatcgtcggctgccgttggcggaggaggacatggcggcggcgtcggggcgggtgctggctgcgtggtggcggagggtgacggcgcaacggcggtctgcgaaggcggtgtcggtggcagcgacgacggcggccgtgattgtggaggcggtggtgatgtcggcggcggggatggagttggggatgaggtgaggatggcgacagtgaggtggctgggtgttcggcaacagcggctgtggtggtggtgaccgtgtctgcggtcatcagaggcgtgacggtctcggacggctagccgagggcgtgggagatggcgacatctgaccggcgtggcatcgtttggtgaaggggtcggagactggcttgacgcagagaggcgcagccgatgggagcggaggccggctcggcgcgagaggcgcgagcggcggagatggaagccggcgtgaggaggagctgtcggtggatgtggcgcgtcttctgcacacgaaggctggctgacgggagacgccggttcaggggtctaacatgtcggcagagcttgtgtggtggtggagtatcagtgcgttagtcgtggattcgcttgtggtgagcggcgggtcgtgctgtctcacccctcaagggtgtttgccgggtgaaagcctagtcttggctcctttgagtcccgacggacggcggcggcggtttttccgtcgcttctcttcttgaagacgtcgttctggcatcccctagggggcgatctcgtctgtgtccctttgttggtctagtggcggtcggtcacgcttagcggcggtcgatccggtgctagacttctcctgggtttgtgtgttggcgatgtcggtgtgtgggtggtgttttttttttcctttttcctggttacgaccctccaggttataatcttgtaatttttgtcctgctctatcaatagaatttcgcatcgtctcgtgcgagttgttt

SEQ ID NO: 3377 - DNA, 1432 bp, Oryza sativa
  ref <308>: DATABASE ACCESSION NUMBER: AK104428
  ref <309>: DATABASE ENTRY DATE: 2002-08-28
gcaaatggcgtcgtcgaccagcctcgccgcgctgccctcgcagctcgcctcccccgcccgccgcgccgccctctcccggtccgctaccgcgcggccgcgccaccaccaccaccccctcctccgcgcaccgcccaaaggctgcaggctggtggtgacctgcaacgcgcagacggcggtcccgaccagcattgcgcagggcacgcccgtcaggccgaccagcatcctggtggtcggcgccaccgggacgctgggacggcaggtggtcaggcgggcgctggacgagggctacgacgtgcgctgcctcgtcaggccccgcccggcgccggccgatttcctccgcgactggggcgccactgtggtcaatgccgatctcagcaagccagagaccattcccgcgacgcttgttggtattcataccgtcatcgattgtgctacagggcgtcccgaagagcccattcggacggtagattgggaaggaaaggttgctctaatacaatgtgctaaggccatgggaattcaaaagtatgtgttctactctattcataactgtgacaagcacccggaggttcccttgatggaaatcaagcattgtacagagaagtttattcaggatgccggtctggattatctcatcatccgtttgtgtggtttcatgcagggcctaattgggcaatatgctgtgcccatactagaagagaagtcagtatggggaactgatgctcctacccggattgcttacatggatacccaggacgttgctcgactgacgtttattgccatgcggaatgagaaggctagcaagaagctcttaacttttgccggaccacgtgcctggacaactcaagaggtgattacactgtgtgagcggttggctggccaagatgccaacgttactactgtccctgttgcagtgttgagatttactcgtcagttgacacggttcttccagtggacaaatgatgtggctgacagactggcattctcagaggtcctctccagtgacacaattttctcagttccaatgaatgatacataccagcttcttggggtagattcaaaggatattctcaccttagagaagtatttgcaagattacttcactaacattttaaaaaaattgaaggatctcaaggcacagtccaagcaaactgacatattcttttgacaagaaggatatctacaaacctatggatatattttctgatgcagatctgtgcttcaaaacacagatgagtgaatacaaattttcttgtatatctgttgttgtggtatgtgcaagaagtgcatgctattaggttatgtctacagaatcccaactattgaactatcaggtcatgtatataggatctcaactattcaactatcaaagacctggagtttgtgtagatcagacctaaattcatgaattcacagtcagcttctgcttttctat

SEQ ID NO: 3378 - DNA, 963 bp, Oryza sativa
  ref <308>: DATABASE ACCESSION NUMBER: AK061063
  ref <309>: DATABASE ENTRY DATE: 2001-12-06
atgagtccgatttatctgagaatgactacggaatgcgcattgacttgattaccagagtttttggtgctaatgcagctgaagatttttttgagaaacttccagcttgtgtgcaatcactggaagcatatacagctctcctacattcttatgctcgatccaagatgacagacaaagctgagaggctgtttaaaagaatgaaggatgccaacctttccatgaatatccttgtttacaatgaaatgatgaccctgtacatttctgttggtgagcttgataaagttccggtcattgctgaagagctgaaaaggcaaaaattttccccagacctcttcacatacaatctccggatcagcgcttctgcggcatcaatggatctggagggcttcaaaggaatccttgatgagatgtcaaaagatccaaactccaatgaagggtggaagctgtaccagaacctcgctgtgatttacgtcgacgctggtcagcttgttggttcaggaaactcgctggtggaagcagaggcgaagatcagccggagggagtggatcacatacgatttcctcgtaatcttacacaccgggctcggcaaccgggatagaatcaaggacatttggaaatccatgctgatgacttcacagaggatgacgagtcggaactacatctgcgtgctctcatcctacctgatgtgcgggcagctgaaggatgccggggaagtcatcgaccagtggcagcggtcgaaagccccagagttcgacatctctgcctgcaataggctgtttgatgccttcctgaacgccggtttcaccgacacggcaaatagcttcagggaactgatgctgcaaaagagctgtatactgacaagcaggcaagaacgctcttcctgagtggccatccatgctgaaactgttgagtaggattatgtcattacatgatgcaataataatagatactttccagttggttgct

SEQ ID NO: 3379 - DNA, 1314 bp, Oryza sativa
  ref <308>: DATABASE ACCESSION NUMBER: AK061064
  ref <309>: DATABASE ENTRY DATE: 2001-12-06
atcaactgcaagcttacatcacactagctaattagctacttactcttcttcttgctagcttgctagcttctgcatttagacattgcaaaatctgaaaaaacttgagaaattaactaaacaaaatggttgttccggtgatcgacttctccaagctcgacggcaccgccgcagagagggctgagacgatggcgcagatcgacaatggctgcgaggagtggggattcttccagctggtgaaccatggcgtcccgaaggagcttcttgatcgggtgaagaaggtgtgcttggagagctaccgactccgggaggcggcgttcatggagtcggagccggtgaggacgctggaggggctcatggcggcggagcggcgcggcgaggcggcggcgccggtggacgacatggactgggaggacatcttctacctccacgacgacaaccagtggccgtcgaacccgccggagttcaaggagacgatgcgcgagtaccgcgcggcgctgcgggggctcgccgagagggtgatggaggccatggacgagaacctcggcctcgacaaggggcgcatgaggcgcgccttcaccggcgacggccgccacgcgccgttcttcggcaccaaggtcagccactacccgccgtgcccgcgccccgacctcatcaccggcctccgcgcccacaccgacgccggcggcgtcatcctgctgttccaggacgaccgcgtcggcggcctccaggtgctcaggggcggcgagtgggtcgacgtgcagccgctcgccgacgccatcgtcgtcaacaccggcgaccaggtggaggtgctcagcaacggccgctaccgcagcgcgtggcaccgcgtcctccccatgcgcgacggaaaccggcgctccgtcgcgtcgttctacaacccggcgttcgaggccaccatctcgccggcggtgggcgccggcggcgagtacccggagtacgtgttcggcgagtacatggatgtgtacgccaagcagaagttcgatgcgaaggagccacgcttcgaggccgtcaaggcgccaaaatctgcttaaagttaaaaatagacttttatttgtgaattaattaattgattagttgcataaactatacataaccgcttttgctattcaagataaaaaaataggtgaccttacaaaatttaagtggttattattgtcatgagaatacaactattgttatgttacagtatatagtttggtattttagtgtgtcacggtttgtcagtaggaatatataataatgtaatagatcgtgttgttatatatacatgaataaactatatagatttttttaatt

SEQ ID NO: 3380 - DNA, 1068 bp, Oryza sativa
  ref <308>: DATABASE ACCESSION NUMBER: AK061065
  ref <309>: DATABASE ENTRY DATE: 2001-12-06
caggaccatatgtgcaaccttcactggtggttcaaccatcatcacaggctacccaaccgcagtcaatcttacctggcaatatgtatagagcaatgtcatcatcaccttttagtagtacaccaatgcctatgccacatggcacctacagagctgctggggcacaaccgcatgctccctctcctcatctccagcagcttaggatgccgtcaccttatgccacgagtcatggaaatcagcaccaacgaccatctatcctagcatccctactgccatttgtgctcccatctagttcaaatcctagcctcacggcacccctgtcattgaacacggttgttcacaggacctcaggtccactgaatgcaggtgctggaagccagcacgctggatctcaaatttcaggtgtcaatccctcaggttcttctgcatcagcatcactgaatacatggctaacagctaggcttgcgctgactagtgaggccagagggacggtctccagcacagaggttgtgtgcctttctgacgatgaatcgtagtgaggaaggttcagtcaaattgtaggttactagtgcaatagttaactgatttgagttatagtcgatctaacccctttagtattctgatagcaagagacggacatcaatagaagtacagtgggtcggggtttcttttttgggggatgacgggtgctaacatcaatttgaatatccatcttgtataatcagtctacctttcctgcaaatatcaaaccttgttgatacgggtctggaaatgttgaggttaccccttttcctgctgaagataatatgatgggctgctgatattttttttgttctgacatgtgggtattgtctctgctatctcattgacagtaaggggctttactgtcaatgagttgacctgttgtagcattggatccagtctgtcaaccctgttgttacagaaatgtgagtgtttttttagttggaaatgtgggtgcattttgtatattgcttaatcttagtggcacatgctggtgcatgttacgacgtttattttgatttttgaagacttgtggatgttggaacttgg

SEQ ID NO: 3381 - DNA, 1189 bp, Oryza sativa
  ref <308>: DATABASE ACCESSION NUMBER: AK061066
  ref <309>: DATABASE ENTRY DATE: 2001-12-06
aagtgctcaagcaccaaccccaaatcccctctcccccccaatcctcaaagatgccgtcctcctcctcctactcctcctccgttagcaaccctggtcccgagctacctaggtcagcgcgccaagaaccatgctcttgtctcctccagctccaccgccgctgaagccgcccgtccgcctgaatcgactcccgcagcggcagccgggaggcggcggccggttcttgctgccccggaggaggccaagaacgccgcggtcctttggcgtggtggtgtgcatggcggagatggccagggttgggaccgggtcctcgtgggaggaggagttgggcgtcccggaggagagcgacgcgatcctgggaggcggaggcggggacgggcaaaggcggcaggcgaccaggtgggagctcgtcgaggcgagactgaaccagacgagtaaatggctggtcgcgggttgttatacttctgcagccatttggaagcatgatgctcttattatgtgggctatgattggtgctgttctaaactctatgttttcaaatcttcttaaacggatattcaaccatgaaaggcctgtgtctgctttgcggtctgatcctggaatgccttcatcccacgcgcaatcttttctctattctgcggtgtttctaattctttcattgttctactggctcgggagaacttatctgtcagttattcttggggttgcaattctagcaatgtgctgctatctttcgtggttacgagtgtcgcagcacctccatacactgaaccaggttcttgtgggtgctatagtaggatcagcctttggtgctatgtggtttgcgctttttaatttgctcgtgcaagaggcgtttgcttcttccgtaccggttcagattgcggtgactatcgggacggcaatattatgcatcggctttgtcatccatgtcgttcgccactggttcaaggatgagtgaatagcaatatgaaatcgcaatgaccaataggtgattgattgagacacaaaatcaactggtaacggaaggctctgtatactctatgggaagatcatactggaattatttgggagtgggttcgcaagatagtcacagatagcaacctcagttcattttttggcatttttgctgcaggatagtcacagcactgattcttgtaatacagaacagtttatgcttgaaatttcttccacg

SEQ ID NO: 3382 - DNA, 870 bp, Oryza sativa
  ref <308>: DATABASE ACCESSION NUMBER: AK061067
  ref <309>: DATABASE ENTRY DATE: 2001-12-06
gatcaaatcctctcctcgatctctcctgcaatcctcatcacacagcaaacccaaaccgcgagcggaatcctcagcctgctgagagagcctgagaccaagagggggattcttttttggttattgacgatggcgcagcgcgacaagaaggatcaggagccgacggagctcagggcgccggagatcacgctgtgcgccaacagctgcggattcccgggcaacccggccacgcagaacctctgccagaactgcttcttggcggccacggcgtccacctcgtcgccgtcttctttgtcgtcaccggtgctcgacaagcagccgccgaggccggcggcgccgctggttgagcctcaggctcctctcccaccgcctgtggaggagatggcctccgcgctcgcgacggcgccggcgccggtcgccaagacgtcggcggtgaaccggtgctccaggtgccggaagcgtgtcggcctcaccgggttccggtgccggtgcggccacctgttctgcggcgagcaccggtactccgaccgccacggctgcagctacgactacaagtcggcggcgagggacgccatcgccagggacaacccggtggtgcgcgcggccaagatcgttaggttctgagaggcaaacaaaattaaaaaaaaaatctactgttttagcaagaaatggagaaaaaaattgggaattgaaggtgtggatgttattattatgctgttctcttctcgcaattgtttttccctttttattctttttaattgcaaacgggaggataagtggtggaaaaggaatagtgtaacaataatggtgatgtgaggtggttgagggaaaaagaatcgaagaacaaatggattgggtgtgtatttgtctcgc

SEQ ID NO: 3383 - DNA, 1259 bp, Oryza sativa
  ref <308>: DATABASE ACCESSION NUMBER: AK061068
  ref <309>: DATABASE ENTRY DATE: 2001-12-06
aaaacacaaagcagacaaggtagtagtacaggcttttgtacgtacgtagcagagggagttcccaagatggctggggcctctgccaaggtcgtcgcgatgctgctctccgtgctcgccacgtacggcttcgccgccggcgtcgtctacaccaacgactggctcccggccaaggccacctggtacggccagcccaacggcgccggacccgacgacaacggcggtgcgtgcgggttcaagaacaccaaccagtacccgttcatgtccatgacctcctgcggcaacgagcctctgttccaggacggcaagggctgtggcgcctgctaccagatacggtgcaccaacaacccgtcgtgctccgggcagcccaggacggtgatcatcacggacatgaactactaccccgtggccaggtaccacttcgacctgagcggcacggcgttcggcgccatggcgaggccggggctgaacgaccagctccgccacgccggcatcatcgacatccagttcaggcgcgtcccgtgctaccaccgcggcctctacgtgaacttccacgtcgaggccgggtccaacccggtgtacctcgccgtgctggtggagttcgccaacaaggacggcacggtggtgcagctcgacgtcatggagtcgctccccagcggcaagccgacgcgggtctggacgcccatgcgccgctcctggggatccatctggcgcctcgacgccaaccaccgcctccagggccccttctccctccgcatggtcagcgagtccggccagaccgtcatcgcccaccaggtcatcccggccaactggagggccaacaccaactacggctccaaagtccagttccgttgatccatcgatcgatctacctatgtgcatgcaatgccttcgtcgtcttgtgtcgccggtcaagaacgaattttgattctaccgatcggcagttcggcactagtactgtactacgattctgtgtgtgtgtgtgtgtgtgtgtgattgcaatgcaaattgcgaacggatcaattaagagcgtttttttctctctctctttttaatttgtagttgtgtgtgtcagcgagatgtgtgggaaatggaacaggggcagggcacgcagtatccatgtgcttgctctgaaccgcccacattgacaaatgacccaatgccaatatgccatatatatataccggattggcagacttattgtattgtgaccaaaaccaagtttgtaattgaactgaattaatacggtgtgtttgcttatc

SEQ ID NO: 3384 - DNA, 1025 bp, Oryza sativa
  ref <308>: DATABASE ACCESSION NUMBER: AK061069
  ref <309>: DATABASE ENTRY DATE: 2001-12-06
gctcctacaccgcgccgtcgccagcagccgccgccgctgcctctcctcctcctcccctcgccgccgatccaatccggtcactttcagtcttttttcttgagggggagatggcggtttctttcaccaacgttagctcagaggcaggcctcaaaaagctcgatgagtaccttctcactcgcagctacatctctgggtaccaagcctccaacgatgacttggctgtgtactctgcattttcaactgcgccctcttcaagctataccaatgttgctaggtggtttactcacattgatgcactcctacgtctgagtggagttactgctgatggtcaaggcgtaaaggtcgagtcgacagctgttccttcagcttcaacccctgatgttgctgatgcaaaggctcctgcagctgatgatgacgatgatgacgatgttgacctttttggtgaggagactgaagaggagaagaaggcagctgaggagcgtgctgctgctgtcaaggcttctggcaagaagaaggaatctgggaagtcctcagtgttgcttgatgtcaaaccatgggacgatgagactgacatgaccaaattggaagaagctgtgaggaatgttaagatggaaggcctcctttggggcgcatccaagcttgtcccggttggttacggtatcaagaaattgcaaatcatgatgaccattgtcgatgatcttgtgtcggttgatagtctgattgaggactacttctacaccgaaccagcgaatgagtacatccagagctgcgacattgttgcgttcaacaagatctagatcttccttgagtcaggtgatggcgatcggtgcacaaagataaaaagaaaaatccggaagtttgaattaccgttgatacttcaatctagaagtttgaattaccattgatgtgtcgttcgtggtgtcaactagtacttgagcccgttttgtgttgagattgtagcactctacttctactgagatcgttttctcctcctttaatgtttaaagaccaatcaggttattatt

SEQ ID NO: 3385 - DNA, 1207 bp, Oryza sativa
  ref <308>: DATABASE ACCESSION NUMBER: AK061070
  ref <309>: DATABASE ENTRY DATE: 2001-12-06
cttgatgtgaaaaattatttggttgatcttgagaaaaaaaaatcccagttcatgtgcatgctctttgtatttcgcttgctgcattttttttagtgaattgaactttgagccacctttgattaccattgttacaatttggactaggctaaagctaaatttttcaatttgggcaaagtatctttacatgatgtttcaatttggactcccttcttcttcctccaactctcttcccccaatctccccttcaatctgtaaaatcttccaaagaattcaaagggtagtttgcattttcaatctcgactacctagtgcttgtggcttaatttcaaggacagcggaaggtgcacaacaagtattcctactggtagcaactagcatacgaagaagctggccggcaatggcagacagttgctgctactttctgaactgacgataagaactaagtcaagtagcagatagccacgctctcaagctcatgctcgacctcagctagtgctacatgttatgctgcacgcctgcgctaaatttccacatgtgtcgctcgagcttcaacaagttttgcagcgctcaagctccgccttcgtagtgccgcctgcatttgagctcgaaatcaacttcggcgggtggctaccctgtgaaaggttttgcttcttgccttttcatgcactgcacctgatcgagaaagagaccttgagctgtacggagaaaagagaggaagaaagggagttggaggaagaagaagagagtctaaattgaaacattgtgtaaacatacccggttcaaagtgaaaagtttactttttcactggtctaagttacagtacaggtaagaaaaaatagcccaagatgcaatttactgttttttttctttccagttccagttctcgaaggctagctgttggcctgttgctgggtgctactgctaccttcttctcatgtttctcgagaaggttattgccttccttatgttccgttctataatatatcttccggttattttgatttcacacgagttcttgtaatcttttgccatggatcaattagtacttttactgaaatccttattatctagttttgccctttaaatttgggttgccatccacccatctgttctcatcatgcctgtaaaaacaaagtcaaaatatataatagattgatacttcattttgtaaatatcatttttggtgaatagagatatatcatttcaac

SEQ ID NO: 3386 - DNA, 1149 bp, Oryza sativa
  ref <308>: DATABASE ACCESSION NUMBER: AK061071
  ref <309>: DATABASE ENTRY DATE: 2001-12-06
aagaaattttggtgatagtggatcctcatggagcggaggaagttacagaaatgatgagtcacgtggagagagatctgaagatcgctggaacacacgagattctgatggtggcagaggaagaggaagaggacactttggcagaggtgatcgcaatcaaggtaataactatggttcgggtgacaacaatgacagaacctggggttctggcaggggaaacagggaccaggatggttgcaaaaattggaaccgaaatgatgacagaagaccgttcggtcaagatcgaggtggtgactggtcccaatcttccgactggaacgccaacaaaggacagtccagctggggagcgccaaaaccttctggtggagatgaccaggcaggaaaaaacaatggaaacaatccgtggggtgctcctgctgacagcatgactggtggtggatccggtggaggagggtcttggaaaaataagactgaggatacctggaattcgtctggaggaacaagggattcaggtacgaccccaggaaaatcttcttggggtggatcagaagatggccaaaagaaagaaggatcatgggggaaaagcgaggggagcgggagacaagtcggtggaggcagctcctgggacaagccggatggaggatggaacagcagcaagtgcgagggcacccaaggaggtggcggcggtagctcctgggacaaggcggatggcgggaacagtaacaagggcacccaaggaggtggtggcggcagctcctgggacaaggcagatggcggatggaacagcagcagcaagggtgggagctccggcaatggtgggtggtaagctcgatccaggatcagctgcaatccattagtgcatgtatataatggttgccatgcagcttgaacttgctgtatatttctactctttctagacttagaacgctattattagtaataacgtcgccatgctactctaaactacgaacttaccttaattccagcagaacattatctattgctgacggttattaaggtagctttgtatcaccatctctacgattcccaggtgtttttatgctccttttgttttgacgatgtgatattttgtgttagtttgatggatgcgcctctgggcataatgatgaagctctcaaacaccgtttctcc

SEQ ID NO: 3387 - DNA, 1686 bp, Oryza sativa; identical to SEQ ID NO: 1486
  ref <308>: DATABASE ACCESSION NUMBER: AK104429
  ref <309>: DATABASE ENTRY DATE: 2002-08-28

SEQ ID NO: 3388 - DNA, 1052 bp, Oryza sativa
  ref <308>: DATABASE ACCESSION NUMBER: AK061072
  ref <309>: DATABASE ENTRY DATE: 2001-12-06
gagccccaaaaccttatcttcccaaagcctcatctcctccttcctcccaccacctcgcctcgccatggcggccaccctcttctccacctcgctcacccccaccttcctcccggccgtcccctgccccaagcccgcgccgccggcctcagcctgcttcccctgcgcgctgccgccgcgcgccgcgctagcggcgccaccggcaccgctgcggaggcggctttctcccgtggccgtcgcggtgtcgtcggaggtggaggaggaggagggtggcgcggagtccgagggggagttcgccgaggacctcaaggtgtttgttggtaaccttccgttcagcgtcgacagcgcgcagctcgcggggctcttcgagcaggccggctccgttgagatggtcgaggttgtatatgacagacagaccggaagaagccgtggctttggattcgtcacaatgtctacagctgaagaagctggtgctgccatcgaacaattcaatggatacacattccaaggaagacctctgagggtaaactcagggccgcctccgcctcgggatgatttcgcgccaagatcacctaggggtggtgggagcaactttgattcatccaacaagctctatgtagggaaccttgcttggggtgtcgacaactcgacactcgagaacctgttcagtgagcagggaaccgtgctcgatgccaaggtcatctacgacagggagagcggcaggtcgaggggttttggttttgtcacctatggctccgctgaagaagtcaacaatgccatatcaaatcttgacggcgttgacctggacggcaggcagatccgagttacagttgcagaatcaaagccaaggcgccaattttgagatttttttttggttatgttgatttagaggttgatgatgtgcttccaagatgttagtttgtagcttctactattgtacaccaatatggcgaaaaggaaaattgatgcggttgatgagagactgaaagtctgaaattgtacacgaggggaagatttttccccaaagatgcaatatgcacagatcctcttgttag

SEQ ID NO: 3389 - DNA, 1106 bp, Oryza sativa
  ref <308>: DATABASE ACCESSION NUMBER: AK061073
  ref <309>: DATABASE ENTRY DATE: 2001-12-06
ctgcctgcctacctgtcctgtccgtccaccttgctgtgttaaatgcgtttctagcgtagcgtagcagatccaacaaacacctagcagcagcagcattggtacgtactcctcctagtcctagctagtgagtgagcgtgaggagcagtgagcatggcgtcgccacagctacagctgcaggtactagcgctgctgctgctgctcgccaccacggccacggccacggcgacgccgacgccgacgctgatattccttttgggcgggcagtccaacatgggcggtcgcggcggcgccaccaacgggccgtgggacggcgtggtgccgccggagtgcgccccgtcacctcgcatcctccggttgtcccctgagctccggtgggaggaagcgcgggagcccctccacgccggcatcgacgtccacaacgtgctcggcgtgggcccggggatgtccttcgcccacgccctcttccgcgccatcccgccctccaccgtcatcggcctcgtcccctgcgcccagggaggcacgcccatcgccaactggaccaggggcacggagctgtacgagcggatggtggggcgcggcagggcggccatggccaccgccggtgcaggtgcaggggccaggatgggggcgctgctgtggtaccagggggaggcggacaccatccggcgggaggacgcggaggtgtacgcccggaagatggagggcatggtgcgcgacgtccggcgagacctggcgttgccggagctgctggtgatccaggtggggatcgcgacggggcagggcaagttcgtcgagcccgtcagggaggcccagaaggcggtcaggcttccttttctcaagtacgtcgacgccaagggcctccccatcgccaacgactacacgcacctcaccaccccggcgcaggtcaagctcggcaaattgctagccaaggcctacctatccacgctctaattatatcatttgcgttcactgctggctactaagtactgattcattcctccccttcccctctatgcaaaatctgtcatatggagcgcgtgctgtatgtaggggatgagtatcttaccacttcttccttcattccggattaaaatataatgttactg

SEQ ID NO: 3390 - DNA, 1785 bp, Oryza sativa
  ref <308>: DATABASE ACCESSION NUMBER: AK061074
  ref <309>: DATABASE ENTRY DATE: 2001-12-06
atctctaagagcgatatactccatattactatttcatcgagagtttcgttacatatccaaaaacggtctcaaagaacccaaccatggcagccacgccccctcctcctccactccacattgtggtgtttccatggctggccttcggccacatgatccccttcctcgagctctccaagcggctggcgaggcgaggccacgccatcaccttcgtctccacgccgaggaacgctggtaggctgggcgcgatcccaccggcgatgtccgcccacctccgcgtcgtgtcgctcgacctcccggcagtcgacggccttgccggagggcgccgagtcgacggccgacgtcccgccggagaaggtcgggctcctcaagaaggcgttcgacggcctcgccgtgcccttcgctagcctcatcgccgaggcctgtggcggcgccgccggtgatggggaagaagccgccgctgggttctcgaggaagccagactggatcatactcgacttcgcgcagaactggatatggccgacagccgaggagtatgaggtgatcttgaggctttgagctcatgctcatcgtctccattatattaccatttcggtgaataaaaggactaattcattgatttttgtttgttttatttgaaccttgaagattgcatgtgccatcttctccatcttcccggcggcattgggggccttcgttggcacgaaacaagagaacctagctcacccgcgtaccaccacggaagactacatggcccagccagcgtggatccccttcccctccaccgttacataccggcggcacgaagcggagtggatagcagccggtttccggcccaacgcctccggtgtgtccgatgctgatcgtttctgggactcagagcgcccctcctgccgcctcatcatctaccgtagttgtcccgaggcagagccgcgactgttcccgctcctcaccaagctctatactaagccggccatcccctccggcctccttgtgcctcccgctcttgacgacaatgatattggtgtgtacaatagatccgaccggtccttcgtggcagtgatgcaatggcttgacaagcagccaaacaaatctgtcatctatgtttcactcgggaccgaggcacctatcacagcagaccatatgcatgagctcgcatttggactagagcttgctggtgtgcgcttcctatgggcactccgtcgtccgagtggcatcaactgccacgacgacatgctcctccccagtgggttcgagacacgtgttgctgcacgtggcttagtgtgcacggagtgggtaccgcaggtgcgcatgttagcgcatggtgcagtaggtgtattcttaacacattgcggctggggctccaccgtggagagcttccactatggtcagccactggtgatgctcccttttatcgctgaccagggcctaattgctcaggcggtggcggcaacgggggtaggtgtggaggtggcgaggaactacgacgatggctcgttctacagggatgatgttgcggcggcgatacaaagggtcatggtggaggaggaggggaaggaattggcacacaaagccatagagttgtgcggcatcctcggggatagagtccagcaggagatgtacctttatgagcttatcggctacttacagtgctacaaatgatcattgctcactatactctcgcgtctatcactctataccatgaatggccatgttcttgtgcctacaatgaacaaatgtattttcacatcttaataaatttctatagaaaaccatcaaaattaatgc

SEQ ID NO: 3391 - DNA, 938 bp, Oryza sativa
  ref <308>: DATABASE ACCESSION NUMBER: AK061075
  ref <309>: DATABASE ENTRY DATE: 2001-12-06
gacggtagccggaggaggcagcccgccgccgtgtcctcttctcctcgcggctgcggaggagatgagcggcggcgcgaggagggtgctcgaggcgtggaggctcggggtggtgaggtacggcgacgccctcgggctccaggagaggctcgtcaccgaccggagggccggccgggtccccgacctcgtgctgtcgctgcagcacccgccgacctacaccctcggcaagcggcgcaccgaccacaacctgctcctgccggaggccgacctcagggcgctcggcgccgacatccaccgcacggagcgcggcggcgacgtcaccttccacgggccgcggcaggccgtgctctacccgatcctctcgctccgggccatcggcctcggcgcgcggaggtacgtggaggggctcgagtccgccatgatcgaggtggcggcgctgtacggcgtccaggcgtgcccgggtgccgccggcgagaccggcgtgtgggtcggggacaggaagattggcgccatcggggtcaggatctcgtcagggtttacttgccatggtctggccttcaacatcgatcctgatttgggtttcttcgagcacattgtgccctgcggtatcgccgacaaggaggtcacctctctgcggcgagaggcggcggtggagctccctcccgacgaggtgatccatgatcagctcgtgcagagcttagcaagaacattctgcttcagcgatgtggaattcaaggatgaatccgagtgcgccgacatggtttgcttagctgcagataagcaatcctgattgttttactatgtatactgaacttagagttcttcagaacgtcttgccgtcaagtctggaaatgacattaggaaattttcgtctggttttgttcattgcgaatgaaggtgacctccattttggagcataaatgaagaataaatgatgctgt

SEQ ID NO: 3392 - DNA, 967 bp, Oryza sativa
  ref <308>: DATABASE ACCESSION NUMBER: AK061076
  ref <309>: DATABASE ENTRY DATE: 2001-12-06
acataattatcaaccggatttcgttaatgcacaaggaaaaccaagtaatggaatcctcacttgagaccaagctgattgatatgccacaaccacaagaaaccaatggtgacggcgaggcagctcctgaggcagatataagcatggccacgacgctgatgcccaacggtgtcggcgagcgtaaggcgacagctgcgcctgcgctgccggcggctaggccgccaccggagatgactgacaaggttatggccagcacggcgaacctggcgcagctgctgcctacgggcacggcgttggcctaccaggcgctgtccacgtccttcaccaaccacggccagtgctacaggtcaaaccggtggctcaccgctggtctcgtcgccgtcctcaccgcctcctccatcttcttctccctcacggacagcgtcgtcggacgcggtggcaagctatactacggcatggccacgccgcgggggttcaacgtgttcaatttgtcccgggaggaggaggaagcgcaggagttgtcgcgcaccaagctacgggagctgcgggtgcggccgctggacatcgtgcacgccttcttcacggcggtggtgttcctcaccgtggcattcagcgacgtcgggctcaccaagtgcttcttccccgacgccggcaacgacaccaaggagctgctcaagaacctgcccctggggatggcgttcatgtcgacgttcgtcttcttgctcttcccaacgaaaaggaagggcatcggatacaccgacaccactccccgtccggcgccagaaacgaacaagcctacacaagtttcagatcacatgccataggaccattatacttacactgtattacagtattgctaactgctaatttagtttgcatattagcgagattggaggtgcttgaaggacacaatgctaattcctccgttcaatttattgtcgagtaaaattattactgtttgacgtacatt

SEQ ID NO: 3393 - DNA, 1065 bp, Oryza sativa
  ref <308>: DATABASE ACCESSION NUMBER: AK061077
  ref <309>: DATABASE ENTRY DATE: 2001-12-06
aaatcaatccgcggtggcggcggcggcggcggcggcggcggtggtccacgtcagcttctactgcaattttagcatttgaccacgcatcaattttagtccatcctctgcgagtgggttcagcatatggatttgccaggtccaagatggaagaagggcaacgatggcaaggacttctcagcactagcagcagctaatcccatgtcagtcattgttgctgagctcaaggcctcattcataagctcaaagcctgtggcagttttgtcaggtccaggtggcggtgccattcttggagttgagccagagcaagccgtgatcctaaaccgtgctgcctttggccacgccgtcgaaattgctgcggcacagaagcactggttccaacttagccctgaggaggtcttctacctctgccatgttctgaactgcatcagggttgagtcacacgacaagaagcagatgagtgataagcaactgtggaatcacttcaggtccatgtcggagtcctttccagagatgtacaaggcttactcgcatctgagatttaagaactgggtggtgagatcagggttgcagtatggtgcagattttgtgtcttaccgtcaccatccagcactcgttcactcagaatttgcggtggttgtggttccagaaggcgcagcgtttggcaataggtgtggtcgtatggaggtgtggtctgatctactatgtgctctccgggcttctggcagtgtagccaagacattgcttgttctgaccatcagcagcggcagttgcgaactgagctccccagattgcttagaacagcttgttgttcacgagagaacaatcactagatggataccgcaacagtgccgtgaacagcggtctgaagcaagcagagatgaagccaatagggaagaactgattagcaaaaaggaaagtgtagagttcaacctctggggtgtgatacttggcttcagtgttctatctagcttgcttgtatacaagctgaaattcagacaatgaagcttagcatttctatgtactgcggagatactagttttgatccagttgcaatttcaaatcctc

SEQ ID NO: 3394 - DNA, 1727 bp, Oryza sativa
  ref <308>: DATABASE ACCESSION NUMBER: AK061078
  ref <309>: DATABASE ENTRY DATE: 2001-12-06
aaactcctccaatggcgaccgcgcgcgtctccctcatcctcctcgtcgtcgtcctcgccgcctccgcctgcgcggaggggctccggctgccccgcgacgccaagttccccgcggcgcaggccgagcggctcatccgctcgctcaacctgctgcccaaggaggccgggccaaccggcgccggggatgtccccagcgtggcgcccggcgagctgcttgagcggcgggtcacgctgcccgggctcccccagggggtcggcgacctcggccaccacgccggctactaccgcctccccaacacgcacgacgcgaggatgttctacttcttgttcgaatcgagggggaagaaggaggatcccgtcgtgatctggctcaccggaggccccggatgcagcagcgagctggccgtcttctacgagaatggcccgttcaccatctcgaacaacatgtcgcttgcttggaacaaattcggctgggacacgatttcaaatataatttttgttgatcaacccactggaactggatttagctatagctctgatgatcgtgatactcgtcatgatgagacaggcgtcagcaatgacctatatagctttcttcaggtgttctttaagaagcatccagagtttgcaaagaatgacttctttataaccggagaatcttatgctgggcactacattccagcattcgcaagccgggttcaccaaggaaacaaagcaaacgagggcattcacataaacttgaagggttttgcgatcggtaatggcctcacggatccagcaatccagtacaaagcttacaccgattatgcattggacatgaaccttattaaaaaatcagattacgacaggatcaacaagttcatcccaccatgtgaatttgcaataaagctttgtggtaccaatgggaaagcatcttgcatggcagcatacatggtctgcaattctattttcagctccatcatgaagcttgttgggacaaagaattactatgacgttaggaaggaatgcgaagggaaactttgctatgatttctcaaacttggagaagttttttggagataaagcagtcaaagaagcaattggagttggcgaccttgaatttgtctcatgcagcactactgtttatcaagcaatgctgacagactggatgagaaacttggaagttggcatcccagctctacttgaggatgggatcaatgtgcttatatatgctggagagtatgatcttatatgcaattggcttggaaactcgaggtgggtccactcgatggaatggtctggccagaaagactttgtatcatctcatgaatcgccatttgtagtagatggtgccgaagctggtgttttgaagagccacgggccactcagcttcctcaaggtccacaatgctggtcacatggttccaatggaccaacccaaagcttccctggaaatgctgaggagatttactcaagggaaactcaaggaggaatggcttgccgagcttcctgagcaaccgatgtatgctgcgatgtgataaaaatacaactgaaatagtctaataggtagtttgagttgccgtttcacggagtgcctgaagcttcatgtttccttttttaccctctttctttttcccaatgtatcaactgaatgcataattctgaaaataacgttggaaccgcgatgtaactaaagttccactcatgtacactgcaaatgaaaaatcaaatacatggaggggaaatgtttc

SEQ ID NO: 3395 - DNA, 1845 bp, Oryza sativa
  ref <308>: DATABASE ACCESSION NUMBER: AK061079
  ref <309>: DATABASE ENTRY DATE: 2001-12-06
ctcgatcgcgagctgttgttgttttggtggaagaatcggtccgtgcgtgatttgatccatggcggtgtcgtcgtcgtcgctgctgctccgccgcggagccaccggcggcgccgggagacggtggggtccgggggaggcgttgcggaggctggtgtcgtcgtcggaggcggcgccggcggagaaggttccggcgcggtcgccgccggtgatgccgccgttcgagcaccggcccaggccgtacgccgggtggagcggcgatgagatcctcgcgaagaggaagcagtttcttggatcgtctgtgttctactactaccagaagccgctgaacattgtggaagggaagatgcagtatctgtacgatgagaatgggaagagatacctcgattgcttcggaggcatcgtgacagtttcatgcggccattgccatccggatatcgtgaacgctgtggtggagcagaccaagctgctccagcacacgaccaccatatatttgaatcaacccatcgtcgagtttgcagaagcgctcgcgtccaagatgccaggaaatctcaaggtggtgtattttgtgaattctgggactgaagcgaatgaactggcgatgctgatggctcggctgtacagtgggaatctcaatatgattgcattgagaaatgcttatcatggtggtagtgctggaacaataggattgacgggtttgcagacgtggaagtacccaatccctcagggcgaaatacatcatgtcatgaaccctgatccttaccgtggaactttcggttctgatgctgtagcttatgccaaggaagtcgaagaacaaataaattatggtacctccggaagggttgcgggtttcattgctgaaactttccaaggcgtgggaggtgcagttgaactagctcctggatatttaaagttagcttatgacactgtccggaaggctggtggtgtttgtatagctgatgaagtccagagtggatttggtcgaactggaagtcactattggggatttcagacgcaagatgttattcctgacattgtaacaatggcaaagggaattggaaatggtctaccattgggggcagttgtaacaacacccgagattgcaaatgtgctggcgcaaaaaatccaatttaacacatttggtggaaaccctgtttgctccgttggtggacttgctgtgctcaaggttcttgacaaggagaaacgccaggcacattgtgctgatgttggatctcatttggtgaatcgtctaaaagagctccagcaaaagcatgaaatcattggagatgttagagggaggggattgatgcttggggtggagcttgttaccgataggaaggagaagacacctgccaaggccgagaccaatttattgtttgagaaactcaaggatctcaacattttagttggaaaaggtggtctgcatggtaatgtcttcaggataaaaccaccaatgtgctttacaagggatgatgcagattacctggtggatgccatggactatgcaatgtcagggctctgagagctgcaccctgaataccaaagccgtctgccatcctcaacgcaagaagattcatgtcatgatgctaccggtagcccagccaactctttccatgtacatgcttccagttccagttgatgtgttgtgtaacggtggcagaaccatgtaggtgtggaaatcccaagaataagatggaaggaaaggaccatgtaggtgtggctttcccattgtaaaagtggcagttctgcaacagtgagaaggccatgggtgattgtaagcagtgttggccttaggggcaacatgtgtatccaaaagaaaaactaataaatgtatgcttgttgtgcacc

SEQ ID NO: 3396 - DNA, 1119 bp, Oryza sativa
  ref <308>: DATABASE ACCESSION NUMBER: AK061080
  ref <309>: DATABASE ENTRY DATE: 2001-12-06
aaaaaaaacccaaaaccctactgcgcccatggcttcgccgccgccgccgccgccgcagccacctagcccctccgccgccacggcgggggcggcagcggcgccggtggacgcgctgttcctccagaacctgatgagccgggtccagctccgcccgcccttcctcgacaccaactccttcctcacccaggacctcgacgagttcctcctcaacgagttcgccgcgctgtcggccgccgcgggggcctccgacgatgacgacgacggcgaggatggggaaggggagggatccgatggggaggtggtctccggggaggcgaggcggcggcggacgctggcgagggaggaggccaagctggagaaggagatcgtgcggctcgtgctcgccggggaggcggaggaggcgctcaagcccaactccggccagtccgtcgccgtcggcgaccaccacatctgcgtcggcttccacgacgattccggcggtgtgtaccgcgtctgggagtggcacggccacgtcatgatcttcgacgacgaggatggctattccgcggagtacatctacggcaaccacttcgagcccctcgccgccgccaccgccagggcgaaggagaaggagagggagaagagggagaaggagctcagctcgggcctccgcgatttgatcctgggcgacactggcagcggcgccaatggctccaaggagaatggcaagggtggggcacccagggtggtgcgcaggaacgtcgtcaatgcccctgcggcgcctgcgaggtaataaaactcctctttagctctagcgcgtgtattgatggaagcgaggcatcaatccgagaaacagaagcaaaataatgatttgatctttccttttcttctgtagttgccgctgagggcggtttcttttgttctgatcagaaatgctatatactttgcttctgttatgatacacagtgtacccaactgggttttgagatgggagtatttgttccatatactacacatatgctgttccattatgtgcttaaatttttgctgctcatgtgaaagaacttatgcttgctgcacctgtcgattgtgaacttatgagttattatcactattgtaaagaatttggttcatgctttc

SEQ ID NO: 3397 - DNA, 1014 bp, Oryza sativa
  ref <308>: DATABASE ACCESSION NUMBER: AK061081
  ref <309>: DATABASE ENTRY DATE: 2001-12-06
actgcaaaatcgccaatcccaaccgcgccactgtcggtgtcggcatcggcgctggaggacctcgagctcgaaatcttgcctcccatggcctccacctcgaggcggtggtggtggtggccgtgggcgacgccgccgcccttctcctcctccgcctcgcggcaccacaagggggaggggtgggggctgggcgggcccgcgctggtgaaggccgtcgggtggctcctcctcgccggcctcctcttccgtgtgctctgctccttcccctcctccacctcttcgccggagatcagcgaagggaaatgtaacctttttgatggtgaatggataccaaatccctctggcccagcctataccaacaaaacttgtcgatttattgatggtcaccagaactgtatgttgaatggtagacctgacatgtcatatttacactggaggtggaaaccatatgagtgtgaactgccacaatttgatgaagtgagatttctaagtgctatgaggaacaaatcctggggtctgattggtgactccattcttcgtaatcaagttcagtcactgctttgccttttgtctaaggctgaagaacctattgaagtgtaccatgacaaggaatacagaaacaggagatggcacttccaatcatacaacttcaccgtgtcactcgtctggagtcccttcctcaccaaatctgaggtatttgaaaatgagaatgggcaatccacctctgaaatccagcttcaccttgacatacttgacccaatctggacaagtcagtatgagaccttcgactatgttgttattgccggtgcattttactcatactgaaaatgcagggtttgtttcaagcacattctgcaaatctcgaatcagggtcagtttcctgtgctcggtcgtgtactggtttaaccgaaatttgtaactagtaaaacctaaattttgtggttgtaaatcatatttcggttttgggccgggaagtggcttattgtttaatgtgtgcggctgtaacttttggaagtc

SEQ ID NO: 3398 - DNA, 1118 bp, Oryza sativa
  ref <308>: DATABASE ACCESSION NUMBER: AK061082
  ref <309>: DATABASE ENTRY DATE: 2001-12-06
agaaaccgttccccccactttcccctctctctccactttttacggattaggcggcgacgatgatggcttgcgtgtgcggcaggcggttgaccgacgattgcaggacgacggcgggcgggcgatggcatgggcttcctcggcttcctctggcggcgggcgacggcgacggcctgcgccagcagcgagcgacggggatggcctacgttagcggcgggcgacgggctcgccggggtgacctccgcccgggtccagcagcggtggccgtcccccgccttgatccgacatcggcggtgggagtttgagacggagctgacttcgatggcggtgggtcgtccggactggtcgccggcgatggaggcgtggtggcgcatcgtccgtccgtgagttggtgccgcctcctgggatctgccccgacgacctaccgccaaatccaagccctcgaccatgaaggaaccgttccaggaggccggtagcctcactgctctggccttcctccgtgacggctgagatcgtgtggtggtggcggagaaaagccgagtagctgatgaagcggagaccacatagaggaggagttggaagaggataactcgccgacggcgtgagttcctgccgagcggtgggagaccggcgtgtcctgggcgcggtgcacgcggtcggcggagttatcgctggcggcattcagtgatgacgtcgccgacgacgtgcggtcgcttctccggcggtacaaggtggctggttgatgcgggactacggcagtgacatggacaacgccgccgctgccggagcattccttgcgtggaaggagcagcctgtcgtgtggacgagtgcgtggatgccttgagatcgattgatccaacaagtccaaatccgccattgctgcaaatgatcgagcctgcgattcatttgattcatttgtttaatttgattctcagttgattcctctgttctttttttttttttgaactagctgattcatttgtataactgaatattccagtgacttgtataggaggtagtgatagattatttgctttaccggttaacactgaatctcacgttcttgatgcatgttatgtatatatctgtgtcctctatgcaattatgagcttgtttgcatt

SEQ ID NO: 3399 - DNA, 1138 bp, Oryza sativa
  ref <308>: DATABASE ACCESSION NUMBER: AK061083
  ref <309>: DATABASE ENTRY DATE: 2001-12-06
gcaaaaaggccaccgaatcccactcttcctcctcgcctcgcctcgcccgctcgcctcctcgcggaggaagaagaagaagaagaagaagaagaagaaattcctcgagaggaaatcgatccatcgcgttcgcggcgggatccgcatcctcgccgcgcgcggattctcggcgagctcatcctcctcctcctgcggcggcggcggcggcggctgctgctgaggctgcggttggtgggatcttggtcgagcacaccgggggggagagggagatggccagcggcggcggcggcggcggcgggatggaggcggtggaggtgaggttccggctggacgacggctccgacatcgggccaagcatgcacgaccaggccaccaccgtcaccgcgctcaaggagttcgtcctcgctcggtggccgcagggtaaagaaatagctccaagaacagttaatgatgtgactatcatcaatgctggacaggtactagagaataacagaacccttgctgagtctcgaaacctagcagcagaatctccagaaggtccgatcacaatgcatgttgttgtgcgcagaagtcgacccgagagaagggtgaagcagccgccgaaagcacgaccacccgagcggatcggatgtggatgcacaatattgtgacgtcgatgccagctgcaatgtgtacattggtgcccaagttcacagcgattacaagttcattttaacaatcgtcgtcgattcatgcacttattcttcgaaatttagggagaatttggttagcagtttttagcactgggccatgtccgctttgttatggtgaagttttcctgtgacttttgtgagtgttcataggggcctctcggccgtaaaaccttttgtgacgagtacaagtgtgcaggaggcaacggagacctggatgcttgctgtgccgctgtgattttagacgtgagtaggataagggaaacgagatctgctgctactttgcgtctatacatatgatatactactggtagtaaatgtcgagatgctattctctcggttgctgctacttatatatagttgtataccacatgcatatcgcatgtaaattctgtaaagttacattgatctggttcagaggtggatgaaaacgtccaagggtttggtttggc

SEQ ID NO: 3400 - DNA, 996 bp, Oryza sativa
  ref <308>: DATABASE ACCESSION NUMBER: AK061084
  ref <309>: DATABASE ENTRY DATE: 2001-12-06
ccaaagctaaagctgttcggcttccacacctccaagcaggagacgatggattagcacaagcacggctaggagcaggacaggagtagtactcgactgagcgtctgagccggagaacgcgccggccggtctgcggcaacggagacggagctcgatcgcagaggaggagctaggcggccagcgatgacagagctagctcgtagacaatctgatggaggcgtgcccgctgctcattgagtaaagctcgagcttgcttccgccaagctcgacgaatgggtgcgccaaactcgcggtagtcatggcgctcgagctcctccccgcgcatgtatcttcggcgagctccgcctctccactcggagttgcttcgtccctgtgccgctgccttcgccggagaacgccgcccccactgccgcctccaccaccaccgccgtaggtgctggagctcgatttggttgcgcgcttgcggctgtcatcctctacggcggtggaatgggtattggaggacggtgtttgcaggcggcgaatctgcagctccgtcagggacgagatgtcgatgggtgtgcggtggtcctcgctgggcagatggatgagccatgcgcccatgccgaaggagagagagacagtggagaggaggaaggaggaccggactgatacatgggactaactaatctatacaggtggcatcctaatgtgcaaaaatagtgtagaaaaccactcgagggtgtcttttgtactgtattgaaagtttgagggggtcaaatgtctgtctggttttaaagttgtggggtgtgctttagacaagctaaagacttagagggtgtaaaatagacttatccctttaattctgagagagttctggatgttggtgtcggctgccgtagtgtctctagccagtgttggctgaaggaaatctgttattttggtttaagttctaacttgtaagctggaatgcccggcaaaatgctatatttgcttcaatagaagcagggtcattggctg

SEQ ID NO: 3401 - DNA, 1463 bp, Oryza sativa
  ref <308>: DATABASE ACCESSION NUMBER: AK061085
  ref <309>: DATABASE ENTRY DATE: 2001-12-06
caaggagttcaacggcaacaacatccgcgacaccttccgcgtcctcctccagatgtccgccgtcctcaccttcggcggccaaatgcccgtcatcaaggttgggagaatggcggggcaattcgcgaagccgaggtcggaggcgttcgaggagagggacggggtgaagctgccgagctacaggggcgacaacatcaatggcgacgcgttcaacgagaagagccgcatccctgacccgcagaggatggtccgggcctatgcgcagtccgccgccacgctcaacctcctccgcgctttcgccaccggaggatacgccgccatgcagcgcgtgacgcagtggaacctcgatttcacccagcacagcgagcagggcgacaggtaccgtgaattggcacacagggttgatgaagcccttggctttatgtctgctgctgggctaacagtggaccacccgttgatgacaagtactgatttctggacctcacatgagtgccttctcctaccctatgaacaatctctgacccgtcaggactccacaactggtcatttctacgactgctctgcccacatgctatgggtgggcgaacgcactcgccagctcgatggtgctcatgttgagttcctcaggggtgtggccaaccctcttggcatcaaggtgagtgacaaaatgaacccaaccgagttggtgaagctgattgagattttgaacccatcaaacaagcctgggagaattaccatcatcacaaggatgggggcagagaacatgagggtcaagttacctcatcttatccgtgcggtccgccacgctggacaaattgtcacatggattactgatccaatgcacgggaacaccatcaaggctccttgtggtctgaagacacgcccctttgactccattctggccgaggtacgagcattcttcgatgtgcatgatcaagaaggaagccacccaggaggtgtccacctcgagatgactgggcagaacgtaaccgagtgcatcggcggatcccgaaccgtcaccttcgatgacctgggtgaccgctaccacacccactgcgacccgaggctgaacgcgtcccagtcgctggagctctccttcatcatcgccgagaggctgaggaggaagaggatccggtcgtcgaagctgaacaacatgttgccgttgccacccttcggtgtctgaatctgaaatgggtaagggaaaccaggggaagacggaggaatgacgaacggggtagataagatagctgcagcaagaactcgacgacgcctattccatttgttggtgggatgctcttggtgaaatcctatattttgcgagcttttttttctgttgtaacttttcagttggtatatatatgctctgtaatatcatgccaggctgaaaggctttgacatttcggtttttctatgtttctatcatggataagagaataaaatgcaagatagaagaaggctttgtgaat

SEQ ID NO: 3402 - DNA, 856 bp, Oryza sativa
  ref <308>: DATABASE ACCESSION NUMBER: AK061086
  ref <309>: DATABASE ENTRY DATE: 2001-12-06
aatcttagagtctactagactcacacactagctttagcttagctaaaagaagaaaaagaaaagagaggcacaataataggttaggcatggcggagcagctgggcggcgtgggcagcccgcagctaagcctgagcagctgcagctccttcctttccatctccagcgccggtactagcgccgccgatggtgctccccatctatccctcggcgtgggcggcgccgaggagctggatctgctgctgcaggtgggcataggcggtggcggtggcggcggcggcgacgaggaagaggaggagcgcaagaccatccggatgatgaagaacagggagtcggcgctgcgctccagggcaaggaagagggcgtatgtgcaggagctggagaaggaagttcgccggctggtgaatgagaatctcaagctcaagaggcactgcaaacaacttaagacggagatggctgctctgatccagcagcctaccaacaagcagagttcccaccgaagaagctcatccacttgatcagaacgcagcagcttaagcctttaattaattaagcataggcaaggtagcgggcagccattggattggggaccattatttaattgggttggctgtccagctccagcaagagtctctagcaagtaacaacaactcactctgatccgccggcttggctttccatgcattccggtagtacgtaagtactctattttgttactgtgtcgatcatccgctacacatggatgcatacatgcatgcttaattgtttgtgtcaccggctaacttttgcatacccttgtttgcttgcttgctgcaagacccaaattaatataaattgtatgagactcggattagctgct

SEQ ID NO: 3403 - DNA, 1030 bp, Oryza sativa
  ref <308>: DATABASE ACCESSION NUMBER: AK061087
  ref <309>: DATABASE ENTRY DATE: 2001-12-06
aactagaaatcaaggctgcggaaacctctcacgactcacgagcgctctctctcgaaacctcacttgctacagtaaatcccctctctcgacccctcttcctcctcgattccggcggcctcgtcgccggcggcgggagggagaggggtcgtcccccctcccctagtatagctaagtagccgggctagtctcgttaggtcgggttcttcccgtttcctcctcgttggtgtggtatggaagttggagatggaggcggattcgacgcggatgcagctcgtgacggcgatggcgacgcagaatcgatccgagacgacggcagcgacgcggatctggcctgcggtggtggcggcggctcggatgcgacctgcggcggcgacaggggctcggatgcagtctgtggcggcggcggcgactcggtttcggtcagctgcggcggcggcctcacggatgcgactcggatgatctccttttcttcaaccttctccatcgagttaccaagacagcatgttcttcgccaccatctttggattaagtctttggttggctggatttggggaaattcttcctctttatctcttggcagcaataaccatgcaggatttatcgttcgggttgagcccagattggatttgcaactttggtttgcaggtttgcagtccaagcttgtcagattcaatgatgaaccccgtggaaatcttttgtggagtccggtgatgttcacaccaaaatctacggcttcgcaccaaacctctcatatgtgtcgtttccgtggaggcagccgaaggggtttaccagttcgtcaagcggagtacatatcaatagaggcccttggatgcaattgtcgcggccctgccacagtaccctatcgatttgctccttcattgctgcttagtttcattataaagtttgcttctttttttcagttgacctctctcttgttaaatatggtccaactcttatgtttatcctgggcgatgtattggggaattcaattcccctaaacgctgtggtttaacaaagtgtgttgtgtttt

SEQ ID NO: 3404 - DNA, 1031 bp, Oryza sativa
  ref <308>: DATABASE ACCESSION NUMBER: AK061088
  ref <309>: DATABASE ENTRY DATE: 2001-12-06
atgctttgcctgataaattcaagcacctcaagtagagctcggtggatttcggaggaggtctttgcccaccgtgaagccgccgtcgacgacgaggttgtggccggtgacgaacttggcctcgtcggacgccaagaacacggccgccctcgccacgtcttccacctccagcgatgtcccttccagctcctgcatctccctcgtcaccatcctcctcacctcctccgcggtggccgccgggaacgtctcggcgatgatgcctagcgccatcggcgtcgggatggcgtgcggcgagatggcgttcacccgcacgccgtcgcgcgccagctgcctcgccaccgcgcgcaccatgccgacgatggccgccttcgacatggagtacaccggcgacgccacgccgccgagcaccgccgccgagctggccgtgcagaggatgcagccggcgcggcgcggcgccatgacgcgcgccgcgtgcttgacgcacgccaacatcgaccgggcgttgacggccatgacgcggtcgtactcgtcgaggtcgagcgccgcgagcgaggccggagccggtgctcctatgacgccggcgttgctgtagacgacgtcgaggcggccgtggcgcgccacggcgaggtcgacggccgcggcgacatccttctcgacggtgacgtcgcagtgcgtgtacgacgcggcgtcggcgccgagctcggcggccacggcgcggccgaggtcgtcctggatatcggcaatgataaccttggcgccgttcctgacgaactccttcgccgtggcctcgccgatgccgctcgccgcgccggtgatcacggccactttgccatccaactttctggagcttgacgacgaggagaagaggcgatcggccaagccgttggagaacacctgagcagctatgctcttccccctgcaacttgtttacgtgaaaaatgattgaaatcatcaaaatttcacggtttgcacgaacgttttttactggagaagatgcgaacctgagaagtttgttggctgctgcgttgagcatc

SEQ ID NO: 3405 - DNA, 992 bp, Oryza sativa
  ref <308>: DATABASE ACCESSION NUMBER: AK061089
  ref <309>: DATABASE ENTRY DATE: 2001-12-06
accgacgcacgcgccccttctcttccctctccgtggcggcatggcggcgtgccccctcctcccgctgctccagctctagccctccctccacaacatcctggacatggatcctctacctttggctcgccggagcaatggggccaccagactgccagcgatgagtccgggggcatccagatccagcgccacctcacccatggcagctgctccggtgcgacgatggccaggggccgcgctgccctcctcatccctccactggttagtgaagaagttgggtgaagaaggacccgggcaagacttacatgctagctgcctctccatggcggagaacttggagcttctaactggtagctcggatttgatttctagtgtagctagtgactaagacatactccatccgtttcacgataagattggagccatgttccaagaagtcattccaaaattgcaatgtctgttccagtactgaaccaatccagctcggctccatttcaagccatcataggcatcacctcaaagacattctactcactgcaaagccagggagccatttctttctctcaagttggcatgcgttccttttcttagttaaatcataaattaacaggcccaacttaattatcatggaataagccacagcaattttacccacctaaggtcactctgtgcattcatttcaggacaatgacaagcattgggatagacaaggcagtagattctcaatcaattggtgctgtctagtaggtgaagagtgacaccgaagcaggatttgcaagtcaactggctcatcttcatattatttgaggtgttgtcggactgcctgcaatgccattcgtcaactcttttctcgtttccctacctccttggttatctaaccttaagaagtaatattcaaatttcatctcagttgtagatgtctatgagattggcattgctattgtaattcacattagattgttgtcaaatcgattaattgaacgtggatgtcaatg

SEQ ID NO: 3406 - DNA, 1264 bp, Oryza sativa
  ref <308>: DATABASE ACCESSION NUMBER: AK104430
  ref <309>: DATABASE ENTRY DATE: 2002-08-28
aaaaaaaccaagcaaacgccacagccactccaccagaccaccaccaccaccaccaccccacccagctggtgcgcctccaagaattcctcctcctcttcctcggattccttccccctcttcggcggcgggctcccccaccggcaccggcgtccccgctcccggcgtcgccattggcctcctccctcgtctctgctcgacggaatatgaagttaaggccaaaaagacctggatggaagtcacttatgcctctgcagttgagcaggaaatctgcactgcgtttctttttgtttcccaaggttcaggctgcgggtcaatctccagatgacacaccagtttatcttaatgtgtatgatttaacacccatgaatggctatgtatattgggcaggccttggtatatttcactccggaattgaagttcatggtgttgaatatgcatttggagcacatgactacccctcaagtggagtatttgaagtagagcctcgtcaatgccctggtttcagattcaggaaatcgatatttctcggtacaacatgcttagatcccattcaagttaggcaattcatggagctacagtcagtgaactacaatggagatacttaccaccttatcacaaagaactgcaaccacttttgcaaggacatgtgttacaaattgactggtaacaaaattccaaaatgggtaaatcgcctcgccagaataggtgccatttgcaactgccttctgccagaatcactcaagatatccccagtcggccatgatccaaacagtcgacctgaagattgtgagaaaaggcggctgaggaacccgttgagctgcttctcttcgatctcgagccagaggcagctgcccccatcttccccgttcccgacatcacctgtgaaagagcctcttgcgtacagttcatcaaggaaatccagcgctccatcactgaggaataggtagcctggcctcccttgtgtaacttttgataccaagttaggctaatttggtcagtggcaacatctggagggcactaccctgcatgctgccgcaactgtcagctaattctttttgctcggtatcagtcaaaatgcttggtggtgttgttgtatcatgtaagtggaactaatgcgagtgagtcacctggagaggtgtctctgtgtgggtgagagtgaatgcctctcaattctacccaccccctgtactgatcatgagacacgaaccgggatgtattttgtatattattaatccactattctttcagctgttgtagctgcctg

SEQ ID NO: 3407 - DNA, 1198 bp, Oryza sativa
  ref <308>: DATABASE ACCESSION NUMBER: AK061090
  ref <309>: DATABASE ENTRY DATE: 2001-12-06
aaggaggaatcgaggagatggacggcgagattggggaggacatgctcacggagattctggtgaggctgccgtacaagtcgctggcgaggttccagtgcgtggccacgtcgtggcggcgcctcatctccggcgactacctccgccggaggctgccgctcatcacctccggtgtgctgtaccaggaggcaggcgtacacgtacgcgtgcgcgtcggggggtggtgaccacggcggcggcgtggcggaggccgacatgggattcttccccgggcacgagacgtccaccatcatcgacgggtgcaacggcatgctgctgtactacgcatcgcaaccggcggcggcgttccacgtcgtgaacccgacgacgcggcggtgggcgaggctgccgccgccgcgcgggaagacgctgctgtccgtgctggcgttcgacccctccgcgtccccgcactacagggtggtgtgcttcaccgggtggctcccccgcggcgcgtccgtcgaggtgttcgactccgagggcggcgcgtggcgcgaccacgagctcgacttcgggctcgacaccgacgccatgtcggccaccatgcactacttcgacggcgcgatccacgtgctggcctactcgggccacgtcgtccgcatcgacctcgggaccatggcgtgcgcggtgaccgcgctcccggccccggtcagctgccgggcgcgcgccgggcactgccgtggccgcctccggtacgcgtccagcgacggcacgcgcctcaagttctgggagctcaagaacgcggccacatcggagtgggcactgaagcacgagctgggggtcaatgacctcgtcgccggcgaggcgagcggagcttgccaggccgtcaccttcttgttcatggcgttccacccggacagggagatggtgtacctgtggacgccatggaagctcgtggcgttcgacatggagaagaggcgcgtcgaggaggagtgggaggtcgggccggagaaggagaaggaaggcgcgcatctcattcagatttggctgtttccgttctcgcgccatctggccaacagcttggcctgattggtctatgtggctgataggctggccggcgatgttgacaatggcatgtgggcccaatgcttgtctgcaacattgggcacaatgccgttccgttcgagtgtccaactgtacaaagaaggtacaagacaatcaaaag

SEQ ID NO: 3408 - DNA, 1120 bp, Oryza sativa
  ref <308>: DATABASE ACCESSION NUMBER: AK061091
  ref <309>: DATABASE ENTRY DATE: 2001-12-06
aagataacacagcgcacagaaaagagaagctgccaaacccggccacctcctcctctcctctcctcccccatcgccttccccaatccgtcggcgaggccaaggcaggcaggaagccatgggcgacaacagcgccgccgcggcggccgtggccgcgccgcgcggcaggttcggcaggatctgcgtcttctgcggcagcaacgccggcaaccgcgcggtgttcggcgacgcggcgctccagctcgggcaggagctggtgtcgagagggatcgagttggtctacggtggcggcagcgtcgggttgatgggcttgatcgcgcagacggttcttgatggcggctgcggtgttctcggggtgattccaaaagcactcatgcccaccgagatatcaggtgcaagtgttggagaagtgaaaattgtgtctgacatgcatgagaggaaagctgagatggcacgccaatccgatgccttcatcgctcttcctggagggtatggaacaatggaggagttgttagagatgataacttggtcacaacttggaattcatgacaaaccagttgggttgctgaatgtggacggttactatgatccgttgcttgcgctatttgataagggtgcggcagaaggatttattaaggccgattgcagacaaataattgtttcggcaccgactgcgcatgagctgctgagaaagatggagcaatacactcgttcacaccaggaggtagcgccacgtacaagctgggagatgtcagagcttggttatggaaagacaccagaggaatcgtagcataatctgctaatgtgacattgttcctgaaggagaattgcagctgctccttttatctcccattttggttaccttatcgtgttacctgtccagtcaacttcatccggtgaagaagatgcataagaaaatatgtacctaccctcggttttcctgtgggggaatgaacgcatggttatagtccgtataatatttcctgccttacataaattaagaggcatttgagcaacagaatccgtgtgttttctccttgcaaattctatgcaaaattcgattgggtcttgtaaatctgcagatgtaatgcaagggaacacttcttatatgcataggcttatc

SEQ ID NO: 3409 - DNA, 1097 bp, Oryza sativa
  ref <308>: DATABASE ACCESSION NUMBER: AK061092
  ref <309>: DATABASE ENTRY DATE: 2001-12-06
atctcttggactctgccggcgccggcgttggtagggtagccatggcggaggaggccaccctgagccacccgtcgcggtacgtgaagctgagcagggagcacgacgcccccgcccccgccgaggacatccgccccggcgagctcaaccagccagtccacgtcccgcagctcgagggcaggaggtgcagcgagtgcggccaggtcctgccggaatcctacgagccccccgccgacgagccctggaccaccgggatcttcgcctgcaccgacgatccacaaacctgccgaactgggttgttctgtccttgtgttctttttggacgcaatattgaggccctcagagaggatatcccttggacaacgccttgtgtttgccatgctgtctttgttgaaggagggattgcgcttgcaattctcaccgcaatatttcatggtgttgatcccagaacgtctttcctgattggagaaggtttggtgttcagctggtggttgtgtggtacttatacgggcatctttcgccaagaacttcagaggaaataccatctcaagaattctccatgtgacccttgcatggtccattgctgcttgcactggtgcgcgaattgtcaggagcaccgtgaaaggacggggcggcttgcagagaacagcgcggtgccaatgaccgttgtgaatccacctgcagtgcaagagatgagcatggcagaaagccgtggtcctgtttcccccggtatggagaacggagcaccatcaaactcaaagggtgagcatgaggaacccaagagtgatcacgatgatgtggaggtgatacctctatagggtgaatgaaagaaagatattctttctgataataggatagcaagaggaatgaatcgatgtgacgaattcatggacgcttggcgacgatgttcttgtgtcatctggaactggaatcatcataaaacacacagggtgatactctttctttttttttttgtactagtattaaaacttcaaatataattaactggagagcaggggctgcctgagtacattgctacgtttctgcatccaccggccgtgtgttgtttatgccatcatgtaaaattcattcttgatttt

SEQ ID NO: 3410 - DNA, 1704 bp, Oryza sativa
  ref <308>: DATABASE ACCESSION NUMBER: AK104431
  ref <309>: DATABASE ENTRY DATE: 2002-08-28
agcagctagcgcgcggtacggtaggcaccagctatacagcgcgccacacacaacaatggccggcgctaccgctgccgccgtctcctcctccttcctcgcgctcgcgttgctctcgctctgcgccgcggccgctggcggctcgcctcagctggacgcggaggccgcgcggcagcaggaggccgaccgcgtgacgaggctgccggggcaacccgccgtgcggttcgcgcagtacgccgggtacgtgacggtgaacgagacgcacggccgcgcgctcttctactggttcttcgaggccaccgccgccgccgacaagaagcccctcgtcctctggctcaacggcgggcctgggtgttcgtctgttgggtatggagaagcggaggagctcggtccattcttggtgcagaagggcaagccggagctaaaatggaacaagtactcgtggaacaaagaggccaatctgatgttcctggagtcccctgtgggtgtcggcttctcatacactaacacaagctccgatctgcagcagcttggcgacaagatcaccgctgatgatgcttacatcttcctgctcaactggttcaagcgcttccctcagtacaaatctcacgacttctacatcgctggagagagctacgctgggcattacgttccacagctttcggagaagattttcgacggcaacaagcaaggccccaaggagaactacatcaacttcaagggtttcatgatagggaatgccctgatggacgacgagacggaccagacgggcatgatcgactacgcctgggaccacgccgtcatctcggaccgggtgtacgccgacgtcaagaagtactgcaacttcggcatggagaacgtgaccgacgcgtgcgacagcgcgctcaccgagtacttcgccgtgtaccgcctcatcgacatgtacagcctctacacccccgtctgcaccgaggtctcgtcgtcggcggcgttcggccagcgccaggtcgccgtccacggcgccgccccaaaaatcttctccaaataccatgggtggtacatgaggccggcggggtacgatccgtgcacgtcggatcacgccgaggtgtacttcaaccgggctgacgtgcaggaggcgctgcacgccaacgtgaccaatatcggctacaactggacgcactgcagcgacgtgatcggcaagtggagagatgctcccttctcgactctccccatcatccgtaagctcgtcgccggcggcatcagggtctgggttttcagcggtgacaccgatggaaggatccccgtgacgtcgacgaggctcaccctgaacaagcttgggctgaagacggtgcaggagtggacgccgtggtacgaccatcagcaggttggaggatggacgatcctctacgagggcctgacgttcgtgacgatccgcggcgccgggcacgaggttcccctgcacgcgccgaggcaggcgctcagcctcttcagccacttcttggctgacaagaagatgcctccgacggcgttcccctagtcgctcgcatgcagtctgccttcttcaacgatggcgaggaacgggcgtcgtgcgcccactaggttgttttccagcgataccaactgatcaggaaattttcttttctttggtccaagactccaagtcatgtaacacagtggaaattcgattggaacaatcgataacaataaaatcatatatagtgttgattg

SEQ ID NO: 3411 - DNA, 1053 bp, Oryza sativa
  ref <308>: DATABASE ACCESSION NUMBER: AK061093
  ref <309>: DATABASE ENTRY DATE: 2001-12-06
acacaaccaccactcaccaccaacatggcgacgacgacggcggcggcgatggtggtggcaatgtcggtgctgctgctgggtggcggcgaggcggcggcgccgcggaagccggtggacgtggcgttcgagaagaactacgtgccgacgtgggcggaggaccacatccactacgtggacggcgggcgcgaggtgcagctctacctcgacaagtccaccggcaccggcttccagacccggggctcctacctcttcggccacttcagcatgcacatcaagctcgtcgccggcgactccgccggcaccgtcaccgccttctacctgtcgtcgcagaactcggagcacgacgagatcgacttcgagttcctggggaacaggacgggggagccgtacatcctgcagacgaacgtcttctccggcgggaagggggaccgggagcagaggatctacctctggttcgaccccaccaaggactaccactcctactccgtcctctggaacctctacatgatcgcgttcttcgtggacgacacgccgatcagggtgttcaagaacagcaaggacctgggcgtgcggtacccgttcaaccagccgatgaagctctactccagcctgtggaacgccgacgactgggccacccgcggcgggcgggagaagaccgactggtcgcgggcgccgttcgtcgcctcctaccggggcttccacgtcgatggctgcgaggcgtcggcggaggaccggtactgcgccacccagggcgcccggtggtgggaccagccggagttccgcgacctcgacgccgaccagtaccgccgcctcgcctgggtccgcaagacgcacaccatctacaactactgcgacgaccgcgaacgctaccccgccatgtcgcccgagtgccaccgcgaccgcgacgcctgagatctcatcgagatctgtgatcgatgcttgctggccgtccgatggatggatggatggatggggatgagtacgtgtacggctacgattaatcatgatttgagtgcgtgcagttaattaattaatgggtaacgttttgggggt

SEQ ID NO: 3412 - DNA, 957 bp, Oryza sativa
  ref <308>: DATABASE ACCESSION NUMBER: AK061094
  ref <309>: DATABASE ENTRY DATE: 2001-12-06
ctccgctgctgctgctgcgttcggtagctaagcttagcttagcttgcgagctgcgtcgccacctgggacaccgcctccgccgcagaatccgagatcaagaaccgcctcctcgactccaactccgactccgacgacggcgacaacccggacgacgcggcggtgaactcggacgcctcctccgcggatcccccgcggatcgcctacctcctggagggaaccaagggggacggggcgcggatgaggcgggcgctgcaggcgatctaccacccgcggaaccagtacatcctccacctcgatctggaggcgccgccgcgggagcggatcgacctggccatgtacgtcaagggggacgccatgttcagcgaggtcgggaacgtgagggtcatcgccaagggcaacctggtcacctacaaggggccaaccatggtggcctgcacgctgcacgccgtctccatcctcctcaaggagggtctggagtgggactggttcatcaacctcagcgcctccgattaccccctcgtcacgcaggatggtcagtgctctgattactctgctgaatgaattttagcttactttgtgtgttgtgcttgttctagaatgtagagatgttttgttaattagctatgaaatgccaccgaatttgcctctaggattgtctacttgatgacaaaggatggtcagtgttcttcaggtcagctgaatttcaattacatattgttgtgtttgttctaggatgtggagatattttcttagctatggagtgccactgaaaagattggaatttaggatttgcctctaggatagcattgttgagggcagcaattagcatctgtgtaactgtaatggttaaattcgttgtgtaagctatagcctatctgatagctcaactagatttctttgcattggcatcagttatgtagagcttgctagctactattagcaagcttcagattcagg

SEQ ID NO: 3413 - DNA, 1216 bp, Oryza sativa
  ref <308>: DATABASE ACCESSION NUMBER: AK061095
  ref <309>: DATABASE ENTRY DATE: 2001-12-06
aagaagaagccgcccaaccaacgccaaaagctactgctgcttgcacaggagagggcagagagagagagagagagagagagagaagagggcggctgcggcggcggcgcgcttcgctcatgcagggcgagtaccaccgctcctccagcgaggactcggctgcttctgctgctgctgctgcggcggcggcggctgcggctatggctcctctcgccgcggctgcggcggcggttgctgccaaggaggagcaggcggcggcggcggcggtgctgccgctgcagcagcagcagccgaggcggcagtaccgtggcgtgcggatgcggaagtggggcaagtgggtggcggagatccgggagccgcacaagcggacgcgcatctggctggggtcgtacgcgacgcccgtggcggcggcgcgcgcctacgacacggcggtgttctacctccgcgggcggtcggcgcggctcaacttccccgaggagatctcctcgctggcgtcgctgtccgagggcggcggcgcgagcgagccccgcgagcccgacggcggcacgctgtccgcggcctcgatccggaagaaggccatcgaggtcggctcccgcgtcgacgcgctccagaccggcatgatggtcgcgccgacgacccaccaccgcgagcggcagaagcaccaccaccaccaccaccaccaccacccgcacctgcagccgcacggcgaggagcaacaccaccaccacgagcagaagcaccagcggacggcgtggagcggccgcgccaagaacccggatctcaaccaggcgccaagcccggagaactccgacgccgagtagaagccaacaaaaccgcctccgcgcggcaagatcgatcaacggcttcgtcaacatgcagccagcgtatgatcacctccaccacgtacgctcgctgcatccatccacctaccacctattcgtccacccctcatctccacctcggcggcggcggcggcggcttcgtggcgagatttttcgatgcggttttggataagaacaagggaagggcagcgtcgggaggagggcggtggagacgggggaggaggacgccacaagtggcggtctttccaaatgtcaaaaaagacagctgtaacagtgataaaacaagtcatcctctctgttttttttttcctctctctcttctccgtgttattatcgactagataagcagcgattaattaatccgtccttcccccttt

SEQ ID NO: 3414 - DNA, 1869 bp, Oryza sativa
  ref <308>: DATABASE ACCESSION NUMBER: AK061096
  ref <309>: DATABASE ENTRY DATE: 2001-12-06
catgatcaaggacgagtattatgtccagtgggtcgtcgacaacttgcccgtgctctaccgcgacccggccgaccagcagctcggctcgtacaagcgcggcttccccgtgggcgagacggatgcgcaggggcgcttctttctgtacaaccacattcgcattatcattctcacgaacaaggacccgtacgccgccgaggaaggcaagaccaagttccgcgtggtcggtttcgaggtcgtgccaacgtccatcaagcacgactatgagaatgagccgctcgccggccaggagctcgagaccaagacgtgtggcaagtttgtcaacattgaagaagttgcggtgaacaaccaccagtacctcgaccctgccaaggacacgaccgtgctgtttacgtacgatgtgcagttccaaccgtcggacattttgtgggaggagcgatgggaccgcattatcagctccaagtcgtcgaatgacaagatccactggttctcgatcatcaactcgctcatgattgtgctcttcctcacgggcatgatcgccatgatcatgttgcgcacgctccaccgcgatatcgctcgttacaacgaagtccagacgaccgaagaggcccaggaagagagcggttggaagcttgtccacggcgatgtgttccgcccgccgcagttttcgccgctgctcttctctgtgtttgtcggcacgggtgtgcaagtttgctcgatgagtgcgatcaccatggtcattgcactgctcggcctgctctcgcccgcgaaccgtggttcgttgctcacaacgctgctgctgctgtttgtctttatgggcagctttgccgggtactactcgtcgcgcacgtacaagatgttcaacggcaagaactggaagtacaacacggtgctcacggcggtgctctacccgggcagtctctttggcgtcttcttcattttgaacctcgtcttgtggagcaaggcgtcgtcgcaggccgtgccgttcggtacgctctttgcgctgctcgtgctgtggttcggtatctcggtaccgctcgtgtttctcggtagctactttggcttcaaggcaccgcagattgaacaccccgtgcgcacgaaccagattgcgcgccaagtgcccgagcaggtctggtacctgtcgtcgctgttcagcattctcgtgggcggcatcctgccgtttggtgccgtcttcattgagctctttttcatcatgtcggcgctgtggctccaccagatctactacgtgtttggcttcctcttcatcgtgcttatcatcttggtcgcgacgtgtgccgaagtgacgatcgtcatgtgctactttcagctttgcgccgaggactaccgctggtggtggcgttcgttcctcacgtcgggctcggcggcggtgtacctgttcctctactcgttcctgtacttcttcaccaagctcaacatcacggcgtttgtctcggggctgctctactttggctacatggccatgatctcgctcacgttcttcttcctcacgggcaccattggctactttgcgtgcctgtggttcacgcgcaagatttacgcctcgatcaagatcgattagacacgaggtatccgcgtttgtccaagagacgtccccgcacgaaccagaagctcatgccgaaccgaaggccgcttcttctattcatgtggggatacttgtgtggaaggaacaagaacaagataccagtgtatagaaagccaagttgtttctcacgcgtagcaggtttacccagctttttcgaactgggaagagaagttgggccgctgctgccactctcatagctcctccgatggtacctcgagtgggggccgtcacaacagaaaaaaaagccaacagaagaaatccattcacac

SEQ ID NO: 3415 - DNA, 1574 bp, Oryza sativa
  ref <308>: DATABASE ACCESSION NUMBER: AK061097
  ref <309>: DATABASE ENTRY DATE: 2001-12-06
cccctcaaatttcctcctcgcctcgcctcgcctcgtcccccacccaccagatctaagcaggttgaaatggccacgacgcagcactccaacggcggcgccgccggcgacaacggcgaggccgcgccgccgtcggttccgccctccctcgcgccgccgcggaaggtggccctggtgacgggcatcacggggcaggacgggagctacctgacggagctgctcctcggcaagggctacgaggtgcacggcctcatccgccgctcctccaacttcaacacccagcgcctcgaccatatctaccacgacccgcactcccagccgtcgacgccgcgccccccgatgcgcctccactacgctgacctctccgactcctcctccctccgccgcgcgctcgaccacatcctccccgacgaggtctacaacctcgccgcccagtcccacgtcgccgtctccttcgaggtccccgactacaccgccgacgtcaccgccaccggcgcgctccgcctcctcgaggccgtgcgcctcgccagcaagcgcatccgctactaccaggcggggtcctccgagatgttcggctccacgccgccgccgcagagcgagtcctcccccttccacccgcgctccccctacgccgccgccaaggtcgccgcccactggtacaccgtcaactaccgcgaggcctacggcctcttcgcctgcaacggcgtgctcttcaaccacgaatccccacgccgcggcgagaacttcgtcacccgcaagatcacccgcgccgtcggccgaatcaaggtcgggctccagaccaaggtcttcctcggcaacctctccgccgccagggactggggattcgccggggactacgtcgaggcaatgtggcgcatgctgcagcaggacaagcccggcgactacgtcgtcgccaccgaggagtcccacaccgtcgaggagttcctccaggccgccttcggctatgcagggctcaactggaaggatcatgtagtcattgacaagaagtacttccgccccgccgaggtggacagcctccagggggatgcaaccaaggccaggaaggagcttgggtggaagcccaaggtcgggttccagcagctcgtcgagatgatggttgataacgacattgagcttgccaagaaggagaaggtcctcgtcgatgccgggtaccgtgatcccaagcagcagccatagaattggctaccatatggtttggttcttgggagattggggttgcattattacctagaaactgatacattgtggctgtcacagaagaggtgggctcaagttaaccatcggtgtttccttgaggtaggaataaggagtgttgctgtttgatcgatcctatagtgcttttcattacgttttactatgtcatattgctgtgtcctcttaacagataataataataaacgagtcgatgccatttgcaaagaaatgtgtagttatgtgtcttactatgaaacaagatttgtccttctgtatcgtggatcgatgccatctctattctcttagcactttgtaacatgtggttagtgcacaattggaaaaatgaatcttctgtccatatt

SEQ ID NO: 3416 - DNA, 1015 bp, Oryza sativa
  ref <308>: DATABASE ACCESSION NUMBER: AK061098
  ref <309>: DATABASE ENTRY DATE: 2001-12-06
accgccacgttctctccttccgctcctcccgggaggacgaggtcgggcgcctcatccgctccatcttcaccgagagcggcggcggcaccgccgccttcaacctcgcccgccgccgccgcctcgcccgtcgtcgcggcgctcgcccgccgccgtcgccatttctgatccgttcttgtttcagagcttgcacccggcggcgaagtaccacgacgctgcgatggcgatcggcgggtgtccgatctacgtcagcgacaagccggggaaccacaacttagaactgcttaggaagctcgtactacccagcggctccgggcttcgggtgcgcctccccggccgccccacccgcgaatgcctcttctccgaccaggcgcgcgacggcgcgagggcgccgggtggtgcagggtggccaagaagacgcatgtgcacgatgcggcgcccggaacgctcaccggcgccgtgcgcgctgacgacgtcgacgccattgcgcaggtcgccgatgatggcgacggcgacgacggctgggatggggaggccgtggcgtacatgcaacgggcgcgtgagctggtccggctgccgtgcgacgccgtactgccggtgacgctcggggcgctcgattacgaggtgttccacgtctgccccgtccgcgctatcgcaatggcgccgggaggcaccgtcgttgcgttcgcgcccgtcgggctccttgacaccgtcgacgccaccgccgccgccgtggcgctcagggtgcatggttgcgaccattttggcgcctacttctcgcggaggccggcgaggtgcacgctcgatggcgccgacgtggggttcacctacgacggcgacacgaggacatgctcacagagggacccgcgtcggattaatttgagccaagggaaaactggtctttaatgattatttctctctcctattcctccaaaaataataaaataatctcaccggtgtccagcagctaattaacagttttttgtgatgccctacagcaaatacacgttcttacgac

SEQ ID NO: 3417 - DNA, 1110 bp, Oryza sativa
  ref <308>: DATABASE ACCESSION NUMBER: AK061099
  ref <309>: DATABASE ENTRY DATE: 2001-12-06
ctcctcgtcatcctctcccttcccccaactcccctcgccggatcgttcgcgatcaatccgccgccgccgcttttctcctccgatccagcgccgccccccgagggagaatcttccgccgccgcggccgcaccccgcaccctcacgcagtagggatcgaggatgtcgtacgcgtacctcttcaagtacatcatcatcggcgacacaggcgtggggaagtcgtgcctgctgctgcagttcacggacaagaggttccagcccgtgcacgacctcaccatcggcgtcgagttcggcgcccgcatgatcaccatcgacaacaagcccatcaagctccagatttgggacacggctggtcaagaatcgttcagatctataactagatcatactacaggggtgctgctggtgcccttttggtgtatgatatcaccaggagagagacttttaatcatcttgctagctggctagaagatgcaagacagcatgcaaatgccaacatgacagtaatgcttattggtaacaaatgtgatctgtctcatagacgtgctgtcagctatgaggaaggtgaacaatttgccaaggagcatggcctagtatttatggaggcatctgcaaaaactgcacaaaatgttgaggaggcattcatcaagactgctggaacaatttacaagaaaatccaagatggtgtctttgatgtatctaatgagtcttatgggatcaaagttggctatgcggtaccaaatgcttcaggtggtggagctggctcatcctctcaaggtggtggctgctgcggctaaaggcagcagcagtatccaactagtcatgtatccagcctaaattgaaaagtcagatcatgtgtaacatggccctcaatatttcgatgttgccttgtggaaaaaatagctggtattggtactgtgttttttactccttccagctaccgacgttcagtgttagtgcacaaaatgttcatccatggtagtttgtctacattgcagtcatgtaaagttaaacattcacgatttctgtacttttgcatgtgtaactaaatgaaatggtgtgttacattcattccttcaatcaaataatccatagaaacaaactggtttgtaact

SEQ ID NO: 3418 - DNA, 1284 bp, Oryza sativa
  ref <308>: DATABASE ACCESSION NUMBER: AK061100
  ref <309>: DATABASE ENTRY DATE: 2001-12-06
aaccgcagtagtgcagtaccagccatcaatcagatctgcccctggatgcatttgtcgtccgcttgatcataaataagctcgggtgatcgggtcaggggcctcaatggaaggtgcctgaaggcttcatctccgtgtctcgatttgttttagctccagtttgcgtgtacgtgctgagtttttttatgccgatatcttttgtttctttgctccttcctcgtgtcgccttcagctgttcagttccgccattgttaatagcttctttttgcccccacgcttgcctccctctggtgtataaagtgtctgcatttgcaagagttctctgtgtacttgtgtagcataggttttgtgaagaaccaagcttttgccattgaattcttcaggagatggcgtccactgagttagcgtcggatgtgtacgcgctcccgtgcggcgacgacggcacgacggcgctgtcgacgccggtggtcgtgtcggtcctcgcgtcgctgctggagcggcacatcgcccggaacgagagggaccaggcggcggcggcggacggcgaggccgcgaggagggcgcgcgccttcgacagcggcacggtgctggacatgagccttcacgcgttcctggagcggttctcccggtacgcgaacgtctcgccgcaggtgtacgtcgtggcgtacgcgtacctggaccggcttcgccgcggcgacggcgtgcgcgtcgtgtcggccaacgcccagcggctgctcaccacagccatcctcgtcgcctccaagttcgtcgaggaccggaactacaagaactcgtacttcgccgcggtgggcgggctgaccgccgcggaactgagctcgctggagctggacttcctcttcctgatgcagttcaggctcaacgtgagcgtcagcgtgttccagagctactgccggcacctggagagggaggtgagctacggcggcgggtaccaggtggagaggtgcctcaagaaggccctcgtctgctccggcgaggcgcaggcgcagcagaggcaagcggcgtcggcggcagcccagtagacgtcagctccggagccgccattcgcgcgtgatctgccagttgcccgccacaggcggccggcacagcagccgcacgatttgatcgccggcagctgccactcgagtgcccagaaagatcaaggatgtaaatagttatggtttgctcgtgtacttaggataggagtaagaattgtgcaatgcaattgttcctctctacctcgattggtaaaagaactgatgcggggacaagtaaaattgattttctttc

SEQ ID NO: 3419 - DNA, 1168 bp, Oryza sativa
  ref <308>: DATABASE ACCESSION NUMBER: AK061101
  ref <309>: DATABASE ENTRY DATE: 2001-12-06
agcagccagctcatccagtcgcttcactcttcaaaccattccatcgcttctctccaacagtcgctgcctttgcaaagcccatcattcaccatgcgtttccagtctatgatcgctgctgcgcttcctgcgctcgtcctctccgctcctactccccagtgggatgatgttcctgaggagtccattgttggtggaaccaccgctgctgccggtgaataccccttcatcgtctctctccaggccggtggccgccacatctgcggtggtaccctcatcaacggcaacaccgttgttaccgctgcccactgctccgtcagcagcgccattggctccgtctccaacaccgctgtccgtgtcggctctttgagctccaactctggcggcactgtcgtccgcgtctcccgcatcgtcctccaccccagctacgcggcgagcacctctaacaacgacgttgccatccggaagctctctagcaccgtcactgccggtggcaacgttggctttgctaccctcgccgcctctggctctgaccccgctagtggatccactgcctccgttgctggatggggagctacccgtgagggtggcagcgcctcgactactctcctcaaggtcagcgtccccattgtggcccgcgacacctgcattgccaactacggctccctcaccgttaccaccaacatggtctgcgctggtgtcactgctggtggtcgcgactcttgccagggtgactctggcggccctctcgtcgatgccaacaagaccctcatcggtatcgtctcctggggaagcggctgcgctcgccccaaccttcccggtgtctactcccgcgtcggcaccctccgcagcttcatcgaccagaacgcttaagcgtgtacgtcttttggctttgggcaagagacagactgaaagcgagttggatatgatttggaaacggtcgactttggatatgaaaagagcaatggtttttatgagtatggtatgggggaggccctgaagatgggagggaaacggtgatgatggattttgcttttgttttaactttacctcttctccctccttaatttcggtgacggcttcttgtaaataggtctagcctcccacgattaattttttttgtcagtagctttatttttcctttgtatagctgaggaaatcaaactgtgtgttg

SEQ ID NO: 3420 - DNA, 1128 bp, Oryza sativa
  ref <308>: DATABASE ACCESSION NUMBER: AK061102
  ref <309>: DATABASE ENTRY DATE: 2001-12-06
atgtgacacttccctctgtccctctctctctctctagcctccaaccatcgcttcaccaagaagccatcacctcctcctctctatcaagttctctcccctctcttgctgtctctgcttgctgctgctgctgctcgattcggccggcggccatggcgtccagcgcgtcgcggttcatcaagtgcgtcacggtcggggacggcgccgtcggcaagacctgcatgctcatctgctacaccagcaacaagttccccactgattacgtacccactgtttttgacaatttcagtgcaaacgtggtggtcgacggcaccacggtgaatttgggtctctgggatactgcagggcaggaagattacaacagattgaggccgctaagctaccgtggcgccgatgtctttgtgcttgccttctccctagtgagccgagctagctatgagaatgtcatgaagaagtggttaccagagcttcagcattatgcaccaggggtgccaattgtgttggttgggaccaaattggatcttcgtgaagataaacactacttacttgaccatcctagcttggtgcctgtgactacagcacagggagaggaactccgcaagcacattggcgcaacgtgttacatcgaatgcagctcaaagacacagcagaatgtaaaagctgtgtttgatgctgccatcaaggtagtaatcaagcctccaacaaagcagagggacaggaagaagaagaaaacacggcgcggatgttctttcttctgcaagggtgtcatgtccagaagaaggctagtatgcttcaagtgaacaagaggggttctttgatgagcagagcagaggtctgtgagacaaaatgatgtcttgtgtttgataattgctttatctcaaaagttccagtttgatagttgcatttccaacctatatatatcctgtttggcaattaactactacctccgtcccaaaatataacaacttttggctatgaatctgaacgcacagttatccagattcatagctaaaaatacttatattttgggacggagggagtactagtagtagattactatcctgtccatgtaatgtattaggaaggttaatagcactccctacatctcagaatggaagttgttttggtttt

SEQ ID NO: 3421 - DNA, 1175 bp, Oryza sativa
  ref <308>: DATABASE ACCESSION NUMBER: AK061103
  ref <309>: DATABASE ENTRY DATE: 2001-12-06
gcgagagcgcatagataaccctagcctcccccttcctcttcctctcctccttctctcgatctctataaaagacctcggatttcgaattcctccgccccgcgcgcgcgcgccacctcccccacgcccgtcgcgcccctttttttgggggtgggattcgcctggtcaagtgccatcgtcggatcatggcggcggaggcggcagcggcgctggaggggagcgagcccgtggacctggccaagcacccctccggcatcatccccacgctccaaaacatcgtatcgacggtcaatttggattgcaaattagacctcaaagctatagctttgcaagctcgcaatgcagaatataatccaaagcgttttgctgcggttatcatgagaataagagaaccaaaaactacagctctgatatttgcatcgggtaaaatggtctgtactggggcaaagagtgaacaacaatccaagcttgcagcaagaaagtacgctcgtattatccagaagcttggctttcctgctaaattcaaggatttcaagattcagaacattgttggctcttgtgatgttaaatttccaatcaggctggagggacttgcatattctcatggtgctttctcaagttatgagccagaactctttcctggtctgatatatcggatgaagcaaccaaagattgttcttctgatttttgtttcaggcaagattgttttgaccggagcaaaggtgagggatgagacgtataccgcctttgagaacatataccctgtgctaacggagttcagaaaagtccagcagtgaaaacttatggaatacacaagtacaagcttccttgagattttgctgcctagtgactgctaatcttaactgtacatatggtctggaggagcgtatagcatcttgtaatttatgtgagcccctcgatgcacgagtgttgtagacttgttgtagtaggcttgtagcttgggtgactgagagacttgagtatcgcgttcagtcgaacgaggtggagacgtggagttatcgtactttagcccgtgctgatttttttcccttcacaaatagatctgtagcgaaacattttattacagaaatgggcggctaacttttaacaaacagaacatatgtactgtggatgcgttgcgttttacagtagaatgtcatggactgtttggatggtgg

SEQ ID NO: 3422 - DNA, 1116 bp, Oryza sativa
  ref <308>: DATABASE ACCESSION NUMBER: AK061104
  ref <309>: DATABASE ENTRY DATE: 2001-12-06
gtcaaaatcaaatcgagtccaaagtggcaggctcaatccgatccgcgagaggcctcctcctcctcctcctcgatccagatggccatggcggcggcgtcggttctcgccgcctcgtcctcctcctcccctcctccgctcgcgctcgcgtcgtggagatggaggcctccgccgccgccgcctcttctggcagttgcaggtgcagctcgcggagcgacaaatcccaggctcgctctccgcctgagcgctgcggcgtctcctccggttaccggcgaatctcgcgccatcgcggggacggggcggtgtctggtggcgccgatgggtggggacgagacggagcgggatgcgacggctgcgacggcgccagactggggcgcgctcgcgaggcggctggctctgggcgcgctggggtgcgccgtgctctgctgcggcggtgcggcggtggcggcggaggactcgatcaaggcgtccggcttcgggctgcgtgtggcggcgtcgctgcggaggctcgggtgggcggacgaggccgtcgtgttcacgctcgctacgctaccggtgatcgagctgcgcggggccattccggttgggtactggatgcgcctcgaccccatccgcctcaccgtcctatccgttctcgggaacatggtgcctgtgccattcattatcctctacctgaaaaaacttgcagcatttctctctcaaagaagcgcatctgcaactcggattatggatcttctctttgagcgggcgcggcagaaggctgcacctgttgaggaatttcaatggcttggtttgatgctgtttgtggctgtaccatttcctggaactggagcatggactggggcaataatttcatcggttcttggcatgccattctggtcaggtttttcagcaaatttcgtgggcgttgtcttagcaggactgttggtaaatttgcttatgaatcttggtttgaagtatgccattatcactggtttagttctgttctttttatcaactgtcatgtggggtgtccttcgatccctcaaaaaatcactgaatgctaaatgatgtaatgaacatgcaactattttttcgttgtaaagaagaattcacccttgtgagggaaaaaaaaaaaag

SEQ ID NO: 3423 - DNA, 1647 bp, Oryza sativa
  ref <308>: DATABASE ACCESSION NUMBER: AK061105
  ref <309>: DATABASE ENTRY DATE: 2001-12-06
gctactgctcctcttctcatcgccacgctacctctcaatggaggccttcctcgccggcttccgggcgccgcggccgcgggtcccggccgtctccgccgccgcccggagcctccctcccaacacctccttcttctccggcggaaggcggcgcaggaggcttctttcctcatcggtggtctgcatggcggagccctatctcatagcaaagttggattctgcagagaaggcttggaaggaaatgtcggttagattggctgatcctgatatagtttcggatcccagcgagtaccaaaaacttgcacaatcagttgctgaactagatcaggttgtgagtacgtacaggcagtttaaggactgtgagaagcaaattgaagaaacaaaagttttgcaaaaagagaatgaagatgacccagatatggcagagatgattgattcagagatggagtctctatctaaccagcttgaagagcttgaggaaaaactgaagttactactgcttcccaatgatcctcttgatgcacgcaacatcttacttgaagtaagagcaggtgctggtggtgatgaagctggaatttgggctggtgaccttgtgcgtatgtatcaaaaatactgtgagcgcaactcctggaagttcaaaccagtttccagctcagaagcagaaaagggtgggttcaagacatatgtgatggaggtgaagggcaaacaagtctacagtaaactgaagtttgagtcaggtgtacaccgtgttcagcgcgttcctcagacagagactatgggccgtgttcacacatcaacagcaactgtagctattatgccagaggctgatgaagttgatgtggttatcgatccgaaagatattgaactcaaaactgcaagatctggtggagctggagggcagaatgttaacaaggtggaaactgctgttgatcttattcacaaacctacgggaattcggatattctgtacagaagaaaggtcacaactccaaaatagagaacgcgcattccaattgttgagagcaaagctttacgagataaaattacgggagcagcaggaatctataagaaaccagaggaaactgcaggttggaactggtgctcgttctgagaagataaggacgtacaattataaggacaacagagtgacagatcaccggttgaagatgaactttgaactcactggtttcctcatgggagatatcgagtcggctgtgcagtcctgttcttcaatggagcagaaggaactcctggaggagatggccacatctgtgggcgcagcgaaggtatgatcagcgcgatcgatctgtctgcagtcctccttccacctgagtaccagaccatcagatagaaatcatccaatggacattgtgttgaaacgggtggtgatcaatggacaaatgtacatgaagaaatccgaagatacatatacatatgcttccgttgctcatgagcatgactaatgtcagaaaacacactgatgcattttcagttcctcttacagttacaaattttgagtagttggatatatgcaatgtgtacatctcaacagttgcatagctacaatatgcattatgcacaattcaacctgttaatagatgggaatgaattatggtgatttgtcaatgtgttcaattgaaatgaatgtgtt

SEQ ID NO: 3424 - DNA, 1192 bp, Oryza sativa
  ref <308>: DATABASE ACCESSION NUMBER: AK061106
  ref <309>: DATABASE ENTRY DATE: 2001-12-06
attgtcctcctctccactacactacactgtgcacttctgcaggttgcaatggccaccatcccggaggtgccggcgagcgagcttatccagaccatgccgcgcgtcggcatgggcacggcggcgttccccttcacctcctcggaggacaccaccgccgccatgctccgcgccatcgagctcggctaccgccacttcgacacggccaggatttacgccaccgagggctgcgtcggcgaggcagtcgcggaggccgtccggcgtggcctcatcgcctcccgcgccgacgtgttcgtcacctccaagatctggtgcagcgacctgcacgccggccgcgtcgtgccggcggcgagggagacgctccgcaacctcgggatggactacgtcgacctgctccttgtccactggccggtgagcctcacgccgggcaactacgacttcccgttccccaaggaggtgatcctgccgtcgttcgacatggagggcgtgtggcgcggcatggaggagtgccaccgcctgggcctcgcgcgcgccatcggcgtcagcaacttctccgccaagaagctggagcagctgctgtcgctcgccgccgtgcggccggcggtgaaccaggtggaggtgaacccgatgtggcagcagaggacgctgcgggaggtgtgccggcgggagggggtgcagctgtgcgggtactcgcctctgggggcgaagggcacgccgtggggcagcgccgccgtgatggactccggcgtcctgcaggagatcgccggagccaagggcaagacgcttgctcagatttgtttgaggtggttgtacgagcaaggtgatgttttattggtgaagacatataatgagaagagaatgaaggaaaatctggacattttcaactgggagctcacagatgaagagagggagaggatcagtcagctgccccaactgaggggcctgcctggattggaattcatctctgaccatgggccttacaaatcagttgaagatttgtgggatggtgacgtctagcaagctacttagatacagtggagtatatatctaaataatcatgatggatcatgatgtggatctatcttaattatgtgcggcaggcatgggcacggcaccattcccgtacacgttctgcgatcaattaatgtatggaccatacatgtatattaattgctgtatacctatccacttattt

SEQ ID NO: 3425 - DNA, 1302 bp, Oryza sativa
  ref <308>: DATABASE ACCESSION NUMBER: AK061107
  ref <309>: DATABASE ENTRY DATE: 2001-12-06
gaccacggagcagcgaaccactcccaaaacgccaccaaaaccctcctctccccacctccgccgccgccgacatggccgtcgtccaccgcctcctccgccgcggcctctccgccgcctctcccctcccctctcttcaggagctcgggaggcgtccggcgagctcgtcggcggcggcggcgggggacgcggcggctgagctgcggggcgcgcgggaggacgtcaagcagctgctcaagtccacctcctgccatcccatcctggttcggttagggtggcatgatgctggtacttatgacaagaacattactgaatggccaaagtgtggtggtgccaatggtagcttgagattcgaaattgagttaaaacatgcggctaatgcaggtcttgtgaatgctttgaagctgatccagcccatcaaagacaagcatgcaggtgtcacttatgcagatctgtttcagctcgccagtgctacagccattgaggaagccggtggccccaagatccccatgatctatggaagggttgatgttgctgcccctgaacaatgcccgccagaggggagacttcctgctgctggccctccttcacctgcggaacatctacgagaagtattctatagaatgggcctgagtgacaaggaaattgttgcattgtcaggagctcatacacttggacgatctagaccagagcgcagtggatggggcaaaccagaaactaaatacactaaaaacggacctggtgcacctggagggcaatcttggacatcacagtggctgaagtttgataatagctacttcaaggacatcaaagaacgccgagatgaggaccttctagttctgcctactgatgctgtgctctttgaggactcatcattcaagatctatgctgaaaagtacgccgcagatcaggatgcattttttgaagactatgctgaagctcatgccaaactgagcaatctcggagcaaagtttgatcctccaaagggtatttcactggaataagtggcgtctgctgccgatgagctgcattttggcgaatgaacaagacgataccctgtttcttcttgctactatagagcatattatggttttattaccgatccagaaatttaatccattgatcggcaaatgtgatgttggtgttttgtattgagttgtgctctccattagaaataaaaatagcggtggccattttcgtttccaggaccaaacattttggcacattacaatacaatgttttagatgatgtctgcattgagctcttacacaggatgatcaaaatatatgacataatttattactg

SEQ ID NO: 3426 - DNA, 1584 bp, Oryza sativa
  ref <308>: DATABASE ACCESSION NUMBER: AK061108
  ref <309>: DATABASE ENTRY DATE: 2001-12-06
ctaatccctcatttcctctccccttcctacgcgccgccgccgccgccaccgcgactcctcgcattcgtccccaccacatccgagccagcggccgcccgcccgccgtcgctacctcctcctcgagccagcggccggcaccaccaccttcccacggagccagcgaccggcgctatgttctcacggagccgggcgcggtgccatcttctcgcggagtcactggcccgcaccgccgctaccttcttctcctcatagagccagggatgtcgacaccatcgccgtctgtgtccgcttcttcgcacagctacgccagcttgcggccactactacaccaggatttgggtgtgggtggagcaagtgtgccagccactgcaccgccgtccactcccatgagaaagtcagctccatcaagatgaacgaacatccagccacttgcgcgctcctccatttgctgccgtatgaggatgaggcaggcagctccagttaggtcactactctgctgaaaaaagaaaactgagtcctgaagaaatgcacagactgttttacaaggcaaacatattgaagggttgttctatctcgaccaaagtttctcagattattttgcctgctgctgcattgtaatactcataagctatattaccatcatcgaatcctcatccggatacgcagctgtgtttttgttgtatagtgtccaatgaatctctgagcaaccctgttatactggaataaaattaaggatggaatgcttcataggctgcttcaaggaatgggacgtaaaaaatgtgaccagcaatcctatagttctggttctacatatatgtgatcactaagaatttgacattggcattgtgccaggctctgttgctgctatccaacctccacataaacattgtgccttattttggtgatatgggtgctttaggtatagacctctgtcgtcgctcgcgcctgcgctggcctcacggtgacggcctccatgcctccggcctcgctgacggccgcgacgtgcagccgccgtgctggcctcacgccgtcctcctcctccgccaccggccacgggagcgcctccaccatgccgccgtcggagtcgcccactcgccgtgggcttcgtcgccgcccgcacccgatctggccacgggagggccagatctgccgcacaccactccggccgcctgctcccgcgtccgacgcgcgccgctcggcctcctccgcgccccgtcgcgccgccacgaacggctgtgaccgccgtccggccgcgccaacctgtgccccgccgtgccagccacggtccccgccagatccggcgtgagagcgacggaccccgacgcccctgatgatgtattcaatctattgacggttccattctcgacgaaacaagtaaccaaatagtactcatattactcttcttccaatttgttttacattccgaaaactagtaattaatcgggatgaaatcaaacaatggcttggatttggaatcaacttcttgagggcgtcatccgataagactggccttgccttcatacttgtaggtgtctttttaataatggaaaatttttccgttttggcacctgctgaaacattatt

SEQ ID NO: 3427 - DNA, 1134 bp, Oryza sativa
  ref <308>: DATABASE ACCESSION NUMBER: AK061109
  ref <309>: DATABASE ENTRY DATE: 2001-12-06
cacgaacgcaaacccccacaagtaccacctcgcaaatgctccattagctcccgaaatccaaaccacccccctcctcccctcacgggctcacggcctcacccacccaccaacccatccatccaactccgcggcggcggcggcggcgatgacgacccgatccaacggcgagcaccaccacgggccgccctcgtaccagcagcggcgcccgcactacgggggcgggtacggcggcgggtcggcctcgttccgcggctgctgctgctgcatcttcctgctgctcaccttcctggccctcctcgcgctggccgtcgcgctcgtcgtggtgctggtggtgaagccgcggaagccgcagttcgacctcaaccaggtgtccgtccagtacctcctcgtcaccccgccgtcctccgccgcctccgccgtgggggggaccgtggccgccgcggtccccgccgcggcctacctctccctcaacatcacgctcctcttcaccgccgtgaaccccaacaaggtcggcatccgctacggcgccacggcgttcgacgtcatgtaccacggcgtgccgctcggggtggcggccgtgcccgggttcgagcagccggcgcacagcacccgcctgctccagacccgcgtcatcgtcgaccgcttcaacgtgctccaggccgacgcccaggacctcgtccgcgacgccgcgatcagcgaccgcgtcgacctccgcatcaccggcgacgtcggcgccaagatcctcgtgctcggcttctcctccccaaaagtccaggtgtcggtggattgcgcgatcgccatcagtccgaggaggcagtcactgacatacaagcaatgtggcgtggatggcctaagcgtctagcagcagcaaccaaccaccacaccatcgcagcaacagcagcagcagaagaagaagaaggatgcagaaggcttaatctaatggagatagataagtggatgtgacccgtgtttgtcgattctaatctctctttctctatctaatcctgggttccgattcctgtacgtggggggtaaattttgagctctctcacctcaccctagaggaggaggtcgccgctgatttttgtgaattactgtccggtaattatcactatcgcccaattcgccatggtc

SEQ ID NO: 3428 - DNA, 1438 bp, Oryza sativa
  ref <308>: DATABASE ACCESSION NUMBER: AK061110
  ref <309>: DATABASE ENTRY DATE: 2001-12-06
actccttggcgttggtggccatcactgagcttatcattggagcggcctcagctgagctcccaaccagctgcagcagcagcagcagcaggggcagcctcagttcaccgcccggcgccgccgcatccatctgcattgctcgctcggaggcctcagttttggttacctgcagtaatcattgttggagaaaatggttgcagaggcctttacagtagatttgaatgaacctcttgtatttcaggttggacatttaggtgagcagtatcaggaatgggttcaccaaccaattgttagcaaggaggggccaagactttttgccaacgatgtcttagagttcttaacacgcacggaatggtgggcaattcctcttatctggttgcctgttgtatgttggtgcctgactaaatcagtcgaaatgggacacacactttcagaagtagctctgatggttgtgtttggaatatgcctatggacattgatcgagtatataatgcatcgattcctgttccacataaatactaaaagttactggacaaacacagcacattaccttcttcatggaattcatcacaagcacccgactgacggccttcgacttgtctttccaccagcagctgcagctatcttgtgctttccgttctggaatctaatcaggctaattactactccgactacaactcacggcgtgtttggaggcggcctgttgggttatgtgatgtatgactgcacacactactatctgcatcatgggcagccgtcatctgatccaggaaaacacctcaagaaataccatctgaaccatcacttcagaatccaaaacaaggggttcggaataacatcgacgctgtgggatcatgtgtttggtacattgccctcgacgaaaaccatcgacaagaagagctcttgacttgcgctgcattttgcaaaaagccagaaatggaggcaaagataagcatgtattatgttctccaatgtccacctcctcaagccaaatcctgttcaggtgttctagattgatttgctcctgcagaatccccatgattgcatgattgatgacaggcctgatggatgatgaatcactgatcgatttctagttcttattctctgaagatgaaccgaagatccaagattggtccatgaaattatcctttcttgatttggccctccgagaatagattcctgtgcaatctagtcagtagttgttcaggtcatgtaaacgtacggtaagaaatttatgtgcagagggttttccagtttatcctatgcatttgacctctggtcatgtattgattctgagacaaagtgtagtgatcgcttgatgatactagtacacattgctgccttcttttttgtcctgtaaaagatttattattggcagcaatggatggtagagagggcaatctgcttcttagttttgagtataaagttttaagttttgagc

SEQ ID NO: 3429 - DNA, 1138 bp, Oryza sativa
  ref <308>: DATABASE ACCESSION NUMBER: AK061111
  ref <309>: DATABASE ENTRY DATE: 2001-12-06
gctcattcctttataggaaagggctggggaaataaaatctaaccaaatttatgcgattattgttccaactccagctcatgctcatcaattcaaattaagtagaaattaaaattaaattccaagagcagctcacaacagcacaaaagaaaattaaaacttgcctttgggaatccaatgcccactcctccccatataaatcacacccgtcgcatcgctccgattcccaatccccacgcttccattccatccatctctctcgctctctcgcttgctcgccccgccgattcccgatcggagtgaggagctcgccgctgctgcttgccatggcggccgccgcgctgaccagccagctcaacgccctcgtcaacaacatgttcgccatgggtttgctggacgaccagttccagcagctgcagatgctgcaggactccaccgcgccggacttcgtctccgaggtcgtcacgctcttctgcgacgacggcgagcggatcatctgcgagctctccaggcagctggagaagccaaatgtggattttgacagggtggactcgtatgtgcatcagctcaaggggagcagcgcaagtgttggtgctcagaaagtgaagaacacttgcattcagttccgtgagttttgccaacagaggagcagagatgggtgcctcaagactttggatttggtgaggactgaattctatgatcttcgtaacaagtttcaggctatgcttcagctggagcagcaaatccaagcttgttaccctaaacattaaactggcgcgacagtggagctgcatgtttacacaactactgtgcctttggagttgtagaacatgctcgtttagcttttatcttggagtcatttgtttctgggatgtctgtagctgtttagcaacaagctgatctagctttggcaccttcattactgagtagtcgctctcagtttctgtgatggggacaaccgtttccagcaatttgtagtatctgttgttatctggtgtctcagctatagtttttttcggtcgtttagaaatgcaacagctgtgcaatttcgcgaaaattgcattttgctggttgattagggcggcttgtggtatgttgttgagaacaaagcgatacttaatatcgatataattgctgtttg

SEQ ID NO: 3430 - DNA, 1321 bp, Oryza sativa
  ref <308>: DATABASE ACCESSION NUMBER: AK061112
  ref <309>: DATABASE ENTRY DATE: 2001-12-06
aaagctagctagtcctaccaacaatggaggtcgccgccggcgcgggcgagggcgcgagggagttcaaagagatcgtgctggaggtgatggaggtgggtggtgtgctgaacgtcggcgacttcgtgccggcgctccggtggctggacccgcagggcgtggtagcgaggatgaaaaagctgcaccgccggttcgacgacatgatgaacgcgatcatcgcggagaggagggccggatcactactcaaaccaaccgacagtcgtgaggaaggtaaggacttgcttggcttgctcctggctatggtgcaggagcaggagtggctcgccgccggcgaggacgacaggatcaccgacacggaaatcaaggcccttatcctgaatctattcgtggcgggcacagacacaacatcaaccatagttgagtggacaatggcagagctgattcgacacccagatatcctcaagcacgcccaagaggagctagatgttgttgtgggtcgtgataggctcctctcagagtcggatctatcacatctcaccttcttccatgctatcatcaaggagacattccgtctacatccatcaacaccgctctcgctgccacgcatggcatctgaggagtgtgagatcgcaggctaccgtatccccaagggtgcagagttgctggtcaatgtgtgggggatcgcccgtgacccagccatatggcctgacccactagagtacaagccctctcggttcctccccggtgggacgcacactgatgtggatgtcaagggaaatgatttcggacttataccattcggtgcagggcgaaggatatgcgccggcctcagttggggcctgcggatggtcaccatgacagcggccacgctggtgcatgcattcgactggcagctaccagcggaccagacgccagacaagctcaatatggatgaggcgtttaccctcctgctgcaaagggcagagccattggtggttcacccggtaccaaggcttctcccatccgcttacaatattgcataaagatttacgagttgaatataattaacgaaaagttatttccgtgtgtgtggcatcaaataaatagagggtatgaacttttgtcatggtgttgcatcattgttgtatgttggtagattggtttttcacgagtatctatactccttataaaaaggagtagtggtgatgattctgctaccaccccactaccaactcttatctttttttaaggacatctaggattagtgggcccatatgtcattactctcaccaacttttattcttgtgaaaggttattaccgtgcgaataaatagtgggtttgaac

SEQ ID NO: 3431 - DNA, 1101 bp, Oryza sativa
  ref <308>: DATABASE ACCESSION NUMBER: AK061113
  ref <309>: DATABASE ENTRY DATE: 2001-12-06
tgcaacatgcaagttctcagacagcttaaaagtactgccacgaggtcttggatgtgtttataaaggagagattatgaacagaagtgtaatgatttataagttgcactcgtgtatcattcagagttcgatgcagttccagcaagaggtccacctcattagcaaggtgaggcaccctcacctggtgactttgattggggcatgcccggatgcattgtgtcttgtctatgaatacgtgccaaacgggagccttcacgaccgcctttggagcaagtgcggcattcctcagttgccatggaaaatccgtgcacgtattgttgctgaaatctcaagtgctctattcttcttgcattcctgtaaacctcagatgattgtccacggtgacttgaagcttgaaaacatccttttagatgccaacctgcactgcaagatagctgattgtggtatttctcaattattcatggaagatgccaaggacgcagacccggaataccggagaagcaaaccattgacacccaaatctgacatatactcctttgggattgtgatactccagttactaactgggaagcaggctgcaggccttcccagcgaagtaaggcgtgcaatgtccagtggaaagctatggtcattgttagatccaacagctggagagtggcctctggaggtggctcgaaggttagcagagttggggctcaagtgcagtgaggcagcaagtccagagctgctgactccagaaactgtgcgagatctggaacagctccacctgatgagggataatagacaagtgccctccttcttcctgtgcccgatcctcaaggaagtgatgcatgatccccaggtgggggcggacgggttgacgtacgaagggcgcgccatttccgagttgatggacaatggccctccaatcacccccaaccacgcccttcgttttgccatccatgactggctctctcagagatcaactcctttctgattttccccaaggatctggattttgtatgtacacattgtttatttcatagtcagtctgtttgttagtagcacatgcatgatgtaacgaaataataatagagtaaatatttcaagtttcatgtatcgagc

SEQ ID NO: 3432 - DNA, 993 bp, Oryza sativa
  ref <308>: DATABASE ACCESSION NUMBER: AK061114
  ref <309>: DATABASE ENTRY DATE: 2001-12-06
accttcactcactccgcccatttccccactcctcctcgcccgcatccggaaccctagctaagcttcgatggcgatggcggcggcctggtccccggcgctcgcggcggttttgctggcggcggccgtggcgtcggcgtccaactcggagggggacgcgctgtacgcgctgcggcgcgcgctggcggacccccggggcgtgctccagagctgggacccgaccctcgtcaacccctgcacctggttccacgtcacctgcgaccgcgccggccgcgtcacccgcctagacttgggtaactcaaatttgtcaggccatcttgctcctgaactgggacaccttgagcatctccaatatctagagctgtacaaaaacaatattcagggcactatcccagctgagctcgggagtctgaagaaccttattagcttggatctgtataacaacaacattactggaaccataccgaaagaacttggcaagctgagttccttagtattcttgcggcttaatgacaacagtttaaacggtccaatcccgagggatctggcaaaaatatctagtctcaaagtgatagatgtctcgaacaatgatctttgcggcacgattcctactagcgggccttttgagcatatacccctgaacaactttgacaaaaatccaaggttggaggggcccgagttgcaagggcttgcaacatatgacacaaactgctgaacgtgccaatcagtccctgtcgctcgtgtgatatagatcaatagcaaattagctttatcggagtacctggtaaatgtgcaagcttggttgctttgcttgtacgagatactgcaagtaaagactaggctgcagctcaacccttgtagtgtagataatatttatcgcaagcctgaggccctcttgactgataatacctggtaatgtatggttgctttgatgaactaagtcttgatatttattgccagttttgatttagttgccctattataagggactggttc

SEQ ID NO: 3433 - DNA, 1070 bp, Oryza sativa
  ref <308>: DATABASE ACCESSION NUMBER: AK061115
  ref <309>: DATABASE ENTRY DATE: 2001-12-06
gactgcagttgcagacttgcagagcccaagagaggagaggagattccaagagaagagatgagatcccacgagatgaacaactcttcttctcgttatgcgtcagaggaggagcgcggcagcaacagcttcctcatcgagagcgaggaggaggaggaggacgaggaagcccacccccactcctccatcctcctcaaggatgccgactccgactccgactccgacgactcctcctgcgctaccccgcgcccaagctcctacgccacccaccaatggccgcaaagctacaggcaatcaatcgacatttatagtagcgtgcagtctcccaacctgagctttttgggaactccaactctaagcaggctctccaactcattcctcaccaactcttttcgtggcaaaacccctgaaattctctctaatcttgtcaagccacttctacgcccatcattttcaagcgacgaccagcagcagcagcagcagcatgacgatgatacccgtaagagttcccagtacctgcttccctcaagaaaaccgtctttgcaacagatcccggaggatcaaaaaccattggtgccggctcatgaggtgccggcttatcaacaatgctcctacacccaggcagtgatgaatggaataaatgttctgtgtggtgtggggatcctatcgactcctcattgctctatctgtccccttctttgggctagttatggcgttggttggttctttactcaccatgcttgtgacctacatccttccatgcgcctgtttcttggccatccttaagagaaaagtgacttggcatcagattgcagcttgctcattcatcatcgtggtaggggtttgctgcgcttgcgtggggacatactcatccctctccaagattatccagaactacacctgacctgagtggccagctgaggaacggagcactagctgcttatgtagtaataagaaaataattaatcatccttctatagccctgcacataccggaacaaagttttgcccgggaactggagtcgacttgatcaattatatatgtataatataattagtttggatcgtttgttt

SEQ ID NO: 3434 - DNA, 1043 bp, Oryza sativa
  ref <308>: DATABASE ACCESSION NUMBER: AK061116
  ref <309>: DATABASE ENTRY DATE: 2001-12-06
agagaagcaaacccaacaaaaaaaaaaaagaattttcaggttttcttctcgctttcaccggagaaggagaaggagaggaaggtgttgatcgaatcctcctccaatcgcgcgcgattcgatccccgttgctggccgctcgctcgctcgatccctcatccgatctgaatcccccgatctgatggcggccaaccccggcaacaagatccgcaacgccaagctggttcttcttggagatgtgggcacgggcaagtcgagcctcgttctccggtttgtgaagggccagtttgttgagttccaggagtccaccatcggcgcggccttcttctcgcaaaccttggcggttaacgatgagacggtgaagttcgaaatctgggatactgcagggcaggagaggtatcatagcttggctccgatgtactatcggggtgcggctgccgcgatagttgtctacgacatcacaaatgcggcctctttcacacgtgcaaaaaaatgggttcaagaacttcaagcgcaaggaaacccaaacacgataatggctcttgctggtaacaaggctgatatggtagaggcgaggcaggtgccagcagaagaggcaaagacctacgcacaagagaatggccttttcttcatggaaacatctgcgaaaacggcgatcaatgtgaacgatgtattccacgagatcgcaaagagattgcttcaaggacagcaggctcaagacacaccggctggaatggttctcaaccagagaccagctgagaggatggtgagcagttcttcatgctgctcataattcaagtgtggagtatgtgacaactacataatgccatggcctgaaatccaggagaagtgtgtatgcatcagagatgcacacaaagcttgtaaagtggctgctgccatcccagctgctgtttcttattttgtcatgttcgttctgtaaatgtgaatactagggtgtcgctgcagaaattcagatgtattactacagtgtatgctcttgcttaagtatttctcgacactgaaacagagtaaagcaaagtctagtc

SEQ ID NO: 3435 - DNA, 1180 bp, Oryza sativa
  ref <308>: DATABASE ACCESSION NUMBER: AK061117
  ref <309>: DATABASE ENTRY DATE: 2001-12-06
atcatgatgatgatgaagggacagattcgggtgaagactttgatgaaaatgagggtctactttctctggaatcagattccactgatgatgtagtggatattgataatgaattggtcatatcgcctaccttttctagttgcaatgcatctgaatcatcaatcaacaaatcagactctggaaattcttccattaatggcactccaccgttggtttctgcaatgaaaggaagccgtgcaaagttgggaatcgtcacaagtttgagtgtttcatgggcccctgatgtatatgatcctcctgttacttctgggtctcacactgtgaaggggcatcaaagaagttcaaggaagagccactacaaatacaagccggccaagagcagtagcagccgcagcagcagtggaagcaaaaaggacaggaagcattctcgccacagtagcagcagcagcagcagcagtaaccacaaaagagacaggaaaccttcctaccgcaacaccgttggtggtgtaagcgtcggcagcagcagcagcagcagaaatactgatgctagtgctgctcaatatcgtgatctgtacagcagcagtggcggcaacagaatcgacattgctgttcctcaatacagcaagctatctccgttggtgccgtctgagagtgcaacatatcgtaatgtgtacaacagcactagcggcagcagaactgaccctaccgttcctcattgtagcaagctatctccgctggtgacatctgagagtgcatcacttgcagggaccgttcctgtgctgaagacattggagccgatcaaacgcagctccagctgctgcaaggagcagcctttgagctttctgtcacgccagtttgtggctgcaaagtacaaggggatgttctcactatggagtcacaaccagctagcttcttaatcatctgttgatacatccaactcgtaagctgttggttatcaacaaaatgcaaaacttttaccgcttatgcctttattattttgatttgtgaccacgtgtcttgttctttgttacactgtttgctccgtttgttgaacatccgaagagatgttatcgaaagttgtcgctcgaagtatgtatgcatactcgagctcattatcttcccttatttatttgttcaatcggcacggttctgtttgaggctttgaacatcatttcatcggttc

SEQ ID NO: 3436 - DNA, 1577 bp, Oryza sativa
  ref <308>: DATABASE ACCESSION NUMBER: AK061118
  ref <309>: DATABASE ENTRY DATE: 2001-12-06
aatgcagaaaccatccagcgtgtagtgtgtagcgtgtagtgtgtcgtcacgatgtcgcgcgccatggcggcctccaggcgggtctcggtgttcgtcgccgcgttggtctgctgctcactcgtgcggctctcccggtgcggcggcggcggcggcgggcagagggcgcagaactacacctcgatgttcagcttcggcgactcgctgacggacaccggcaacctcgtcgtgtccagcccgctctccttcagcatcgtcggcaagtacccctacggcatgacatacttccaccgccccaccggccgctgctccgacggccgcctcgtcgtcgacttcctcgcgcaagcgttcgggctgccgctgctgcagccgtacctgtcgcgcggcgaggacgtcacgcggggcgtcaacttcgccgtcggcggcgcgacggccatggatccgccgttcttcgaggagatcggcgcgtccgacaagctctggaccaacctgtcgctcagcgtccagctcggctggttcgagcagctcaagccctcactctgcagctcacccaaagattgcaaggagttcttcagcaagtcactcttcctcgtcggggagattgggggaaacgactacaactacgccttcttcaagggcaagagcttggacgacgccaaatcctacgtccccaccgtcgccggcgccgtcgccgacgccaccgaaaggctgatcaaggcaggggcggtgcacctggtggtgcccgggaacctgccgatcggctgctcgtcagcgtacctgacgctgcacccgagcagcaacaggagcgactacgactccaccggctgcctcaagacgtacaacgacttcgcccagcaccacaacgccgtgctccaggacaagctccggctgcttcgccggagctacccggaggccaggatcatgtacgccgactactacggcgccgccatgtccttcgcccagaaccccaagcagttcgggttcaggcacggggcgctgaggacgtgctgcggcggcggagggccgtacaacttcaacccgaaggcgagctgcggcgtgcggggctccagcgtgtgcacggacccgtcggcgtacgccaactgggacggcgtccacctgacggaggccggctaccacgccatcgccaacagcatcctcaatggcccttacaccagcccaaggctgctctgaccatcccccgttctctcgacctggtgttagctgctgctgctgctgctgcactctgcaatgtaaactgatctgtaatgtagtgatatgagctagtggtggttttgagttttgacagtgtgtgggctttggctacttgagtctccaggcacagtacagtatgtctgtcgagtgtcatcagctttgggcgtgactgtgtccgtgctacttttgactttgcaagtactgaattatagtactcagcacaactgcacaaacctttctttcatgtgttacgtctggatttcacgagacgagttgaaatcaggcggtatatatatatacgtctggatttcagaacaattagtttcagaaacatacggcgtggcatacaccagtcaaatgatatatac

SEQ ID NO: 3437 - DNA, 1081 bp, Oryza sativa
  ref <308>: DATABASE ACCESSION NUMBER: AK061119
  ref <309>: DATABASE ENTRY DATE: 2001-12-06
gcagcactcctttttgttactccaagctttttcctgtagttttcttctcctctctccacattgccaccaccaaatcagctgagatctcacttttgattcggggactgtctttaagtagaggcagccaagctgagatatcctcctgtgtgttctcccgttcttggcattcggcaataggtcccatgaagccatgattccatcaggagaggcacatcaagacggttgctagtttctgcattcaattcagggaggacaatttgcagggtgccggtgctaatctgaactctgaagggaggagacgtgctggttgcaacctgcaagaggccaagaagcggccgaggcaggcagcaatgagcgggaggtcgaggccgtggccaggggacccgtcgccggcgcctccgcagccgccggtcgtcgccgcagcggcggacgcgggcggcgaggcgtcgacgtcgctcagggacttcggcacgtcgatggacgccatctcgttcgggttcgcggccaccgccatcctcgtctccatgttcctcctcatggccatcttcgagcacctcatcaagccccacgtcttcccgcccctcgccagcgcggcgctccgccccgcgcgccgccgccacggcgtctctcccgccggcaagctccggagccctcccatggtacgtagtacgtcgccaaccacttacacagagcgaaatgatccaatgttgaggtgtttgctgctctgaaattgttgcaggtggagacggtgctgcaggcggcggacctgtcggtgttgatgccggggcaacggtacccgacgtacctggcgcagccggcgccgcttccgccggcgccgtgcccgagggaaggggtgcactggccgccgcacgaccacgacgtccaccactcctacatgccgccatgatcgagatctcgcgtacaatgttgcagtggaacaacatgttagagacacacgctgtcaaaccaaccaaccgaccgatcgatcgatggatcgaatcctgttgctgattgaattgctgtatagcggagacgctgtaaataataaacgcaggggagagtgacaagagttgttggatat

SEQ ID NO: 3438 - DNA, 1136 bp, Oryza sativa
  ref <308>: DATABASE ACCESSION NUMBER: AK061120
  ref <309>: DATABASE ENTRY DATE: 2001-12-06
aggcattcttctgtactagttcacaaacctgacatgcatgcaggcaatcagcgagctcactcatgggaagaaagaggaggtgagcaggacagagttccaggaggtcctgtccgatatcctcctcggcatggcggctggcctcaagagggacccgatcgttatactgcgcatcgacggcgaggacctgagggactttgttgacagccccaggtatgagccagaagctgctgccatcttctcaaagataggttctgaagacatgtctctgcgtcagtgcctgctagctgctcttcagctgctgaatgtcgacaacggaatgccaccagcttctgacccttgggttgcagagaacatcatagagccggcattgcagaaactccctgccggccagcttgagcaaccggcctcgcaagatatcttcttagaacagctcaagaagctcctgagcaacatcgctgaaaggcttcaggagcagcctgtgattgtcgcacacaccgagaacacattcgacggtagttgtgtcaagaggctgctggacaacaaattcgagctggacaagttgttggattctgtctggaaagatgtactcatagagcataagaacaaaggatccagggagtgcctgatagccgcactcgataagatggcagatgcagcaggcttaccaccttacggtgccgttaatcaggtggatgccgtggtgaatgaggcgctcaagacagttaatgctgatgaaagaacagcggtagacgaggccgggttcaagaaactactgacagatatccttagggcagtgatgatgcagctgaacagacagccgattttcgtctcgaacagcaccgtagttcacgagccattgttcagttcatccgcaattttatcctcgcctccagtgaaatcatcgccgagtgaataaattaaaccatatatgaatgttaatgtgcttgacagtggtctatctgtaagcagtgcctgtgatgttgcttttttgtctgatcaagcactgcgggggcatgtatagactggctacaacctgacgagatgtaaagaacacttccgtcagtcttgctagcctgattgatgtataagtttggaataaggctttcaagctatacagattgatcaatggcaaatgc

SEQ ID NO: 3439 - DNA, 1128 bp, Oryza sativa
  ref <308>: DATABASE ACCESSION NUMBER: AK061121
  ref <309>: DATABASE ENTRY DATE: 2001-12-06
gtaggaaaaggcattgacttgccccttcctccttcgatccgcggtctagccagctggttgctgattcgctgcttgttcggattgattcgattcgtcgtccatggatcgtcgtgacgattcttgctgccccggcggcggcggcggcgtctcatctctgatcggagaatttgttggggacgtggtgatgtggcggcggggcgacgtgagcgcctgcctgctggcggcgaccgtctccggctggctgctcttcggctccggcggctacaccttcctctccctcgcctccaacgtcctcctcctcctcctcaccgtcctcttcctctgggccaaggccgcccgcctcctcaacaggccagagccacctattccagagatgcgcatttcgcagcaggttgtgaatgaagtggcagccctgctgcattctggcatgaacacggtcttctctgtcttccatgacatcgcactcgggaaagactcggtgctattttatcaagtcttccttagcctgtggatcatttctatcattggcagcctgactgatttcaccactttatgttacacaagtattgttgctgttctgaccatccctgcattgtaccagaagtatgaggaatgcattgacagatacatgaggtttgcgtatttgaacctgcagatgtacgagatggtgtacgagagattctctgccaagtgcttccacagggctagggatttggttattgaggttctgaaagagccatgacctgatcaatattgtgtttgcttgtacaagatggtggaattgggtttttaactggatgatgattgatttgttgtttcctgtatagagagagggataggttgattgattttttcccccatggagtgctggttttgtttgtttgatttcaatcatatgcagatagttggggccttgatggtcagagatgcagttcttgttgagatgcctgtaatggttgcgtttgtaaattgtgtccaaagggacaaaacagtgtgcagattttggtttcttttggccttcgatcactagttttcagggttttttctttatgtccactgcgaaatggagtgacaatattgtgtaagaacacaatagcattcagatttctgagaacctcgtttggctat

SEQ ID NO: 3440 - DNA, 1666 bp, Oryza sativa
  ref <308>: DATABASE ACCESSION NUMBER: AK061122
  ref <309>: DATABASE ENTRY DATE: 2001-12-06
aatcactccatttccagtttgagctaataaactagcaatctgcactgagcgtacgtacgtccttgctgctcactatcatgaacaaacagtagctaagctagctatagctacgtttttgttcatatgctgttgttgctgccggctgcttggccgcggggaagcatggcggcggcgatggcgttcctcgcggtggtctgcgcggcggcgatggcggcggtgagcggagcggaggaggtgtacgagttcggctccggcgcgtcgttcatcttcggggactcgctcgtcgacgccggcaacaacaactacatcccctcgctgtccaaggccaacatgacgcccaacggcatcgacttcgccgcctccggcggcatgcccaccggccgcttcaccaacggccggaccatcgccgacatcatcggagaaatgttgggccagacggactactcgccgccgttcctcgccccgaacacgaccggcggcgcgctgctcaacggcgtcaactacgcgtcaggaggcgccgggattctcaacggcacaggaagaatctttgtgaacaggatcggaatggatcttcaggtggattacttcaacatcacgaggaagcagctggacgatctcctggggaaggcgaaggcgaaggagttcttgaagaagaaggccatcttctccatcaccgtcgggtccaacgacttcctcaacaactacctcatgcccgtcctctccgccgggacccgtgtcgccgagtcgcccgacggcttcatcaacgacctcatcatccacctccgggagcagctcacgtgaacaggcccatcatctacattatgttggatcgatggccggagactgactgactggtcaacggcggcggcaatggcgggctcgccgccgttgattgtttctgcatccagaggctgtacacgctggacgcgaggaagttcgtggtggcgaacgtggggccgctggggtgcatcccgtaccagaagacgatcaaccgcgtcggcgagaacgagtgcgtgaagctgcccaaccagctcgcctcgcagtacaacggccgcctccgggagctcctcatccagctcaacggcgacctcgccggcgccaagttctgcctcgccaacgtctacgacctcgtcatggacgtcatcaccaactacgactcctacggtgagctatagctagctagctgctcaactttcatcgccatagctttcgacgagttgatcgatcgatcgatcgatctcaaggtagaagacgaggttgggtttttgcagggttcgagacggcgagcatggcgtgctgcgggaacggcgggacgtacgacgggatggtgccgtgcgggccggcgtcgagcatgtgcggcgaccggaagagccacgtgttctgggacccgtaccaccccagcgaggcggcgaacctggtgatggccaagtacatcgtcgacggcgacagcaagtacatctcgccgatgaacctccgcaagctgttctccctctagccttactagcactccattgttaattaccgcgattgatgtcgagcttgcattttgattcgcatgtgtaattgtatctgatgcttttggtgtttttgcacgcgaattgcgagatttggcatgcaatttgcagtgtgtaaatgttcaattcagtgacagattgcaggtttgcat

SEQ ID NO: 3441 - DNA, 1156 bp, Oryza sativa
  ref <308>: DATABASE ACCESSION NUMBER: AK061123
  ref <309>: DATABASE ENTRY DATE: 2001-12-06
gagctgacctgaccccgagccgagccgtacaccaccggaggaggaggaggaagccggcgaggtgacgctgcgagatcgggaggtagggttcggggggaggttttgggtttggtggatggtcacggcggcggcggagttcgtcgatgggcaggtcgttcagggactcgctgaaggtgctcgaggccgacatccagcacgccaactcgcttgctgctgaatttagaagggaatatgatggcgcctgtcttcagatgagaatgtcatactgtccagctgcacacttcttcctttttcttgtgcagtggacagattgcaaccttgctggtgcacttgggctgttgaggattctcatttataaggtttatgctgatgggactaccaccatgtctgctcatgaaaggaaagcaagcattagggaattctatgctgtcatatttccttctttgatgcaactacatgaagggatcaatgaagtggaagacaagaaacaaaaggcaatctgtatagaaagatatagaagacgagatgaagatcagaaaatggtgatttcagagattgatgataacatcgaggaggaatgtggcatatgtatggagataaatggcaaagtagttcttccaacttgtagccatgctatgtgcattaaatgctaccgtgactggagatcaagatcccagtcttgtccattctgccgcgatagtctcaagagagtgaactcggccgacctatggatatatacagataacagggacatagtggacatagcgacggtccgaaaggaaaatcttaggcggctcttcatgtacatagacaagttgcccacggtcatccctgaaactgtttttgacgtttacgattcccacgtaaaatgaccttgcactcatgcacaaattctttactggtgtgttactactagtgctgtagaaattgtggagcccttggtgttcatgctgccccgcttgtagaagctgtaagcagctaagctcgccgaggaggctcgctatacaaaggtatatatgtaaattgtcttggctgtatggtgtgtacctttgtgaggagttaggagaatctgatgccagtcagtctgtaagtaaggaagaaccagcaaccattgactttgtttcttttaattgtaagcatttcactttcacccatg

SEQ ID NO: 3442 - DNA, 1278 bp, Oryza sativa
  ref <308>: DATABASE ACCESSION NUMBER: AK061124
  ref <309>: DATABASE ENTRY DATE: 2001-12-06
acattttcactgctacgtactcgatcatctggccagctgctgccatggcaacattgccacaaatggccgcgaccaaggagcgtcaagaggcggctaacccgaccacgacgaccaggacgctggtcgagtccgtcaccaactggatccgcgtctactccgacggctccgtcgaccgcctcggcccgccggaagccgccgcgttcatggtcctcgtcccgccgtacgacgacccacgggacggggtcaccgtccacgacgtcgccacggaccatggcgtcgacgtccgcctgtacctgacgacgacgacgccggccgggcgccgccctgttctcgtccatttccacggcggcggcttctgcttgtcccacgccgcgtggtcgctctaccaccgcttctacgcccgcctcgccgtggagctcgacgtcgcgggcatcgtctccgtcgtcctcccgctcgcgccggagcaccgcctccccgccgccatcgacgccggacacgccgcgctgctctggctccgtgacgtcgcgtgcggcaccagcgacaccatcgcgcaccatgcggtcgaacgccttcgcgacgccgccgacttctcccgcgtgttcctcatcggcgacagcgcgggcggcgtcctcgtgcacaacgtggcggcacgcgccggcgaggctggggccgaggctctcgacccgatacgcctcgccggcggtgtcctcctccacccgggcttcatcttgccggagaagagcccgtcggagctggagaaccctcccacgccgttcatgacgcaggagacggtggacaagttcgtcatgctcgcgttgccggtgggaaccaccagcagggaccacccgtacacgtctccggcggcggcggtgacggcggcggagggagcccagctgccgccgatgctggtgatggtcgcggaggaggacatgctccgcgacgcgcaggtggagtacggcgaggccatggcgcgcgcgggcaaggcagtggaaacggtggtcagccacggccgcgggatcggccacgtgttctacctcaactggttcgccgtggagtcccaccccgtcgcggcggcgcgggcgcgggagctcgtcgacgccgtcaagagcttcgtcgatagccactgaatcgattccaagtttgaatcggtgtctgcttctatgtctgaatttgtgtcgaaatcctgtatccatctcaccgtcacgtagtacatgtctacatcgcaatgtctctgtagttaaacaagtttcccgcgcaatgcatacgtgttttcgtttc

SEQ ID NO: 3443 - DNA, 1184 bp, Oryza sativa
  ref <308>: DATABASE ACCESSION NUMBER: AK061125
  ref <309>: DATABASE ENTRY DATE: 2001-12-06
tactcctctccaccgccatcattgtcggcgcgagcgagagcccaagcccaagccgacccccgagggaaggggaagacggggccgagatggcggggcgctacgacagcaaccccttcgaggaggacgacgtgaaccctttctcggaacaagcgcgtggtaaggctggagggcagcccagctatggcggcggcgcgttctacatgccgaatccacggaatgtgccttctgtgtcgtcgaattcgcggctttcgcctcttccccctgagcccgcagcttttggggctacggtggatatccctcttgactcttccaaggacctgaagaatagggaaaaggagctgcaagctagggaagcggaattgaacaagagggagaaggagctaaaaaggagggaggaggctgcagcgcgagctggtattgtcattgaggagaaaaactggcctccatttctgccactcatccatcatgatatcaccaatgagataccgagtcaccttcaaagaatgcaatatgttgcatttgcatcatttcttggattggcttgctgtctcttctggaacgtcatagcagttacttcagcttgggtcaagggggaaggcgtgaagatatggttgctggcaatcatctacttcatctctggggttcctggtgcatatgttttatggtatcgacctctgtataatgctatgaggactgatagtgccttgaagtttggattgttcttcttggtttacctgttccatattcttttctgtgtattttctgctgtggctcctcctgttgtcttcgaggggaaatcattggcggggattttaccagcaattgatctcatcagcaagaatgctttggtggggatcttctactttgttggatttggattgttctgcgtcgaatcattgctcagcatctgggttatccagcaagtgtacatgtacttccgaggaagtggaaaagctgctgagatgaagcgtgatgcaactaggggtgctatgcgggcagctttttaattatcagaaaagattattggtccgactcatatctctgatggaatggatagattgtggtataaacgaacatatatgttttccctgtttgctgactacaatttcaaattgttagtaggttacagtgacgttgtatgacctgtcctcttgattcatcaatatagagaatgtgcagttgtt

SEQ ID NO: 3444 - DNA, 1193 bp, Oryza sativa
  ref <308>: DATABASE ACCESSION NUMBER: AK061126
  ref <309>: DATABASE ENTRY DATE: 2001-12-06
aaaaaaaagaccagcaggagctagtcagtagaagaagagacattatttgtaggcagcagctagaaattaaggacgattatcgatggagcagaagccaccagcagttgctgctaataataatcagctgctgctgatgatgataatggtggtggtggcgtgcagtaattatatgattagtggcgcaggagcgcagccatcgccgggatactacccgagcaagacgatccgatcgatggcgttcggcgaagggtacgacaacctgtggggcgggcagcaccagacgctgtcggcggaccagacggcgctgacggtgtggatggaccggagctccggcagcggcttcaagtccaagcgctcctaccgcaacggctacttcggcgcctccatcaaggtcccctccggctacaccgccggcgtcaacaccgccttctacctgtcgaacaacgagctgtacccggggcagcacgacgagatcgacatagagctgctggggacggtgccgggggagccgtggacgctgcagacgaacgtgtacgtgcacggcaccggcgacggcgccatcatcgggagggagatgcggttccacctctggttcgaccccaccgccgacttccaccactacgccatcctctggaaccccgaccacatcgtcttcctcgtcgacgacgtccccgtccgccgttacccgcgcgccgccggcaacacattccccgaccgccagatgtgggcctacggctccatctgggacgcctccgactgggccaccgacggcggccgctacaagtccgactaccgctaccagcccttcgtctcgcgctaccgagacctcaagatcgccggctgcgaggccgccgcgccggcgagctgccagcccgtgccggcgtcgccgtcgggcgccaccggcgagctcagcgcgcagcagaaggcggccatgaggtgggcgcagcagaggtccatggtctactactactgccaggactactccaggaatcacgccaactaccccgagtgctagtggttgagccatgcatcttcagtttcacatcgtttcatgtgttgtgtgcaccacgtagtacgagcaccaacacgtatctactattaccctcatcataattattgtgtacgattggattgaggtgtgcagctgtgtcacccaaaatttcacttcgacctgcaatgcaagcatgtgttcc

SEQ ID NO: 3445 - DNA, 981 bp, Oryza sativa
  ref <308>: DATABASE ACCESSION NUMBER: AK061127
  ref <309>: DATABASE ENTRY DATE: 2001-12-06
atcactatcttcccaatctcgcgaataatcgagagagagagagagagagagagagaggcgacgagacggcgattgctcggttctcccgcgggcggcggcgagccggcgagggcttctccggtggggggcggcgagctatcctagcgcccgccttgggagcgctctcgcggatctcctttggagctttgatagcatagcaaggtcatggcagaggttgcagatttaactggggatggaggtgttcttaagacggtggtcagaaaagcaaaggatgatgctatagctccaactgatagtcttcccttggttgatgttcattatgaaggcacactcgctgaaaatggtgaagttttcgacaccactcatgaagacaactctattttctcatttgaaattgggcaaggagctgtcattaaagcatgggatatagctttaagaactatgaaggttggtgaagttgcaaaaataacatgcaagccagaatacgcatacggaagtgcagggtcgccgccagagattccacccaatgcaacactcatttttgaggtggagttagtggcttgtaggcctaggaaaggttcaagcctgggcagtgtttctgatgagaaagccaggctagaggaactaaagaagcagcgagagctagctgctgccaccaaggaggaagagaaaaagaagagggaagaagcgaaggctgctgcagcagctcgtgtccaagccaaacttgacgcgaagaaggggaagggaaaaggaaagggaaaatagatgactagtatttgcttctgactactgtaacctagaaataatccgcaacaaatcatcatctgcaagattgcttgttggctactgttcatcagatgctgcgttgttgctcctgtttgacaccatggctgtactgatagaacaaaattgtagttaacgttttcacaaatcatcacatgcaatcattgaccggttattggttaatgattgcatcttcat

SEQ ID NO: 3446 - DNA, 1754 bp, Oryza sativa
  ref <308>: DATABASE ACCESSION NUMBER: AK061128
  ref <309>: DATABASE ENTRY DATE: 2001-12-06
cacaagcaaacgcacgcgcccccgcctatgaaagcccgcgcgcaccacgcacacacgcacgcacgcagtcgcaggcgccgcagctcgtctccatgggtgtcgtcgaggcagaggcgttgcatggggcggtggaggccctggctgggtcgctgcagccgcacgtggccaccgccttcttcgtgttctcggcgtgcacggtggccctcgccgcgctccttgccgtggtgcgcctgcgcccgccgtggtggtgcgactgcaccgtgtgcgaggccttcctgacggcgtcgtgggcgggagagttcgacaacctctgcgactggtacgcccacctgctgcgcacctcgccggcgcagaccgtgcacgtgcacgtcctccgcaacgtgctcaccgccaacccggtcaccgtcgaccacgtgctccgcgcccgcttcgacaactatcccaagggcgctcccttctccgccatcctcgccgacttcctcggccgcgggatatttaacgtcgacggtgacgcgtggctcttccagcgcaagctcgccgctgccgagctcgcctctccggcgctccgcgccttcgcggcgcgtgtcgtggcctccgagctgaggtgccgcctcatccctctgctccactctgcttcacgtgagggcaacggcaaggtgctcgacctgcaagacatgttccgccgcttcgccttcgacagcatatgcaagatctcgtttggcctcgaccctggctgcctcgagctgtcgatgcctgtatcgacgctcgtggaagcgttcgacacggcgtcgacactctccgcgcggcgggcgacggtgcccatgcagataatctggaggctgaagcggttcttgaacgtcggggacgaaaggaagctccgggacgcggtccgtttggtcgacgcgctcgcggcggaggtcatccgacaacggcggaagcttggcggcgctgccaccggcagcgacctcctttcacgcttcatgggctccatcgacgacgacaagtacctccgcgacatcgtcgtcagcttcatgctcgccggccgcgacaccatcgcctcggcgctcaccgccttctttctgctcctctccgatcacccagaggtcgccaccgccatccgagacgaggtcgcccgcgtcacgggcgacggcaaccgaaccatggccgccacattcgacaagctcaaggacatgcactatgtgcacgccgcgatgtacgagagcatgcgcctgttcccgccagtgcagttcgattccaagtttgccgccggcgacgatacgctgccggacggcacggtcgtcgcgaagggcacccgggtgacctaccacgcctacgccatgggccggatggagtccgtatggggccccgactgcgccgagttccggccggagcgatggctccgggacggccggttcgtcccggagagcccgtaccgttacccggtgttccaggcgggcgttcgcgtctgcatcggcaaggagctagccctcatggagatgaaagccgtcatcgtcgccgtcgtccggagcttcgacatcgaggcgatcgcgcggagctcgcggcggcccaagttcgcgccgggcctgaccgccacgttcgcaggcggcttgccggtgagagtgcgccggcggcgagcacgtgcgagcgggcacaacccgccaatttaataggtagagcaaacaaactggttcgtgtcatcacgatttgttcttctgtgcttcttttcgaactggaatattaattaggttacatgc

SEQ ID NO: 3447 - DNA, 774 bp, Oryza sativa
  ref <308>: DATABASE ACCESSION NUMBER: AK061129
  ref <309>: DATABASE ENTRY DATE: 2001-12-06
aacatctcgatcagctgcgactgcgagcagctaattacagagtaagggaagttggtactatacctgtcttggccgtttcctttgctggttgtgttttgtgcttgcattcatggcgaccttcaccgaacgtacccgtctcctcgcggcgctgcttgtcgtcgtctccgcggtgatcatcggctgctccgtccacgtctgccacggcgcccaagaggctgacctgcaggctgctggctactaccgacgcggcggcagcatggatgatcccgacttcgattttccctttcccggcccccgccatgttgtgtgcaacgacgggccttgccgcaccggcccaggccgattacgtccctacccctttccgcgacctttgccgtaccgtcagacgccgccggcgccaccgtcgccgccgctgccgccaccgcagaacaaacagatcccgcctccgtgatgaattgatgatgactgttcatgccggccggccggccgtcatgatgccacttaattatatatgcatatggctaattaagtacgtgcgtgtgataaaaacgtacgcacaccagagattacatacgcatattgtacgtgcggcgaacggccgggcgctagctctcttgagcggggtacaacgctagctacagcacactattgtgttattactaattaaaaacgaataatgcccgtcccgtgtgcttgtgtttcattagctggaatagaacaggtgtgagcgtgtaactatgcggtctaaaaaggaaataaaagactggtgttgtc

SEQ ID NO: 3448 - DNA, 937 bp, Oryza sativa
  ref <308>: DATABASE ACCESSION NUMBER: AK061130
  ref <309>: DATABASE ENTRY DATE: 2001-12-06
ctcgctcgaacgcgcggcgccgccatcgcacagaagcagaagcgcgtcacacgcgagcgcggcggcgcacagacgccgtcgaggcatcgccctcggccggttgcagacgacgttctctcgctcggtcggccatctccccttgctcaccgcgcgcggcgcgcccccaccgcccttggcaagctgcctcgccgagtagttctgattcgattcaatcgattgccagaggagccaggaggtgttgaaattggaaacccctgaagtttgatcagctgaaccagttatcaactccagcagaacagtagaatctctagctagccaaagaagccaaggatagcaatggcactccggcgagcactgggatggtcagagggggaggtaatgcgtccagagtctaagccttgctcccggttgatgcgacagactgctggcgtcttctctgttggcggtgccctttctttctgggtgctctgccgccttcactacggtccaagaataacagttccaaggagtctcaggtgggcatcatgcggagcaatctctgtgagctcagcatcggcattgctcgtgcgactcttcagcccagagtgtgaaccacagaatatagcagcttatgacaaacttggacacaagactggatagtattatagaaatattaggtcttgatcatcatctaaagaattagagctaggtagcaaacctctgtatcgtttgctgattcagtctaggagatatattgtatgtctttttctggaagatgtttatgcatgatgtaacttggcctgaagaccttccctccataggagtatccacttcactggctgccgtggacaatgattgttattattttacctgaaacctgatgggtttaataagtttaaggaaacacgctaggtttgttgttctgtgggttttatttacttgataagattcttctttg

SEQ ID NO: 3449 - DNA, 1277 bp, Oryza sativa
  ref <308>: DATABASE ACCESSION NUMBER: AK061131
  ref <309>: DATABASE ENTRY DATE: 2001-12-06
acacggttgatcgatcagtacgagtacgacgagagctaagtaaacttagctatatcgatcgaccatggcgtccaggactagtgctactgccggcatgctgctgctcgccgccgcggctgcgctggtgtgcagctcggcggcggcgaggatgccgccgttggcgaaggggttgtcgttgggctactacgacgcgagttgcccgcaggcggaggccgtcgtgttcgagttcctgcaggacgccatcgccaaggacgtcggcctcgccgcggcgctgatccggctccacttccacgactgcttcgtccagggctgcgacgcctccatcctgctcgacagcacacccaccgagaagagcgagaagttggcgccgccgaacaagaccctccgcaagtcggcgttcgacgccatcgacgatctccgcgacctgctcgacagggaatgcggcgacaccgtcgtgtcctgctccgacatcgtcaccctcgccgcccgcgactccgtcctcctcgccggtggcccgtggtacgatgttcccctcggccgccacgacggctccagtttcgcgtctgaggacgccgtcctgagcgcgctcccgtcgccggactccaacgtcaccacgctcctcgaagcgctgggcaagctcaagctcgacgcccacgacctcgtcgccctctccggcgcgcacaccgtcggcatcgcgcactgcacttccttcgacaagcgcctcttccctcaagtcgaccccaccatggacaagtggttcgccggccacctcaaggtcacctgcccggtgctgaacaccaacgacaccaccgtcaacgacatccggacgcccaacaccttcgacaacaagtactacgtcgacctgcaaaaccgccagggcctcttcacctccgaccagggcctcttcttcaacgcaaccaccaagccgatcgtcaccaagttcgccgtcgaccagtcggccttcttcgaccagtacgtctactccgtcgtcaagatgggcatgatcgaggtgctcaccggctcgcaggggcagatccgcaagcgctgttcggtgtccaacgccgccgccgccggcgaccgtgcttggtccgtcgtggagaccgtcgctgaggccgccgagagcttggtgctgtagggtgctaacaaggatggctagtttaattaagcttatttccttgataaatattttgttgcttccaaatgtcatgagtatgtacacttgcgtgtattttgtagcttattttttatttgcaaataaagttgaatatatgaaaact

SEQ ID NO: 3450 - DNA, 1423 bp, Oryza sativa
  ref <308>: DATABASE ACCESSION NUMBER: AK061132
  ref <309>: DATABASE ENTRY DATE: 2001-12-06
aaagctatagcggctatttcatttcctcttagagtatagttgccgtccatactccaaatacgtactgcctgatgggatcgtcaggggcaccagagttgacacatgaaatgagcagcaatccttgtgccggcgggagagcaacaatcctgggaatcggcacggccgtgccggttcatgtttatgagcagaagtcattccctgattattactttgagattaccgatagcaatcacttggtcgacctaaaagccaagtttgcaaacatctgcgagaagacatcgacggagaagcggcacatgtacatctctgatgagtggctgagggccaacccgtcggtgacggcgtacatgtccacctcgctcaacgtacggcagcaggtcgccgaggagggcatccctcggctcggtgcggaggcggcgcgcaaggccattgacgactgggggaagccggcgtcgagcatcacccacatcgtcttcgccaccaccagcaccggctgcctgcccagcgccgacgtcgtgctcatcaagctcctcggcctcccgctgtcgaccaagcgtgtcatgctctaccaggctggctgcttcggaggcaccacggcgctgcgtgtggccaaggacatcgccgagagcaaccacggtgccagggtgctcgtggtgacatccgaggtgatgtcgctggtcatccgtggcccctccgaatcccacatcggcaacctcgtcggccaagccgtgttcggcgacgccgcgggcgccgtcgtggtggggtgctgccccaccgccgacgagcgtcgtcccgtgttcgagttggtccgggcatcgcaggacgtgataccggggacggacgacgccgtggtggtgaaggtgcggcaggaaggggtggtgatcaccatgcaccgcgacgtgccgctccacgtatccaacgccatcggcggcgtggtcaagagcacgttccacgagatagacatgaagatcaccagctacaacgaggcattctggctgctgcacgccggtgggagggggatcgtggatggcgtggaggagaggctgggcctcggcggggagaagctggctgcgacgagggaggtgatgaggcagtatggcaacacgcgtagctccaccatcttcttggcgatggaggagatgaagaggaggtcggaggagcgagggatggcgacggcgggggaaggcctcgagtgggggatgctcatcgcctttggccccggactcaccttggagaccatgctgctccgtgcagtgccacgtaacagctagctatacatacgccaacatgtgatatcgatcgaccggtaacacgaataaattaagcagggcaatctacaagttatattttccagtgcgtacatgttatattttccagtgtgtgacaccagtaaaaataagtctacatgttatatttttccagt

SEQ ID NO: 3451 - DNA, 1204 bp, Oryza sativa
  ref <308>: DATABASE ACCESSION NUMBER: AK104432
  ref <309>: DATABASE ENTRY DATE: 2002-08-28
aagcccaacccggccggcagcacacgcgacgcgcgcgccgacgcgaccacaccgacaccgacgcggccggcgagataagataagcagctagcagggagtggcctccgaaaccgagaggacgaggagtacacaacgtacgggactacggggcgcgggggccatggacaccttcttcctatcgcacggcacgcccacgctctccatcgacgacacgatgccggcgcagcacttcttcaggtcgtggctaccggcggcggtggcgggcgcgcagcctccgcgtgccatcctcatcgtgtcgggccactgggagacggccacgccgaccgtcaacgtcgtccgcggcaacaatgacaccatccacgacttcgagggctatggcttccccaagtccatgttccagctggaatacccggcgccgggcgcccctgatgtggcgaagaaggccaaagagctcttggagcaagccggatttgggccggtgaaggaggaccacggccgcgggcttgaccacggcgcgtgggtgccactgatgttcatgtacccggaggcgaacgtgccggtgtgccagctctccctgcagaccggccgcgacggcgcgtaccactacgatctcggcagagcgctggcgcctctccgggacgacggcgtcctcatcctcggctccggcaacgccacgcacaaccttagctgcatggcgcccgtcgccgagggcacgccggtgccccagtgggcggcggagttcgacgggtggctgcaggaggcgctcctcgcgggcgggaggcacgacgacgtgaagcagtacgaggagaaggcgccgaacggtaagatggcgcacccgtcgccggaccacttcctcccgctgcacgtcgcgctcggcgccgccggggaggatgccaaggcggagctgatccaccatagctggtacaacgcgacgctctcccacgcgtcgtaccgcttcaccaccaccaccaagaacaaaccgattgccgcatgcaaagagtgaaacatgtcttgcttatatcatcgccattttactcttaacaattaataatctccgtgggatctacgttaatatactcctattaacgtagacgtacgttcgtgcctgtatttcctaacggccgtgtcttgtggttttcagttgcaataaacttgcatgcatggtggtttgggttgtggcccagcctctcatggcgttgatatc

SEQ ID NO: 3452 - DNA, 1132 bp, Oryza sativa
  ref <308>: DATABASE ACCESSION NUMBER: AK061133
  ref <309>: DATABASE ENTRY DATE: 2001-12-06
tgcttctcctcccagatctctctcccacaccccaccgccgccagcgacgcgaggcgggatcaggccatggacggcggcggcggcggaggaggaggcgggttcggactgggcggcctccagtggacggcggaggaggcgtcgacgatcgggggcatcgcgacggtgtcgctgctgcactccttcatccccacgcactggctccccttctccatcgtcgcccgcgcccagcggtggccgctctcccgcaccctcctcgtcactgcatttggaggcgtccttcatgttgtttccactgctcttcttgggataactgctgttactatggcaaatactatagcaggcgaggaaacagtgcataaacttgcatcactgttgctgattgttcttggtggaagttatatcctgctgtttgcactgggaaaaggtggccatggccatgctcataatcatccaatggagaagatggcagttgcaggtcttgtacttgtacctgcattatcaccctgtgcaacaactcttccagtgtttcttgctgttggcaattcatcctccatgatgatccttgcgatcattgtgctcctctttagtaccatcacagtgatgacatccttggtggccctctcattctacggtgctagccagattaagttccactgggtggaacgttacgacaagatccttgtcggctcggtcctgtgcctcgttggggttttgacatacgtattccatcaccatgacggcgacgaacactctctccatgaacacgtgcaccggaaactcgtgggtctttagagtatagtataagattgcggatgaaactttcctacacttgcgagagaaaattgtgttgttccctaaccactgtaacgggtttgctgtatacagatctgattattaatccatctgaagtcagctagccggttttctggcaatgcaaaggttgtgctgacttgtgttgtagttgcctgtacatagaggtattctatcgtttgcttatgctgttatgcacccccaaaatcagaatactacttgcaaatgggaaacatacttgaactgcatccgttgaatttggagtatttggtggtaatgcagaactggaaatcagatttgattattgcgagtgatttactgt

SEQ ID NO: 3453 - DNA, 1195 bp, Oryza sativa
  ref <308>: DATABASE ACCESSION NUMBER: AK061134
  ref <309>: DATABASE ENTRY DATE: 2001-12-06
attcttcatcagtcgtctttccactcaggcgaatgagctccgcactgcccgagaccttcaaggcgtacacgtacgcgcgctacggcccgctcgaggacgtgctcgagtgctcgcagctgacgcagcagccgctgccgtcgcccagccacgtgcgcgtcaaggtctacagcgcgtcgctcaacccgatcgactacaaggtcgttgagacctacggcgccaagtacacgggcggcacgccgacccaagagtcgccgtttcgcattggctttgactttgccggcgaggtcgtcgaggtcggtgccgaggccacggccttcaaagtgggggatgcagtctatggcaaggccgcacgggatgccgccggctcgcttggcgagttcctggtcacgcacgcagagctgctcgcccacaagccaacgactgtggactttgaccatgccgcgggcgtgcccggcgtcgcactgaccagctaccaggcgctccgtgaacacgccaagctccagccgggcgagcgcgtgctcgtgctcggtgggtccagctcgacgggcatctttggcattcagtacgccaaggcccttggcgcgtttgtggtcgcaacgaccagcacaaagaacgtcgcgtttgtccaggcgctcggcaccgacgacgtcattgattaccgcacgcagcagtggagcaagctggtggaagcccactcgatcgacgtggtctacgactgtggcgtcgagcccacgtcgtgggaagacggagcgcagcatgtgctcaagaaagacacgggccgattcgtcacgctgcgccgcgggctcccgcacagcgatgcgaagtttggtgcgacgtactctgctccgtttgcgcgaccgtcgggtcaggacctcgcggcgatcgccacgctcattgacgccggcaagatcaagttgtttatcgactcggtgtttccgctggaaagcacgcgcgaggcgtttgcgcgtctcaagaccgagcgcgctgtgggcaaggtcatcgtccaagtagcgacgccgtaagggtcaacagatcgcatggtcgctgacgcaatcaagccacaacattctcggtacagcatttttgtggtgaagccatcttacgtctggaggggtgcaccagatcctatgcagtcaactgtatggtagagtcttcagcagcacccaccattaagttgagtgaaggaaacaacagc

SEQ ID NO: 3454 - DNA, 1352 bp, Oryza sativa
  ref <308>: DATABASE ACCESSION NUMBER: AK061135
  ref <309>: DATABASE ENTRY DATE: 2001-12-06
caactgaaagagctgaagaactgatggaagaaatagacaaactccaaaggaaactgaaagagctgcaagaagaggatgataggagcatcttgtcacctaggcaaaaggctgctgctgcttcactgaagaaggagaagaggctatcaacaggaagatacccagagctgcaacttccacaacatatctcacggttctccatgtcgatgatcagtaaagcaacgggcaacttctgctcaggaaacctgataggtgaaggaggctatgggccagtgtacaagggaaaactgggtggcgtggcagtggccatcaagctgctgagaccccatggcaggcaaggatttccagagtacaagcaggaggttgtggtgctgagtagaatggagcatccacacatagtgaggctcatgggcgtgtgcccggagtcatgcgggctggtgtacgagcacctgcccaatggcaccctcttggacatcctctccaactccaagagtctgtcatggaaggatcgcgtgaggatcctcggcgagcagcgttccgcgctggcctacctccattcctgccgcccccacgccatcatccacgccgacctcaagctcaccaacatcctcctcgacgccgccaactccagccgcctcggcgacttcggcacggcgcgcgcggtgcacgtcaagccgctgcaggaccaggcggacaccatctgccgccgcaccaaccccatgggcaccaccggctacatggaccccgtcttcttcgtcaccggcgagctcaccgccgagtccgacgtctacgccttcggcgtcgtcgtcctccaggtgctcaccggactgctcgacctcaacatcgccgaccaggtgcgcgaggccctcaagatggacgccgtccactccgtgctggacgcctccgccgggagctggccggaggtgcaggccgagaagctgctccgcctggcgctgcgctgctgcagcctggagaggaagcggcgaccggcaatcacgtgcgacgctgagtggaggtcgcttgacattatgctccgcatggcaaattcaccatctaaatctcggaaatggacttctatttctattcatgcaacctagccgtcgatagtaattactactcctacagtataggcgtatttttttctttttctttttcttttttcttttaagaaaaactaggagtagctagctacttttcagtatgcatgttgcctgtgcatgtacataaggatagggggtctacggtagtcaacagtcaaagtgtcaaataacctgttttgtactactgtcaatgtaattattttagcattataatggttgctccaatttttcatcttcaagattgccatatgtatc

SEQ ID NO: 3455 - DNA, 1113 bp, Oryza sativa
  ref <308>: DATABASE ACCESSION NUMBER: AK061136
  ref <309>: DATABASE ENTRY DATE: 2001-12-06
agccgcatgtcactgccactctgcactcttctctcatccaaaaccccaatttcccacccaaatctatctcttctctcatcttcttctctcctgcggatttgcaaattacacacttctgcaagctaaaaaatccagttttcttgctcaggctagtgcctggttgtatctacagctcagctcagaaagaaaggagtggtttttgaggagtggtttttgtctacacagctgctgcatatcatgcctccacttgccacaatgtcatcgccaggttcgcttcttctgttgacccccgctgtgtaccaggggattgggagaaatcgtggaggacaaagccaggaaggacaatctatctcgtcttcacgatctctcaagactaaactcagcgtttctgccagagcagtttcttcatgcgaagcatccatgagaataacatgttgcgcaaaccagacacagactgcacgacgcaaatctttctctggacctacctcaccgccatcagggtcagttaaagagaaagtgaggagtccaaagcttgacgatggaggcaccggcttcccgccattccggttcggtggaggaggaggaggtggaggtggaggcggcagcaactctgccggtggattcatcctgttcgtgatcgttttgcttcttgattacctgagggagtttgagaggaacctgcagaatggaacaaggaggggcagtgactatgacaatgggctcgctccccaatagttggtttgtttcataggacactttagcgacgatccgaaatgcaagtgggctgacccgtaaacccacttataaatcatttaagcgggtcgatccgtggctggccactggcccatttgcatccttatctgaaactccttttctggaaatgtgtcaagtgaaaattgtgcctgagaaatggtaatggagtgtagcagccttctggaaagaaatggtaatggcatgtagaaagctgagactggtgtatcaaaggccaatgacaatagctacatgatatttgaagggccttgatgaggcaaatgagtgacaatggaccaggtgtttaaaaatgtgaattttttgttgagattgttgattggatatgttgcgagaagtgtttgg

SEQ ID NO: 3456 - DNA, 1156 bp, Oryza sativa
  ref <308>: DATABASE ACCESSION NUMBER: AK061137
  ref <309>: DATABASE ENTRY DATE: 2001-12-06
accgagcaccacccgtccatcccaatctcgcttccaccgaccaagcgagtcgccaccggctcgttcctcagcctccgcttccgtcttctctactcctcctcccatcctccatcctgagcgtgtcctctccatcaagctctacggcgtcgtcgttggtctccgtggcggcgtcgagcccgctggtgtcgccgaatgcgaagccccgcgtgcagccgaagctcccgccgaagacgaagctgaccaccatcacctttagcccccaccacaagcgtgactaccaggtcacctgcaccaacaccggctgccgcccctgcgttgtctcctgcccttccaactgccccaacatgtgcctcgtcgcttgcgcctactgcctcaccttctgcccgcctcgcgctagccgcccacggtgcctgttgtctgcaccgatgccgggaacaccgcaacgacgacggtgaagacgaggagaacacaggcgacggtggccatggcaactatggatctagcacggggtggccagcaaggcggaagttggcgatgggtgaacggcagcaagcaagataaaggccagagacaacccaatattgaggtcccccagtagcagcaagcctaggtaaatcgatcttggatggattggagttccccgttgatccctctggtgattttattttggtggattagagttcgattccggagttcttccgtgcatcgctctgtttgattttattaggatagattagagtgtaattctatctactttatctttgcgagtttggaaatttggaatctattttatctggaatctggaaccatcgctagctgctggtgttaacgccaaaaatttggtaaacccgaagtcatcatcatcgaccttcagaggcttggaatcgaccgatgggagttataaaatcgccagcagttgtgttcttggtggagttggatcaattaaaggaaatttatttagatgagtccgaattcaaaagacgatgcagctttgtctgttttcttttatctttaggaatgtatgtttagtatccgataagcattttatgtttttcttttatccttagtaaagtctttttcttgttctacaaggactagtatctccccattagtataaatatatacacccggggtcattataaaatatctcttgatc

SEQ ID NO: 3457 - DNA, 1205 bp, Oryza sativa
  ref <308>: DATABASE ACCESSION NUMBER: AK061138
  ref <309>: DATABASE ENTRY DATE: 2001-12-06
aagaagaggaggaggaggaggaggaggagacagctgctgccatgtcgtcgtatgaccagatgctcgcgccgcttcttggcgccggccggtcggcgtggacggcgcacgacggcggcggcggcggagaagccgtggtgaggcagatactcaagtgcacgaggtggcagctggaggagacgacggacttcgtcacctgcccgtaccactactactgcgacagctcgtacccgggcgactaccacgccgccgtcggcgtgctcgtcgccgccttcgccgcgtactgcttcctctcgacgctcgcgttcacggtgctcgacctggcgaggagcggcggcggcggcggcggcgcgggcggggtgagggggatcaggaggaagtacctgctcccgtcggggccgttcctgctgccgctggtgctgctcgtgctcgccaaggggcagcggatcaacgccgtgttcccgctcgcgcagctcggcccggcattgctgctgctgctgcaggcgtcggcgctggcgttccggaacgaggccgacggcgacatccggtacgcggtgctggaggcgtccaccgtctccggcgtgctgcacgccagcctgtacctcgacgccgtcgtgctcccctactacacggggctggaggcgctccggtggtcgcagttttccggcgagtgcgcgacctgcctctgccgcatggagcccctcgtcgtcggcggcacggcggtgcggtaccgcggcctctccaagacggcgctggcgatcatcttcgcgctgtgctcgcggatggtgtgccagatttacggcgaggagcggctcagcgcgtggacgcggtcggcgctggaggccgccggctgggtgttcgtggcggccgacgccgtctacctcgtcggctgggtcgccatcgagggcggcgccgtcgccgtgctggcgtacagcctcgtcgccggcctcgtcttcctcagcgtcttcggcaaggtctacagattcttggcatggttggagacgagacaatctcaatggaaatcaagcctctgccatagcgctgtatgatactactactcgtcagaaaaaaaaatctgtaaaaagaaaaaggaaaccatttcttagctcaccttttgttcatttgtacaatgattcacacaatgagaaaaccacagttgtaatttttttttcatgcttatatataagttctctgaaacaaatttgttc

SEQ ID NO: 3458 - DNA, 1093 bp, Oryza sativa
  ref <308>: DATABASE ACCESSION NUMBER: AK061139
  ref <309>: DATABASE ENTRY DATE: 2001-12-06
atcgtctcccatcgcgccgccacctcctcgctccccatccacagtgcacgccgcccgctctccctgcccccgagcgcaccgaagaggaagccctagctcccccacaatccctgcccccaagctctctccatcccgcgctgccatgcccaatccccctccggagatctgggcgtcggcgtgaatcagatcggggcggcgacagggagttcgaagcacgaagtggcggcatcgaaccggaaaccccacggcgagcgccatcccttcccgcacttgctcgatccctcccctcctgccgcagtctgcagccatggcattccgatgtagtgggcttcgagctcgaaggcggcgggcaggcctgcgcgagcaccgggggagcaggagctgcggccgtccaagtcgtgggggatcctcatcttcgggcttcggcctcattggcgccaccaccaccaccaccaccttagtggtgagaagcatcaaacgctccaattaagctgtttgcatcgtttcctgcccaaggtcctaaatcttatcttaagattgcaagagcacttcagatgggtaaaccttgtgctagctactatgtgaccattggcactctgatagacaggccagccaagctttctctggatgacatcaagcgaggttggtgtggtgaataatgtgaagcggcccaagtacaatgtcactgccactctgcagggaacaggaggaccgaaataagcaagagtaggaaggtgaggggcataacatgggatatctgcgctctcggcaatggtgcatcaatatatcaaaatatacatgtgaacttttgatatggatgaagtgagcctgtaccttccaattcgatgcttttcaggatatttgccagcaacaagatgtatacaatatataaatctggccaagtccagataatgtagttattttagcatccccttttcttatagaccattatatgttccatctttggtgtcatttcaaatttgtatgtatgcactattcccacaattcctagctgagctatgtgatttttttacttgtatgttggattcactaatctattagtgaaattagtgaaaagtacacttaatttgtc

SEQ ID NO: 3459 - DNA, 1168 bp, Oryza sativa
  ref <308>: DATABASE ACCESSION NUMBER: AK061140
  ref <309>: DATABASE ENTRY DATE: 2001-12-06
agacacgacacggagcccgcgcggacgcgtcctcattcatggcctcctcttccgtcttctccccgctactccgtgcactccggccgtccacctcctgctcggggcgctcttctgccacccacgacaacagcgccgccgctgtcgttgccgctggtggcgctgccccgcggccggcgcccctcgcggcggttgtcagccacaggagggagctgttgctgggggcggcattgggcgcggcgttcctgaaggcgcctttgccggccgaggcgcgtgaggtcgaggtcggcgcggtcctgccgccggcggcgtccaaccccgggttcgtgttcttccgggctacttccaaggacactcctgcacttcgagctggcaatgtgcaaccttacgagttcattctgccacccacctggaagcaaacgcgagtggccaacattctgtccggcaactactgccagcccaagtgcgccgagccgtgggtggaggtgaaattcgaggacgacaagcagggcaaggtgcaggtggtggcctcgccgttgatccgcctgacgaacaggccgaacgccacgattgaggacatcggtagccctgagaggctaatcgcctctctggggccttttgtcaccgggaacaccttcgactccgacgagctcgtcgatacctccgtggagaagatcgatggccaaacttactacagctatgtgctagagactccattggcactgaccggttctcacaatctggcgaaggcgactgccaaggggaacacggtggtgctcttcgtcgcaagtgccagcgacaagcagtggcagtcgtcggagaaagttctcaagaccatagtggattcatttaaagtatgatgatcgctgcaggtctgctagtacgatctgtttgtggtgattttgttgatgagtacttcccagccttgagcttgggtaacttatctgaagtaaactagaggcatttttacaagagaagcggcgttgcttgtgaagcttggaaaccatagtagagagctagtactgtaattggtaaggtgacaccatggcagtactgttatagcttatctgtttatgtgagaactaagtgtacagtgcacctaacgcacagggattattttttcaatataagattaaatactatgttaagattaaatataatcagttttaat

SEQ ID NO: 3460 - DNA, 1248 bp, Oryza sativa
  ref <308>: DATABASE ACCESSION NUMBER: AK061141
  ref <309>: DATABASE ENTRY DATE: 2001-12-06
ggcaccaccgcgaaagggggaaaaggggggaaggaagcgaggcgaggctagggtttcgattcgatcccgccgctgccatggacgccggtgatgcgtggggccgctcctcctcctcatcctcctccgccgccgccgccgccaggcgcctgcaggcgcgctacgatctgtacatggggttcgacgacgcggacgcggcgggcgtggaggaggtggaggcgcgcggcggcggggaggcgtacaactgccccttctgcggcgaggacttcgacttcgtcgccttctgctgccacgtcgacgacgagcacgccgtcgaggccaagagcggggtatgtcccatctgtgctacaagggttggagtggacttgataggtcacttgacaatgcagcatggaagttactttaagatgcaacgcaggcgaagagtccgaaaaatatcttcagggtcccattctttgttgtctttgttgagaaaggacttaagagatggcagtctgcagtcctttcttggtggatcatcctatgtatctaatcctcctgctgctgcaccagatccatttttgtcatctttaatttgtagtttgcctgtggctgaaccatccaaagatttacattccgactcatctgacaataactttttgctaaataaattcccagatgacaagactgcagagagagctgaaccatctctgtcggagaaggatcagaaggagagggctcaaaggagtaaatttgtccgtgggcttgtgctctcgacgatatttgaggatgataacttgtaagggaggttatcaaccttaatatagcgacggcatggcatggtcaaggaacagaaaatacaggagaacaatctatgcaatgcagcaaccttgttcatgccgtcgctaatgctgcttccagccttcaaggccaactgggggccacccatcatgtttatgtatgcacgtacgtataatgtatgtctgccttcctgcatttgccgagagggcaacaggaaccagctgagtagaggagaaaggtgtttgtgtcccaaccttccacgtcgaataaatgaggacattgtgttccttgagtggctttgtgcatatatgaagagaggagagctactcgcaatgtattaggttctctctattttatttgatcaatgtaatgtaataataggaagtgttgtacaactgtattgtaatcccaatggtatgtgatactgctttgttttgtatttattgaatagccagtgtggccaattgatct

SEQ ID NO: 3461 - DNA, 1693 bp, Oryza sativa
  ref <308>: DATABASE ACCESSION NUMBER: AK061142
  ref <309>: DATABASE ENTRY DATE: 2001-12-06
gatgtcaggaagatctatctccctgtgagagcggtggatgcagctacagctaagcaacggatgcagactgaggtgatagggaaggagctgtttgggcttctgaaggagcagcatggcaaggggtttcagtctttcatcgatgaaaaggtagttccattggctgcagacatgatgcatcagaacctgggcctcgaggaatccaccttgcaagagctcgccaaggaccttaacatcatcgtcaatggagctgccaccaccaacttctacgaaaggtacgacgtggctctggatgtgaacgtgatgggggtgaagtacctgtgccagcttgccaagaagtgtgccaatctcgaggtgttcctccatgtctccacagcgtacgtgtgtggcgagaggtccggggtggtgcaggagagggcgttgagggagggggagacgctgcgggaggggacgtacctggacatcgagacggagctgcggctggtgggcgagcagaggcagcagctggaggacgccggcgacgccaaggcggagaggaaggcgatgaaggatctgggtttagccagggcgcgccacttcgggtggcccaacacctacgtgttcaccaaggccatgggggagatgatgcttcaggagcagctggtcgccggcgccggccgccgccacgggatccccgtggtgatcgcccgccccagcatcattaccagcgtccacagggaccctctccccggctggatcgagggcacccgcaccatcgacgccatcatcatcggctacgccaagcagagcctctcctgcttcctcgccgacctcgacctcatcatggacgtagtgcctggtgacctggtggtgaacgcgatgatggcggcgatggtggcgcactcgagggggtcatcgtcggagatggcggtgtaccacgtgacgtcgtcgatgcggcacccggcggcgtacgcggtgctgtaccggacggggtggcgctacttcctggagaaccctagggtggggaaggacggggtggcggtgcgcacgcggcccgtctacttcttccgcaccatcgcctccttcagggcgttcatggcggtggcctacgcgctccccctccagctcctccgcctcctctccctcctctgcttcggcctcctcttcgcccgccgctacgccgacctctcccgcaagtactccttcgtcatgcagctcgtcgacctctacggccccttcgccctcttcaaggcctgcttcgacgacctcaacatggagaagcttcggctgtccatggccacgccgccgtcgtccgccgccgccgccctcttcaacctcgaccccaagaacatcgactgggacgactacttctacaggatccacatccccggcgtcatgaagtacgtcctcaacaagtgatccattccatccatccatcatacgtaagattattgttcttcttctacctggctgctgctgcttacaatgaagaagctagctagctagctgattgtatactcgatccatccatccatccaacattattgattgatcaccgtaccgtacgtacgtgttaagttatgcttataattcatcacagaatcgatttataagcttctgctgctagtggtggtgaggtattttatttattgttgaaacaaatcaagtcatcttgttaaacatttctcttattattaattaagattgctcttggtcg

SEQ ID NO: 3462 - DNA, 1054 bp, Oryza sativa
  ref <308>: DATABASE ACCESSION NUMBER: AK104433
  ref <309>: DATABASE ENTRY DATE: 2002-08-28
acggagctcgagcaacaaccacccacgcacatcaaggagtcatctcaccactcaacgacagcctcgcacaagagcagggaggaattttcggttgttcctcgtcccaaggatcaatagatggagaaggcagcgtgcaacgagcatgtgatcgggatcccagtgagcaacagggctttcggcatcgaggagccggatttcccaagcgaaggagcagccgcctaccacgccgaggcgaaaagctctgcaaccgcgcgtacgagctccagatttggcaggacaggggacaggctcgctcaaggcatcaaagaacatgtgactctaggaccaaaactgtacgagaccatgaaaggcaagctgacgctgggcgcgagaatcctccaggcaggcggcgtggagaaggtcttccgccggtggttcgccgtcggcaagggcgagaagctcctgagggcctcccagtgctacctgtccaccacggccggcccgatcgccggcatgctcttcatatcgacggagaggatcgcgttccggagcgaccggtcgctggcgctgaccaccccgagcggcgacacggtgcgtgtgccgtacaaggtggccatccctctgaggagggtgaagacggccaagccgagcgagaacaagcaccggccggagcagaagtacgtccaggtggtgaccgacgacggcttcgagttctggttcatgggattcgtcagcttccaggtgaccctgaagaacctggagctggccgtcgcgcaggcgcagtgatcgatcgatctctgatgaaacaaacgtcgaagttgggtcgtcggtttcttggtcgtgtgccttgtgtgtggtctggttaatctgttgtgcatatgtggtagcgtcgtaggtgtttgtggtggattgcttggcgtttttggctttggagcaagtccggtacacatggtaggagaaattttagtgcatcaaatttcttgattggtgttggagaaaatagtgccacggcaaaagtgccatcatatacatgtggtatgtacaagatcaatgagaaatccaaaaatgtttgttc

SEQ ID NO: 3463 - DNA, 1172 bp, Oryza sativa
  ref <308>: DATABASE ACCESSION NUMBER: AK061143
  ref <309>: DATABASE ENTRY DATE: 2001-12-06
aagtccgtctgcctctctcaccaccaccaccgtgcgctgctccaagggggagatggcggtggtgaagtgcatcagggtccacgagctgggcgggcctgaggtgttgagatgggagcaagtggaggtcggggagcccaaggagggcgagatccggatcaagaacaccgccatcggcgtcaatttcatcgacgtctactaccgccagggggtctactccgctccactgcccttcgtccctgggagggaagccgttggagtggtgaccgctgtaggtcctggcctgactggcagaaaggttggggacgtcgtcgcctatgccggcaatcccatgggctcttatgctcaagagcagattattcccgcctccgtcgctgttccccttcctccttccatcgaccacaacactgctgccgctattatgctcaaggggatgactgctcacgttctacttcgccgtgtttacaaggtccagagtggtgattgtgttctggtccacgctgctgccggtggggttggatcactcctttgtcaatgggcaaatgcccttggtgccactgtcatcgggactgtttcaaatgaggagaaggctgcacaggcagctgaagatggatgccaccatgtcatcatttacacaaaggaagatgttgtcacaagagtcaaggagttcacagctgggaaaggtgtcaatgtggtatatgattctgttggcaaggatacatacaagggttcggtggaatgcttggcgtggcgtggtatgctggtgtcgtttgggcagtcgtcaggtaggcctgatcccattccgctgagcgatctggcaagcaagtcgctgttggtaacaaggcccagcctgatgcattacactgctacccgcgacgagttgctggagtcggccggtgaggtgtttgccaatgtaggaagcggggtgttgcgcatccgtgtgaaccacacatatccattgtctcaagctgctcgcgctcatgcggatctccaggccaggaagacgaccggatccatcctgctcatcccagatgatgcatgatactccagtactagtgtaggagtagtagttattccagtacaaaaagtgtctcttctccaatgccgctgctgtttcttactttagtactcctgtatttttcatgcattatcaatcaggttcaggtttggttgcc

SEQ ID NO: 3464 - DNA, 1319 bp, Oryza sativa
  ref <308>: DATABASE ACCESSION NUMBER: AK061144
  ref <309>: DATABASE ENTRY DATE: 2001-12-06
aacatccacactgccaacatctgcaagcagcagcagcagcagcagctcaccatcacttgggagttcggagctggtcagcattatcaagcttgagctgagttaggtacgtaggcgggcttgatctcgtggttgacacacgagctcatcgtcagccatggcgtttagctctagggccgtcgtcgccgtcgcttcggttgctctgctcgtcgcggctctggcctccaccgccgcagccgagggcaatcccgtcgagtacacggagagttactacgataacacgtgccccaacgcgcagaacatcgtgcgatcggtgatggagcggagcgtcgccgccaacccgaggatggcgccggccatcctccgcctcttcttccacgactgcttcgtcaatggttgtgatggctccctcctcctggacagtacggattccacggagagcgagaaggaggaaaaagccaacgcctccctcgccggcttcgacgtgatcgacgccatcaagtccgagctcgagcgcagctgcccggccaccgtctcctgcgccgacgtcctcgcgctcgcctcccgcgacgccgtcgccatgctcggcgggcccagctggggcgtgctgctcggccgcaaggactcgcgcttcgttaccaagaacgccacggaggagctcccggacccgagaaacggccacctcgacgtcctcctcggggtgttccgcgagcacggcctcgacgaacgcgacctcaccgcgctctccggcgcgcacaccgtcggcaaggcccacagctgcgacaacttcgagggccgcatcgacggcggcgagggctacgacgacatcgacccgtcctacgcggcggagctccgtcggacgtgccagcggccggacaactgcgaggaggccggcgtgccgttcgacgagcggacgccgatgaagttcgacatgctctactaccaggacctgctcttcaagcgggggctcctcgccaccgaccaggcgctctacaccccgggcagctgggccggcgagcttgtgctgacctactcccgcaaccaggaggcgttcttcgccgacttcgcgagggcgatggtgaagatggggaacatacgcccggacccttggactccgacggaggtcaggatcaagtgctccgtggccaatggtcattattgatggccggccgtcatatctccttttgtttaagctttgagtccacccaactctttttggactcatctgtatttgtctaaatcaaaattttacgtttactgtattcgtttgtatatgtcaatttttgtttcttctaacgatgcattcgtatatgaattcgtat

SEQ ID NO: 3465 - DNA, 895 bp, Oryza sativa
  ref <308>: DATABASE ACCESSION NUMBER: AK104434
  ref <309>: DATABASE ENTRY DATE: 2002-08-28
ctcccatcgccgcggcggcctatccatctctctcccccgcacacgctctccctcccatggcgctctccctcaccaccgccttctcccacctctccctcccctccacctccaagttccacccgctccccctcctccacctccgcttcccctcctcctcctcctcccgccgcgccgcgcgcctcgcgctcgccgcctccgccgccgaggccgccgagcctgtcgaggtggaggaggcgcccgccgaggacggggcggatgaggtggtggccgtggaggacgagctgtccggaccggcgctgcgaaagtacgtgaagcagcggcttcccgggggcttcgcggcgcagcggatcaccgccacgggccgccgcaagacggccatcgcccgcgtcgtgctccaggagggcaccggaagggtgttcatcaacttccgcgatgccaaggagtatttgcaaggaaatccaatgtggatggagtactgcaaggtacccctggtgaccctagggttcgagaacagctacgacgtcttcgtcaaagttcacgggggtggtctctcgggccaagcccaggccatttgcctcggcgtcgcccgtgcactggtgaagatcagcaccgcaaacaaagttactctgaggggagaaggtttgctgacaagagacacccgtatagttgaaaggaagaaggctggtcttaagaaggcacgcaagcgcccgcagttctcaaagcgttagagtatgcacaaccttgttgttagactcatttaaaagttttacattccacagtttgtattggcccttctctgttattttctgtgcaaattatgtgctcctcaccacagacttgtaatcttcgttctctgtaagcaattttattgaggtcacaaaaggcaattatcttg

SEQ ID NO: 3466 - DNA, 1741 bp, Oryza sativa
  ref <308>: DATABASE ACCESSION NUMBER: AK061145
  ref <309>: DATABASE ENTRY DATE: 2001-12-06
gtagaagatacagcatgcgagcaagcaagagcggttttagccatcaaagccgaaagccatccgggcattcgctctcccctcgctgctagctagctttgcttgctaatctagagctaagcaccaaatggtcctgattgttcttctcgcttctgaattgttgtgacctgtaactacaaaggcatagttaggtagatatagaaagagggggggagaggggccggaggccggagcggcgggggcggcggcgagatgaagctccacttcgtgctcaggttcctgttcggccccgtgccggtgtacttctcggcgctggccatcctcatcctgctgacgaacgcgcagtacttcgggctggtgggcgtcaccgttccccgcgcgacgaagctggcgtcgtcggcgccggtggtgagcgtgatgaagtactgcgacatcttccgcggcgagtgggtgccggactccgacgcgccctactacaaccacaagacgtgttacatgatccaggagcaccagaactgcctcaagtacggccgccccgacctcgaattcctcaagtggcggtggcgcccctccggctgcgagctgccccgcttcgaccccgtgcagttcctacagttcaaccgtcacaagtcgctcgccttcgtcggtgactcgctggctcgcaaccacatgcaatccctgctctgcctcctctcccaggtggcgtatcccaaagacatgtcggcgaacccgacgactcagaacaaggtgtaccactacagggggtacaacttcaccgtcagcatgttctggtcgccgttcctggtgaaggcgcgtgagcccgaccacgacgggccggcgcacacgggccactggagcctgtacctcgacgagcccgaccagtcgtgggtgtccgagatctcgcggttcgactacgtgctggtgtccgccgccaactggttctccaggccgtcgctcttctacgagaagcggcggctggtcgggtgcagcttctgcagcaggcagtacggcgtgccggacctgacgctctactactcgcagcgccgggcgtggcgcgtggcgctgaaggcgatcaacgacctggagagcctccgcgggcgggtgatcgtgcggatgctgtcgccgatgtcgcacttcgagaacgggacgtgggaccagggcggcaactgcaagcggacgcagccgctccggagcaacgagacggtgatggaggggcgggacctgcacttctacacggcgcagatggaggagtaccgcgccgcggagaaggtcgcggaggccaagggccggcggatgatgctcatggacgccacggcggcgatgctgatgcggcccgacggccaccccagccggtacggccacctgccgaaccagaaggtgcagctctacaacgactgcatccactggtgcctgccaggccccatcgacatctggaacgacatgctcttccagatgctcctcgtctaacgcgatcgatcgccaattcgccatcggtaaatgcgacttctactgcacagacaggattgctcttgctgttgtttcaaagcagttttgacaaggatttattcgaacttccccaatagattctttctttctctctcttttcccttcatttcctttcatttttcgtttatgctgacgcgaatttttaatggatcgtcaccggaaagagtgaacgaaagtgtgcctccgaaagaccactgtgatactgtcactccattcatttccaatacttgaaaccaac

SEQ ID NO: 3467 - DNA, 1660 bp, Oryza sativa
  ref <308>: DATABASE ACCESSION NUMBER: AK061146
  ref <309>: DATABASE ENTRY DATE: 2001-12-06
agggatcacacaaacaccggtagaaaaaagctcttcttggagctctctgcttggcctctctctctttagtttagccgcaaacaatttcctctcattttttctttgatggccgcgttgcatgggcatggcttcgcggtcaccgtgctactggtggtgttgttggtgcaatgtgacgcggcggaggcgacgacgtgcgccggtgcggtgccggcgaggccacggccggagacggtgtccatcgccgagttcggcggcgtgggcgacggccggacggtgaacacgtgggcgttccacaaggcagtgtaccgcatccagcaccagcgccgccgcggcggcaccacgctgctcgtgccggccggaacgtggctcaccggcagcttcaacctcaccagccacatgaccctcttcctcgccaggggcgccgtcctcaaggccacacaggagacgaggagctggccgctggcggagccgctgccgtcgtacggaagggggagggagctgccgggggcgaggtacaccagcttcatccacggcgacggcctccgcgacatcgtgattacaggtgacaagggaatcatcgatggacaaggtgatgtatggtggaacatgtggaggcaaaggacacttcagcataccaggcccaaccttctggaattcatgcattccagtggcattcacatctccaacattgttctcaagaattcacccttctggaacatccatcctgtttattgcgacaatgtggtcataaccaacatgatgatcatcgcaccacatgactcgcccaacaccgatggagttgatccagattctagcaccaacgtatgcatcgaggactcctacatctcaaccggcgacgatctcgtggccatcaagagcggctgggacgagtacggcatcgcctacgggcggccgagctcgggcatcaccatcaggcgcgtcaggggctcgtcccccttcagcggcatcgccatcggcagcgaggcatcgggaggcgtcagcaacgtgctggtggaggactgcagcatcttcaacagcggctacggcatccacatcaagaccaacattgggaggggcggcttcatcaggaacatcaccgttgacaacgtccgcatgaacagcgtccgcaacgggctgcgcatcgccggcgatgtcggtgaccacccagatgagcacttcagccagctcgcgctgcccaccgtggatgctgtcagcatcaagaacgtgtggggtgtcaatgtgcagcagcccgggtcgatcgaggggatcaggaactcgccgttcacgaggatatgcctcgccaacgtgaagctgtttgggtggaggaataatgcagcttggaagtgcagggacgtccatggcgcggcgctgggtgtgcagccggggccgtgtgcagagctcacgaccagcctttcttcagggttctgcagctattagtgtgatccagttgtataatgttttttgattagaaaggttgtgcttgctttttttttaggtttgactgctccctaattgtggttgggattgatcaatatgttaggcttgtgctaatcagttaaggagttttaggtgtctttttgttagagaaaggtttggcttctaagttgtcagtctgagtgcaaatatgttctaatctgaataataaatcccagcttgtgtg

SEQ ID NO: 3468 - DNA, 1315 bp, Oryza sativa
  ref <308>: DATABASE ACCESSION NUMBER: AK061147
  ref <309>: DATABASE ENTRY DATE: 2001-12-06
atctcacactgctcttagtgatagtggcagtgtcagcgtacgtgtctcgtcgtcgtcggaattaatggcgggtgcttggcggcggtggccggtggtggtggcggcggcggtcgtgctggccgtggcggcgccggtgcaggcggcgccgcaggtgccgtgctacttcgtgttcggggactcgctggtggacaacggcaacaacaacgatatcgtgtcgctggcccgcgccaactacccgccctacggcatcgacttcgccggcggcgccgccaccggccgcttcagcaacggcctcaccaccgtcgacgtcatctctaagcttctggggttcgaggacttcatcccgccgttcgccggcgcgagcagcgaccagctgctgaccggcgtgaacttcgcgtcggcggcggcggggatccgggaggagaccgggcagcagctgggggcgcggatcagcttcagcgggcaggtgcagaactaccagtcggcggtgcagcagctggtgagcatcctcggcgacgaggacacggcggcggcgcacctgagccagtgcatcttcaccgtcgggatgggcagcaacgactacctcaacaactacttcatgccggcgttctacaacaccggcagccagtacacgccggagcagtacgccgacgacctcgccgcccggtacgcgcagctcctccgcgccatgtacagcaacggcgccaggaaggtggcgctcgtcggcgtcggccaggtcgggtgcagccccaacgagctcgcccagcagagcgccaatggcgtcacctgcgtcgagcggatcaacagcgccatcaggatcttcaaccagaagctcgtcggcctcgtcgaccagttcaacaccctccccggcgcacacttcacctacatcaacatctacggcatcttcgacgacatcctcggtgcacccggatcccacggtttgaaggtgacgaaccaggggtgctgtggggtggggaggaacaacggtcaggtgacgtgcctgccgttccagacgccgtgcgccaacaggcacgagtacgccttctgggacgcgttccacccgacggaggcggccaacgtactcgtcggccagaggacgtacagcgcgcggctgcagtccgacgtgcacccggtggatctccgcactctcgcgagcctctaattaagctcgatcacatggccaaaaaattgcttatatatagttatatggcaattgccaaataacattataggtatcatggattttttttttactacaatgtacaacgacgtgtagtagattcttttgagatcacagttattatattgttcttcc

SEQ ID NO: 3469 - DNA, 1149 bp, Oryza sativa
  ref <308>: DATABASE ACCESSION NUMBER: AK061148
  ref <309>: DATABASE ENTRY DATE: 2001-12-06
aagttacacacacttgatcaactatctaagggtgtgaaacacacagcattgagactgtgagatcgagctatagtgacagccatggcaatcatcagtagcaaagcttgccgttgtttgctactcgtctccttgccttgctcccactcagcatggccatggatccccttggcagctactgctccgggaacagcttggccggcagcagcaaggccgtggccagcatcaactccgtcctcaccgacctcgtcaccaagggctccaccggtgtcggcttcgccacgtccaccgccgggaaaggcaacaacgtcatctacggtctcgtgcaatgccgcggcgacgtctccaccagcgactgccaggcctgcctcgcctccgccgccaaccagatcctcaccagctgcaactaccaatccgactccagaatatggtatgactactgcttcatgcggttcgagaacgagaatttcttcgggcaggctgacacggacaacggggtgatcatggagaacgtgcaggcgatggacaacgccaaggcattccagaaggcggtggggaaggtgatgagcaaggcgacggcacaggtgtcacaggcgggaagcggcgggctgggaagggtgaaggaccaatacacgccattcatcaatatctacgggttcgcacagtgcacgcgggacctatcgccgctgacatgtgcacaatgcctatcaacggcggtgtccaggttcgaccaatattgcggcgcgcaacagggatgccggatactctacagtagctgcatggtgcgctacgaaatttaccccttctattttccgctcgccaccagtagcaccgccactaccgacatgacaaagtataccaagaccatcgtgcaccactaagaactacctacacatacatggtgatgtgcatgcatgcttgtacgcatacacatcacatactaaagtataaactatagtacaatgtgtgtggagacgtttgattagcatgcggttcatgaataatataaggctataaagtgtagccttattagcatactataaccgggaataaaatgtgtactagcaaagcaatgtacacacgtttgtgtggagcagtaatattatcgaagtgttaaacttatatattatgtgctactgaaaattgatcttc

SEQ ID NO: 3470 - DNA, 1504 bp, Oryza sativa
  ref <308>: DATABASE ACCESSION NUMBER: AK104435
  ref <309>: DATABASE ENTRY DATE: 2002-08-28
cacctccgcgtctcctcaccatggcttccgccttctcccccgccaccgccgcgcccgccgcgtcgccggccctcttctccgcctccacctcccggcctctctccctcaccgccgccgccgctgccgtctcagcccgtatcccgtcacggagagggttccgccgcggccgcttcaccgtctgcaatgtagccgccccctccgccacccagcaggaggctaaggcggcgggcgcgaaggagagccaacggccggtgtatccgttcgcggcgatcgtggggcaggacgagatgaagctgtgcctgctgctcaacgtcatcgaccctaagatcggcggtgtcatgatcatgggagaccgtggcaccggcaaatccaccaccgtccgctcgctcgtcgacctgctcccggatatccgcgtcgttgttggcgaccctttcaattccgaccctgacgatcccgaggtcatgggccctgaggtccgggaacgcgtgctggagggtgagaagcttcctgttgtcacggccaagatcaccatggtagatcttccccttggtgccactgaggatagagtctgtggcaccattgatattgagaaggcgctcaccgatggtgtcaaggcgttcgagcctggtttgcttgccaaggccaacagggggattctttatgtggatgaggtcaatttgttggatgaccatctagtagatgtgcttctggattctgctgcgtcaggatggaacaccgtggagagagagggtatctccatctcccaccctgctcggttcatcctcattgggtctggtaaccccgaggaaggggagctccggccacagctgcttgaccggtttggcatgcacgcgcaggttggtactgtcagggatgctgaactcagggtgaaaattgttgaagagagagctcggttcgacagggatccaaaggcgttccgtgagtcctacttggaggaacaagacaagctccagcagcagatttcatctgctcggagtaaccttggtgctgtgcagattgaccatgatcttcgtgttaagatttctaaagtgtgtgcagagttgaatgttgatggattaagaggggacattgtgactaacagggctgccaaggcgttggcagcactcaaaggcagggacactgtcactgtagaggacattgccactgttatccccaactgcttgaggcatcggcttcggaaggacccacttgaatcaattgactcaggattgctcgtggttgagaagttttatgaagtcttcacctaaattattctggaggtaaatggttttctatcagaaagttcggcaggagggcttttgtttgagtttaatgacattgtttcagaggcttgaacttgatgtctatttgtacatctatcattagtatagattttattccccttcaatcgaaatgcctgctatgagttgcagacggttcgtacatttgaatcttccttgtagtcattgatgcagccaatgattaggaaaggagcatctaagtc

SEQ ID NO: 3471 - DNA, 977 bp, Oryza sativa
  ref <308>: DATABASE ACCESSION NUMBER: AK061149
  ref <309>: DATABASE ENTRY DATE: 2001-12-06
acctccacctccacctagctctagagccttccctctcctcctcctccacatccaccggagagagtgtgtttattggttcttggaggagagatgtccaagatggcggaggagaaggtgctggcggcgccggccaccgtcgacggcgggatgcagtcctccggggacctgcaggcttcgtcggcggcggcggcgcgtgtgcggcccgtcgagacgctcctccgcgccgcgccgctggggctctgcgtcgccgccatggccatcatgctccgcaactcggtcaccaacgagtacggcaccgtctcctactccgacctcggcggcttcaagtacctggtgtacgcgaacgggctctgcgccgcctactcgctggcgtcggcgttctacatcgccgtgccgaggccggcgacgttgtcccgctcctgggtcgttttcctcctcgaccaggtgttcacgtacctgatcctggcagcgggggcggcgtcggcggagctactgtacctggcgtacaacggcgacaaggaggtgacgtggagcgaggcgtgcggcgtcttcggtggattctgccggcaggcgaggacgtcggtggccatcaccttcgcctccgttgcctgctacatcctcctctccctcatctcctcctaccgcctcttcagcgcctacgacccaccccagccttccctcggcaacaagggcgtcgagatcgccgccttcccccgctgatcgccgccgccgccggagacgaagaagaagacgaccacccagacgaccaccaccaccacgacatccccagctactaagcttgagctgctgcgtgcttgggtactactactagctaggcgagagcatgattaagtaataataataagtacttttatctctccagctaaatatatagtgatgagtgctttttaatttcttcttgtgctctgttatatatatatgtgattatctctgacctgatcatgatcatcgtcgtc

SEQ ID NO: 3472 - DNA, 1634 bp, Oryza sativa
  ref <308>: DATABASE ACCESSION NUMBER: AK061150
  ref <309>: DATABASE ENTRY DATE: 2001-12-06
acacactctaagcttgaagtgtctttccttcctttccatggccgcgatgtatcgtcccgatccggcgaaccccgccgcccgccgcccgcgcctcgtcgtgctcctcctcgttgccttcttcgccctccagctgctcgtcttcctcgccttccgcggcgcgccctccccgagctcccccgatgccgccgttgaccgcgtgccggtgtcggcgcgccgtgacggcgaggactccggctgcgtgggcgggctagtgtacgtctacgacctcccgccggtcttcaacgaggatctgctcgccctgtgcgaggtgctcgcgccgatgtactcgctgtgcccgtacctcgccaacgacgggctcgggttcccggcgaaggggggcaaccagtcggagttcccgccggccgagctggttgggtcgtggtactcctccgaccagttcgcgctcgagcacatcgtccaccgccgcctgctctcgcaccggtgccgcaccaccgatccggcccgcgccacggcgttcttcgtgccattctacgcggggctggccgtcgggcgccacctgtgggcgaccaacgccaccgacgccgaccgcgacagggactgcctcgcgctgctgtcgtggctccacgcgcagccgtactacaagcggtctaatggctgggaccacttcatcgcgctcggccgcatcacctgggacttccgccgctcgccggacggcgggtggggcggaagcttcctcctcatgcccgggctggccaacaccacccgcctggtcatcgagcgcgatccccgggacgccatggacgtcggcatcccttacccgaccagcttccacccgcgcaccgccgccgacgtgcgcgcgtggcagcagtacgcctcgtcccgctctcgccccaagctcttcgccttcgccggcgccccgcgatcggcaatcaagggggatttccgcgggctgctgctcgaggagtgccaggcggccggggacgcgtgcggcgcgctggactgcggcgagggcaggtgcatcaagcaaaacgagctcgtcatggagctgttcctgggcgcgcgcttctgcctgcagccgcgcggggacagcttcacccggcggtcgctgttcgactgcatggtgggcggcgccgtgccggtgctcttctggcggcggagcgcgtaccggcagtacgggtggtacgtgccggtgggcaacagtcaggaggaagaatggtccgtgttcatcgaccgcgacgagctgcgcgccggcaatgtcaccgttcgtggcgttcttgcggccatcccggaagcgaaggtgcgggagatgaggaatcgcgtggtggagatgatacccaagctggtgtactccgctgcagacaaggaggggctcggcgacggcatgaaggacgccgtggacgtcatgatcgacggcatgctgcggcgagcggctgagcagcgccggagttggaggaaagtgtaaaatcttgtggccggaacagatcaaattgatcattcttttttacacatattttttgttcctttttcaaaagaaaagaaaaggaatcactaccacttggtacattttgtattgtcgtgagagtaggtgtgaattacgagtttacgacacaggtgattaatggatgaatttgtgc

SEQ ID NO: 3473 - DNA, 1228 bp, Oryza sativa
  ref <308>: DATABASE ACCESSION NUMBER: AK061151
  ref <309>: DATABASE ENTRY DATE: 2001-12-06
atacccagttcaaacatactaatggattcatgcaaaaggcatctagaaaccatgaggcgttgtcgaactgatgcttctaatgcttggagaacagctgcctgggtgagggttccctatccattccagtggggccctcctacatttcatttcaaaacgagcatcattatggtaatagtttcactggttgcatcagttgattcgctttcctcgtatcatgctacgtcattgctggtcaatttaagtccgccaacacgtggagttgttagcagagggattggctttgaagggatttccactcttatcgctggagtatggggtacaggaactggctcgacaactctaacagagaacatacatacccttgagaataccaaaatggccagcagaagagccttgcagtttggcgcagtcctgttggtcattttttcattctttggaaaaattggagccctccttgcctccattcctgttgctttggctgcctctgttctgtgcttcacctgggcactaatcgtcgcgcttggcttgtccacattgcgatacacccaagccgcaagctcgagaaacatgataatcgtcgggtttacgctgttcatctccatgtctgtcccagcttatttccagcaatatgaacccagcaccaatcttattctaccaagctatctccttccatacgccgcagcttcaagcggaccggttcgcagtggcagcaacgggctaaactttgcggtgaacgcgctcctatccataaacgtggtggtggctctcctcgtcgccttgatcctcgacaacacggtgccaggcagcaggcaggagtgcggggtgtacatctggtcagatccaaactcgctggagatggaccctgcgtcgctggagccgtaccggttgcctgagaagatctcatgctggttcagatgggcaaagtgtgtcggcatctaacaacaaaaacaacaacagaaggaatgaccccccaactgcacattgcgtgccggaggtgaaagattctatttattctattgcaccctgctggtgtagggatcatatggaagagagagttaatatatacggatgctatttagataggaccatgttgattctgctagctccgaggatgtctgagcatactaccacttataagttgtaaatgtagtcgttttgttaggaatgattacctatgtattgacaggtctctacgtgaaaagaacttctcagattagttcttgtgtgc

SEQ ID NO: 3474 - DNA, 1857 bp, Oryza sativa
  ref <308>: DATABASE ACCESSION NUMBER: AK061152
  ref <309>: DATABASE ENTRY DATE: 2001-12-06
catgctgctcacggtctgtaatttccctgcgttagctcaccatgctatttgtgagcccttgctaaatattgttttttattatatgtttatctgttattcagccaagtggaagatttgagattcaaaagaagatttgtttgagcatatccaattaccaccctgagcactggcaaccatcatggagtggtgagtactgagtagcattttgtttcgaaagggattgttcaagtaagcccttacgttggggtacctaatgcaatgagtagcaccatatttcatagtccacggtgatttggtcttgtgggctatacgagcatggtgcaaaagtaatgccttctttttgtattggtctttgtgattttcatgggcgagtacttgccctatgaccaggccaaaagaaacatgcacttctccctgcagttcttacaaaactttgtgttcagcagcttcctttcaatgctgctaagatacaataggcagtccatggtgttcttgttttttacaatttgctgcttatcatatccttttgtcagttggtgtataatgagagatatatgctaaagcttgtacaccaaattattcaaggtcagactcgcagtcgcagcaatggcggccgaggagatcttggagctctccaatggccgcatcaccgccaagatcgccgcctggggcgccaccatcacctccctcatcgtccccgacgcccacgggaatctcgcggatgtggttcttggattcgacactctggagccttacatgaaaggcatatcaccttattttggatgcattgttggccgtgttgcaaataggatcaaggagggaaagtttactctgaatggagttgagtattcactagctatcaataatggacccaacagtcttcatggtgggttgaaggggtttgacaaagtagtgtgggatgtagtagagcgcaaaagtgaatgcccatcaatcaccttccaatatcacagcaaggatggggaagagggctaccctggcgatgtgactgttcgagcaacatactctcttcctgattctaccaccttaagacttgacatggaagcagtagcagagaacaaagcgacgcccatcaacttggcgcagcacacctactggaacctggcagggcacaactccggtgacaccttggatcattcaatccagatctggggaaaacacataactccagttgacgagaacacgattcccaccggtgagataatgcctgtcaagggcacacctttcgacttcacaacagagcacaagattggagcccgcatcaacgatgtgcctggaggatatgaccataactatgtgctggactctggcgaagagaagaatggcctgaagcatgctgccaagctgaaagattcatcgaactcacggaccctggacctctggactgatgcacctggaatgcagttctacactgctaactatgtggatggcgtaactggcaaaggtggtgccgtttatgggaagcattccggagtatgcttggaaacccaggggtttcctaatgccatcaaccaacccaatttcccctccgtggtggtgcagcctggtgagaagtataagcacactatgctgtttgagttctcagcctaattagtgatgctgtgaacagctcaaatggctgcaactgcagctcattgtagaatcaaataagagaaaatctagcagaaatctaagatgtagagcaaagaataaatattagttaccagacctggatggttgtatcttgtcttacaaccagaataatataacacgaataaatatcagttaccagacctggatagttgtatcttgtcttacaaccagaataatataatacgaatgttcagaggtagatttatg

SEQ ID NO: 3475 - DNA, 1516 bp, Oryza sativa
  ref <308>: DATABASE ACCESSION NUMBER: AK061153
  ref <309>: DATABASE ENTRY DATE: 2001-12-06
gactcctcatcgtgagttcgccggctcgctcgtcgccgatcccatcctccccgcgagcgatccggggcgccgtcgctcgtcctgctgctgcttccgccgaatcctgtttggggggttcaatcggatccccatgtcccatgttagatccgcatccgccgctgccgatgcggcgtcggattggcagaaggtgagggcggagtggttcgccaggttcaaggaggagtacgagaggaaggtcgcggagcatcccgacgtcgactggtccgacgagctggccgtcgacgcccgccactatcgcgagagctgggaacgcatctatgcaagagcctacggccccttcgacaaatccacgtctatcccacctatgcgatatacggctgagcctgtgccattcgatgcatctgaacaatatacgctgcagatcttctgtgtaaaaatcaaagaattaaggcggggcttacagtggccgatccatgtgtttggtctcattgctgcacgggacacaattgatcacaatcgcaatatggtcttcgaccgcactagggatgactgccaaaccctcacccaagaggatccatatctactactgacaggccctacccgtgctgttgtggtgtgtgatcctgtctaccttgaggctgtgctaagagtcaagggctctactgaatcagaggatgaagatttaagctttttcactgtaccgctcaccgatgtcaaccgccctagggaaacatgcctgattactagagagtacaccagcaagcttagcacgctggagctgacgtttggctatgtcgttcgctccgtggaggccacgatcaaggcgcgtatcgttgatgggtcatggccagaagaagatggttcttcagctcggtttactgcctgtacctccagcctgaaacacaatggagttttgttgcttgattctggagataagaggaggaagatgcgtgttgatgccgatggcgtggtagggctctcgcggcgtgtggtttctgttgagtttgagggggagctggaagtttctgtggtgacatttgatggtagtaatatttgtagtaagatggaagctgagataaggttcgtgcctgaggaggtcggtgaaagctgtgttgagcttgatgttggcttttgtaaaatggagatcactgttgcctggtcatgtctttctttatcatgtcgatgatttgggggtagtactttacctgttgtggttgttaaggcttcgctatacgcggtaaggcgcatccatgggctcaacatgaccaaaaagagggtgaaacgaggatatttcctcatctgctcgaggtcaattccgactcctcgtgggatgtggatcccctaaagttgatgctaaaaccacccgacgtagttgaaaaatgtcaaccatccctttgtttctaccagctgagattaatttctcctaatcagtgttgatttagtgagaaaatatttttattttcaacaatgagataagtaacatagatgtgtatatccatgagatcagtttatcctc

SEQ ID NO: 3476 - DNA, 1194 bp, Oryza sativa
  ref <308>: DATABASE ACCESSION NUMBER: AK104436
  ref <309>: DATABASE ENTRY DATE: 2002-08-28
agtcacagtcgcggagtcggtagcatcggggcgaggacttggaggcgacaatggcgtgctctctcctgccgccgctcgctcccgtttcccctccgcctcgtctcctcctcccctcctcccgctcggctctgctccctcgcggtcctagggttgcgccccgagtccccgtttccccaccgcgcgcgctgccggacaccgctgtgggggcggcggaggcgctccgtggcgcgctcgccgacgccttcctggcgtcgcctccgacgtggaggtcggccgccgtgagcaacctcgccatcttcgtcgccggctccccggtgctcctgtctggcctctccgcctccggtttcgccgccgcgtacctcctcggcaccctcacgtggcgcgccttcgggcccaaggggctcgtcctcgtcgcctcctacttcgtattgggcacagcagcaactaagttgaaaataaagcagaaagaagctttgggggtggcggagaaaagaggaggaaggagagggactggaagtgttattggttccagtgctgctggttgtgtctgtgctctgctatcaatctacaatgtaggcagtgcagcgttggctgagctctggagacttggcttcgttgctagttattgtactaaactaagtgacacagtttccagtgaaatagggaaggcctacggaagaacaacgtacctggtgacaacacttaaggttgttccgcgaggtacagaaggtgcgatcagtattgagggtactctagctggaattcttgcatcgataattcttgcaagtgttggttatctcctggggcaggttaatgtatcacaaggcgcagtatgtgtccttgcatcccagattgcaaatttttgtgagagttatattggtgccacactacaagataaagaaggttttgaatggctcaccaatgatgttgtcaatgtactaaatatctcaactggtggtatattggctgttctgatgcagcagttgctagtaagttggcgctcttgaatacttttttatgacttcttttgttcagcctccgttattataacttattatggagaaatgactggttgatggcaatgttcttacatgctgctgccatgtgaaatggaagtataaattccggtcttagagatcatatttgaacggataaacatttgtggatgtagttatctgtgtcaatccttctggt

SEQ ID NO: 3477 - DNA, 1259 bp, Oryza sativa
  ref <308>: DATABASE ACCESSION NUMBER: AK061154
  ref <309>: DATABASE ENTRY DATE: 2001-12-06
ataccatcactccactccatcacctcctgcttgagcaagcaagcaagcaatcgctgcagccaactgttcgaccagagcgagttagccatggcgtacagagttcttgaggtgaccctccactcggcgagggacctgaagaacgtcaacttcatctcgcgcatggaggtgtacgcggtggcgaccatctccggcgacccgctgacgcggcagtgcacgccgccggacccctacggcggccgccacccggcctggaacgccacgctccgcttcaccgtcccgcctaccgccgcctccgccgccggctgcctccacgtcctcctccgcgccgagcgctccctcggcgaccgcgacatcggcgaggtcatcatcccgctcgccgacgtcctctccggcccctacgacctcggcgcccgcccgccgcagttcgcctcctaccaggtccgcaagctccatcgctccgagacccgcggcgtgctccacctctcctaccgcctcggccccgtcgtcgcgccgcagtccgtcttcgcctacccggcgccgccgccgccgccgccgcagctgttcgagaccgctcctccctcgccgccttacgttcccccaccaccggacgcctaccttcgtaaaccgtcgccgccgtctccaccacccgccaagctgtcgccgccgccaccgccacagacacagacacagccgctggcaaagccgccggcgccggcgacgccgtcgcgagctggcgggcacgtggcggcgctggcgccacctgcggtggcgaaggccgacaggcacgtgtcgacgccgtcaccggcgaaggccgactggcagatggtgggcacgccgacggcgacgaaaggggcgagcaagcatggcagcctggagttcgagcgggggctcaacgccgggctggtcggcggcgccatcggcgggatgctggtcggcaccgagatggtgtccgacgcggcgttctaccacgccggctacagggccgggctcgccgaccgcgacggatgggccgtctactaaaccgtcgtcgccatggctgcaggtgcagcgccatgcatggtcggtcggcgaagatgcttagctgaataaaagtctctggttttctttttttggccttttgagattagctcaataaaagtcgatgaaatttactttggctgagagtttgtaactcttcctcttcggctagtgaattaatcgacttgttgtatatattttgttactggttatgatgtaatatatggccacgaaaatccaag

SEQ ID NO: 3478 - DNA, 1324 bp, Oryza sativa
  ref <308>: DATABASE ACCESSION NUMBER: AK061155
  ref <309>: DATABASE ENTRY DATE: 2001-12-06
catgcttcacttggctggtgcccttaggattgtggacaagttctgggttgtgggatattctgcaggtagcattcatgcttggagtgctcttcgccacattcctgaccgagtggcaggtgcagcaatgttcgcgcctatggcaaatccatacgactctaagatgaccaaggaagaaagacgcaaaacatgggagaggtggtcaaccaagcggaaactaatgcacattttagctcggaggtttccggccctattacctctcttttatcaccgaagcttcctttctggaaagcaagggcagcctgagagttggctgtcactttcactggggaagaaggacaaaacttcactggaaagtcctatgttcaatgcattttgggaaaaggatgttgcagagtctgtgcgccaaggagatgcacagccttttgtagaggaagctgtactgcaagtatcagattggggattcagcttgtcagacattcaaatgcagaagagagaggatctgagcttttttgaattgatcaaatctctattccgtcaggctgaacgggagtgggtgggatttctgggcccaatacacatatggcaggggatggatgaccgggtggtgccaccgtcagttactgaatacgtcaggcgggtggttccaggagccacagtgcacaaacttctcgatgaaggccacttctcgtacttctgtttctgcgacgagtgccacaggcagatcttctccaccctgtttgggattcctcagggccctatcaaccctgtaccagaacccattgaagttgcctccgaactcacagaagaaacaacagtacctgacaaagctaaagaagaggagcaggacatatcggacttggcctgatagcattcagattcaggaaatcagtatcagaagcagtatagacacgagacgatactacttaacacagacaccacagaaagatagctttcgtcggctctcaccggcggacattgttgacagcgggtggaccgagctggcttcttttgcgctagtatttgtataggcaaattcttgaagaaggatgctacggtgcggttgatgtgccggctcatttcaatgtacaaaagggctatttaaaagttctgcacgtcacctgctgggtgcgctgctgctactctggtagagctcagtgatagctatataacatttgattaaacttcttactacgttgcatgttgtttttagatactcctatgttcttcacgctgctatgatgatgggtcacagcactcatctgtgcagggacagccagtgttcttggtcgctaactaacataagaatatggtgcggttaatcatt

SEQ ID NO: 3479 - DNA, 1038 bp, Oryza sativa
  ref <308>: DATABASE ACCESSION NUMBER: AK061156
  ref <309>: DATABASE ENTRY DATE: 2001-12-06
ggctcggcgcgcgcgcgcgcgcggcgcgggtggtttacgcaagctgagctgccgccgcgcggcttgctagttagcgtcaaatcgatcggttcgagccctgcaataggagtcccacgcaagcaactccttcctcctcttaaccacgccctctctcaccgtcgtcttcctcaattccctctacccctcaccgcccgcacgcgcgcgctgcctagctaacacaaaccgccattgcttcccctcctcctccttgccgccgtgcttagcttgctgtttgtagcttgttggctagagaggtcgtcgtacgccggtggctggcgatcgccggccggccggtggtccatgactaacggtgccgcgagctgccagcctgcagcgcggtggacatgagccggcgactcggcgccgcggccgccgtcctcctcctgtggctcgccgtgctcaccttcgccttgcacggctactacggcggccgcctcggctccgcgaggcggcggaatatcctcctccaacacccggcgctagcgctccatctccccaccaggaagatgctcctcgccgtggcgagcttcgacgacgcctcctcgccgtcgtcgttgacgaccaccgatcgtcatcatcaccatcacaggcatcatggccaccaccatcatcgcggccatgatcggtggaacaggaagggtgtcccgccgacggcagctgggccgggcgaggaggtcgacccgcggttcggcgtgcagaagaggctggtcccgacgggccccaaccccctgcaccattgatgccggcggctcgccattgatgggtgctcgagtttttctgcggtgagtcacgcgcacatatacactactacaccgttcttgttgtgttcatcgatcgaccaaaggctagctagctagctagcacagtaatattgattccaattccaacctgtggatgaattcaagaaagcattgccgatgtgtgtgtgctcttgcatgtatgtaccacgatcatatcagaaagcttcaaaacaagaggagaaaaagaaatgttactagc

SEQ ID NO: 3480 - DNA, 1276 bp, Oryza sativa
  ref <308>: DATABASE ACCESSION NUMBER: AK061157
  ref <309>: DATABASE ENTRY DATE: 2001-12-06
atattgccgccttccccgatctccaagccctcgcaccaccctccttgttacagctgtgccgcctcttgcttcctcctcctcatcgtccgccatggcttctctcaccgatctcgtcaacctcaacctctccgacaccacggagaagatcatcgccgagtacatatggatcggtggatctggcatggatctcaggagcaaggctaggactctctccggccctgtgactgatcccagcaagctgcccaagtggaactacgatggctccagcaccggccaggcccccggcgaggacagtgaggtcatcctgtacccacaggctatcttcaaggacccattcaggaagggaaacaacatccttgtcatgtgcgattgctacacgccagccggagaaccgatccccaccaacaagaggcacaatgctgccaagatcttcagctcccctgaggttgcttctgaggagccctggtacggtattgagcaagagtacaccctcctccagaaggacatcaactggccccttggctggcctgttggtggcttccctggtcctcagggtccttactactgtggtatcggtgctgacaagtcttttgggcgtgatattgttgactcccactacaaggcttgcctctatgccggcatcaacatcagtggaatcaacggcgaggtcatgccaggacagtgggagttccaagttggcccgtctgtcggcatttctgccggtgatcaggtgtgggttgctcgctacattcttgagaggatcaccgagatcgccggagtcgtcgtctcatttgaccccaagcccatcccgggagactggaacggtgctggtgctcacaccaactacagcaccaagtcgatgaggaacgatggtggctacgagatcatcaagtccgccattgagaagctcaagctcaggcacaaggagcacatctccgcctacggcgagggcaacgagcgccggctcaccggcaggcacgagaccgccgacatcaacaccttcagctggggagttgccaaccgcggcgcctcggtccgcgtcggccgggagacggagcagaacggcaagggctacttcgaggatcgccggccggcgtccaacatggacccttacatcgtcacctccatgatcgccgagaccaccatcatctggaagccctgaagcggcttcttgacgccacgacatcctcgtcatcgtcctccccagctcgccgtgtcgctccggttgctccattgatcggacgatctggtgaattgcatttgtgctgggagaagt

SEQ ID NO: 3481 - DNA, 1162 bp, Oryza sativa
  ref <308>: DATABASE ACCESSION NUMBER: AK061158
  ref <309>: DATABASE ENTRY DATE: 2001-12-06
gtccttccttcctcccctacctcccctttgcgcttgacatcgccgggtggatcagcggcggaggctgccagcgatgtcgtccctcaactcgctcttcaaccgctccaccttcggtaccaaatgcaaaacatgcttgaatttagtcatttcgaggatcaagctgctgcgcaacaggagggagttgcagctaataaatatgcgcaaagagatggttcagtatcttcagacaggccaggaatcgatagcaaggattcgggtggagcacattattcgagagcaaaatatattggctgcatatgagattgttgagcttttctgcgaatttgtgctggcaagggtccctattgttgaggtccaaaaggaatgccccttcgaactacgggaagcaatagctagtataatatttgcatcagggagatgttcagacttgcctgagctaatgcatctccgtactttgttcaccaccaaatatggcaaggaatttgttgctgcagctatggaattgcgtcctgacagcggtgttaatcgtacaataatcgagaagctctcagtgaaggccccatcagctgaatcaaagctgaaggttctgaaagctattgctcaagagtatggccttgaatgggactcatcgaatactgaagcagagcttaacaagaaatacgaagatctgctggatggatcaggatcctcagcacgccagggccagttacctataatcgagaactctccagttgcttccatttccagagatatgccatcgttgtccatttcacctgtcgaggacactggaaaatatcaagctgctccccagtccccaagctcacctgctgggtctgcagtaatgcatgcggctaccaagagtaacatggtgagccaggagcatcatcgctcccctgctgatgagatatcgtgcgcaaccccaagttcgtcggacgttcttgaaaaagcccgagctgccattgctgcagccaaccgcgcctccgccgctgcccgtgcagccgcggaccttgtaaaggtcaaaattacaagctagtgacgcactgacgcctgctgttgtggcgaaccaaggcaagttgcgtggtttgagattgtggcaactcgggtttattactgactatacacatgcttaatttgaatgacaaagtgtggcttaaacaaaaac

SEQ ID NO: 3482 - DNA, 1126 bp, Oryza sativa
  ref <308>: DATABASE ACCESSION NUMBER: AK061159
  ref <309>: DATABASE ENTRY DATE: 2001-12-06
ctctctctctctctctctctctcccctgtcctccccgattcccaatctcgctctcaagtcgcagcagcactcagcatcgcggcggccggggcccggggcaacggcgacgaggcggcgcgccggcagcgcgggcgcatcggctccaagcagatactcaaatattccctgttaactagagtatcttccccttcccttggcgtaaaagaaaaaaaatctcccgtctcgtctcctccgctccttgcgccatctcgctgctgaacaggggaggggcgccgatctccatccggcgagcagagcaggggagggggaggggaggggatcctgagccttgacatggcagagaaattgggacctgagaagcggcacgccttcgtccacaacgggcagaaggtctttgagtgggaccaaacactggaggaagtgaacatgtacattgagctccccaagggtgtgcccaccaagctctttcactgcgccatccaggccactcatgttgaggtcggcatccgcggcaatccaccctacctcaaccatgacctgacactcccagtgaagactgattcatcattctggacaatagaggatggtgaaatgcacatcacactgcaaaaaaagagagaaggggaaaacatggtcatctccaatacaaggccaaggtagcttagatccatatgctgcagaccaagaacaaaaacggcttatgctgcaaaggtttcaagaagagaatccaggattcgacttctcccaggctcagttcaccggaacctgccctgacccaagaaccttcatgggtggaattcgctctgactgaagcttggcccaacgtcatgtatctggctaaatgatgttgctaacctcacagtggcttgtcaaataatcaaatgtggtggctgtacatatctcgcatctgtaaattgtgaaattcgccggtttcctatggctgcctttgtgccttagaaataatggtgaatgtttggcctatcaatcgccgagccagacgtaggattctgaagttatttattcacttattgatctagcatccttgatgatgtagtaagtttgtgatcaccaggtacttgtgactgttcgaatgaaaatataccatctacccatgccgggtcatttc

SEQ ID NO: 3483 - DNA, 1003 bp, Oryza sativa
  ref <308>: DATABASE ACCESSION NUMBER: AK061160
  ref <309>: DATABASE ENTRY DATE: 2001-12-06
aacggaagtgataatcgttgttaagcatccgctttcaaccactcggccacgcccagcgacccaagtcaacagaaacgcaaccaaccattatcttttcctgaaaaacctcccctcacaatcctcgcccgatcgaaaaggatcgtgatcccagatcgctgccgtgtcaatgctgcgccgccccggcccgagcaccgccgcctcgtccctgccctgaccccgccgcatcctccagttctgccgtcgacgctgcgccgcctcgacccgcatgtcgccgctttatcctctcccgtgctgcgccgacggctgaccggcacgccgccgcctcattgccccgatcgcgatggcccctgaatcccctgaccctgttgcctggaccgccacatcgtgctccatctcgtccgctgctgttctcagctgatctggttgatccctagtgacttagttattagttattgatcatgccccaagtttctcgatggaattgcaattgtgaagaattattagcagagaattcttaaccagggatggttccaaagatgcttggcacaaaaatttagccattggtgaaagcaaataatttgatccaaagagtaactctggctgttaagtgacaaattgagatctcattctgctacatgaacaatgggaaagccaacccatacttcggattttttccaagctgtaatgggatgttaaatgttcatttccattacatatcttttcctgtaatccagtgacatctattttatggtgaagtgttgccttgaggatgatgggatagaggaagaagaaattgctaaggagaagatattgttgttgctgccaagtgcccaagttacagaaactaatgttgatctggtcacagagaaaattcaagatgatgttttttttttttttgcaagattcaacatatgtttgtactacactcactaatatgctgtggtgtatacacaagttgtacttataagagatttgtgaattaatatattgtgatttttttctt

SEQ ID NO: 3484 - DNA, 1071 bp, Oryza sativa
  ref <308>: DATABASE ACCESSION NUMBER: AK061161
  ref <309>: DATABASE ENTRY DATE: 2001-12-06
ctgcccctcgcccgtcgccgccgtgtttctcgcccctacccatcgcccatcaccgccaaccccaatccccaaaccctacaccgctgtcggcactgcgcatccccatcccctcgcgcggcgcgatatccgcccaaacccccgttgccgcctccgctccgatccccatctcgcgagtcgcgagcagagcaggagaggagaggggcgccgtcgttgcccacatcgttgcctttgctccgatctcatgaacagagcagacgaggggaggggcgccgtcgtcctgctgcatcccataacctcggacgacgacatcgaccaactcaagtggcggcggtggcctccaaggggcctatgcagagattgagtgttgtgttgtgttgggcacagtcatggccactgcagccatctcttccatcctcgccgttaggactgatttcaagctatctcgaaccaaatcatctctggattaagatgatctttgtaatgtacaagtctctcaatatgttcagtgttagctataacactaattggctaaaacaataattatccggactctaaacgaagtgttgtgtccatggcttgaggttgacgttacaatttttttccagactgagttgggtatttggtttcaacatagttctgatttaattgactcaagattttagaaatggtattgcaaagttttgaatggtcacagaacggtacttctattctttggtaaaaagcataacattgccttgcttttcaggcatcttgggtgttagtaaagagtcaagtggctgaaacggtggccatggctgttattggtggcgttttaaggtaaattttgggtattatggtcatggcctcgcgctggccgatcagcatacagaggtggggaaagagagctatggctatgggccatgggcctatggcaatggcagcggcgctgcttctcatgttgtccctagcgaggcggtcatcatctcttttgtatctccttgcatatgtgaaggagaagacggcaattggttaagatcaggccattctgcttgaatactcagatgtcattgcaatcgattaagttcgttgtcc

SEQ ID NO: 3485 - DNA, 1187 bp, Oryza sativa
  ref <308>: DATABASE ACCESSION NUMBER: AK061162
  ref <309>: DATABASE ENTRY DATE: 2001-12-06
cagaagacgtgttgaccggacaacggatccatgcagcgggttggagatccacgctgatggaaatcgaaccaccagcattcatgggttgtgcaccaaatggagggcccgcctgcctaacccagttgaagagatgggcatcaggttttttagaaatactcatcagtcggaataacccaatcctcacaaccacatttaagagtctccaattccgacaatgccttgcatacctgcacagctatgtgtggcctgtgagggcacctttcgaattgtgctatgcattgttggggccttattgcttactatcaaaccaatccttcttgccaaagacatcagaagacggtttctacatcgcattagctctattcattgcctataacacatacatgttcatggagttcatagagtgtgggcagtctgcacgtgcatgttggaacaaccacaggatgcaacggatcacctcagcttctgcttggctactggcatttcttaccgtcatcctcaagaccttaggcttctccgagactgtgttcgaggtcacccgcaaagacaagagcacatcagatggtgattccaacaccgatgagcctgagccagggaggttcaccttcgacgaatcgacggtgttcattcccgtgacagcacttgcaatgttaagtgtcattgcaatcgctgtaggagcatggagggtggttttggtgacaacggaaggcttgcccggtggccctggtatcagtgaattcatctcctgtgggtgctggtgctgtgcttcatgccattgctgagaggtctagtgggaagtggtcgatatggcattccttggagtatcaagatgaaggcctgcttgcttgttgctatattcttgctcttctgcaaaagaaattaattgcagctggtgtgcagcaacaattagtccatactattatttgagcatgcaaacactaggtttcatcttcatattattatgtccgcaaacgttgactaagctctagaaaagggaacaattcaatcactaattcgaagcaaaaactggttgtttactgtaagagagaatctactcgtccatggcaagttgtcccaccggtgcaaacttgatcttagtggcatatatatagtagatttcctcttattgtacggcctgtatgcatgcatgaatccttcaaagtagaagcattggagcggtcccgtgc

SEQ ID NO: 3486 - DNA, 1141 bp, Oryza sativa
  ref <308>: DATABASE ACCESSION NUMBER: AK104437
  ref <309>: DATABASE ENTRY DATE: 2002-08-28
aaccaacctagctaaccgcgccgccgcgccgttctcctccccacccggccgccgcagaagcgcagaccatcaccggatctttccgcgcgaagacgagcacgccttgtgaatggtgggagcccgcacgacctcccccgcctccccgccgcagccggagagggcctccttccgcagcttcggttgctgcatgcagggctggcaccaccgctgcatcggcctcgacccgtgaacgcctcgtcgccggcgacgagcgcgcaacgggcgcaggatttcgtcgattcgattcgactcgactctcccgcctgattcttttttttttggtcgtgagttcttcctcttcttgcgagaaaacagagagaaaaaaagaaagttaggcaattctttgattttagttggatttgttccgatttggccgttgctctaccgccgacgatgatgaagctgggcaaggcggagtccgcccgcggaaaggtggcgccggccgggtccggcggccgagcgcgcatgctggtgacggtgaccgtgctcggcagcgccgggccgctgcggttcctgatcgacgagggggagacggtcgccggcctcatccgggctgcgctccgctgctacgcccgcgagggccgcatgcctctgctcggtgccgacgccgccggcttcctgctttacaccgccaacggcggatccgacgcgctcagcgccgacgagaagatctacttcaacggctgccggagcttcctgctctggcagaaggcggcgcgcgacaccatggccaagggcggccggcctgagctggcgaatgtcgcgacctgcaatccctgcaagaaacggggcggcggcggctggaagggcggcctgaacaagttcctcctcagcttcagcttcaaggtgtgagagccaccgatgcctccgtaatccggatcgagctgatctcctcctgccggaatcgttgtccccgagttcatcactacagctggtcgggttgcgcgtaataattcgacgatgcttctttttcagtcgtcagtgtcagttgcttggttatttcgttcagttttgtcaatctagtcgcattttctcgtcctgttgcaaactcctatctacatgtcagcatcaaaattatgaataaaatcaccgtgtcccgatg

SEQ ID NO: 3487 - DNA, 1328 bp, Oryza sativa
  ref <308>: DATABASE ACCESSION NUMBER: AK061163
  ref <309>: DATABASE ENTRY DATE: 2001-12-06
gaacgcacgctacactgcaagaaaggcaagtataggggtggcaggtagtttatattcactggaaaccgagaacttcactcctcccagcactccacactaggaggatgctcactgtctgactgactgactggctgctgctgctgctcattccttctcctactctgcctgcctcctctgctgtgtccttgggagaattcttcagggacagtatccctgcagaggtgagatcatgggacagtcgaagaagaagttccgcggagtcaggcagcgccactggggctcctgggtctccgagatcaggcaccctctccttaagaggagggtgtggctgggtacctttgagacggcggaggaggcggcgcgggcgtacgacgaggccgccatcctgatgagcggccgcaacgccaagaccaacttcccagtcgcgaggaacgccacgggggagctcacaccggcggctgcggtggcagggcgggatggccgtgtcggcggcggcagcggcagctcgtcctcaatgacggccaacggcggcgggaacagcctgtctcagatcctcagcgccaagctccgcaagtgctgcaagacgccgtcgccgtcgctcacctgcctccgccttgacccggagaagtcccacattggcgtctggcagaagcgcgccggcgcacgcgctgactccagctgggtcatgaccgtcgagctcaacaaggacacggccgtgtcgtcggctgcgacggtggcagcagcaacagcagtgtcgtccagcgaccagccgactccgagtgacagcacagtcacaacgacgtccacgtccaccacgggctcgccgtcgccaccacctccggcaatggacgacgaggagaggatcgcgctgcagatgatcgaggagctgctgggcaggagcggcccgggctcgccgtcacatgggctgctgcacggtggtgaaggtagcctcgtcatctgaattccggaagaacaggaaagaaattgaaaatgcaaggttaaaacagcatgatcaggtcaccatctaagatcaaggatctggtagggtggttggtgcacaggcagttaagattgctacatatgataggtatatctctattactactacatatccagcttaattaggaaacaattataagatcgattactactgtgtgaagtgaagctgtgtatttattaaagacttacttgtatgtacaagacgtccccgtcattatagtcatactggtgaaagctctgctatgtatcaacgtcatcagagatcagactacatatatataagtggtgtcaacttctaataaaagtaaataaaaacattgtaattgtgt

SEQ ID NO: 3488 - DNA, 925 bp, Oryza sativa
  ref <308>: DATABASE ACCESSION NUMBER: AK061164
  ref <309>: DATABASE ENTRY DATE: 2001-12-06
tcgcttcatcaccttccactcagtcaatcgcagcgagaagccaagaagcactcaaccacgcgctgttcgtcatggcgagggtacagctctgggtggccgccgcgtgcgccgtcgtgctcgcgctcgccgcgccctcgctcgccggcgaccccgacatgctccaggacgtctgcgtcgccgacttggcgtccccggtgaagctgaacgggttcccgtgcaaggcgaacgtgacggcggacgacttcttcttcgcggggctgaagaaccccggcaacaccaacaacccggcggggtcgaacgtgacggcggcgaacgtgcagtcgttcccgggggtgaacacgctgggcgtgtctatggcgaggatcgactacgcgccggggggacagaacccgccgcacacgcacccgcgcgccaccgagatcatcttcgtcctcgagggcgtcctcgaggtgggcttcatcaccactgccaacaagctcttcaccaagactgtcaccgccggcgaggtcttcgtcttcccgcgcggcctcgtccacttccagcagaaccgcggccacggccccgccgccgtcatcgccgccttcaacagccagctccagggcacccaggccatcgccgccacgctcttcgccgccgcgccgcccgtgccgtccgacgtcctcgccaaggccttccgcgtcgacgtcccgcaggtggacgccatcaaggccaagttcaagtgatcgtagccggccgccgtcgatctcccatcattttctgcattttctttcatcaacaaaaccatctgatctactcatttgatttggttacggaataattttagtggatactgtctgtagcgtgcagttgatttcttccgtttgtaaatctgtttgcatttgttaatttgccttggaaataagacttgttccgttttgtgtggact

SEQ ID NO: 3489 - DNA, 1402 bp, Oryza sativa
  ref <308>: DATABASE ACCESSION NUMBER: AK061165
  ref <309>: DATABASE ENTRY DATE: 2001-12-06
tcgagaaagaaaaagaaaacgtagaaaagtttttcgcagccgcggcggccagccaaccaaccaacccaaccagccaacgcggatcgcctctcgagcaccaaaccctacccggatcgccagcgcagccactcaccaagccttcccccccaccctgcttctgctgctcgcgccgggattcttggctcgtctgctcttcgcggtcggtgtcgcgccatcagcaaccatggagggcgagaggagggcggtgaggacggtgcgggtgcggaacatctcagatctggcaggggagcgggaggtgcgggagttcttctccttctccggcgaaatcgagcacgtcgacatcagatgcgatggggtggcgacggggaggacggcctacgtcacgttcaaggatcccaaggccctagagatcgcgctgctgctgtcgggagcaacaattgtggatcgggttgtcaacataacccctgctgaagactacatctacatccctgttactgaccagcaacttgtggtcagtgaggtggtcggtgaggtgacaagtacggctcctaatgcagatttggaccaacctaccgaggccaatgccagccccactactggccgtgtttatgtcagcaaggctcatgatgtcatgacaactgtgattgcaaggggttcagcaatgcgacaagatgctgtgaacaaagctaaagcattcgatgagaaacatcaattgagggcaaatgcatcggccaagatcaattcctttgataagcgtgttggaatttcagagaagataaacagcgggataacagttgtaaatgagaaagtgaaatctgtagaccaaaggctacatgtttctgacaaaacaatggctgctttgctggctgcagagcgcaagctaaatgacactggctctgctgtgaaaaccaacaggtatgtgtctgctggaacaagctggctaaatggtgccttcagcaaggttgctaaggctggtcatgttgctggctcaagaacaagagagaagttccaaatagctgtgtccaatctaacagcgaaaggtcctgctgttgttgcttgagctgctgtggtcctggttttggaagctcttcttcctgggagaaaagtcgatcataaagcatcgtgcaatcaccttcactcagagtgtatcgacagtgtggcttgtaactgtgtatttcactgttcccattttttcttcggggaggtttttccagtgagccatgtcagatttggtacatagaggatctcatgtttttggaactttagagtcgccattcttttctttgtagtgtcgatgttaaattgattataggtgatagtgatattctgggccatatgttgttgactcggtatggattattggttattgaatgtctatgcttgtgccatgtttgttcttagc

SEQ ID NO: 3490 - DNA, 1122 bp, Oryza sativa
  ref <308>: DATABASE ACCESSION NUMBER: AK061166
  ref <309>: DATABASE ENTRY DATE: 2001-12-06
atcaggggtccattcgcgtcgtgttgctccgtcggtcgtgtgtcccccaaaggctccaagctccgtcgttcctctcctcctccgccgccgccgccgccgaagccgacgagcagtagccggtaggcatgacgaggctcgcggcagccgcgctccggagggccaccgccgcatctgggatcccctcgtcctcctcgcgctcgtccgtgcttgctccgttcgcgcctcgcctcttctccaccgaggcgtccggagaaacccccgcggcgggcgccgccgcccaggggtcgcaggacgagcctttcttcaagccttctgacgaaggtgtggcatatggaaggttctacagtgttattcctggaggcagccgtctccctaagagcatgctcaaaactgatattatccaccaccttgataaatctgaactgtcactggacgatgtgaagattgattataacaggggatattatccagtgggcgcgttgttgaggttttcttcagtgccattatttaacacagcagtcaggcaaacacgagaaggtcgtcagtacaggcttgagatgatcagtcgtgaggagtttgatctgaagcagtcttatgatggaaaagctatactattgcaaggagtccctcgaaatgctgtaccagaggacatagaacgattcctgtgtggcaccaatgttgaacctccgccatttgaaagctttctcagacctggtgtcccagatcctatcagagtggtgctggttaaattccgctcaaggactgatgccgccaatgctttcattactaagaaccggggtttctgcctgaacaaccctgtgagcatgcgtgttcttcaatagcccgtccatttttatcgtgcttatggcaatcagctccaaaatgaaccctctcagcctttggatctgaactcctatctgcaaatgtggtagaaagtttgactttgtacgtttgcactctactgtcagtcgcttttatgttattttgtttgtgcttttagttgtgctacttcatttctctaatttcatgtgtaaactggaagttgctgttgcccccagtttacaacagaaacatcagaaggaattatccgtaataaatgttcaaaattgcacatttcttttc

SEQ ID NO: 3491 - DNA, 971 bp, Oryza sativa
  ref <308>: DATABASE ACCESSION NUMBER: AK061167
  ref <309>: DATABASE ENTRY DATE: 2001-12-06
aatcaatcgaaacccaatttatcaaatccatcgcgaatccccaacccaaccgaatccacccaagaagaagaagaagaagaagaagggttattgcatcgatcgcagcgagggggaaaggggtaatcgcggagcagatcgaaacccgaatccaatcgatcgagccgccatgagcttcatcttcggcaagcggaagaccccagccgagttgctgcgggagaacaagcggatgctggataaatccatcagggagatcgagagggagaggcagggcctgcaggctcaggagaagaagctcatcgccgagatcaagaaggtggccaagcaaggacagatgggagccgtaaaaattatggcaaaggaccttatccgcacaagacatcagatcacaaaattctatgccctcaagtcccagctacagggtgtatctcttcgaattcagacattgaaatcgacacaagctatgggtgaggccatgaagggtgtcacaaaagccatgagacagatgaacaggcagatgaatctaccagctctgcagaagataatgcgggagtttgagatacaaaacgagaagatggagatagtcagtagcacaatgaatgatgccattgacgatgctttggagggcgatgaggaggaggaagaaacagaagaactggtaaaccaggtccttgacgaaattggcatcgacgtcaactcagagcttgtcggggctccttcaaccgctgttgctgcaccggttggagcaggaaaggttgccgctcaagttgaagccgctggaggtggggacggtgggatagatgacgacctacaggcccggcttgataatctgaggaagatgtgagcatatagggcttggaagaaataactatacggtgtcattgtacaatcagcatatagacattttatgccatcatttttcttagattgttgggcacataactgcaggcttcgattttctagcccccttgtat

SEQ ID NO: 3492 - DNA, 1148 bp, Oryza sativa
  ref <308>: DATABASE ACCESSION NUMBER: AK061168
  ref <309>: DATABASE ENTRY DATE: 2001-12-06
aacagccccgctctattcgtttgccaagatgaggtcaatccgagcggcgcaagctctggcctcccgctcgctgctcctctcctcgcgcgctctccatggggacgccgcctccacggcggcggccgcggcgggcggcgggagattgggcgtccagccgtcgcccccatcccaggcatcatcatcatcatcctcgcgggccatgccagctggaatcgctggggcggtctccttctccctgaccttcgcgacgatggcggcggcggaggccaaggaaaggccgcccatggatctgctgccgcagaacgtggtgctgtaccagtaccaggcctgccccttctgcaacaaagtcagagctttcctagactatcatgatataccctacaaggttgtggaagttaatccattgagcaagaaggaaatcaagtggtctgagtacaagaaggtcccaatactgatggtagatggtgaacagctggttgattcatcagatataatcaatatattacagcaaagggtccgccctgatgataaagccactaatgaagaggaagaaaaatggcgcaggtgggttgatgagcaccttgtgcatgtcttgtcgccaaatatatatcggacaacttcagaggccttggaatcttttgattatatttcaaaacatggcaacttcagttttactgagcggtttgctgtgaagtatgctggtgctgcagcaatgtacatggtgtctaagaagctaaagaagaagtacaatataactgatgcgcgtgcttcattatacgatgctgccaacacatggatggaagcccttgatggaagggattttctaggtggctccaagcctaacttggcagatcttgcagtatttggtgttttgagacctatccgatacttgacagctggaaaagatatggttgagcatacacaaattggtgactggtaccaacgtatggaagatgcaattggagaaccatcaagaatccaggagtagaacgaaattagtagaatttctttttgcctcttcaagtctttgaccatttcaaacggaaggaagtatatgctttagacattgaaattattgaagttttgcagaatgtgtgacaatgtaataatgtgacatcatatatttagtacacagagaattgaacatg

SEQ ID NO: 3493 - DNA, 1006 bp, Oryza sativa
  ref <308>: DATABASE ACCESSION NUMBER: AK061169
  ref <309>: DATABASE ENTRY DATE: 2001-12-06
cgatctgggcactgtctcggagagagactcggtgaaatagacatgtctgtgaagatgcggactacctgcacctggacagaaagaccctatgaagctttactgttccctgggattggctttgggcctttcctgcgcagcttaggtggaaggcgaagaaggcccccttccggggggggcccgagccatcagtgagataccactctggaagagctcggattctaaccttgtgtcagacccgcgggccaagggacagtctcaggtagacagtttctatggggcgtaggcctcccaaaaggtaacggaggcgtgcaaaggtttcctcgggccagacggacattggtcctcgagtgcaaaggcagaagggagcttgactgcaagactcacccgtcgagcagagacgaaagtcggccttagtgatccgacggtgccgagtggaagggccgtcgctcaacggataaaagttactctagggataacaggctgatcttccccaagagtccacatcgacgggaaggtttggcacctcgatgtcggctcttcgccacctggagctgtaggtggttccaagggttgggctgttcgcccattaatgcggtacgtgagctgggttcagaacgtcgtgagacagttcggtccatatccggtgtgggcgttagagcattgagaggacctttccctagtacgagaggaccgggaaggacgcacctctggtgtaccagttatcgtgcctacggtaaacgctgggtagccaagtgcggagaggataactgctgaaagcatataagtagtaagcccaccccaagatgagtgctctctcctccgacttccctagagcctccggtagcatagccgagacagcgacgggttctccacccatacggggatggagcgacagaagcatggaaataggataaggtagcggcgagacgagccgtttaaataggtgtcaagtggaagtgcagtgatgtatgcagctgaggcatcctaacgaacgaacgatttgaac

SEQ ID NO: 3494 - DNA, 1110 bp, Oryza sativa
  ref <308>: DATABASE ACCESSION NUMBER: AK061170
  ref <309>: DATABASE ENTRY DATE: 2001-12-06
ttccctcgtcgcggtgtcccctacactcgccctcgccggcgcacgcgatttcgcaggggtgcacctctgcctgtacccggatgatgcccccgccacggctcgcgaggtgctttcctggccaggatccccctccgccaccgtgctgtcgatggcagccacttctgccaccgaagtgtcatccccttggctgttcaccagcttcgagtcggcacggcggaactcgagcgctgtagtgacgtttgacatgaattccctctcacctgtggcagaaattggccggaaggaggtgtatggtgcggacgtggaggcagccatcccggcttccaggctcagctggcttggcaggcacaatctcctgctcgccgctgggtcgcactctggtcctgccggagtggtgggggacatttgcctctgggatgttcgggcgagcgcgactgtgccagtgtgggagttaagggagaaggaggactgcttcgcagacattgccgcatcagaggcactgtcatcgttgttcaaggtgggggcagcatccggtgaagtgttcatggctgacttgagaatgctcggtggtggtggcattagcattgaaccgtgggtgtgcattggagatgggcagagagcagcagctgcggcatctgcaggcagaaaggaggggaatggttgcaggattgagtgctatctcaattgggtatttgtggcgcgcggtggagaggttgaggtgtggacacaggtggaattggctcaagaagctggtgggaagaagttgatgaggaggaattgggtggggaatggaccatcctttgtgattgcaggcggaagtggccacgagagtgtgaaggagaagaccaagattgtgagctgggcctttggaggcagcaggatggcattggcgagggatgataagcggtccattgaggtgtgggatagtgcaccggcggctatatctttcaacccctaaccctgaatagaggaagaagactacaaatgtgcaatagtgtacgtcaatttccatttgctggtcttgttcatctataaatgttgccctgtgtcattatgtgttgtttctactagatactttgatccttaaatgcaattcaagaatatcattcc

SEQ ID NO: 3495 - DNA, 1551 bp, Oryza sativa
  ref <308>: DATABASE ACCESSION NUMBER: AK061171
  ref <309>: DATABASE ENTRY DATE: 2001-12-06
atgcatgaagcttccagaggcagtgaggcaccacaaattttcagacacatgctggctggagtagtgtaaatatacacacacacacactctctctctcatagtaacagggctcaagggccaacaagattagcactcactggttcttcttccttgtttatttggtaattactctgtccctgattcttctccggctccggcgagatcatgtatcttgtgaaggatatcggcggcgccattgcgctgatgggcgtgtcactggtgctcctgggcacatggccggtggtcctcgccgtgctggagcgccgcggccgcctcccgcagcacacctacctggactactccatcaccaacttcctcgccgccctcctcgtcgccttcaccttcggccagatcggcgccgacacgccggagacgcctaatttcctcacacagctcacccagatgcaggacaactggccttcaatcttgttcgcgatgtcgggtggcatctttaacggcctagggacactggccacgcagtacgggtgggcgttcgtcgggctttcggtcaccgaggtcatggcgtcaagcctgaaggttgtcatagggacaacactgaactattttctcgatggccggatcaacaaggcggagattcttttccccggtgtcggatgctttctgattgcagcctgccttggatctcttgttcactcttccaatgctgctgacaaccaggagaagctgtctagtgccatggtgaaccacagcaacaccaatggggacactgaaaatgaagaactcaccaagcacctccttgagatagaacaacccaaggattgtgaagaacaagagcctgaagtggcaccggctgcccaggctgtggaaaaactagaggcaggaacagctgatttcctggttgaccttgaggggaagagatctattaaagtgctcggatcgaacaccttcctgggcctcggcatcgtcaccttcgccggcgtgagctactccctcttctcgccggcgttcaacctcgccaccaacgaccagtggcacacgctcggggagggcgtcccccacatggtggtgtacacggcattcttctacttctccctcgcctgcttcgccatcggcatcgccctcaacatctggttcctctaccaccccatggtcggcgtgccgcggtcgtcgctcacggcctacctgaaggattggaaggggagggatcttgctctcctcatggacatgaccgagaaacatcagaagaagaagaagaagctgcatatgtacagctccattgatctgaccacatcagtgtgtagttcctgaccttctcgacgtaggatctatgcatattgcctcccggtgcttgcgcatcggcgaggctacacatcaattaatttcttctgcaatgagcaaccatgggatgggggagtgaatttggagatgtgattggactagtatatagtgtaatgttgtaatatatgtctcagcttctttgtgtgaagcttctgtgaagggaaccaaaataattttcaaatgtataaattttgatcaatgttatgaggagct

SEQ ID NO: 3496 - DNA, 1160 bp, Oryza sativa
  ref <308>: DATABASE ACCESSION NUMBER: AK061172
  ref <309>: DATABASE ENTRY DATE: 2001-12-06
ctttcttgcagttgagttggggtgctacgcactagctactcaagtgcatgagctagctcaaacaatcgatcgatggcgatgaaggcggtgatcaagggcggcgatggcggaggcgggtgcatggtggtggtggcgcacgtgctagcggtggcggcgacggcgatggtgttggtgtggtgcgttcacttccgcggcggactcgccctgcgctcccacaacaagcagctcatcttcaacacccacccggtgctcatggtgcttggcctcgtcgtcctcgccgccgaggccatcctctcctaccgctccctctccatcatcgtcagcagcagggacgccagaaagaaggtgcacctggggctgcacgccgtggggctcgccctcggcggcgtcggcatctacgcggtgttcaagtaccacgccgaggccgacatccccaacctctactccctccactcctggatcggcatcgccaccatctccctctacgcgctccactggctcctcgccttcctcaccttcttcttccccggcgcctcccacgacaccaggcgctccgccgtcccgtggcacgcgctcctcggcctcctcgtcttcgcgctcgccgtgggcaacgcccagctcggcttcctcgagaagctcaccttcctgcaggccccgccgctgcgcctgtccaggtacggggcggaggcgctactcgtcaacttcacggcgctggtggtcctcctcctcggcgtcgccgtcgtcctcgccaccgccaacgtcgactccactaaatacaccgccatgtaattccattttattatacatatatttcatcatcttttctttattattactctacatataatcgatcgatctagctacacacccgtagtacgcagtgtcgtaccatatatacatgcatcgcgctgagtgtgtgcgcgcgcgcacgtgtcatgtggctttgtgtaattaattaattattattattcctcaattccatcgtgcatctttaattaccatgcatgtatatatatatatctggccgagtgtaaatactatgtatgtatgtatgtatgtatgtatgtatgtatgtatgtatgtatgtatggatacacacttacgtactcatctgtaaaatacataatatattgcgtctcatctgtgtacgtatatatagc

SEQ ID NO: 3497 - DNA, 1107 bp, Oryza sativa
  ref <308>: DATABASE ACCESSION NUMBER: AK061173
  ref <309>: DATABASE ENTRY DATE: 2001-12-06
acacgcaaaccatttgcatttgagccttttgcttgccttctctcctgtcctgactgcagcgagagatcagtagggagagggcaatggcattgacggtgcggctgcacacggcggtggcggcggtggccgtggccgtggtggtggcgatggggatggcggcggcgcagatgtcgccggcgggggcgccggcgccggcgggcgggatcagcccggcgtgcatggacgcggtgctcaacatgtcggactgcctgacgtacgtgatgaacgggagcacggcgcggaagcccgacgagccgtgctgcccggagctggcggggctgctcgagtccaagcccgtctgcctctgccagctgctcgccggcggcgccagctcgtacgacatcagcgtcgactacaagcgcgccatggcgctcccgggcatctgcggcctcgccgcgccgcccgtcaccgcatgcgcgcttcttggagtacctgtgcctatggcgccttctgcatcgccgatggcaggcctcgggccatctactgaaccacaaatgcctgagaaatcgccgtcggcctcgccgtccgagtcgagtaaccatgctcccggccgcttcaccgccctcgccgcggtggtcctcgccgttgcagccgccgggatggtttagaaaatgcctggattttcggccgatcgatctcaagatttagcccgacgattcttgtttattcttgccacacatttggctgtgtattaatttacaacacgttacagtacgtatgcgcaatgaacgatatttttctgctttgctttaaattcttataattaactagtaactcttccttgtcgtaagttgctagagcatatggtgagactatatgtacacacgtagtgatatctggccatccgcagtagctacttggggccttctgttaattattttcagtgtttaaatgcttggtttttggaggcgaggtggagaggatttttggaaagatgtgagctggagatgatcaaagtgtggggaaaaaaagcattggattcgccggtcggcaatacacggcggccggccccgatcggccgtaaggcgctgtaggttcatgaatgctaagattccgatcccttcattc

SEQ ID NO: 3498 - DNA, 982 bp, Oryza sativa
  ref <308>: DATABASE ACCESSION NUMBER: AK061174
  ref <309>: DATABASE ENTRY DATE: 2001-12-06
agacctgacccaaacggaagtcttctcctctccccttgctcagttcattcagttggcctcctcgatccacctccagcctctcaattcaatcgccattgacaacaatccgcgaggcgaggtgcttagtttctcagccaagactcgagtcgacgccggccatggctttctgggaggattggggcaagggcgactgcgactgcggctggaagaagtgcctcatctggacggcggccatcgccggcgtgggcgggctcatcgtgctcctcgtcttcgccttcgccctcgtgttcccgcccaaggccaccgccgacgacgccgtgctgctccgcctcgcgctgtccccgggctcgccgccgtccaactccaccgtctcctacaacgccacggtgacgctgtcgctgcgtaacccgaacctgtaccgcggcatcagctacgaccccgtcgcggtggccttctccttcaacggcacgcgcttcgacgagtccgccaccgtgccggcgttctaccatcggccgaggaagacggcgacgttccacgtcacggtgggcggcgcgggcaagcccgtccccaagctcaccgcggcgggggtggcggcgttcagggcggagaacgcgacggggaggttcgaggtggaggtgaggctggacacggtgatgcagtacaaggcgaggaaggcgcggtgcccgctcgccgtcatctgcccgctgcagctgcagctcgtcgacccggacgtcgccgccaccgcgttccagaggaccaagtgcaccgtcctccgggccaagaagtccggatgctagctaacctacctacctgcaattttctcgagatttcagttttcttttgcttgttcttgcttgctggagattgttgccatgtatgattggaagattgcattttggattagaaattgtaagattggttattgtgtagtgtgtactgtgtactgctactcatctggagaaattcgggacaattggatatc

SEQ ID NO: 3499 - DNA, 1193 bp, Oryza sativa
  ref <308>: DATABASE ACCESSION NUMBER: AK061175
  ref <309>: DATABASE ENTRY DATE: 2001-12-06
gtcgtcgatggcgtcgtcgtcgccgccggtccggccatgggcggacctgcagcacgacctgctcgtgatgatcatgtcccgggtgggcctccccgatctcctctccggcggcgccacccgcgcctgctccgcatggcgggcctcggcgcgcgacccgctcgtgtggcgccgcgttgacctccgcgactgggccgtcctgacctcggcccggcgccggctcgctgcgggagacggtgaagcagcagccgccgggcgcgggcgtgtccctcttcaagccgctctctgcagtgtgctggagatcgtcgtgcggcgggcggccggtcggatggaggccttgctcctaccggagttcgccgatgaggagcacctcctcttcctcgctcagaggaatccaaatctgcactatttcagccttcctgccacatgtataacttatgatcagttccgtaaggcaattgacaaattacaatttcttaaaggcatggcagtggatgagggtcttattaatcacgatgttctcagccatgtacatcagtgttgtccagattttctggagttgaaggtgtttgctctttatgtcgacgaagagatggcttcaatcatttgcaactcccttccacgtctgaagaagcttgagataccaaactctgatatgtcttgtgctgcaataataaaattccttgattgcctagaggagcttgagtacttggacatatctggttatgagacttcggcaatatcaagtgctgtgctccaaaaagcttctcggctgaacatcttcatctggaactcaaaatttgagcttggggagttcacggactgttcgaattgtggtgaacattgcattaatcctcaagagccttgtaagtgcgtgatggagcacagagtcatggactggctggctggaccttcacaaccttcctgatgcagtaaactgtgacttaagttaaattgacaatcctacctgctcgtcaaatttcaacatttgtctgggttacttgtcaatcaaatggtgggtaaggtggtaccacgctttgatgtgccttatgtggcactttattttggagtttaatatgtatgtgatatcacgatttccagcattttattgtcaatgatgtcttgtgagaacgaagcaacgcacgctacttggtgcagtgttgagccttgttttacaataaattttaagtcgttgc

SEQ ID NO: 3500 - DNA, 1104 bp, Oryza sativa
  ref <308>: DATABASE ACCESSION NUMBER: AK061176
  ref <309>: DATABASE ENTRY DATE: 2001-12-06
ctggtattcgctattcatctctgaccctgcggcgcaccaaaacccccgtttccgtctcgcgttcttcgatcgcctccgcttaaaaagctcgccgcctccgaccgaatccactccccccccatcaatcccgcaaccctaccgaaaccggtaaaccactggaagaaagcgggttcgatcgatcgatcttgctagtgcggctatatctgctagtaggtgaattggtcgctcgacgttggtgatcatggtggagaagacgaagctgcagctgccgctggtgcacaacgagcggctgtgggcgcggccgtggcggtgggccaagacggtgttcttcctcgtctccatgctcgcctcgctgctgctcgtctgcgcgccgccgctgctcatcgtcgtcctcgacctgctactcccgcccgcgctcctctccaacttccaccgcgccgcgaaccaccccacctcgctcatcgaccaggccaggggcttccacttccggtcatcgctcgtcgacctccccgccgtctccgccgcgcgctccctcctcatcctctgcgcgtacacggcgtgcgggggaggcgcggcctacctgtgggtggccgtggcgtgcagcgtcggctcggtgtgctacgtcgtcgccaaggcggccgtggtgttcggcgcggcgcccgacagggccgtgctggggctgcagggcaagggccagctcgtcgccgtggaggccatgttcctcatgtcgctcgcgctcgccgccgcgcacatcgccatggcctaccgcgccagctgccgcgagcgacgccgcctgctcgtctacagaatcgacgtcgaagctgtaaggctaaagggaggccaaacgcccaagtccctgaagcagcagttcgccgtatgacactcgctgcctggccgttgcagtcggacacaaactgaatgccacggcatggcagggccctgcagggttcgttcctccggtctcaatttttggttcaagtagatgtgtacaacacgaccgttcactgtacctcaagtgaaaaatagtgtaaagaagatgtaaatacgaaacatttgtgcttcggcctcctgcagtcaatgcaaaaataggatgagccgttcggc

SEQ ID NO: 3501 - DNA, 1419 bp, Oryza sativa
  ref <308>: DATABASE ACCESSION NUMBER: AK061177
  ref <309>: DATABASE ENTRY DATE: 2001-12-06
gtgccaaacatatccgtccctttccctctcctcagcttcgcgtcaattccagagatcaaaaccctagccaacccctcctcctcctcctcttcctcgcgatccaccggcgatggcctccgccctcggggctcaggcgtctgtcgcggcgcccatcggtgcgggcggctacgggaggagttcctcgagcaagggtagcaatactgttaacttctgcaacaaatcatggattggaaccacattagcatgggaaagcaaggccctaaaatcaaggcatatgaacaagatcttttccatgtccgttcaacaagcaagcaaaagcaaagttgctgtaaaacctctggaattggataatgcgaaggagccaccccttaacttatacaaaccaaaggagccttacacagccacaattgtctcagtcgaaaggcttgtaggccctaaagctcctggtgaaacatgccatattgttattgatcatggtggcaatgttccatactgggaaggacaaagttatggtgtcattcctccaggagagaacccgaagaaacctggttccccaaatactgtccggctctattctattgcatctactaggtacggtgattcttttgatggaaagactgccagtttgtgtgttcgtcgtgctgtttattatgatcctgaaactggaaaagaagaccccacaaagaaaggtatctgcagtaatttcctatgcgactctaaaccaggcgacaaagttcagataacaggcccctcaggcaaaatcatgcttctacctgaggatgatccaaatgcaacccatatcatgattgctactggcactggtgttgctccctaccgtggctatctacgtcgtatgttcatggaggatgtcccaagtttcaagtttggtggtctggcttggctatttctaggtgttgctaacactgatagccttctgtatgatgaagagttcacaaactaccttcagcagtatccagacaatttcaggtatgataaagcactaagtagggaacagaagaataagaatggtggaaagatgtatgtgcaggacaagattgaagagtacagcgatgaaatttttaaacttttggatggcggtgcacatatccacttttgtggtttgaagggtatgatgccagggatccaggacacactcaagagagtagctgagcaaagaggtgagagttgggagcagaagctgtcgcagctcaaaaagaacaaacaatggcacgtggaggtttactaagttactaaaaagcacgggctgtgattttgtgattgttttgcagcgagttgaaacataaaacagtaaaaagcgatgattctcgttgcattgtaaaattgtcaatcttattcataagcttctgcttgacatggtgaataaaatgaagcatatgctaattttgacttagtattgtg

SEQ ID NO: 3502 - DNA, 927 bp, Oryza sativa
  ref <308>: DATABASE ACCESSION NUMBER: AK061178
  ref <309>: DATABASE ENTRY DATE: 2001-12-06
ctttttctctctcttttttttccctgtccgctttgcttcgcctgagccctgagccgccgcctcccgtactcccttgcgagctggggttttagcggcggcggcgagaggagaggaggaggaggagaggggaagatgagccggagcctggggatcccggtgaagctgctgcacgaggcggcggggcacgtggtgacggtggagctcaagaccggcgaggtgtaccgcggcgccatggtggagtgcgaggacaactggaactgccagctcgacaacatcaccttcaccgccaaggatggcaaggtgtcgcagctggagcacgtcttcatcagaggaagcagagtgagatttatgattataccggatatgctcaagaacgcacccatgttcaagcgcctggaagcaaggattaggggcaaaggatcagctattggagtcgggcgtggccgtgcggttgcaatgcgtgcccgggctgctgctggtcgtggtggtggtcctgttggacggggtggtgcacctccggtgaggagatagattgtctgtcatctattatctgcctgaggaagttgatgccttaatttgaaaacattgcttgagaattaaacagccagtgtgcatcttgtctgatcaatccgcttaaaggaggatgcatgcatgttggtggcgtcgatttcatgtatttttaatgttagatatggtaggttgagtatgatatttcaaaggtagaaacattgtgttcgttaacctgatttgaatgacaagaccagtttcccctgtcattgagcgaatttccttttgtatctaccagtttagtggccgtttggaacgcagtgattcttaaaattcatgtgctccaaaggcctagtggttatctggcaacttcctgaatcggatgcttcttataagttattataacgcactttgtatctt

SEQ ID NO: 3503 - DNA, 1204 bp, Oryza sativa
  ref <308>: DATABASE ACCESSION NUMBER: AK061179
  ref <309>: DATABASE ENTRY DATE: 2001-12-06
tcgatgtggatctagcccttggctttgctgctcactatgggaaactggataccatggggtgcttagttgaggagggtaatgcggttgcctttcttggccctttaatgcgggcagctgaacggggatgccttcaagttgttgaatggttcgtcaaccttggttgtcgggatatggagctttgcttagcccttactgctgcaacctctagtagccaggttgcagttgcagcctatcttctccctctagtcccaaagcatgttcttgcacccctcagcgtcgaaattctcaaggctgctggtgagaggagcaccggttccctgcatggtgtggacttccttctccgctcaaacttcctcaatgacccagctgccacatatgctgtagcagacaacattgcaaaatctgccgatgaggcagtggatgcaaagcttagatctttcatgctcgagcattggtcagaggcagctttttctgagggattcgcgtctgcgcaagagcacttcgttaacttcatgaggataatggaaaagggtgagtcgccgatctgcctgagggacctcccacttgagctggtgattgccatggcctacctaccactgtacagggaatgcgtggagtcaggtgggcggctattgccgcagaagctgagagggcagcttgttgaggcggctggtagactcgagggccggcaactcgacagggctagccaaggcacagagctcctggccatcttggagcaccacctcccgtgtttcatgatccagacttgaaaggtcagcttccacatgatctgcattggtcgctgcaagaagcaaagtaacaagggcaatgcaccatcttcagtgttttccagtgctgtcatgttcctgcttggggacaatcatctgaaacgatggcaccttgaggtctctgagagcatagtgactgaagaactctcctgctggcgctgttcggagagtatataattttggggagaaaatggtgtgtaccttcttgtcgagccaagtgttgagtagatcttattgggatcataatcttgatgaaaatgatataagcattgagcaaagtgttctccagttttttctgagtgctagccatgggcgtcatgtttttgttttggactaatgagtttttgaacatggactagtctcatctttcttggcttcacaaacataaaaatgaatggacagtaagtatatgcttt

SEQ ID NO: 3504 - DNA, 1215 bp, Oryza sativa
  ref <308>: DATABASE ACCESSION NUMBER: AK061180
  ref <309>: DATABASE ENTRY DATE: 2001-12-06
gtaacaagtgcctttccggactcgcacacaaagcacctcgcttacggtttttagcacccacacacactcccggccaacatctcaccacccccgagagagaaggccgcgcgccgcgcgctgctagtagtgctcgatggcgatggtccccgccgacgccgacgccgccgccaagccgccgccggacgtggagaagccggactacagctcccagaacggcgcccccaactcggccgccgccgccgccggggggggcggcggcggcgtggtggattcggtggtggcgcggtggcggcgggaggacatgctcgacaagagccccctcgcgctgcacgcggccgccgcggcgttcgccttcgtcgcgctcgtgctcgtcgcctccaaccagcacggggactggatggagttcgaccggtaccaggagtacaggtatctgctcgcgattgcggcactggcgttcgcctactcgctcgcgcaggcgctgcggcatgctctccggatgcgccgcggcgtcgaccccgtcccgacggcgtccgggcggctcctcgatttcgccagtgatcaggtagtcgcatacttgctgatgtctgctctctctgctgctacacccattacaaatcggatgagatctgcagtaatcaaccgcttcaccgacacgactgctgctgcaatcagcatggccttcttggcatttgtatccctcgccttgtcagcgatagtttctggatacaaactctccaaacaaacctacatgtgaagcatcgttctataggagtaaagcccatttcatgtgatccattcatcctggagatgcaagaacttatgatgacatgaaggcgtagtggtgattgctgttacctattggtagcttacacatgtgtacataagcttagatgcaacatgcctgaagctctgaagaccgcaatatttgtttaaaatttgtgctaccctttgactaccagaacaacatttctgcggtgatgagaaggtgagaactgcttgttctgaagatacagataagtgtacctatgtgagcatttattgtagcatcttttgtatgtgagactgttatcattttattgtagcgtctaagttcaatttgtgtactaaatttttagcgtgaggaatttatgggctagatttgtcatttctatattccttcttggtggttggtttgtgatcgatttatgttagtacagtcagatgtgtgtatttgtt

SEQ ID NO: 3505 - DNA, 1132 bp, Oryza sativa
  ref <308>: DATABASE ACCESSION NUMBER: AK061181
  ref <309>: DATABASE ENTRY DATE: 2001-12-06
atggcaacgccaccaccgccaccgccttcgcctcgtcgcctccgccgctagccgttacccccccaccaccggcgccccctcaccttctccccaatgtcgacggcggcgcccgcatccgctacggcggctgcgagcctcttcctccgccggagtctctcctcctcctcccctcgccacgtcttcctgcctcattgggttgcccccattgtcgtcgcgcgccccgctaggttatctgcggtgccggcgaagcgcggtggaggtggtgttgttgcggctgcatcggcggcggcggggagcgcgcagtttggcgccggggacagtgagaatccatacgagattttggggatcagtccacttgatgggttcgaccaggtgaagatggcctataagcggaggcgaaaggatgccgagagcaacaaagatgccgagcacctgttcaagttagagagggcatacgatatggtcatgatggagcagcttcagaaccggaagaatggggtggcatatggatcaatccaggtgtcaaaggacattaaatatgctgataatcaaccagtggttccttgggggcctagatactcaagatccactgggaaggacctgcgcattaatatggcaatatcagcaacatttatcatgtatatatctaccatgggccatgcagactggaagcccatgcagtttttgtgttttgcctatttctatcgaatacttgacaaactgaaggctaccgagtcagctagcactcctatatacaatgagtatggtgaggttgaaggtcgtggcatacacatggcaaaacgagtactccgtagtttgggtttggtacttggatcaatacttgctgtatccctgggctacactgggctagccaatttttctcagtttcttgggcagtatattccatctgttgtttataacttccaggaattgattgtgactacagcttcatctgttttgctttgcatattggcgtcgtactatcgatagcaacttgtgtaattgtgttggatcaccccttggcattgcaatcttgataaacctgtcttcatgagggccatggtcgataacttgagcctattctgctatggaatatgagagcccatcaactatataagtgcactgttcttgc

SEQ ID NO: 3506 - DNA, 928 bp, Oryza sativa
  ref <308>: DATABASE ACCESSION NUMBER: AK061182
  ref <309>: DATABASE ENTRY DATE: 2001-12-06
atcgatcaccggcgacgagagacactctcactgaacgaagctacctagcttaattacctagctactcgatcgatcatcagtctagatatggcggctttgaacggtaaggtggtggtggcggtgatggtggtggcgatggtggtggcggcgccgggggcgtcggcggcgatcacgtgcgggcaggtggggtcggcgatcgcgccgtgcatctcgtacgtgacggggaggggcggcctcacccagggatgctgcaacggcgtcaaggggctgaacaacgccgcccgcaccaccgccgaccgccaggccgcctgccggtgcctcaagaccctcgccggcaccatcaagtctctcaacctcggcgccgccgccggcatccccggcaagtgcggcgtcaacgtcggcttccccatcagcctctccactgactgcagcaaggtcagctagatcgattaatcctgcttggaccgaccgatcgatatatcgatcgatgctggctcgcagttgatcaactagccaaaataatagctacagtaaaaataacagctggggcatatcaatgcagcgctggtcatctctctctctatctctgtatactttatgttgcacgctccgtgcgtgcatgctatcttaattttcttgactctgtacaccgctctgtgtacgtgtaatcctacgttgatgaattgcatcttgtccagacttggacctagctaactacgtactccagcttggcagcttcttgccgaggcaatctgtagtaatttccttgttacattcccctgtcccctctactccctctatcccataaaaacaaacctaatatactaaatatgacacatatattctagtactacaaatctagacagatgtatatttagatttgttatactagaatatgtcacatccagtcttatgttcgtttttttgg

SEQ ID NO: 3507 - DNA, 1225 bp, Oryza sativa
  ref <308>: DATABASE ACCESSION NUMBER: AK061183
  ref <309>: DATABASE ENTRY DATE: 2001-12-06
gcaccagatcatcattggcaggcatacgcaacgcaacagcagccgcgatggccgcggcgccgggcgaggttagcggcggccaaggcaacggcggcgtcaccgccatcgccgagctcaccatctcctcgctgccgctggagacgcgatgcgcgccgttccccctgcgtcagcacggcggcttctggctgccggagacgttcctcccggggctcgaggccgcgcgcgcgcgcttcgagccgcggccgtccgacgtcctcctcgcgagcttccccaagtccggcaccacctggctcaaggcgctcgccttcgcgacgctcaaccgggccgcctacccgccctccggcgagggccacccgctccgccgtcgtggcccgcacgactgcgtgcagttcctcgagtcggcgcttgtggtgtccgacgacatgtttgcttcactcccttcgccgcgtttactgtctacccacctgccttactccctcctgcctgagggcgtcaaggcggatagctccggctgtcgtatcgtctacatttgcagggatcccaaagacgttcttgtctcctggtggctgtttaccaagaaggccttgggcactcaagatggacctaccaacggaggcaacaagccaatgctttccaacggaccatactggcgccacgtgctggagtattgggcagagagcaagaggaggccacagaaggttctcttcctccgctacgaggagatgacacgagagacgacgagcaacgtgaggaagctggccgagttcatgggctgcccgttctccggcgaggaggaggcagacggcgtgccggacgccatcgtcggcctctgcagcttcgaccatctcaggagcttggaggtaaacaggaatggtgccaatgatttcaacatcaaaaacgactcgttctaccgaaagggggtggctggagactgggccaattatttgtcacctgagatggcggcacagctggatctggtcattgacgacgagttgcggtcctctgggtttagctttgccaccggtggacggtaactcagcatgagccgccacaggtatagcccatcgaccggccttgtggtcggaccacggtgatcgatgcatgctgcgcaagaagatccatcgcagttacctgctactactgctagtagtacatacacccaaagcattgtttggtcaaggatataataagagcgtaggttgtattgaaatctcaaactggggat

SEQ ID NO: 3508 - DNA, 1759 bp, Oryza sativa
  ref <308>: DATABASE ACCESSION NUMBER: AK104438
  ref <309>: DATABASE ENTRY DATE: 2002-08-28
gatgcggggaggctgagctcgcaatccccaaagctcgcggagatggacgccaagctgctcctcctccccttcccctcgccgccggccactctccaccaccacccgccgccccccaaatccctcttcctcggcgcctccctcccgctcctccacccgccgccgccgctgcggctgctgcggcccggcgccccgcggcggctggcggtggtggcgcaggccgccgtgaagcggcgcaaggagatcccgttcgacaacgtcatccagcgcgacaagaagctcaagctggtgctcaagctccgcaacatcctcgtctccaacccggaccgcgtcatgagcctccgcgacctcggccgcttccgccgcgacctcggcctcacccgcaagcgccgcctcatcgcgctcctcaagcggttcccgggtgtcttcgaggtcgtcgaggagggcgtctactcgctcaggttccgccttaccccggccgccgagcgcctctacctcgacgagctccacctcaagaatgagtccgagggcctagccgtcaccaagctccgcaagctcctcatgatgtcgcaggacaagcgcatcctcattgagaagattgcgcacctcaagaacgatcttggactcccgccggagttccgcgacactatctgcctcaggtacccacagtacttccgcgtcgtccagatggaccgagggccagggctggagctcactcattgggaccctgaattggcggtgtcggcagcggaggttgccgaggaggagaatcgagcgagggaagaacaagagaggaatctgatcattgaccggccactcaagtttaatcgggtgaagctaccacaggggctgaaattatcaagaggggaggcgcgcagggttgcgcaattcaaggaaatgccatacatttcgccgtactctgacttctcgcatctgcgatccgggtcggctgagaaggagaagcatgcttgcggcgtagttcatgagattttgagcctgacacttgagaagcgcacgctggtggatcatctgacacacttccgggaggaattccggttctcgcaatctctgcgtggtatgctaattcgccacccagacatgttttacgtgtcgcttaagggggacagggactcggtcttcctccgtgaggcatacaagaactcccagttggtcgagaagagcaaactcgtgctgcttaaggagaagatgagggctcttgttgcagtcccacgcttccctagaaggggtgtgccggcaactagtgaggaggctgatagaaccaatggagctgcgcaaatgctgagtgaaggaagcgatgtagaagatgatgaagacgagggattgtcggatatggaagacttaattagtgagatttctggtggcaaatctgacacagactaccactggggagatggctgggttggcgagaatgatgactcgccaccagacttcgaagacgatgatggctcaagtcttaaagaagtcaaggtgactatgaagaaaactgctaattctgccaatggcaaggcacatgttcctgtttttcctgatggcagaccaagggaacgatggtaaaatgatctattttagattgtttggtagagtgtgtaatctttgttgttagttatttcatcatatctagaaagtcgcaaaaccctcagtcctttgaggtgctgcttgaattttgttaccgagcacatgaatagcatatcagaatttgaacagttcacatgaatcatcactaatatagtgaacgaatttg

SEQ ID NO: 3509 - DNA, 1061 bp, Oryza sativa
  ref <308>: DATABASE ACCESSION NUMBER: AK061184
  ref <309>: DATABASE ENTRY DATE: 2001-12-06
atatgcccgaccatcatgacttccgcacagaccacttcttctaccattagccgtacatatcacacagataccgattcgccatatgcgctgccaaacgaccatatcgaagtctcgcggttacatgaacagcatgaagctgtgcttgacctcatgcatggccgtccagtgcatgctccgctgcagaatccaaggaaaattcttgacattggctgcggcgtcaacgctgacatgacaatactgctctcgaaaatgtatccctccgccattgtatacgccgtcgatatttcacctattgctgtttgtttgccatccaatgtcgtcttcatccacggcaacattaccaccatggtagcacagaaagaccctcgcctgcctgtgggcgagttcgattatgtttttagtcgctttctgatcggagccgtaaagaactggtcggactggattcacaacactatcgggcccttactagcgccgggaggttggatggagcttcatgattctcctcatttcgaatggtataatcgtaagactggcgagcacgtctcacgagattggaagtggctccagatctaccagcaacatgctgagaagcatggacttgggggttatgtagggcggcaattgaaaagtgagttgcccgacatcttgcaccgcgcccctactggcttggaggatatccagagccgatggtaccaaaccccatgggcccctgtgccggggcgtcctgagacggagaagttcgttacatacgccctgggcacgttaaaggatacatttagcgcggctgttgacaagattgtgcctgcggagcagcttgaggaagtcattaaaggcatacaagagacgatgggaagacgaatggaggatgtatacatgcctatcttagtggcttgggcgaagcgtatagattaactctgcactacacgatgttaacttctacaaccctctaggtaaatctctaacgaccctattacagacttgctattagttaggtaacctagtttacactaagtaaactaactaatgttaactatcttaaggctatatttcgtagctattat

SEQ ID NO: 3510 - DNA, 945 bp, Oryza sativa
  ref <308>: DATABASE ACCESSION NUMBER: AK061185
  ref <309>: DATABASE ENTRY DATE: 2001-12-06
aagggaatctggaagccccaagagatccccaaccctgagtacttcgagcttgacaagcctgactctgatccgattgccgctattgggattgagatctggacgatgcaagatggcatcctgtttgacaacattttgatcgctgatgatgagaaggttgccacttctatcctggagaagtcttggaagcccaagtacgaagtagagaaggagaaggagaaggctgaggaggcagcagcggcagcaggtgatggtctttctgagttccagaagaagatctttgacgttctgtacaaactcgctgacattccattcttggaaccctacaagactaagatcattgatgtaattgagaagggagagaagcagcccaacatcaccattggaattctggtctccatcgttgtcgtctttgtgactgtgctcttcaggatcctgttcggcggcaagaagccagcggctcctgtgaagcccgtagccgaggtcaaaaaaccaaagtctaccgagtccgaagcagctggaagcagcggtggcaaggaggacgagaaggaagaggaagagaaggatggagctgctgccccacgccggaggtcccgaagggagacatgagacacaacataagcctttgattttgacgtcttatcgcggccattttggcggctgcttttttcctttttcgagaacttgggcttttatgttttttgagtgtataataggagattcatgtcgcctatgctccctgcagatgatgatttggtacccctgcttaaatggttagaacttcacggacagtagaagttagtcatgttgggtttatttgtgtgctgtgcctgacatataatcactttcttgatcacctagtgattattttctcgtagatagttgaaacatcaagagtctctttcagaagtgtgaggttcagtgcaagctagttattatctttgctgc

SEQ ID NO: 3511 - DNA, 1002 bp, Oryza sativa
  ref <308>: DATABASE ACCESSION NUMBER: AK061186
  ref <309>: DATABASE ENTRY DATE: 2001-12-06
ctcttggactctgccggcgccggcgttggtagggtagccatggcggaggaggccaccctgagccacccgtcgcggtacgtgaagctgagcagggagcacgacgcccccgcccccgccgaggacatccgccccggcgagctcaaccagccagtccacgtcccgcagctcgagggcaggaggtgcagcgagtgcggccaggtcctgccggaatcctacgagccccccgccgacgagccctggaccaccgggatcttcgcctgcaccgacgatccacaaacctgccgaactgggttgttctgtccttgtgttctttttggacgcaatattgaggccctcagagaggatatcccttggacaacgccttgtgtttgccatgctgtctttgttgaaggagggattgcgcttgcaattctcaccgcaatatttcatggtgttgatcccagaacgtctttcctgattggagaaggtttggtgttcagctggtggttgtgtggtacttatacgggcatctttcgccaagaacttcagaggaaataccatctcaagaattctccatgtgacccttgcatggtccattgctgcttgcactggtgcgcgaattgtcaggagcaccgtgaaaggacggggcggcttgcagagaacagcgcggtgccaatgaccgttgtgaatccacctgcagtgcaagagatgagcatggcagaaagccgtggtcctgtttcccccggtatggagaacggagcaccatcaaactcaaagggatagcaagaggaatgaatcgatgtgacgaattcatggacgcttggcgacgatgttcttgtgtcatctggaactggaatcatcataaaacacacagggtgatactctttctttttttttgtactagtattaaaacttcaaatataattaactggagagcaggggctgcctgagtacattgctacgtttctgcatccaccggccgtgtgttgtttatgccatcatgtaaaattcattcttgatttt

SEQ ID NO: 3512 - DNA, 1199 bp, Oryza sativa
  ref <308>: DATABASE ACCESSION NUMBER: AK061187
  ref <309>: DATABASE ENTRY DATE: 2001-12-06
aagccagccacacacatctgctcacatctctagctactactccagtagctggcaagaaggtgaagtgagagtgtgagaagtaattggagctagcatccatggcgtcaccaagcagaagatcgcaccattgctgcctggtactagttgctctctcgttggctgcaatgttgctcccaatggccatggctactacgatatcgatgtctcccattggcaccttctgctggaatccgagctacaacgagatgagcagcggcgaggccatcgccaggcggcgcagcatcaactccgtcgtctccgacctcgccgccaaggcgcgcgccggcggcggattcgccacctcctccgccggcaggggcatcgacgccttctacggcctcgcgcagtgccgcggcgacgtctccggcggcgactgcgacgcctgcctcgcccaagccgccaaacagatggtcaccaactgcaactatacattagactccagaatatggtatgagtactgcttcatgcggtacgttgacttcaacttctttggggagatggacacgaggacagacgcaagtgtgaccctgaggcaatggccggatatggacaaccccatggcgttccagaaggcagtaggaaaggcgacggggaaagcggtagcgcatgctgtcacgatgggtagcggtgggctgggcagagcgaaggagcagtgcacatcattcgtgaacgtctatgcgttggcacaatgcacgcgggatctggcaccaccactgtgcgcacaatgcctgtcaacgacggtttccaagtttgccgaggcctgcggcagtgggcaggggtgccagattgactatagtagctgttgggtgcgctacgagatctacccgttctattttccactcgaggccaacaggcaggcccccaccgacttgacaaagtacaccaaggtcacgatgcattgaataaatctcgcatatatataggctgcgtgtatagtacaatacgatattgcatacatgcaagcatacacacgttgtaacgcatagcagtatagttatgttatgcgtacctgagatctgtcccggaacaagtatttctaatgatgttttatttcaataataaatcatgtgttgtaggctatatatttataagctgtattgattcttaattagtatgctgctagtttggaataaataaagatgtgtactgaggtatgatgt

SEQ ID NO: 3513 - DNA, 1206 bp, Oryza sativa
  ref <308>: DATABASE ACCESSION NUMBER: AK061188
  ref <309>: DATABASE ENTRY DATE: 2001-12-06
acattccgctggtccaggcagagagaccaatggcgtcttgctgggagcagctgcagggcctctgcgccgccggccacttgcgtcgccgctgccgcggtagaagcttggtcctgctgcagcagctgcagctgctgggggttttggtggtggtggtggccggggttgcaccaggcatcagtgaggcacaggtgaggagccggttcaaggcgatcttcatgttcggcgactcgatcgtggatccagggaacaacaacgggcaactaacggaggcgagagccgacttcccgccgtacgggcaggatttccccggcggggtcgccaccggcagattctccaacggcaaggtccccggtgacttgatagcttctaagttgggcattaaagagctattgccagcttacaaagatcaggaccttgaactaaatgacctacttactggtgtggcctttgcctcaggaggcagtggatatgatcccctcacttctatatcgactgccatatcgagttcaggacaactcaatttattcagtgactacaagcagaagcttacatctttgatcggagaggaggcaatgacacgtattctctcagaagcagttttctttactgtcatgggagcaaatgacttgctcaacaattattttacgcttcctgtgaggcggcatcaatatgacattcctggctacgtggactttgttgtctctaacgcagttaactttactctgacaatgaatgagatgggtgctaagatgattgggttcgttggtgttccaccacttggttgttgtccctcacagagaactggtccatcaagagaatgcgaaccattacgaaatcaagcatcagaattatttaatactagaatgaagcaggaaatcgatcgactaaatgtcgaacataatattgatggtttaagggttgtttattttgacatatactacaatttgctcgacctgatccacaatcctggttattatggtttcaaggatacatctgatggatgctgcggcaacacagtgctaaatgctgctatattcattaaatatcacagtgcatgtccaaatgtttatgattatattttctgggatagcttccatcctaccgaaaaggcatacgacatagtggttgataagcttatccaggaaaataagcagtatctgatgtaaatgaaatatattatcttatatattacatgtgcttaaacgg

SEQ ID NO: 3514 - DNA, 1129 bp, Oryza sativa
  ref <308>: DATABASE ACCESSION NUMBER: AK061189
  ref <309>: DATABASE ENTRY DATE: 2001-12-06
aaaacccatttgcatcatgcgtcctcacttggcctgcctccctccacgctcctccgtctcctacccctttctcgccttccccaactttatcctcgctcactttccatctcacacgacggccacactgacgagtagtagacggtgaacagcctacagggaggaggcatgggggtagccgtgacaatggcgagctacgccgccgtcctgcgcccgcacgcctcgtcgacgaggactccgcgcgggcctcgtcgtcccgcgggcgcggtgccacctacgccgcgccgggcagcgctgcgagctactacgcggtctcctccggctgtcgctgccactccacctccgcgggagcgggtgcagcagcagcagcagccgggtgacggccagacgacgacgcggctctactcgctggcgccgtgcccgctcctgctggcggcgctgctgccgggggccgagccggtgcgcgccgtgttcgagccgttcgtcgagctggtcaagacgtggggcctccccggctggctcgtgcactggggccaccccggcaacatggccgtggtgctctttgcaatgggtggctacggaacatacctgggcttcaggatcaagctatcggatgaccctgaagagaaggccaaggccaaggacctccacccgaagctcctcgccggcatgttcttcttcttcgcagctggcgccactggtggagtcaccgctcttctcacgtcagacaaaccaatctttgagagtccgcatgctgtgaccggcatcatcggccttgcactccttaccattcagtctatcctgccgacattgttcgagggtaatccttcgctgagaaatgcacatggactcctcggcagcggcatcatgaccctgtttctaatccacgcagccttcgggctacagctcgggctcagcttctaatcctcagccacaacatctggggtttgcttctctgtgattagctctcagaggcatccctgttacacacatcgaagagaaatgaaacacagagagagttttctctctcttgttttccctttgtttcttttcaccctgcgaatgttgacaataatgtagacctggtgttggattgtgtattgacgacaacgaattccatcgtgttgcgctg

SEQ ID NO: 3515 - DNA, 1037 bp, Oryza sativa
  ref <308>: DATABASE ACCESSION NUMBER: AK061190
  ref <309>: DATABASE ENTRY DATE: 2001-12-06
aagctatccattcgccgccgccaccatccactcccccaccgtcctccgtcgccttctctctgaatcttggcggcggcggcgaccgagtgcgctcgagccggcggcggcggctcgcatccccattccgtcctccgccccctcctctctgaatctcggcggtggcggtgtccgcgcgcgctagagccggcgccggcgccggcggctcgcatccccactcgcattccgtccttcgtccccctcctctttgaatctcggcggcgaccacgcatgctcaagccgccggcggcagcagcgaccgcgcgcagtcgaaccggtggtggcggcggcgaccgtgcgcgcactagctggcggcggtggctagcatcccccctcggtactccgttctaggatctgcaggtttgtccacggcgacgacggcgccgctctggcgtgcgctgctatggacgcggccaccgccaaacagcagcagtgccaggatttcctcctccgttccaagagccggtgcctcggccctgctgcttcccggcttaccatccgcccccaccaagtgccttagcctcttgctgcagcaacagcacaacgacaaccaaagagtgaaatgtggggatggcaaagtcaggaatgtgatctgcagaaagatttgcttactgaagatgctgcagatccatctagctgtttgtggagtgaagcaaatcagaatgccagtgatgcttggaccatgttcgattagcaaactccatctagctgcttgtacatgtgtttttttttaggttgctgggctcaaacatatgtgaactttgatggagaagtggccaaaatgctttggtggctgctgggtattgtcatgtgcttttgaacaggttttaattatgctgtatgagatatgctcaacaaacattatgttgtatgagatgtgaaggttgtaatgtgtttttagaatatttatgtgctgatctgatgatgatgatgagagaatgtaaattgatgatcggtaattaattttgtttaaattatggatgaaatatttgcattttgct

SEQ ID NO: 3516 - DNA, 1346 bp, Oryza sativa
  ref <308>: DATABASE ACCESSION NUMBER: AK061191
  ref <309>: DATABASE ENTRY DATE: 2001-12-06
atgcaaccatcaaaattggaaaaaaaaaattcagttcaccggccgactagctagctactacagtagtggctatacatggagcttcttcttgtcctgctgctcgccgtcacctgctctccggcgatggccgacgtcgtctcctacagtttcgccgccgtcggaggcggcagggcggcgtcgaacggccttgtggtggccaccaactcgtccatcctgtctcccgccacgttcctcttcgacgcccagctgttccccgtcttcaacgagtccgacggcttcctcctcctcgccgacacgctccagctctggcgcgccgccgccgccgggatgccgccggccctcgacgcgtcattcaacacgaccttcaccttcctctcctccgccgtcgccttcgtcgtcctcctcgacagcttcccgccgctggcgagccaccgcggcgtttcggcaccgaccgacggcggcgccatgacgacgaccaaccccaacgccaccagcagcctcgccaccgtcgaggtcggcacggtgaactcgtacggccggcgatcccccaacgtcggcctcaacgtcaccgtgtccgcgaaccgcacggcggcgccgcatggcctcaccgtgtggatcgagtacagcgccgtcgagcaccacctgtgggtgtacgtcgccgccgccggcgaggcaaggccggccaaatccgtcatcgacctgccgctcaacctccccggccggcggatcacacagagagcgttcgtcggcttcttcgccggcacggtcagggacgccgtcctcggcatccgtgactggaacctcacggtggacaggttcccgggcgacgggcggcggcgaggagaagacgttgatgaacaggtgaagaagggcacgccgccgtcgcggtggctggtggcgctgctcgccgtgctcggcgccgttgcggcggtggtgaccgtggcgtcggtggtggtgtgctacatggtgtcacggagacgggcgctggagacggagcgaattaggcaatacaccaagtactattttccggcaggagggaggcccggaagcaactgaatgtgaataaaatgaaattatcgtacgtaggagtattaatttatattacaagtcgctttgatacttctttttcttgtcaaatatttctaagtttgctcaagtttataaaaaattacactaactttttaacacaaaacaaatatattatcaaaatatattaaatattagttttaataaaaataatttggtgttgtagatgttactattttttctatatataaacttagttaaacctaaaatagtttaactaggaaaaaaatcaaaccttatactccctccgtagaaaagag

SEQ ID NO: 3517 - DNA, 1294 bp, Oryza sativa
  ref <308>: DATABASE ACCESSION NUMBER: AK061192
  ref <309>: DATABASE ENTRY DATE: 2001-12-06
attataaaattcttgcaccgagctgcggatctcacactggtaccatcagttgctatcggcaaggatcttcaagctgcccgtgttacagcagccaataagatacgcctttggaacaagggtgttgattcagaaagcttccatccccgtttccgtaatgacgaaatgcgtgcaaggctaactaacggtgaaccagaaaaaccgcttatactgtatgttggtcgtttgggagttgagaaaagcttagactttcttaagagggtcatggaccgacttccaggatcaagaatcgcatttgttggtgatgggccattcagggctgaactccaactgatgttcacgggaatgcctgcagtgttcactggtacattacaaggagaagagctatcgcaggcctatgccagtggggatgtgtttgtgatgccttctgagtcagaaacgcttggttttgttgtgttggaggctatgtcatcaggagttcccgtagttgcagctcgtgctggaggaatacctgatattataccagaggatcaggagggtaagaccagctttctgtacacaccaggagatgttgatgactgtgttagcaagatcgaacgtctcttgacatgcgaagagttgagagagacaatgcggaaggctgccagaaaggagatggagaagtttgattggagagcagctacgaggaaaattcggaacgagcagtacagtgccgcgatttggttctggcgcaagaagagggcacagctattgagacccatccagtgggtgtcccggaggctgttcaggcctacacctgcaccttccaccatgaatcaatcataaattcatcatattcatgaatcatgatgctcgattctgtcagttggaagcaggtcgatcaaattttagtcagatatataaacttgttaatgtgcccctgtgatgtgagaatatgtaagctcaagcatatcggatgaaggaaggtgaggcgaagttcattgaacataatgtgtaaggcaccgttcaatatgctgtctttgcttgccttcaacacaagagtgttcctacaatactgacgaaatatcaacctgtgaatttgtgaatgataattatatgaaaagcaaagcataggtttttaggtggcgtttgtgcctccagccatatattgtaaatcgcagtggtattccaccttgcttgcttcattgttgattgttgtatttagggattgtaaacaccctctagtggatgtttgaatgggaggaactttgtaattgttaaattctacaggatattttttcatcactatagaatacac

SEQ ID NO: 3518 - DNA, 926 bp, Oryza sativa
  ref <308>: DATABASE ACCESSION NUMBER: AK061193
  ref <309>: DATABASE ENTRY DATE: 2001-12-06
gaagtcgccccctcgcctccatctctctcatctgccctcctcgactcgactcgactcccctccgccgccgccgccgccatcttcctcctccaccagaccaccaccaccaccaacaacaactcgtcgtcgcgtctgcctagctagggtttcccttctctacccaaccctaggaggaagatgagccgcagccttggtatcccagtgaagctgctgcacgaggcggcggggcacgtggtgaccgtggagctcaagaccggcgaggtgtaccgcggctccatggtcgagtgcgaggacaactggaactgccagctcgacaacatcaccttcaccgccaaggacggcaaggtctcccagctggagcacgtcttcatcagaggaagcagggtcaggttcatgatcatacccgacatgctcaagaacgcccccatgttcaagcgcctcgaggctaggattaggggtaaaggctcagctattggtgttggccgtggccgtgccgttgctatgcgtgctcgggctgctgctggtcgtggtggtggtccagttggacggggtggtgcacctcctgtgaggcggtagatttacgggcagctcattgtatgctgttatgatatggaggaagtccagggagtctttgtgttcatcatccaaaacgttggttcagcagccagagtgcatgtgagctaagcttatgtacctccatccagtttagtttgcctgtgtgcagaatggatggatgcatgccggtggtgttaactcgtaagcatgatgtattgcagcgaactttagtagctcggctcaagttttcataggtggggcagcgttttcatgtatgtagactagtgactcttgacttgtttcgttattaatccactgtaccctgctgcccgttgatatgaatgaatattgctgctactgtgctattgctg

SEQ ID NO: 3519 - DNA, 1187 bp, Oryza sativa
  ref <308>: DATABASE ACCESSION NUMBER: AK061194
  ref <309>: DATABASE ENTRY DATE: 2001-12-06
agccagccactgttcccatgccatcctcccttgctctccctgccgctgccttttccccttcctcccctgctatggtggctcgtggcttgagcctcgccgcgccgcaactgcccgcccaccgatgcctctcgctggatctggcgagcttgtcaggagaagggagaaggagcttgggggaacggcggcggcggcagccgaaagcaggcgcggtggcatgagctagggctggaaatcgatgggacgccactaatctggtcccagcgcaacaccccattcacgagattagagcttgaggttgacggcgaggtggttgatcccggctcaggaaattgggcggtccggacggatgtgcagaggtaattctccaaagtaaacctcccctcatgtcccagccacttgattgttcttgctgccatcctcaagagcaatggatctagcgagtggatctgcctggaacttgttcgttcttgagtgcattctgggagcactgcatctagcaagtggatctttgcttgtatccatttttgctttgacgtcactctgctggtatttggtgaaaaaaaaagacaggtatactttcttccctttcccccacctctaatggtttgtgcctgcaatggagcaatcgatatggtcaaaaatgttttacccactgcaatgatccttcagctgataacactcggtttcagcatggtcaggatggatcgatttgttgcagaacaacagatccatcaccaagcagtccattgccatctccaccatgggttccttcattcttagtagtccgttgccatcgtcatcttgggctccttaattcttagtgcatgtagattgcagacccgttggtgcaagacatgctctgcaatgcagaaaacttcgcacctctggctcaagttagtatgggaaaaggtggtggctgctggactatcaattgtctggcttactatatttcttgcaattctgtatacacacccagtgataactttaggttgcacgagttgaaattatctagcaatcaaacttagtggctttttacgatttactgtcaagtgatagagactcccattacctgaccttgtactgaatatatatgtctcttcagagctgcaaatagggatagcatttttttactagatgttaatcatagatttgcatggtatgcaaattgcgcttaacatcttctcttg

SEQ ID NO: 3520 - DNA, 1299 bp, Oryza sativa
  ref <308>: DATABASE ACCESSION NUMBER: AK104439
  ref <309>: DATABASE ENTRY DATE: 2002-08-28
atagccatttcgtcgaacaccttcccgagccgactgccgccgccgccgccatgctcctcgcgaagccccacctctcctcctcctctttcctcccatccacgcgggtgtctagccccgctccgggtcccaaccacgcaaagcccatcgccgcctctcccgcccctcgacgctgcctccgtctcgccgtcacatccgccgcggcgccggctgcttcgtcggcggaggcggcggcggcgctgagccgcgtggatgtgctctcagaggcgctccccttcatccagcgcttcaaggggaagaccgtggtggtgaagtacggcggcgcggcgatgaagtcgccggagctccaggcttcagtgatccgcgacctggtcctcctctcgtgcgtcggcctccaccccgtgctcgtccacggcggcggccccgagatcaactcctggctgctccgcgtcggcgtcgagccgcagttccggaacggcctccgcgtcactgacgcgctcaccatggaggtcgtcgagatggtgctcgtcggcaaggtcaacaagcacctcgtctccctcatcaacctcgcgggcggaaccgccgtaggtctctgtggcaaggacgctcgcctcctcaccgcgcgcccctccccgaacgcagcggccctcggcttcgtcggcgaggtctcgcgcgtggacgccaccgtcctccacccaatcatcgcctccggtcacatcccggtcatcgccactgtggccgccgacgagaccgggcaggcctacaacatcaacgctgacacggcggccggcgagatcgccgccgcggtcggcgcggagaagctgttgctgctcacagatgtgtctggaattctggccgaccgtaatgaccccgggagtctggtgaaagagatcgacattgctggggtgcggcagatggtggccgacgggcaggtagctggtgggatgataccgaaggtggaatgctgcgtgcgtgccctcgcacagggcgtgcacactgcaagcatcatcgatgggcgtgtcccgcactcgttgctgctcgagattctcacagatgagggcactggcactatgatcactggctgaggtgattcatcccgtcgtggtattctccggtgcctctcttctcatactgtaatgtaatttgcatttgatatgcctcatgattgcaataagaattgtattcctcacacctgtagctggttgagataggttctgccatccgtttgttctgtgactttgttcgcaatggtgacatttttgtagtttgtgctataaatcgaatcaattcaggttaaactgt

SEQ ID NO: 3521 - DNA, 1032 bp, Oryza sativa
  ref <308>: DATABASE ACCESSION NUMBER: AK061195
  ref <309>: DATABASE ENTRY DATE: 2001-12-06
atgtgcatatgcaaacctctcctacctcacactccaccctagctagcccactacacctcctacaccctcaccatccaatagcgcagtgacagtgccaatggcctctcacaccaccctcatcctcctcctccctctcctcgccgccgcggccgtcgccgccgcggacgtcgcccctgcgccggcgccacctgcggcgcagacgatcaacctcacgggcatcctcgagaagggcgggcagtacaacacgctgctccgcctcctcaacgccacccgcgtcggcgagcagctgggcagccagctgaagaccacctacgacggcctcaccttcttcgcgccgacggacgccgccttcgccgcgctgaggccgggcacgctcaacggcctgagcgaccaggagcaggtgcagctggtgctctaccacgtcctcccgcgctactacaccctcgccacgttccagacggccagcaacccgctgcgcacgcaggccacgggccccgccggcgtgtacaccgtcaacgtcaccaccaccacggggcagagcctcgtcaacgtgtccaccggcgtcgccgccgtccccctcggcaccacgctctccgccgacttcccgctcgccgtctactccgtcgacggcgtgctcctgccggagcagatgttcgggaaggccaaggctcccgcgccggccgccgcgcccgcgtccgccgccgggaagggcgccaataaggagcacaagaagggcggcgccatgcccaagaatgaggtcgcggccaccgcgccgacggccggagctggaggagaagattcagatgacagcgccaccaccaatgcggtggccgttgcaggcgcggccggtgtggtgtggactgctgctctcgtggggattgccaatcttgtcatcgcgtagaaagtgtgtgcttgtctttttctccttcgccgttttctttcgttttcgtcgttgcatatgtttcattgcacgtgtcctattttgtatgtatgcaagagtatttatatatgttgatgatgattcactcagtg

SEQ ID NO: 3522 - DNA, 1114 bp, Oryza sativa
  ref <308>: DATABASE ACCESSION NUMBER: AK061196
  ref <309>: DATABASE ENTRY DATE: 2001-12-06
gtgtcgcttgctctttctgactcagcgctcgccccctccttcccccatcttgcggcgagcagtcgccccgactcctccaccaaacccaaatcgccaccgccagggacactgacgcctgcctcccccaccgaactgcacctccgggacactgacgcccgcctcgccgatcccctcacatcctctgccgctcccctcgcccccttccgcgtcgtctgcaccgcccacgatctccgcctcgacgaccggttccacaacgccattcctcacgatcccctcccgtcctcctcgattggcgtcgcccccgatctctcctcgaccgcctccacgcaaccaccaccaccaatctccgccgagcactgttctccaccggatccctctccaccgagccgccgtcgggtcgtcggcaatccctcgacctcctccgggctgccaccgagtcgggatccgggaacgcggccggatcagcgtcaaccgcctggccgctcctccactccgccaccaccgagggacatctccatctacaaaagccgtcctctcttcccagctgacccagatgatcgccagctctatcctgtcggcttcgtcttactggatgtcatcgaccctaccacctactgcctctaagcctgtcagttccatcaaggttttctttttctcctcttcctattctctatttgtgtgatggaataggacgaagaggttcagtaaaggggtcattttctatgcccgcgctgtcgagagctgtgacgcttgaagtggcggggtgatgcttgttgcttcttgaactctcgctatgtgtgcaaaaagaggaacagtctgtgctcttcctgcatcataggagacggcgcaaggtgattgtggaggcatggtggacaatggaagcattgagacgtgctagaaggcgtgatatgcaaaattgttgtgtatcatgcatggatgtttcaggaacattgggttaattgtgttgagtatatagtattgagatactgattaactaaaattgtctaggggtgtttatggttatgatcatagtcatatttactgattgatggtaatgttttattctctgaatttttctatggagtacatcaaaatagatggttttggattgcac

SEQ ID NO: 3523 - DNA, 1074 bp, Oryza sativa
  ref <308>: DATABASE ACCESSION NUMBER: AK104440
  ref <309>: DATABASE ENTRY DATE: 2002-08-28
gtcgctctgtctgacagtgtgggccctccccgagatgcaggcgtggttctccggcacggggccctccgcctcgtcggcgtcgtcgtcgtcgtcgccgccgcagccgtcgctgctcgcggaatggaactcctacgccgccgcgcgctccgcggaggaggaggaggacggcggcgggggaggcttcgggatcgacatcgaggccgccgtccgctccgccaacgaccgcgtctccggcaccttcggcgtggtatctaaaggtgttctagggttgccaggcagcttcaagtccacaacaagcagtgttccatcgagcaaatcacttgtgtattttggcctttttcttgctagtggaatattcctagttttcattgcgttcacgatatttctgccagtcatggtaatcatgcctcaaaagtttgccatctgtttcacggcgggatgcgccttcataattggatcattctttgcgctaaaagggccgaagaatcagctctatcatatgatttccaaagagaggttacctttcaccatgggatttgtgggcagcatggctgctaccatctacgtgtcaatggtgctccatagctacatactttcagttttcttctcttgtcttcaggtacttgcgctagcatattatgctatttcatacttccccgggggatctgctggaatgaagtttctatcatctgcacttgtgtcctctgtgctgagatgctttgggcgatgagctcacccgttagttgctctcacccatccatttggcgcgcattcatcgtaaccttgtgtagttccattacagttttgtctttttgcttttgctatagaggtagtgcctgtcaagatgaccctggtgctggtgtccattgaaatatgtgtgtataccactgtcctgtattgggagctctgttccttggattgaattatgaaaatcaggaaaatggaaatctatcgagattcgagagtcaatagtttgtgaaatttggaacacttgcactgtaacttaccttcaatcttgcattgggggatttcccttttttgactttaatctgcccatctgccttactactcttc

SEQ ID NO: 3524 - DNA, 1022 bp, Oryza sativa
  ref <308>: DATABASE ACCESSION NUMBER: AK061197
  ref <309>: DATABASE ENTRY DATE: 2001-12-06
gaagctcgtgttccagccggcggaggaggggtacgccggcgggtactatgtgctcgaggaaggcgctgtggacgatgtgcagggcatcttcggcatgcacgtcgatgcgggtttgccggcgggcgtagtcgcgtccaggccggggccgttcctcgccggctcggctcgcttcacggcgaccatcaacggtaaaggcggccacgcggcggcgccccaccacgccgtcgatccgatcgtggctgtctcttccgccgtcctcagcctccagcagattgttgctcgcgagaccgatcccctccaaggcgcggtggtgtctgtgaccaccatcaaaggaggtgaagctttcaatgtcattccggaatctgtcactctgggcggcaccttgaggagcatgacaaccgatggcatgtcttacctcatgaagagaatcagagaggtgatagaggggcaagcagccgtgaaccggtgcacggcggcggtggacttcatggaggataagctcccgccatacccagcgacggtgaacgacgaggagatgtacgcgcacgccaaggcggtggcggagagcatgctcggggaggccaacgtgaagctgtccccacagggcatgggggcggaggatttcgggttctacgcgcagaggatcccggccgccttcttcggcataggggtcggcaacgatggcggcgggatggcggagacgacgacgaagaatcagctgcactcgccgcactttgtcgtcgacgaggaagcgctccccgtcggagccgccttccacgccgccgtcgccatcgagtacctcaacaagaacgcctctggcccttcagcctgatgcgtcccgtcaaggagcttaaatcgcctatgcatggcttggtaatggggttatctaagactataataatatccaaaaataatggtcctactagctactagctgcccaagaacaggccgttacaaaaacgtgtaaaaactattccagttggtcagcacaagcagtgataataaattcccggattgttttc

SEQ ID NO: 3525 - DNA, 1048 bp, Oryza sativa
  ref <308>: DATABASE ACCESSION NUMBER: AK061198
  ref <309>: DATABASE ENTRY DATE: 2001-12-06
aacacacctcgcctacctccactctctcgcgctcgctctccaatgccgccaccaatggcgctctccatctcctccaccgccgcggcgaccgctctcctcccgactctcccgccctcgcgctcgcgcctgcgcgtcgcgccgcgcagggcggcggctcgggtggcgcgcgtggtgtcggccggatacgccgcggggttctacggcggggcggcggctgcggccggtggcgagaacgacgaggtgggggatgaggagggttcgtcctcggggttcggtgctgggctagggataggaggcggtgggcttgggatgtcggccgcggaggcggcgctggcgctggaggagcgggagatgccgccgtgcccgcccgggcttcgccagtacgagaccatggtcgtgctccgccccgacatgtccgaggaggagcgcctcgccctcatacagcgttacgaggagctccttgttgcgggtggcgccatgtatgtggaagtcttcaaccgaggagtcatcccactggcatacagcatcaggaagaggaacagcaggactggtttgccatccacctactacgacggaatctacctccttgtgacatacttcaccaagcctgaatccctggatgctctgcaaatgaggctcaatgctgacgacgatgtcatccgctcaaccagtttcaaggtccgcaagcggaaagccttttaagatcagtttcaccacctggactcaggtttccatgttttggggaatatgtttatatcatacaagaatcctactgccatgggaggagattggtttttcgctgcaatcgttgagaaaaaatgtcgccctttctgttgataatttagaagaaatttgtcttccttttttttcgttatagcactgctctgatcttacctggtactcctacacgttaagggatattgaacgaacacttttgtggagcatggcctgctggggcctctggaacaagttatgctgttaacaaaatcagggctcatttcctgtacgccatggcatttcatttataggctgccttaccgtgcatttc

SEQ ID NO: 3526 - DNA, 1055 bp, Oryza sativa
  ref <308>: DATABASE ACCESSION NUMBER: AK061199
  ref <309>: DATABASE ENTRY DATE: 2001-12-06
atgcagagattgaatgctcttttgggtggattgagtgtgttgggattgctgataggtctgcatatgatctgcgtgctcactcggataaaagtggtgttgcacttgaagcacatgaaaagtttgcagagcctagagaagtggagaagttagttataaccccgtcaaagaaggaactaggtcttgcgttcaaagggaatcaaaggatggttcttgaagcattggaggcaatgagcgagactgaagctttgaatatgaaatcagctttagaatccaaaggggaggttgaatttaaggtgtgtacacttgggaaagatgtcaccataaagaaaagcatggtttcaattaacatggagaagaaaaaggaacatcaaaggaaatttactccttctgtcatagagccatcctttggcatagggagaatcatttactgtctgttcgaacattgcttctatcaaagacctggcaaggcggaggatgagcagttgaatgtattcggtttcccccctcttgttgctcccatcaagtgcactgtctttccacttgtcaagatcgaaaaatttgaagttgttgccaagaaaatttcgaaagcattgacagcagcagggatttctcacataattgatatgacaggtaacacaatcggtaagcgttatgcaaggaccgatgaaatcggtgtccccctggcaatcacggttgacaacaccacgagtgtgactgtccgtgaccgggacagcaaggatcagatccgcgttgaggtcgatgaggtggcctcagtggtgaaggaagtgacggacgggcagagcacctgggcagacatcatgtggaggtacccggcacatactgcctcggccgctgaagaggaggaagcatcagaaacctgaagggggcaagcagtgcagtgcaagccaaaacctctggctggaattgagatggttgttgccatcctgcttttctgatacatgttttaacagaatgctaatgcagcattgagcattgttctgtaatctcgatgatttctctacatatttacagatgattttctcctgtttactgtt

SEQ ID NO: 3527 - DNA, 1132 bp, Oryza sativa
  ref <308>: DATABASE ACCESSION NUMBER: AK061200
  ref <309>: DATABASE ENTRY DATE: 2001-12-06
cagcgcgtacctgacggtccccgcgcgccgtcgtctccaccacggggcggcgtcgtgcccgaccgtcgacgacctcgccacggcgcccgtggggttcccgccgtcgtcgtcgctggccaccgtgccgacctaccaggccgccgacttcacctacgtgttcaccagcttccacggcatgcccagcgcgtacgaccgcgtcgccgcctgcgacaaggccagcgacgtcctcgtcttcaagacctgcgccgagatggaaggcccctacatcgaatacgtcgccacgcaatacgacaagcccattctcgtcacgggtcccctcgtgccggagccgccgcatggcgagctggaggagcggtgggagacatggctctcctccttcccggacaacgccgtcgtcttcgcctccttcggcagcgagacgttccttccaaccgccgccgcgacggagctcctcctcggactggaggccaccggccagccgttcgtcgccgtgctcaacttccctaggagcgtggacgccgaggcggaggtgaagaagtgcatggcgccggggttcgaggagagggtgaaggggaggggtgtcgtccactcggggtgggtgcagcagcagcacatcctgcggcaccgcagcgtcggctgctacgtcaaccacgccggtttcagctccgtcgtggaggggctcgtcgccggctgccggctggttctgctgccgatgaagagcgaccagttcttcaacgccgcgctgctcgcgcgcgagctccgcgtgggtaccgaggttgcgcggcgagatggcgacggatggtttggccatgacgcggtgcgtgacgcggtgaacgcggcggtcgccgacgccggtggaggggacgacgacgagaggaagtggcgggagttcttgacggatgacgccgtgcaaaggagattcgtggaggagttcgtcagggagctgagaaaactcgtcctctgaagaaaatcaactttggccgagtttagttacaaacttttttttcaaacttgtaactttccatcacatcaaaacttttcttacacataaattttcaacttttctgtcacatcgttccaattttaatgtaaactaaacacacctaaaagtctgtcgtgaaataaggcgtgt

SEQ ID NO: 3528 - DNA, 927 bp, Oryza sativa
  ref <308>: DATABASE ACCESSION NUMBER: AK104441
  ref <309>: DATABASE ENTRY DATE: 2002-08-28
agcttgatgccaccgaagcggaagagggctgcagccatggagacggcgggaggggacgccgcgccgccgccgcagcagcagcgtcggaacaaatcctcggcggccaacaaggggaagaagggcggcgcttccggcggcggaggcggcgggaggtggccaccggtcaagccgaagaaggatctccaggtcaatcgcctcaagggcacccacctcctcaccgtgccaaacttcttcacttccgctgaggcgaaggcctttgtcgacattgctgagaatattggcttcacgcaccagggcagcctcggacccctgaagggtgaagcttatagagataatgaccggatatctgtgacagatcctttgcttgctcagaccatttgggaatctgggataaacaaaatatttgaggacatcagcatctctggcaaagtagcaaccagcttgaatccaaatatcaggttctacaggtacactgaaggtcagcgattcggtaggcatattgatgagagtgtcgaccttggagatggttcaagaacattgtatactttgctaatatacctctctggcaaaggaagtgcaaaggaatcatcagggcaagctcttgttggaggggagactgttttttatgatcatcgtggaggagttgtcgctgaggttgctccagtgcaaggactggctctactccatcttcatggtgccaaatgcatgctgcatgaagcacgggttgtgaaaaagaatatcaagtatgtgcttcgttctgatgttgtatttgcttagctggagaattctccatgcttgtgttgaagtactatagacctgagcatgctatagacgaacggctaacttttccattttacaaacctttgtactaaagcatgtaactgatccaacatgaacttggaaggtgatgacatcaaatttgtgttt

SEQ ID NO: 3529 - DNA, 1502 bp, Oryza sativa
  ref <308>: DATABASE ACCESSION NUMBER: AK061201
  ref <309>: DATABASE ENTRY DATE: 2001-12-06
aataaaggaagttgtggattgaacatccggaaaagagatgctatttgtgtagagagaagggatgaaaatgtaaccttggtcacgaaagccttgcaacaactatgcgggtataaggggacacataagctttctcacctctgtgtgtgaattgggaatttcacttgtcaggactcaagctactgcgcaagctactgcggttagcggggaggaaatagactttgaaaagggcggaaatcgctatgtacttacttcttcttgccgaatggacagtaggaaaccacagctatcttatgtagtacttcctgccgaaaggagggaatcacctattgtaactactgatttacgaattgaggaatgtatgaaaacaacaaaattacctgcttattcaaacgaattcccaataaagaaataggcaaaattccccatctcctcgtctcctcccaactccaaaccctagctcccaccccctctcgccgtcgccgtcgcgtcccatggcgaagtcgcggccgcccaagcggatcctcgagtcctacaccatcaagggctccgacaaagtcatcaagcctggggactgtgtgctaatgagggcatctgatacatcaaagccaccctatgtggcaagagttgaggctattgaggctgcagggtcacgaggcacaaatgtgagagtacgggtgcggtggtactatcggccagaggagtccatgggtggaaggcgtccatttcatggtgccaaagaggtgttcctctcggatcactatgacgtacagagtgctgacaccatagagggaaagtgcaacgttcacagcttccgtagctacacaaagcttgattctgtcaatgctgaggacttcttctgtcgctttgagtacaaatcagccacaggaagcttcgtgcccgaccgcattgctgtgttctgcaagtgtgagatgccatacaatcctgatgaccttatgatccaatgtgaggaatgctctgattggtttcacccttcttgcattggaatgactattaaagatgcaaaaaaactagagcattttttctgccagagctgtactgcggaaaatggaaagatggctgagaattctcatgaagctacagcgcaatccgaagaaaagcaggtggagtcaaaaagacggagaaggtgactgccccccagattcattgacgagatacacctggatgtacaaagccttctcaagttggtgtaatgctatttatttgtcatggcaagtgtgtgtgacccacgaccacgagagtcccttcctgtaatgtcagtcgcatggtgtacataaacttttcaacctgagactgttgtattaggagacgacacgacctgttgttgttgcatgatgtttttagcagcgtcagaattagcatggtagagtcgggtgatgaagcccctcgcgggcattaggactcccgtatggatgttatcactgatcatacattgatactacattggatgcagttgagtctgtcatctgcgtttgtctttggag

SEQ ID NO: 3530 - DNA, 1024 bp, Oryza sativa
  ref <308>: DATABASE ACCESSION NUMBER: AK061202
  ref <309>: DATABASE ENTRY DATE: 2001-12-06
gtgctgacctttcccaagtcctcctgccgccgcagcgccgcggaggaagaaagtagaaactgcttccccctcctcttcccctcttctcgcgggaatctccccgtctccgccgcgaaaccatggaagctgccgccggcgccggcgccggattggcggaggcagcgaacggcgggatcgagagctcggccgccgacccctccacctccggcaccgcctcgcggctctccgtccaccggatcgccggcggcgggaaagctgctgatatcatcttatggaagcgtggacgtgttacaattggtgttatatttggcgctacaatggcatggtggctgtttgagaaatctggactgtccttcttgacagtttgctctgatgtactgctcattttgattgttgtgcagttcatacggattaaagtagctggattgctaaataagcaacctaggccactacctgagttagttttatcagaggaaatggttagcaatgctgcagcttcattccgtgttaaagtcaacaacatgctgatgatcgcacatgacattactcttggcaaggactttcgactctttttccaggttgtgttgctcctatggctgttatctgttattggaaatttctgctcgtctattactcttgcttactttggaaccattgctttggtcacaatacctgcattatacagtaagaaccaggagcaagttgataggtatgctgggatggtccacaggaacatatcaaggcattacaagattgtcgacgaaaatgtgatgagcaggctaccaagaagctttatcagagataaagaggattgatttgtttagaagctgtgatagtagtcatgccactatatccacacccaagtgtgtgtgttttctacacttgtatttttatgccgtagattgtgcaaattaggaatttagggcaaaagctggagtatgctgtagatgccactgcaatgtgctactattctaactcttgagcaataaggttcgaaacaaaaaaaaaatattttgcttgtcct

SEQ ID NO: 3531 - DNA, 1101 bp, Oryza sativa
  ref <308>: DATABASE ACCESSION NUMBER: AK061203
  ref <309>: DATABASE ENTRY DATE: 2001-12-06
aaaaaaaaaaaaaaggggaaaaaaagatagagtggggagagagtcaagagaggggcgtgtagcacacgtggaagctgacgataaatttttttcccccaattccgcctctttgctttgcgtgcgaatttgatctcgaagcttccgccaagcagcgagctctcccgatccgcgggggcgtcgaatcctatggcggccaacgccggcaacaagatccgcaacgccaaactggttcttcttggagatgtgggcgcaggaaaatctagcttggtgcttcgttttgtaaaaggacagtttgttgagtttcaggaatcgacaattggagcagcatttttctcacagaccttagcagttaatgacgaaaccgtgaagtttgaaatctgggatacagctgggcaggagagatatcacagcttggctcccatgtactataggggtgcggctgctgccatagttgtctatgacatcacgaatccggcctctttcacccgtgcaaagaaatgggttcaagaacttcaagctcaaggtaactcgagtacagtggtggctcttgctggcaacaaagccgatttgctagagactaggcaggtgcaaatagaggaagcaaagacatatgcacaggagaatgggcttttcttcatggaaacatctgcgaaaactgcaacaaatgtgaatgacatattttatgaaattgcaaaaagattgcttcaaggacagccagctcagaacccgcaggccggcatggtcctctcccagagaccaaatgagagactggtcagctctgcttcatgctgctcttgaagcatagtttcggccgagtattgtcattataaaatctaggagaggaaaattcaacaaatatcccagaagttcttgtgtggccaccttcatggctatatactccagccttcacgcttatttcttttcattccttgtgtcatgtaaatgtcaatacaagaatgccacatcagaggcttgaaattggtaccgaaatgttaattgtgctctatcattgttactgttcttttacattcgcattcccatgaaatgtgtgacccatggttactggttactgaagagctatagctggtgcacgttgtcctg

SEQ ID NO: 3532 - DNA, 1234 bp, Oryza sativa
  ref <308>: DATABASE ACCESSION NUMBER: AK061204
  ref <309>: DATABASE ENTRY DATE: 2001-12-06
atggcgaacaagggaggagagccggcagcaagagcagctgtgcgccatggtggaggccccgtcgcgttcaaggacgctgtcgacgtcgacgccacgccggtgcgccctccgacggagctcgccgccgccgtctccgccctgccggcgggcgtctcctacggccagccgatgcgctgctacggggggacctgggtgttcgagagctgggcgcagggcgtggtcgccatgcaccgcggcggcctcgtgccccgcgccggcgacgtcctcctcgccagcctccccaagtcggggacgacgtggctcaaggcactcgcgttcgccaccatggcgcgccgcgcgtgcccgccgccggcgagccccgaccacccgctccgccgcctcaacccgcacgactgcgtgcccctcctcgacaggctcttcgccgccggccgcgacgcgcttctcgacgagctgccgtcgccgaggctcatgtgcacgcacatgccgctctcgctgctgccgccggcggtggctgacggcaactccaacaccaagatcatctacatttgcagggaccagaaagatagattggtctccatctggcactttcggaaacgcaatgtgccagatctgttgctccaagaagtgtatgagtctatatgtgatggcactgggtttgctggtcctgtctgggatcacttgcttggttactggagggcaagcaaaatagatctaggccgagtgctcttcttgaaatatgaggaggtgcttcgagacccagtgaacaccgttagagagctcgcacaatttgtcgggcagccattctctgacacagaggaagaagctggcattgttgcggagatcgtcaagctatgtagcctagagagtctaaggagccagaaagccaacaaagaaggcatacaaggtgtgtacatcaagttctcgcacgactcgtattttaggaagggggtggaaggggactggaggaaccacatgactcctaagatgggcgaacatctggattcgattatgcgagaaaagtttgatggatcggggctcaccatatgatgcgccattatggccggggtttcatcttttaatttgtagtcacagttttcaagctatgtgtttcataataaaacaaagcctcctagcctgtttggaggcttaactttaactgtttatgcttataaacaggtacatctatgacctatgtaattttcggtgcaccaaataaaatccttccgatgctacc

SEQ ID NO: 3533 - DNA, 1362 bp, Oryza sativa
  ref <308>: DATABASE ACCESSION NUMBER: AK061205
  ref <309>: DATABASE ENTRY DATE: 2001-12-06
acgcggccgtccatcccttcacactgctccacagccatccatccctccgccgccgccgccgccgccgccgccgccgccgccgaaaccctaccggcgtcgatcgaatcccctcgcctccgcctcgcgcgcacgcggggggttgggcccgaatcggaggcagaccggccaggagcggcgggatccctcgctccgtcggcgcgaatcttggtccggccatggcggtggtgggggtgctggattctttggccgccgaggagcggtggctgtacccggggttcctggccatgtacgccgccatctactgcgtcggccaactcgccctgctccggcggtgggcgtggccgctccgcctcgacggcgccagctgcctcatctccctcgcgcacggcacgcccgccgcgctcgccgcggcgggcgccatcctcgcgctgccgccggaggcgagggggttcgccgcgcccaacacccgcctccaggaccacgtcctcgactacagcgtcgcctacttcaccatggacctgctccactacctcgccttcctccccggggacaccctcttcatcgcccaccacgtcgccacgctcttcgtgttcgtcacctgccgctacctcgtccgccacggcgcctacgcgctcctcgtcctcctcgtcctcgccgaggtcaccagcctcctccagaacgtctggacgctcgccgggatctggcgcgccgagaagcccgccgcggcgagggtgtacagggcgctgtcgccgcccttctacttcatctacaccgtcgtcaggggcgtcgccggcccgctcttcttcctcaagatgagcctcttctacctgtccggccaggccgtcgacgtcatcccgtggtgggtgcgcatttcttggatcgtcgtcgtcggcaccgccatcacggtcagcaacctgtggatttggaacctctggaaggagctcttcagagaacggaagcagagcatgacgaagaaaagcacgtaggtgtatcaagcaaccatgctgtagcataatctatcgaaattgcactgatgatcagatgattcagatgacgatgatggatattttggatggcatttgtggagaattctctatatgacataattctttcattcaggtcagaaatctcaagtctaattaattagtacttagtagggaatagtccaatgggcattctgtcgcatgcattgggattttacttgttgatcattcagctaagaacactaatcactccttgatggcgagttctttggagtgatggttccctttagcatttagataaaaaaaaaatactgtactgctacatatacctcacttgatgattaccaatagatggttctttggagtgatggttcccttc

SEQ ID NO: 3534 - DNA, 1151 bp, Oryza sativa
  ref <308>: DATABASE ACCESSION NUMBER: AK104442
  ref <309>: DATABASE ENTRY DATE: 2002-08-28
ccgcctttggtccagatccacgcgtgttgcggacttgcggttgcttttgttcgtcttctcccggagattcggcgtgttcgtgctgcgaaatccgaactacttctgctgctaagatttctgccgcgtgctaatggcggaggaagggtacaaggttgttcttaacgtgtacgacctcagcaacggcctcgcgcggcagctctccacctccttcctcggcaagccaatcgaggccatctggcatacgggcgtggtggtgtacgggaacgagtacttcttcggcggcgggatccagtcgctggcggcggggaggacgccgtacgggcggccggtgcgggtggtggagatgggcgagacgcacatcccgcgggaggtgttcgaggactacctccgcgacatctcgccgcggtacacggcggagacgtaccggctgctcagccacaactgcaacaacttcagcaacgaggtggcgcaattcctcgtcggcgccggcatccccgactacatcctcaacctccccgccgaggtcatgtccagccccatgggccccctcatcatgcccatgattcagaacctcgagtccacgctccggaccaacgccgcgccgcaggccacgcagttcgtcccctcgtccgtgccgccgccgccgccgccgcagaacaagcccggcgagggctcgtcttcctcgaagcaagaagacaaggcggccaaagcgaagcagggctcggcggctgacccgctcggcggcgcgagggggaaggtgcaggaggaggtgatgcgggagttcgcggcgatcatggcgagcgggacgctgcgggcgagcgaggcggcggcgctggcgatgcggcgggtcatggagcggcacggcaacgccaccatgcagcagagctagacgagagagacacacacaccaccatacattcgacgcgatgatgcgtgtcgcaatcgcaattaccgagtttttacggagtagttaacttctttatgaatgagaaggtgatttctgtagcgtattgattgtttgttactgtgtgtgaacctggactgttctgcttaaattcgataatctttctcttgtctactatccgatggatggataacgataacccattctccattattgaatagacaaagcatgtttgtggtgtctggtg

SEQ ID NO: 3535 - DNA, 1170 bp, Oryza sativa
  ref <308>: DATABASE ACCESSION NUMBER: AK061206
  ref <309>: DATABASE ENTRY DATE: 2001-12-06
agtaacttctgtgagagatggagtactcttacagctacaggttcatgcttgtatgctctgttcttgtactgtgccttaatactcggggtgcgagatgccagttatccgacgatttctacgactacatatgtcctgatgtgtacaccgttgtccagcagcatgtttatgctgccatgaggactgagatgaggatgggtgcctccctcctaaggctccatttccatgactgctttgtcaatgggtgtgacggttccatccttctggacggtgacgacggcgagaaatttgcacttcccaacaagaactctgtcagagggttcgaagtcattgacgcgataaaggaagatctcgagaacatctgccctgaagttgtttcctgcgccgacattgtagcccttgcagctggctatggagtactatttagtggaggcccttactatgacgttcttctcggtagaagggatggtcttgtcgcaaatcaatcaggagctgacaacggcctcccttcaccgttcgaacccatcaaatcgatcatacagaagttcaatgatgtcggcctcgacacaaccgatgttgtcgtcctatcaggagggcacacgatcggacgagcccggtgcacgctgttcagcaaccggttgtcgaccacctcaagctcagccgacccgacgctggacgccaccatggccgccaacctccagagcctctgtgccggtggagacggcaacgagaccaccgtgctggacatcacctccgcctacgttttcgacaaccgctactaccagaacctcctcaatcagaaaggcctcctgtcctccgaccagggcctcttctccagcgacgacggcatcgccaacaccaaggagctggtggagacttacagcgcagatgcccacaagttcttctgggattttggcagatccatggtgaagatgggcaacatcagcccactcaccggtgacgacggccagattcgcaagaactgcagggttgttaattaactgagcttcagtgtgttgaaaagatagtaaatttcttgtacttttcacaaggcgattgagacgatgtgtgttatgttttgatgttacatgaatgcttgaagaagcagaagtaataacgatgtgattgtgactagtttgtgaactgatcgtcaacaaagatgtgatccattgg

SEQ ID NO: 3536 - DNA, 1154 bp, Oryza sativa
  ref <308>: DATABASE ACCESSION NUMBER: AK061207
  ref <309>: DATABASE ENTRY DATE: 2001-12-06
atatcgatctgatctctctatatattttatggattacctctctgtttttaagggaagagctagcgatcgagctccagtagtatacgtgcactttgggttgctcatgcactggcttaatttctgaagatgagtaatctgctcaaggctaagagctgggtaccagaggagaaagctgcagcgactgcttctgatgaacagaatgacaagataaagaaagtccgggaactcctgggaagccagatgacagcagagatgccgtcattcttgtcggacgccaccatccgccgcttcctccgggcaaggaactggagcacggagcaagcaaccaaggctctcaaagagactgtcaaatggaggcgtcagtacaggccggacacaatccgctgggaagacattcctggaagggagcacgaagctaggagaacatatatagccgactactttgataagaatggaaggatcgtcttcatatcgaatccgacaattaagagtaaatcatccaccaaggaccagataaaacagttagtgtataacctggagatttttgccatgcactcagaaaacatggaagacgaatgtactgtttggttaactgactttcaaggctgggtgctaacaaatacgccattgccgttgcttcgtgaatgcactcacataattcaaaaccattatccagggctgatttctgtcgcaatcctcagcaacccaccaaggattttcgaatccttttggaagattgtgtgctatttcattgagccaaagttgaaagaaaaagtgaagttcgtatatactaacaatccagagagccacaagatagttgctgatatgtttgatttggacaagctggagtctgcatttggggggaggaacacacttccatttgacatggacaagtatgcagagagaatgaaacgaagtgaccaaatgagaggagctcccatgcatgccaatggctactcttgctctacccaaacctgaccacataaaagttcaccttaatttcttttagtttcatataaagtggcataaatatatatacgccggttagatctgaataagtgatgcatgtcactcttaggtaggattttgaggcgggcggacctgagtaaaactccatgacaaattatgtacaaggaagaagctaatcatgtaat

SEQ ID NO: 3537 - DNA, 1028 bp, Oryza sativa
  ref <308>: DATABASE ACCESSION NUMBER: AK061208
  ref <309>: DATABASE ENTRY DATE: 2001-12-06
ccatccatccatccatctcccaccaccacaccttcgcccctcccgcggcaaccaccgctcctcgccgccctcggatgctcccgccgccgcctccgccgcaatccgagtcatcggcggcggccgcgctctagccgctcgctcgctgttggcacggtcccggagcggagccggagcgcatggcggaggccctcctccccctgccccggcgcctcgtcgtcaccgcctccacgcccgcgtgctcctctgcctcctcctccacgtccccgtcgcctcactgcctcctctcgcgcgccaacccgcgcccgccgcgcttggccgccccctcgcccccgcgccaccgccgcctcaaggcccatgcagccgtctcagacaaaagtgagcaaccaaaatggtgggagaagaatgctggtccaaatatgattgacatccactctacacaagagttcttggatgcactgagggatgcaggcgacaggcttgtaattgtggagttttatggaacttggtgtggttcttgcagggcactcttcccaaggctctgcagaacagctgtggagaatcctgatatcttgttcttaaaagtaaattttgatgaaaataaacctatgtgcaaacggttgaatgtgaaagtccttccttacttccatttttaccgtggagctgacgggcaattggaggcgttctcatgttccttggcgaagtttcagaaactgaaggatgcaattgctgttcacaacactgctcgctgtagcatcggtccaccagtcggagttggggatgtgctggatagccctgaggagaaacctgcagaagctagtccccggtagatttgttctgttacagtgcgtctcgctctccattgctatatctgctcattttttttacctcgatagatcttactgtaaccaactcaggagaatattcagttttcctggataggggtggccaggcaacgggccagcatcagatgttgtaagcattactgtttaatttttttgagaaagaaaaatcgtgtattatagtgtgtc

SEQ ID NO: 3538 - DNA, 1122 bp, Oryza sativa
  ref <308>: DATABASE ACCESSION NUMBER: AK061209
  ref <309>: DATABASE ENTRY DATE: 2001-12-06
atcatctcccctcactctctctttctctcctctcttgctctccactcctcctcgggcggcggtggcaggagctggcggcgtcaaggggggctctcggccgcctcgggctctggcctggagctggcggtggctggggcggctctgcctggagctaacggcggcgggggcgacgacctcggcgaagagtgggcggtggcgggcctcgtctcactcggatccggaggcggcaggccttgtcctgctcggatccggcgacggcgggcctcgtcccgcccggatccggtagcggcctcgggggaagagtgggcggcgacctcgttgaccttgggggaagagtgggtggcggcgccatcgccatctcctcctcaccgccgacgacgaggaggtggccagatgcagccccttcgtcgccgcctcgccgccctattcatccccccaccccccggggcgggtaccggcgcctcggctcctccgcctccgtgtccacgacaacggatgtgatttgggtggaggttgggacgacgaagggggataggagcttattccatgtcgattcggccgtgcttgagaccgggtcggtgcggcgcttcctcgcggtggctgggcagcgggcccgcggcggtgcggtggcggtcgccatggacgcgctgctgttcgagcacctgctgtggctgcaggcggtgggtacatgagctcaagcttgccatgaagccggtgcaattcttctccagctccagtgggctggcgccccttctgcatctcgatgtggatgggttcagtggcctcttaccctaatcccccacctcgtgctcttttctctcgctcttcatggcgtggcaaaccagcgcccagcggtgccgccgtgctgcgcgtgtggtggcctgacgatggctcaaagcagaacatagcgccagatttggtcaagccctccagattttccctttacatggtgataaaactagctataatggttgtatttttttggtcgaactgcaaacatttcagtgttggtatcgttgcatgaattttgtttacgaatgttctatggttcacatgtgcagctgcccattgccattcttccttctctgacattatctatgaagtatgtattttttttccttg

SEQ ID NO: 3539 - DNA, 1393 bp, Oryza sativa
  ref <308>: DATABASE ACCESSION NUMBER: AK061210
  ref <309>: DATABASE ENTRY DATE: 2001-12-06
acgtacgaacgagagtgatcgatcgctagctcgccgagatcaccagcctcctcgtcttcttcttcttcttcctctcgatctcgaggagggtgccatgggtaccatggttggccatgtcgcgccgggcgccggcttcatcctcatcggcatgtggcagctgttcaaccacatccggctgttcgcgctgcggccgagctcgtacgcggcgccggtgtggttcccggtgcgcggggtgcgccacctggagctcatactggtgatcgtcggcgcggctatctccatcctgatggagctcgtgatcgggccggcgaggcaccagccgttcgacgacgacgggaccatcccctccaaccacctccacaacttcgagcacgcgtccatctcgctcgcgctgctggtctacgccgcggtgactatccacatggacagggccagggcgcccatgcgcgacgccgtgtcgcagctggtcgccgccgcggcgttcgcgcagcagctgctcatcttccacctccactccgcggaccacatgggcgtggaggggcagttccactggctgctgcagacggtgatcgccgtcacgctcgccaccacggtgctcgggatcccctgcccccaggagcttcgccgtcagcctcgtccggtcggcgagcctcgtgttccagggcgtctggttcgtcgtcatgggcgtcatgctctggaccccggcgctcatccccaagggctgcttcctcaacctcgaggaaggccacgacgtcgtccggtgccgcaccgatgaggcgctccaccgcgccaagtcgctcgtcaacctccagttcagctggtacctcaccgccaccgtggtgttcgtcgtcgtgttctacctccacctgacgaagctgtacccggaggagccgaggtacttgccgctggtcaagggcggcggcggcggcggcgacggtgacagcgacggcggcaggttcagcatcggagacgacgaggacgacctcgaggccgcgaaaggtggcttcggacacgtggcgggtggcgggaacgccgttgaaatcgagcggtaatttactccgcgattccgtgtcagaggaagaaacaaatgtcaggatggctatgtgattagattgaaaaacgagggcctatgtgtaaataatagtatttctttttaaaaaatatttttagtagtactatagggaattagtgatttgtgtgtgagtgaacaagctgatcgacccataaatttgggtaaatctcatgcttggatcgcttcaatttgtttagtcaagagtgtctgatatcacaagggttaaattgatccatggatgtcgcatttggttggttatgtctgtactctagccatatgagtggagattttgcacacaacggaaaaccttttcatcctctg

SEQ ID NO: 3540 - DNA, 1556 bp, Oryza sativa
  ref <308>: DATABASE ACCESSION NUMBER: AK061211
  ref <309>: DATABASE ENTRY DATE: 2001-12-06
tcaactgcctcgcttcctccctcctcccgatcgaccgcgccatggctgccgccgccgtcaccaagtcgccgccggcgctggtgcccccggcggggcccaccccgggcggctccctcccgctctcctccatcgacaagaccgccgccgtccgcgtctccgtcgacttcatccaggtcttcccctcctccgccgaagccgccaaggaccaggccgcatcggtcgccgccatgcgggagggtttcgccagggcgctcgtccactactaccccgtcgccggccgcatcgcggagccggtccccggggagcccgagatcgactgcaccggggaaggggtgtggttcatcgaggccgaggcgagctgctcgctcgaggaggcgcgcaacctcgagcgccccctgtgcatccccaaggaggagctgctccctcacccgccgcccgaggtccgcgtcgaggacaccgtgctcctcgcgcagattacgaagttcacatgcggtggatttgctgtgggcatttgcttcagtcacttggtgtttgacgggcaaggtgcagcccagttcctgaaagcagttggtgagatggcaagagggctccctgagccatcactcaaaccaatttgggccagggatgccattcccaaccctcccaagccacctctaggaccacctccatcgtttactgcattcaactttgagaaatccgtcattgagatctcgttggatagcatcaagcgtgtcaaggaccaggtcgcaagtgagaccaaccagaaatgctccaccttcgatgtggtcactgccatgatgttcaaatcccgtactttggctattgactttgcacctgatgccgatgttcgtctgggttttgctgctagcacacgtcacctgctgaacaatgtgctgccttcagtcgacggctactacggtaactgtgtctaccctggtggcctcgccaaaaccagccaggaggtcaaggatgcgtcgctcgtagagattgtgacagcgatcagggaagccaaggatgtgctctcgacacggttcctcgattggatgagcggtggtgccaaggagaaccattacaatgtgtcgctggattacggcacactagtcgtcacagattggagccatgtcgggttcaacgaggtggactacgggtttggcgagccgagctatgtgttcaccctgaatgatgatgtgaacattgtgccgtccgtcgtctacctgaagccgcccaagccgaagcagggaatcaggttggtgctgcagtgcgtggaggctcagcactccaaggttttcggtgaggagttgcagaagcttgcatagaggtaacttcgtgtttatacgcctacacttcgcagcgttgagagctgttgtattctggtgtgttgaatagccgcttcttgaacttggttacaaataaaacaaggtggatcgtgtttgtattctgtattgttgttaccatactacattatacattgattgacattgttgaggcagtactgttacagttgagaacaaatgattccattgatttcaagaatttgtacaatatagtcctacatg

SEQ ID NO: 3541 - DNA, 1434 bp, Oryza sativa
  ref <308>: DATABASE ACCESSION NUMBER: AK061212
  ref <309>: DATABASE ENTRY DATE: 2001-12-06
atcacaaccaaaagcgttcatcaagaagtcaagcagagcaaagttcagaagcaagcaagagagaggcagaagcgttgagaaaggccgaggcgagatggtcaaccaagccgcgatgccgctgctgacaccgtacaagcaggctggcggcaagatcgatctctcccaccgtgtgctgctctcgccgatgacgcggtgccgatcctacggcaacgtgccgcagccgcacgcggcgctgtactacacgcagcgcgccaccagcggcggcctcctcatcacggaggccaccggcgtctccgacaccgcgcagggctacccggagacacccggcgtctggacgcgggagcacgtcgaggcgtggaagcccatcgtcgacgccgtccaccgcaagggcgccctcttcatctgccagctctggcacgtcgggagagtctccaccaacgactaccagccaaatgggcaggcaccgatctcaagctccgacatacagatcacaccggacggttcagggatcgtgtactccaagcctcgccggctgcgggtcgacgagatccctcagatcgtcgacgacttcaggctcgccgcgcggaacgccatcgaggccgggttcgacggcgtggagatccacggcgccaacggctacctcctcgagcagttcatgaaggacagctccaacgaccgcaccgacgagtacggcggcagcctcgagaaccggtgccgcttcgccgtcgaggtgatcgacgccgtcgtcggcgagatcggcgcccaccgcgtcggcatcaggctgtcgccgttcctggacttcatggactgcgtcgactccgacccggaggctctcggctcgtacatggtggagcagctcaacaagcacgagggtttcctctactgccacatggtggagcctcgcatggccatcgtcgacggccgccggcagattcagcacggcctgctgccattcaggaaagctttcaagggcacgttcatcgccgccggtgggtatgaccgggaggaaggcaacaaggtgatcgaaaatggctacactgatcttgtctcctttggaaggcttttcttggcgaaccctgacttgcctaagaggttcgagcttgatgcgccattgaacaagtatgatcgcaacaccttctacactcaagacccaattgttggatacacggactaccctttcctcgatgaggatcagaacaactcggttgctgatgcttagattttgtgctattttagttgttggttctatatatccacaataataatgtgcacgattcatgtaaacagtgttagtatatgcctgcgtgcaagatgtcattttcttctctcttttttgatggtttatgtctgcaactaattcattttgatatttgattagttatgcatccaaatatattgggattaataaacgcagatgtattcacaccacatgag

SEQ ID NO: 3542 - DNA, 1038 bp, Oryza sativa
  ref <308>: DATABASE ACCESSION NUMBER: AK061213
  ref <309>: DATABASE ENTRY DATE: 2001-12-06
gacgaggaggagcggcgtcgaggaagagtggcggtggcggttctgggatgaggaggagcagcagatcccggcgacgccaaggtgcgtggacgggcgcggttgtggcgggtgcagcatcaacaggcgcggcggcggcggcgatgggcgactgcgggcgggaggcgaggcgacggtggatccagccgccactctacgccacggcgggatggattcggcgcgactgcgggtgcagcggcgacggacgactacggggcgggaggcgcggaggtgcagcggcgacaagcgggaggtgaggcgttggcggatccggccgccgctccgcatctcacgcgcatggttttggctacggcggcgcggttgctggcggtgcggccgtggatccggctacggcggcgtgctcctcacatggttcattcattgtcctcctaacgatgagcgacgggcagcagatggagtttatctagaattctagatgacgaggagggcagcgatgtatccctcatgacgaggagcgcagagatggggctggccccgtcgcccgtgtctatggctgccatctaggtggtaggatacggggtggtgggaaccatggtggaggagacagcagcccaccatccacagcagtcccatccatccctctcacgtcgccgccagtgcacgctggcattcaccttgtgcggcggcgatagactggagccccggcgaccggtcacatgcagccatcgatcatcgatgggatggaggtggaagccggcgagcaatcacgtgcatgtgcagtgtcaggaggacgggaggagttccttgtggtcgtcggctccgagaaactgcttaccacaggagtcgtcggaggcagatatgttgtattttgttttgtttgtttttcgcattttgttgtaggagcgaagccaccgcctgatttaccatacccagctttttaaacgtgtgattcatatcattggatgcaacattatgtattccatcaaaagtgcaatctacatattatgcgtggagtaaaaaaattactattattgagtcact

SEQ ID NO: 3543 - DNA, 986 bp, Oryza sativa
  ref <308>: DATABASE ACCESSION NUMBER: AK061214
  ref <309>: DATABASE ENTRY DATE: 2001-12-06
atcgccaccgtcgttcacaccacaccacctgctgcacacagctcgatcgagttagcccactagctaccaaccaagctgccggcgagaggtatggcggcgtggcgcggtctggcgttggcagcggtggtggcgtggtgcgtggcggcggcggcggcggcgccagacgcggcgctgcagagcaaatgccagcaggacttcacgaagctgacggactgcatggactacgcgacggggcacgaggaggcgccgtcgtcgacgtgctgcggcgacatgtcggcgacgcagcaggcgcggcccgagtgcctgtgctacatcatccagcaggtgcacggcggccggaacgaggtccagtcgctcggcctccgcttcgaccgcctcctcgccatgcccaccgcctgcaagctccccaacgccaacgtctccctctgcatcaacctgctgcacctgaccccaagctcaccggactacgctgtcttcgccaacgcctccaaggcagcggctacgacgccgtcaagcaccaccccgggggcggcggcggccaccgccggcggcttcaaggttcaggcggggctcagctacggcgtcgtcgcggcggcgatggtttctgccgtcttctcatccatcttctgatccgtgaaacaagctagtcacccacccatttttctttgggaaaaaatcttttctgtctcttgatctctacgtcgttcagcttttactctgcaagaaacgaatgcacactggatggatggatggatggttggtttgtgatgtgctacacgaagattcgttctgatgttgtactcttttgtaccctgataaatagatttgagacttgatttttgttcttctgtggcttgatgctagctagctacattctgaatactgatacacgcatatgctagtactaaatctgaataatcaataatgtacctcattttttcttctgaatattgatacccttaagtcataataacatctttgtgtgc

SEQ ID NO: 3544 - DNA, 1096 bp, Oryza sativa
  ref <308>: DATABASE ACCESSION NUMBER: AK061215
  ref <309>: DATABASE ENTRY DATE: 2001-12-06
aatggccacggcagtaaactccaacctcttccgggactacatcggcgccatcttcaacggcgtgaagttcaccgacgtgccaatcaatccgaaagtccggttcgacttcatcctcgccttcatcatcgactacaccaccgagacgaacccgccgaccccgaccaacggcaagttcaacatcttctggcagaacacggtgctcaccccgtcggccgtcgcgtcgatcaagcagagcaaccccaacgtgagggtggccgtcagcatgggcggcgccaccgtgaacgaccgcccggtcttcttcaacatcacctccgtcgactcgtgggtaaacaacgctgtcgagtccctcaccggcatcatccaggacaacaacctggacggcatcgacatcgactacgagcagttccaggtcgacccggacaccttcaccgagtgcgtcggccgcctcatcacggtgctcaaggccaagggggtgatcaagttcgcctccatcgcgcccttcggcaacgccgaggtccagcgccattacatggcgctgtgggccaagtacggcgccgtgatcgactacatcaacttccagttctacgcctacggcgccagcacgacggaggcgcagtacgtcgacttcttcaaccagcagatcgtcaactaccccggagggaacatccttgcgagcttcacgacggcggcgacgacgatctcggtgcccgtcgagacggcgctgagcgcttgccggactctgcagaaggaggggaagctgtacggcatcttcatctgggctgctgatcattccaggagccaagggttcaagtatgagacagaatcgcaagcacttctggctaatgccaccatcagttactagctagtagctagttttgtttgctgcattattgtttcacatttttaaacaaagatcacaagagctgtactatgaaaataagcaactcaaatttgaaatacgaatttgaattagcatctagtatatatctagccgtgcatcattccagctggaatttaagataaaaccccaaccgtgttatacgtacagacatgcttatgttgtgtatgtcattattggattgttcctgttttgttg

SEQ ID NO: 3545 - DNA, 1058 bp, Oryza sativa
  ref <308>: DATABASE ACCESSION NUMBER: AK061216
  ref <309>: DATABASE ENTRY DATE: 2001-12-06
gcgactccgttctccattcgcgaatccaccggaagcgagcccccgatttctcgacttcgtcggcgaccgaccggggtccagaaccctaaccctaaccctagcgaggaagaaggcggcggcggcggccggaggggggagatggtgtactacgcgctgtactggtgggcggacctggacaacctcaccaacctgcagccccgctacggctgcgacgacccgacctacccctactacttcaagctgcggtgcgagaactgcggggaggtcagcgccaaggcaacctgcgtctccctcggcgaggtcgtcgacctgcccaacggacgcagcaccgctaaccttgtccagaagtgcaagctttgtgggagggatgcatcgattgtgatgattcctgggcaggggacaccactgactatggagcagagccaaaaaggagatagaacttgtttgatggtctttgactgcagaggctgtgaacctattgatttcgcttttggtaatggctggaaggctgaatctctggaagggacttcatttgacattgactgctctgaaggtgagtttgctgattacgatgagaagggggagtgccctgtaggtgtgggcaagctgcggtcagaattcagagtggtgaagaagcaggagagtcgtgggaagactaaatatgtctagatccagcggcatctggggtattcaatcatacaagctgggaatgtataaagcgtattataaaatgagacctttctctcgtatgtgtgaacaaaactcgggaacatccttttgctgatgctgtgggatgccaatggatttggcgacatgttaggcaccgaaccatccattattccctaccagttccattaacctggatcatttcgtgaagtcttgcacatgtctgatatcgaatgttttacccgtgtctctgatgttgaaggttctgctcatgtctgatattgaatgttttgctcatgtctgacatctgtgcaggccatagcaaattgtaattggaaatgctgccagtgccttttatatggtaaaaggagcacactgcgtacgagaacagc

SEQ ID NO: 3546 - DNA, 1421 bp, Oryza sativa
  ref <308>: DATABASE ACCESSION NUMBER: AK061217
  ref <309>: DATABASE ENTRY DATE: 2001-12-06
atcagacgttcaccatcttccgcgtccccgcctttcttcgcgagagcagccggacctcctacgagccgcgcttggtgtccatcggcccctactaccacggcgccgccgcgctccgcgccatggaggaccacaagtggcgctacctccacgacctgctgtctccgcaaggaccgccggaacccaaccatcgcgttccacttccaccccttgtctccggactctccgcatccgccttggttgagaagatgcggtctctcgaggccgaggcgcgcgcctgctacagcgagcaacccgtcgacctcagctccgacgacttcgtccagatgctcctcctggacggatgcttcatcctcgagttcttccgtaagtggcgcagaaatcagcccgatgtgctatgcgacgttggttggggcctcacgttcgtcatctccgatttgctccttatggagaatcagctcccgttcttcgtcctcaagaagttatatgttaccgcctttggcgaacaggatggccaggccggaaataacctcctccagcttctccttcagtacatcgccggccgtcaagttccaatcagatggccgaacgggcaggtcaatcacatcctacacctgtactacgagagcttcgtgccccagagccagcggacgccgcagcaagaacagagtaccacggcgccgcgagtgctaccgtgcgccgtcgagatgagcgaagccgggatgactttcgccgtgcggcggaactcagacaacggctacgacgtggtgttcgactcccttaggggcgtcatggagatacccaccatattgatcgacgacgcgaagacgccgctgctcgcgaacctgatcgcgttcgagcagagcctgggcaacgacgaggccatcctcctcagcagctacgtggcgctgatgggccagctcatcgtcacggcgcgcgacgtcgcgctgctccgccggcgcggcgtgctggagaacatgctggccaacgacgacgatgccgcccggttcttcaaccacctcggcgactgtggcgccgtcaaccacgacagccacgccttcgtcgggctctacaaggacgtggaccgctactgcgggacatggtggcggaggaagacggcggcgctccggcgcgactacttcgccagcccgtggtcggccatctccttcgtcgccgccgcagtcgccgtcgtgctcgcagttatgcagacctacttcaccatgtttccattgaaaaaagggtgaatttggtaattaagcacaatcacacagttgagagttgtaaaatctctactcccattgtttcagggtataagacattttgactatggttaaagtcaaactgctttaattttgattaagttcgtagagaaaagtattactacatccgtcctctaatataagatattttgatattttgcttgc

SEQ ID NO: 3547 - DNA, 1001 bp, Oryza sativa
  ref <308>: DATABASE ACCESSION NUMBER: AK061218
  ref <309>: DATABASE ENTRY DATE: 2001-12-06
aactctctctctcccattccatttcccttctcccccagccagaggcagaggctcccgcgacctcgtcggcgacggcgaccgcgaccgcgcgacgacgaggaagcgaaggacgaggaagcgagcgcgccaccatcttcatagctcgctctcctcctcacctcaggtggtgaaccgaggagacctgcgtggggtgggggatggaggaggaggaggcgggtgtgagggagcgccgcggcgtgctcaaggtggtggtggccagcgggaccaacctcgccgtccgggacttcacctccagcgacccctacgtcgtcgtccgcctcgccgccatgaataagaagacaaaagtcatcaacagctgcctaaacccagtttggaacgaagagatgtccttctccatcgaagaaccagcaggggtcatcaaattcgaggtgttcgactgggaccggttcaagtacgacgataaaatggggcacgcgtttcttgagctgcagccggtggccgcggcggcgaagctgcggcgtgcgctgcggctgacgacgggggagaccaagctccggaaggttgccgccagcgtcgacaactgcctcatgtgcgacagcttcgtgacgtacgccgacggtgagatcgtgctcgacgccaggctgcggctgcgcgacgtcgagtccggcgagctgttcgtcactgtcaagtggatcgatgcgaacgccaagtgagaaaatgggactccgtgtgaatgctgtctgatctaaatctgaaatttccagacagttctaacaggcatagtattagcgtgtgcgtgcatgttcagaatgtttttgtgcttttcttttttaatgaacgatcgggaaagtaggaaactctaattattgtttggaaataggaacgcaatgtgttctccccactctttttagcccattctagagataagtaccctttttctccaattcatatgtgtacaagtattacattgtttttctctaaatatgtgcaccattcatgtg

SEQ ID NO: 3548 - DNA, 1366 bp, Oryza sativa
  ref <308>: DATABASE ACCESSION NUMBER: AK061219
  ref <309>: DATABASE ENTRY DATE: 2001-12-06
atctctccaccctcagccgccacacttctcccatccattcccctctcctctcctctcctctcctctccggcggtgggtatcggcgatgacagcgtgcggcggcgtcctcctcctccatcgccgctcgcggtgccggcttactcccccctcaccgcttactgcgccgcctccgtctccgccggcgccaggctcgggagcggtggatctgccgccgacagcgctcccgggcctagggcggctagatcgcgcggcggcagtccccgggcggctcaacgacggcgtgcggctacggcgctgggcctgattagcacgcagcagctcgccagagctcgctgccgcgccgtttgtgccggcgggctcctgcttcggggtttctggaggcgcgtgggggtccgtccgcgggtgcagtctgcatactggctcaagttctggcggaacatgatgcgcgtcactctcacctacgaggcgcatgccgcgcggatgctggaccgcgggaccccatcaacgccaacctctactgcgcaagaagcttcgggaactcaggcaccgttgccaggagggttcgctcagggacatcgtcttctgcatgcgagccgacctgcttaggaatctcggcaacacgtgcaactccaagatccgcaggttctgcactaatcttaatctgtattatgccagcatgtttttgtttcagaatgcaggcagatttaatacccagatttttgaaagaaggcctaaacttgctaaacagagtctttataccagcaattttgatgcgataagatgttgttaggatttagggcaacttattcttagaactttagcaatatttcctaccaaattgatgagcggtgagactaaacaccctttcatggtttctattgttccctcgctgggcttatgtttcttttgttgatttgactaggatttaacagatgatcagctgcttgtaggaattaagcttcgaattgacaagtccattgaaaaaaggaaaattaacacatggtctgagtaggatgttatgattgttttttttttcctttctgacaggaggaatggatacatcagtcaaggaaggaggagtatgaacaagagagcaaggcatgcagataggaagacatcattcggtgaaccgaccaaactatgtgagtagttagatgattttttaagcatgcatatgtattctagacaagttgttaggtctaatggtgctgagcatctgttaggttaggtctaatgatgtatttgataactgtgggcaagtaagttgctttaatttgaaatatcgagggagtatgtgctatagtctatcggataatttattgatgtctaaattatcgtttcttaggccaactgatactgtgataag

SEQ ID NO: 3549 - DNA, 1656 bp, Oryza sativa
  ref <308>: DATABASE ACCESSION NUMBER: AK061220
  ref <309>: DATABASE ENTRY DATE: 2001-12-06
gtgccgcccgcctcaaaaccaaccgcgtccgtccccggcgtcaaaaccatgtgcccccccgccccattcctacgtgctgccgcgcgccacatattaatcagccgcacaccgttgcccgcctaccactactaccactgatcacacttgctactactaccacacatggcgaggagagcgcgggaagaggaagcggatcaggtggagaggaagctggtgctggggcggtacgagctcgggaggctgctggggcagggcacattcgccaaggtgtactacggccgtgacctccggtccggtgagagcgtggcgatcaaggtgatcgacaaggcgcggctccgtcgcacggaagggatggtggagcagctgcggcgtgagatctccatcatgcggatggtgcgccaccccaacgtggtggggatccgcgaggtgctcgccagccgcgcccgcgtgttcgtcgtcatggagtacgcccgcggcggggagctgttcgccaaggtggcgcgcgggcggctcaccgaggagcacgcgaggaggtacttccagcagctcgtcgccgccgtcgggttctgccacggccgcggcgtcgcgcaccgggacctcaagcccgagaacctgctgctcgacgaggaggggcggctcaaggtcaccgacttcggcctcgccgcgctgcccgagcagctgcgacaggacggcctcctccacacgcagtgcggcaccccggcgtacgtcgcgcccgaggtgctccggaagcgcggctatgacggcgcccgcgccgacctctggtcctgcggcgtcgtgctctacgtgctcctctgcggcttcctcccgttccagcacgagaactacgccaagatgtaccagaagatcttcaaggcggagtaccaggtgccgccgtgggtgtccggcgacgcgcgccgcctcatcgtccgcctgctcgtcgtcgacccggccaagcgcatctccatcccggagatcatgcgcacgccatggttcaagaagggcttcgtgccgcccgtccccacctcccctgtctcccccaagaaatgggaagaagacgatgtcctcctcgacggcggcgactccggcgccatgtcgccccggacgtgcaacgcgttccagctcatatcctccatgtcctccgggttcgacctgtcggggatgttcgagagcgagcagaaggccgccacggtgttcacgtcgcgcgcgccggcggccaccgtcatccagaagctggaggccgtggggcgatcgctgggttacagcgccacgagagggaaagggtggaagctgaggttggaggcgacggcggacggagcaaacgggcggctcgcggtcaccgtcgaggcgctcgaggtggccgccgacgtcgcggtggtcgagttcgcgcacgacgccggcgacgagctcgagttcaacaagttctgcgccgtcgacgtgcggccggggctcgccgacattgtctgggcgtggcagggcgaccggccggcggcgcccgacgttgccgccgccaccgtcgagtgctcgccggcgtgatcagagccgtccgttcagcgcgacgtgaaatctgtaggatgtattagctttagcttctttgctcgcggttatgtacaggccaaatcgagagatgtgtaaatacaaaagttttgttacttgatc

SEQ ID NO: 3550 - DNA, 1316 bp, Oryza sativa
  ref <308>: DATABASE ACCESSION NUMBER: AK061221
  ref <309>: DATABASE ENTRY DATE: 2001-12-06
ttcgtatccaggaggagaatgcaaaacgagaaaaggctgaaagagagcgaatgcagcaaatgattactcttatcactaattcaataagcaaggaccttcctgctactttggagaagtcactgaagaaagaaatttcttcacttggacctgttattgcacgggcaataacacctattatcgagaagtgttcagcctctgcagttgctgattcaattcagaaagtggttggtgacagagtggtgaatcagctggacaagtctgttagtgcaaaacttgaagctactgttgctagacaaatccaaatgcagttccacacatctgtaaaacagacccttcaggatgctttacgtgctagcctggaagctttccttgttccagcgtttgaacaatcttgcaagacaatgtttgagcaagtcgatagcgcattccagaaaggaatgtctgaacacactgttgctattcagcagcaagttgaggcaacacataccccattggcgcaaactttaaaggataccatctcttctgcgtcttcgatcacccagaatcttacagcagagttgcttgatggccatcgcaaactattggcgctgcttgcatcgggcaatgcaaaagcacatagtacaaacgttttgcagcccaacaatgtccctgtgactggtccaccggaggttgaggctccattagatccaatgaaggagttgggcagactgatatctgaacgcaaatttgacgaggcatttacaatggctcttcaaagaagtgacgtgtcgatagtgtcttggttgtgctctcaggttgatttgcgcgcattgtgctcaatggtccccgtcccccttaaccagggggtcctcctagccctattgcagcagctagcagttgacattgctactgatacgccgcggaagattcagtggatgacagatgtcgctatggcgataaatccaaccgatccggtgatcgccatgcacgtgaagcctattttcgagcaagtctacaatgcattgctccacctacgctcgctccccaccaccagcccatcagacagcaccagcatccgcttattcatgcatgtaattaattctgttctgcttagctacaagtgattctaggcatctattgaggttctggaactgagatgcatggtctactaccgttgtatagagaaattttggtaagcgaaggaaacccaatagggcattccattgcctatgaggctgtgaccgagaacactagcaggagggtggaagtgccccttgctgtaaactaggcttgtaacagtcttaatttggagtatttcaatatccagtttagtgtct

SEQ ID NO: 3551 - DNA, 964 bp, Oryza sativa
  ref <308>: DATABASE ACCESSION NUMBER: AK061222
  ref <309>: DATABASE ENTRY DATE: 2001-12-06
cttgcattcactgcttctgctcggctgtgaacttggtgcggaaccgcttcctcggcatcccggcgccgccggagggaggcgcggtcgccgccggcgacatcacctacagcgggagcctttgcgcctgcccgctcgagcccagcgagagtagcatgtgctgcgccgaagggtaatacggctggtgcaccaccggcgccggcaggtgcggtggcgacggcggggacacagaccgctcgtcgtagtattccgagccatccgagttgttgtcagactcgtcgccatcaaccccagggagccggacctcgggcgtctcctcctcgcggtgcagctggccgtggagcacgttcgccggcatgggcggcgcgggcagcgccagcggcggaggcggcggcggggacccctccagcagccagcagtggaagttgcagtggcagccgcacgcggcgcacatgagcgacgtcgggtcggtgggttcaccgccgacgacggcatgaactcctcgcagccgtccagcgccgtgtccgcccaggctcgctgcgtggttcttggggcactcctggtacaccgtctctcctccgcccaccgccggctgtgctcgtcgcagctgtagctacggaggggtacagcccacaagctccacctcagccatgtctccggcgacgacgcggacgaagctgggcgacagtggcgcggcgaggtcgggcggcggcacgaccttgcggtgcccggcgaggagtggcgtagcaagccgagcattgctcggcgcggcatcccgaggctgacgtacggcggaggtgcggctgctgaccgaggtggcggcggcgctgagcgctgtgacggagatgacggaaaaggagggggatagatggaaaacttgacgagagtggcacggttctaatttctgtaaaattttaatggcacgtttacgaataagcgaattataattgtatttttctgaatggcg

SEQ ID NO: 3552 - DNA, 1044 bp, Oryza sativa
  ref <308>: DATABASE ACCESSION NUMBER: AK061223
  ref <309>: DATABASE ENTRY DATE: 2001-12-06
atcgtccggccgtttcgtttcgtctccccgccgcgttcttaaatcccaagcccaagccgccctcgcacttcctcttcccccacctcgccgagctccacgccgccgccgcggcgccccgtctcccacgccgcttcgccccgtcgtctgcgggggagccgcttggagtcaagagcagcgaccggttcaagtctcgggggacgactcgactcctccacgcgggtcgcggactcagcggtgccgtactctgccacccgtgtgtgcctgatatatgtgagttcgtgccttttcccttgggtggcggcagcagcagctgagtctcgtggaggaggaggtagcgtcgtcggtcggcacgcgtatggccatggacctcgtccgccgggaagcggaccggggcgccgcgccggagttcgtggcggtcgacatcgggggcgaggcggagacggccggggcagaagcggagcccaagaagatggagtcctccttcgctgggaagggcctcgagcgggagaggagcggagacgccaatccttctaccacaggtgtgttggccgtgtatgagaagcaggtggtgcctgtgcacgttgatggtagcccaaaggagcagttccacccttcaacaccaacagctggtggggcaaagcgccgacgaacaggcagacgggtcccagggtggcgtgacccgaggaagatcctttttgccttcgcagcactgtctagtgtgggcacgttgatcttgctctacttcacactctcaatggggaggatgacaggaggtcaggctgatggccagtgatgccatctgaccgcacagtttatcacttttcatagtgtttctgatgtttgtaaagatcaagaaatggacggttggtttctatactagcagtgttacatcactgcttaattatatcaccatgatttagatgtttgtacaaaaatatgtaggccgtatgttagagagtttttaagtggcatgaggtgattggtgaatacttgaagtgtaaataaacacatgaacagcaattggatggacgacggcggtggaac

SEQ ID NO: 3553 - DNA, 1526 bp, Oryza sativa
  ref <308>: DATABASE ACCESSION NUMBER: AK104443
  ref <309>: DATABASE ENTRY DATE: 2002-08-28
aaccagcctgaattcctgaagtcctaagctatagctagcactagcagctagttgctccaaagcccaaaccatgcagcactcaccttcaaacgaaatgaccctccttctccttctcttcctccttggatgcacacactacggtcacgccggctcagaccgtcccaagatcgactccatcttcagcttcggcaactcgtacgccgacaccggcaacttcgtcaagctggcggcgccggtgttccccggcatccctttcaacaacctcccctacggcgagaccttcttcggccaccccaccggccgcgcctccaatggccgcctcaacgtcgacttcatcgctgagggccttggagtccccttgctcgccccgtaccatggcgagtcgcaggacttcagccatggcgccaacttcgccgtcgtcggcgccacggcgctcgatctcgccttcttccagaagaacaacatcaccagcgtgcccccgttcaacacctcactgagcgtgcaggtcgagtggttccaaaagctcaagcctaccttgtgctcgacaacccaagggtgcaaagactacttcgagagatcgctcttcttcatgggcgagataggcggtaacgactacgtcttcctctatgccgccggcaagaccgtcgacgaggccatgtcatacgtgccaaaggtcgtccaagccatctctgccggcgtcgaggcggtgatcaaggagggagccaggtacgtggtggtgccgggccagctgccgacgggctgcctcccgatcatcctcacgctgtacgcgagcccggccgcggcggactacgacgccggcaccggctgcctgtggcggttcaacgcgctcgcacgctaccacaacgcggtgctgttcgcggcggtgtcgctgctccgggccaagcacccgtcggtcgccatcgtcttcgcggactactaccgcccggtgatcaagttcgtgcaaaacccagacgaattcgggttcagcgagtcgtcgaagctccgggcgtgctgcggcggcggcggcggggcgtacaactacgacgtggcggcggcgtgcggcttccccggcgcggcggcgtgcccggaccccgacgcggcgatcaactgggacggcatccacctcacggaggcggcctacggccaggtcgccgccggctggctccgcggcccgtacgcgcatccgcccatcctcgcggccgtgcaacgatctgacgaaggaaaccccatccaaatggctacgtcgatgcctgcctctttctgatacgctctccttttgagtcactttgtctctgttattcttaatccaagagtaccccagctgttaattgtatatgctcctttaaaaaggagtccataagtgacagttactggaagtcggagctgcttcatcgattgcgatgagtttggcagcgatatataaccggtgacgagtctgagtagttgcgttgttctggggttttgcttatgctttctgtgtggtttttgctggtttttcataaatgaaccgtgtggttgtatggttc

SEQ ID NO: 3554 - DNA, 1218 bp, Oryza sativa
  ref <308>: DATABASE ACCESSION NUMBER: AK061224
  ref <309>: DATABASE ENTRY DATE: 2001-12-06
aacggcaacggcgtgatcgcgagcatggagcactgcaacgacttcatgctgctgggcacggaggcggtggcgctgggccgcgtcggcgacgacttctggtgcaccgacccctccggcgaccccgacggcaccttctggctgcagggctgccacatggtgcactgcgcctacaactctctgtggatgggcgccttcatccacccggactgggacatgttccagtccacccacccctgcgccgccttccacgccgcctcccgcgccgtctccggcggccccgtctacgtcagcgacgccgtggggtgccacgacttcgacctgctccgccgcctcgcgctgccggatgggaccatactccggtgcgagcgctacgcgctgccgacgcgcgactgcctgttcgccgacccgctccatgacgggaagacgatgctcaagatctggaacgtgaacaagttctccggcgtgctcggcgcgttcaactgccagggcggcgggtggagccgcgaggcgcggcggaacatgtgcgccgcggggttctccgtccccgtcaccgcgcgcgcctcccccgccgacgtcgagtggagccacggcggcggcggcggcgaccgcttcgccgtctacttcgtcgaggcgcggaagctgcagctgctccgccgcgacgagtccgtcgagctcacgctcgagccgttcacctacgagctcctcgtggtggcgcccgtgcgggccatcgtctcgccggagctggggatcggcttcgcgcccatcgggctcgccaacatgctgaacgccggcggcgccgtgcagggcttcgaggcggcgaggaaggacggcgacgtggcggcggaggtggcggtgaagggcgccggggagatggtggcgtactcgtcggcgaggcctaggctgtgcaaggtgaacggccaggatgcggagttcaagtacgaggacggcatcgtcaccgtcgatgtgccgtggaccgggtcgtcgaagaagctgtcgcgtgtcgagtacttttactagtgtggttcaatgctggaaagagactaagacaaaattttcggtctttttattttttattttacttaggtcggaaaataatttgagtgtgtgagagctttgtaagttgcttagctctggttggtttcggttggattatcattgttacgggttttaaacgctggttaatgtgaattaatgcaactatgcaagtgttactttatc

SEQ ID NO: 3555 - DNA, 1047 bp, Oryza sativa
  ref <308>: DATABASE ACCESSION NUMBER: AK061225
  ref <309>: DATABASE ENTRY DATE: 2001-12-06
atgcgccacgatcagatcacattctcaagaacacaaataagataatagcatcatggctatgtgagcttagagagagaataatgcagagccagagagacagagagaggtaggtgattgataataagaaagaagggaagaagaacacaggtctaaccggaggagggcaagagaagatggtggtgatgatgatgcagaagagctccctggacctggtgcttgtgccatgtggtctggtgatcatgttcggctaccacctcatcctcctctaccggattctccgccgccccgccgccaccgtcatcggctacgagaaccacaacaagctggcatgggtccgccgcatggtgcaggcgagcccggacgagacggggctggcactgagcgtcatctccagcaacatctcggcgtcgacgaacctggcgtcgctgtgcatcgcgctgggctcgctcatcggggcctgggtgagcagcacctccaaggttttcatgacggagctcgtctacggcgaccgcacccaggcgacggccaccgtgaagtacatctcccttctcgtctgcttcctcgtctccttcacttgcttcatccactctgcaaggtactatgtccaagccagcttcctaataaccacgctggattctgatgtcccggcaagctacatccagcatgctgtgatccgaggaggcaacttctggtcaatggggctccgtgcactctacttcgcgacaacgctgctgatgtggatcttcgggccaataccaatgttcacctgctcggtgttgatggtgttcatcctgcacctgctggacagcaattccctgccattgcacaaccatcagttcacaattagaaaacggcatgatcagagagctctggcatctacagtggttacaaggcaccccagccctcagaatccgattctcagtaacccggtcttgtctcctgtaactttttcaataaattaatagatatgtttgctgcaaagcttggaggtttgtatggagtaacattacatgagaatatgagattcaggtacaaaattttcatcag

SEQ ID NO: 3556 - DNA, 1285 bp, Oryza sativa
  ref <308>: DATABASE ACCESSION NUMBER: AK104444
  ref <309>: DATABASE ENTRY DATE: 2002-08-28
gagagagagagagagagcagtgttgggcgatggctagaccagctccgctgctgcttcttctcgcggcggtgtgcctagtggccgccgcctccgccggcggtgccgatgcggcggagaggaaggcgacgacggtcggcgtctatgagctcaggaagggagatttctccatcagggtcaccaattggggagcggtcatcatgtccgtcgtgcttcctgactccagagggaaattggacgatgttgttcttggatatgacaccattgctgaatatgttaattcttctacttactttggagcgctcgtcggacgggtagccaacagaattgccaaggcgcggttcgtgctcgatggaaaagcttatcatctgtatccaaatgatggcaaaaacacacttcacggtggtcacaggggtttcagcaatgttacatggacagtgaaggagcatgttggtggaggtgacgcaccatacatcacactgtactaccatagctttgacggagaacaaggattcccaggcgccctagacgtgtacgtgacgtaccagctgtccggcccgtacgtgctgagcgtgcacatgaacgcgacggcggcgggcaaggcgacgccggtgaacctggcgcagcactcgtactggaacctcggtggcacgggcagcggcgacatcctgggtaacacggtgcagctgttcgcgtcgcggtacacccccgtggacgccgagctcatcccgacgggccaggtcgcgcccgtcaccggcacgccctacgacctccgcgcgccgacgcccgtgggcgcgcgcgtccacctggtgacgggcggcctcagcaagacgggcgccaccatctacggcttcgacaccaactacgccgtggacggcggtgacgacgtcgacgcgcacgcgcacgcgctgcggcgggtggccgtcgtccgggacggcaagtccgggcggtcgctggagctgtgggcgaaccagcccggggtgcagttctacaccggcaacttcctcacggccgacgtgaaggggaagggcgggaaggcgtacgggcagtacggcgcgctgtgcctggagacgcaggggttccccgacgccgtgaaccaccccaacttcccgtcggtgatcgtgaggcccggacaggtgtacaagcacgatatggtgtacaagttctcgttctagtttaggtgactatacatggatcatatgtggtcattggtcgatcgcttcatctgctgtaagttgtgacattgtcggtgtcggtcggtgcaataatatgatatgcgttgatttgc

SEQ ID NO: 3557 - DNA, 1155 bp, Oryza sativa
  ref <308>: DATABASE ACCESSION NUMBER: AK061226
  ref <309>: DATABASE ENTRY DATE: 2001-12-06
agccgcggaaaggcagcgaaagagggcgcgaaaccgtagaggcgggcggcgagcggcggcggcggcggcgcggagatgagctcgtcgacgtccgcccgcgacgacgaggcgccggacctcgtctgccagatcgactgcgtccacggcatggtcgacgcgctctcctgcgtccgctggaagcgccaccaggacgcggtgctggagctgtcggagcacggcatcgtgctcatcgtcgaggagagtggctgcctccaggccaaggtctacctcaagcgtgagctgttcatggaatatgagtacgcggcagaggggcggccgcggtttggcctcagcctggggctcctcgtcgattgcctcaacacgttctcggccccggggcactcctctcctgtcgagatccgctaccctgggcctgatatgcagcttcttctcaagtcagtgggctccccagattcatgtatgtatgcagaaattagaaccaggattccagatacaatctcctgggattaccattttgagcatgctgggaatacaccagtcacttttactgtcaagtctgctgtcctgaaagaatcgatcgaggaccttgagtggccaggttccagcattcagattcaaatgcaaccagaccccccttcggtactattcaaaggtgaaggtcatggtgacttgcagattgagttcccctactatgcaaatacagatcttctcattgcattccaatgtgaccatgaaacatcatacaggtataagtacaaatttcttcgtgcaacaacttcgaatttcccaaacagtattgtgaaggagaatcgtgggagcaaggtgacaattggtaggggtgggatgcttaaaatccagcacctggtttcagttgcaaggccagggtgtaaagttttgggatgggatctaaagagggcccaaagcattttccttttgctgctcaagcaacagtctacagcgtggtgaacctgagtcaaaatagcctattcatattacttgggcaaccaaaaacatggccaaattcaatatcatctttaagacgaaatggattttaatttttggaggaagtttggtgttgaatttacgttgcttgctactaattgtatgatgattgcttgactccgtttttggaagttcattattgcttgattgctt

SEQ ID NO: 3558 - DNA, 1014 bp, Oryza sativa
  ref <308>: DATABASE ACCESSION NUMBER: AK061227
  ref <309>: DATABASE ENTRY DATE: 2001-12-06
acctcaccgtgcccatctacgaccgcctcgtcgtgcccgtggcgcggcgcgccaccggcaacccgcacgggctcaccccgctccagcgcatcggcgtcgggctggtgctgtccatcgtcgccatggtgtgcgccgcgctgacggaggtgaggcggctccgcgtggcgagggacgcgcgcgtcggcggcggcgaggccgtgcccatgaccgtgttctggctgatcccgcagttcctgttcgtcggcgccggcgaggcgttcacctacatcggccagctcgacttcttcctccgcgagtgccccaaggggatgaagacgatgagcacggggctgttcctgagcacgctctcgctggggttcttcgtcagctcggcgctcgtcgccgccgtccacaagctcaccggcgaccgccacccctggctcgccgacgacctcaacaagggccagctccacaagttctactggctcctcgccggcgtctgcctcgccaacctcctcgtatacctcgtcgccgccaggtggtacaagtacaaggccggccgcgccgccgccgccggcgacggcggcgtcgagatggccgacgccaagccatgcctccactgatccacaccgtccatccatccatccatcagacggctacgatttcttcttcgcatcttgtactatatatatactagtatactactagtacgtacgtacgtacgtgtgtaccaagcgaggcgtgtatgcgtatacgtatacgtgtacgtgtgcctgcgtgtagtataatggaattaataacttgttagaggggggaaacagtaaaaaaaatgacgaaattaatggtggggattagggagagatttttaagggtggtggtggtggggtcggggtgtcagtgactcgaggttggtgcattttgtgtcgtgtgggagagtcttcgtggtgtggtaaaaaaaaagagaacaccacggcttcatcagtgtacaatcatccgatcgaaaggaaaagatgaaaaaattgcgtgcttttcatt

SEQ ID NO: 3559 - DNA, 968 bp, Oryza sativa
  ref <308>: DATABASE ACCESSION NUMBER: AK061228
  ref <309>: DATABASE ENTRY DATE: 2001-12-06
aactcctttatacacctcttctctctcctcccctctcgctcccgtttcttctcacatcggcgagttcgcaacctcctccctccaggctccacttcccagacgaatcggcggcagcggcggcggcggcggtgatggagtgcgttatcggggtcgtcggccgcgacttcgcggtggtggccgccgacacatcggcggtgcagagcatcctggtccacaagaccgacgaggacaaggtgatggtgctcgacagccacaagctgatgggcgcgtccggagagcccggcgaccgggtgcagttcaccgagttcatccagaagaatctccacctgtatcagttccgcaacaacatcccgctcagcaccgccgccaccgccaatttcacccgcggcgagctcgccaccgccctgcggaagaatccgtactatgtcaacgtgttgcttgctggatatgattcggatgttggtgcctctttgtattacattgactacatcgcaacattccataagatcgaaaagggtgcctttgggtatggctcctacttctgtctctcgctgatggacaagttatatcgtccagacatgtcagtcgaggaagctgttgatcttgttgacaagtgcattaaagaaattcggctcaggttggtcgttgctcctcaaaacttcataatcaagattgttgataaagagggtgctagggagtatgccaggcgtgcatacaccgacagtccaccggaagctgcaacatcagaagctgcaactgtagcagcctgagttgtatctgccatatgggtgtgaaccttaggtttccgagtacaattgctatgtaatcacaagtactgggatctgagaactttgttgcaaatttacttcctcttttatttgtgttatttatctgtttaactgtttcatgttcgtgaatgctgtgcaactggattttatagacatctttctagttcctcctgttcccac

SEQ ID NO: 3560 - DNA, 1016 bp, Oryza sativa
  ref <308>: DATABASE ACCESSION NUMBER: AK061229
  ref <309>: DATABASE ENTRY DATE: 2001-12-06
gagatgggatcttgaagttgaagacaaggcagttgttcagtctcctctagcacagcactagcgagtgactgccccaggcggatattctgaatccaaggaggaaagatgaggccgcggctggtgctcttcggcgactccatcaccgagctctccttcgccgacggcggctggggcgccgccctcgccgaccacttcgcccgcaaggccgacgtggtgctgcgcgggttcagcggctacaacacgcggtgggcgctgcgggtgctggcgagggcgatggagggcgcggccgccgccgcggacccggcggccgtcacggtgttcttcggcgccaacgacgcgtcgctgccggaacggaagcaggtgcaccagcacgtgccgctcgacgagtaccagagcaacctccgctccatctgcgcctacttcaaggagcaatggccctccactaaaattatactcatcacgcctccaccaatctatgaaccggcgagaatccgggacatgtatggagaagatgacccttcaaaactacctgaaagaaccaatgaagctgctggcacttatgcacaggcatgcctgacagttgctaaagaattgaaccatccagtcatagacatctggacaaagatgcagcaatttcctgactggcaaacatctgcattatgtgatggactgcacttcaccccattgggaaacaaaattttgtttgactgtgtgctggagacactggaaagcattggtttcagccaagggagtcttcaaccagatcttcctctcttccatgatatcgacccaaaggaccctttgaaagcctttgaaatctgaagaaggtcccggccggcatggtttgttcaggcacggatactcgttgtaacagggacaccttatgccatcgtgttgtgccagctgtatgtgcttgaattttccattataagatggttgaatttccatgtagaacataataaatggtttgtatttccatgtagaacataataaatagtcatacaattccatggttc

SEQ ID NO: 3561 - DNA, 1280 bp, Oryza sativa
  ref <308>: DATABASE ACCESSION NUMBER: AK061230
  ref <309>: DATABASE ENTRY DATE: 2001-12-06
aagatcagacgtcaccactactgactcgtcttcctcccacctcggtcgcgccccacgattaactccgccccttctcgcctcttccttcgtgctaactactaccgccgccgccgccgccgccgacgccaaatccccaaaccctagctccgccctcggcctcgccgccgcccgccgccatggcggagaccgtcgacgacaaggtcagctacttccaggcggtcaccggcatctccgaccacgacctctgcaccgagatcctcgccgcccacaactgggacctccagctcgccgtctcctccatcacccggacacccctgccttctgcggtggctgcctctgcgctgagccagtcgcggccttcatagatgagaacttcgttgcgtggggtggtagcatcaggaggactgaagggttcaagatgagcaacagcctgaatgcatcgaggttccctttctgcgcggtggtcatggcgtctacgaaccagagaattgtgttgttgcggcagattgaggggcccaaatcacctgaagagatgataacaactcttcaaggggcagttgaagaatgcagtgcatcactcgttgctgctaggattgatgctgaagagaggctaaacaatcaacgcttgcgtgaggaacaagatgctgcttatagagctgcacttgaagctgatcaggccagggaacgccaacggagagaggagcaggaaaagcgtgaaagagaggctgcagaggctgagagaaagcgcaaagaagaagaggaggctcaagaaagggctgcccaagaagcagctgagaaagaagccgctcttgcaaggaggagacaagagaaggccatggctcttggagcagaacctgagaaaggaccagatgttactcgagttcttataagatttccaactggagagcgcaaagaaaggagattcaacagttccactaccatcacttcactgtatgactatgttgattctttggactgcttgaaagcagagaagtacagcctagtttcgaacttcccgagggtgacatacggtccagaaaaactctcccaaacgctggaggaagcaggtttgcatccgcaggcgagcttgtttattgagatagaacaatgaggtgttaagtttgtaagttctgaacggaaacctgcaggtataggtgctccttttacaatttatttaacaacagtgaggaacttcttgtatgacattatactgagaaatgtcttcgatgcaaatcttcttttgtgcttctcatttatattcaataaattcaccttcaccc

SEQ ID NO: 3562 - DNA, 623 bp, Oryza sativa
  ref <308>: DATABASE ACCESSION NUMBER: AK061231
  ref <309>: DATABASE ENTRY DATE: 2001-12-06
attcctcaagctctcactcctctctcgcttccatggcgctcctcgccgtccacgccatggccgcgtccccggccaccttcccctcctcccaccaccacgccgccgtctcctcctactgcgcgctccccgccgccgccgcattctcccgctcccgctctcgcgtcgccgccgccgccgccgccaccctctcggccccgctcactccagttcttgaagtttactgcgggagaggggacaagaagaccaagaggggaaaaaggttcaaccactcgtacggaaatgcgaggccgcgcaacaagaagaagggaactggccctgcacggctgttcgcgccgcctgcgcctccgaggaaggaccagttcgacgacggcgaggtcaccccgatcgacatcgacgatgacatcctggaataggttgtctgaatttccccccttgaattatggtttaccttgagcttaccttttgtctagtctgtaccaaacactgtttcttgaaattaattacagtacattacatggtctcattctacataatgtagatgcctatgatttctttccttgtaatatatatgaatggtgctgcttagagtcattttttatgcattaccagctgaagcagaacat

SEQ ID NO: 3563 - DNA, 1046 bp, Oryza sativa
  ref <308>: DATABASE ACCESSION NUMBER: AK061232
  ref <309>: DATABASE ENTRY DATE: 2001-12-06
acactctcctgcaaaggcacttcacctggaggtgtagtgtgaggagagctttttctttgcaccttttggttttttggagcttcagcaatgggggaggtcaagcatctttgcctggtgaagttcaaggaagaggtcttggtggatgacatcctgcaaggcatgaccaagcttgtctcggagatggacatggtgaaatccttcgagtggtattgcatcaaccagtgctgttatatttagactatagttttgttttctaaatctgcaggttctgaggcagaatacctcttaactagataacatgcctaagatcacttgtttttagcagctaaatgaacttgtaagtttgtttatccttgagagttcagacaactaattagatttttgacttgttttctgctctaaatctaggttcagcagaaagtgtgacatatgcctaagatcactagttcttttagcaactaaatgagcttgtattttcatttgaggctttaaactgttaagagacattgtgcaaacacattggatctgtaatctcttttttttcagggggaaggatgtgttgaaccaggagatgctgacacagggcttcactcatgtcttctcgctgaccttcgcgagctctgaagatctgacgacctacatgagccacgagagacaccaggagttcgccggcacgttcatggcggcgatcgacaaggtcgtcgtcgtcgacttccccgtcgtcgcctccaagcctgcaccaccggcggcaccggcggcggcgtgatgatgacgacatcaactgtccatcaagcatccatccgccatggcatcaaccattgcatcattgttccaagtactttcaggtatccatccatccatctacacacgcagatagctgtgatagatgtaccttaggttccattattgcatgtttctgctgcttcagtgttgagctggtgtagcttagctaaagctgtaatgcagctctatcccgtgcattccgttcaaagcttgttcggttattcttggaataaatttcggtgatcttttggttgctgtgactt

SEQ ID NO: 3564 - DNA, 950 bp, Oryza sativa
  ref <308>: DATABASE ACCESSION NUMBER: AK061233
  ref <309>: DATABASE ENTRY DATE: 2001-12-06
gagccaacgactacacctcgggagggtacacggcgatcgagtagctcgagaacgagacgtggcaatggcgggagacggcgagctgaagctactggggatgtggaccagcgcgttcgtgctcagggtgcgcttcgtccttaacctcaagtcactgccgtacgagttcgtggaggagaacctgggcgacaagagcgacctcctcctcgcctccaacccggtcaacaagaccgtccccgtcctcctccacgccggccgccccgtcaacgagtcgcaggtcatcctgcagtacatcgacgaggcctggcccgaccgcccccccgccgtgctgccctccgacccctacgagcgcgccgtggcgcggttctgggcggcatacgtcgacgacaaggtgcggctggcgtggctggggatcctgttccggagcgagacggaggaggagagggcggcggcggtggcgcaggccgacgcggcgctggagacgctggagggcgcgctccgggagtgctccggggggaagcccttcttcggcggcgacggcgtcgggctcgtcgacgtcgtgctcggcggctacctcgggtggttcacggcgatcaagaagctgatcgggcgcaggatgatcgacccggcgaggacgccggcgctggccgcgtgggaggatctcttccgcgccaccgatgcggccaggggcgtcttgccggatgacgccgacaagatgctcgagttcaggcagacggcactcgccttgggcgcctccaaaaaaatcactctgtgacactaaagacatgtatgtggcacgccatgcgtatccaagctaagtttgtgaggctgcgacaggcagccatatacatctagttttgtttcttccatggcccatggcgtgcttaattaaattgttttcttctcgatgctacttttgactttgtatcaaagacaatgtaataagtggttgt

SEQ ID NO: 3565 - DNA, 890 bp, Oryza sativa
  ref <308>: DATABASE ACCESSION NUMBER: AK061234
  ref <309>: DATABASE ENTRY DATE: 2001-12-06
agaacacaccaagaaagcaagctcacaacaaggacaagacaggaactgaaagccctagtactaagaacagcaaccacctctgaaagctttacaagttcgcaggggcttaactgcgaatgaacatccagaggaagccaggagactggaactgcaaatcgtgccagcatctcaacttcagccgccgggactactgccagcgctgccataccccacgccaggacctgccgcttggcgatggttatgtcccaggtggtgtgctgacctccctggacattcgcccgggcgactggtactgcaactgcggctatcacaactttgctagccgagcaagctgcttcaaatgtggcgccattgtgaaggaccttccagcaggccaaggtggtggtgttgccaacggtgactttgcccgtgccctcgacagcagcgcagttcgtgctgggtggaaggcaggcgactggatttgcacaaggcctggttgcaacgtccacaactttgcaagtaggattgagtgctataggtgcaatgcacctagggaagcaggtaatgtgaagtaagaaaggactgacgcgaccaaagatcgtgagacgtgacgagctggccgaggatgaataaagtgactgctgtcagttgtcacattcacaggctgcgatccagaaactatggatgggactatgtagtaacgtgctgatatattattgctaagtgttactactgcatggttgcaagggtggtagaagtaccttagcttccaagatcgttgtaatgtgtgagtttaattttggcgttttaagtaataagtctagtgattgcaggattgtacggggtaatgtacttgcattatccattataatcttaagcatccaatataattatgcaataattcgtgcctt

SEQ ID NO: 3566 - DNA, 1124 bp, Oryza sativa
  ref <308>: DATABASE ACCESSION NUMBER: AK104445
  ref <309>: DATABASE ENTRY DATE: 2002-08-28
atccatccagtgtgagctccgtttcttgctccatccatctatccatccaaggagtgtggaacgccacacgtattttttttttatctatgctaatctgatcattagcagaggagagttttagcagtaggattggattaaattggaatagtttcatagtttgtgtgtagtgatcttaattagctttgattagacagacagtacagtagagtagaggatgttggctgtgttcagcggcgcggtggtggaggtgccggcggagctggtggccgccggcagccggacgccgtcgcccaagacgcgggcgtcggagctggtcggccgcttcctcgccgccgccgagccggccgtgtccctgcagctcggcgaccttggccacctcgcctactcccacgccaaccaatccctcctccgcccaagatcctttgcatcaaaagatgacattttctgcctgtttgagggagtcctggacaatctgggcaggctgagccagcagtatggcctgtccaagggcgccaatgaggtgctcctggttatcgaggcgtacaagacgctgagagacagagcaccttaccctgctagcttcatgctctcgcagctcaccggcagctacgcctttgtgctcttcgacaagtccacctcttctctccttgtggcctctgatccagagggcaaggtgcctctgttctgggggataactgctgatggatctgttgccttctctaacgacattgacctgcttaaaggatcatgtggcaagtcacttgcacctttcccacaaggttgcttctattccaatgctcttggaggcttgaagtgctatgagaacccaaagaacaaggtgactgctgttcctgcaaatgaagaagagatctgtggtgcaaccttcaaggttgagagcgccactgcaatcctcacagctctgcactaggatgatgtttcggtgtccggtcgttgtacatggtggtggtgtaacatagttgcaactgatctgtatcatcttttcataaaagagaagtactgcctgcatggcaagtgcttcagtgttctgggtgtgtagtatgatctctgtacctttgttgttcaagcaggaatgaactccaggccggctgtgatcagttgaatgt

SEQ ID NO: 3567 - DNA, 1345 bp, Oryza sativa
  ref <308>: DATABASE ACCESSION NUMBER: AK061235
  ref <309>: DATABASE ENTRY DATE: 2001-12-06
acctcgtcgcaccccagctccagttctagcctcctcaccaaaccgccgcaatggcgggaacacctcctccttgccgactcgtcctcacacgtcggcctcggcctgaacaccgtcgccgcatggctactctccttcctggccgcgtccgtgtcgagcgccggcggcgtggggggcggatcgctgttcctccccatcctgaacctcgtggcggggctcagcctcaagcgggccaccgcctactcgtccttcatggtcaccggcggggccgcctccaacgtgctctacaacctcctctgcacgggctgcgggcggcgcgccgcggcggtgatcgactacgacatcgccctgctcttccagccgtgcctgctcctgggcgtcagcatcggggtggtgtgcaacgtcatgttcccggagtggctcatcaccgcgctcttcgcgctgttcctcgccttctgcaccaccaagacgttgcgtgccgggctcaggatatggagctcggagagccgcggcgccaccctcgcagtcgcagccgccaccgcgcacggccgcgaggagcccctgctgctgccgcacggcaccgatgccggcaatggcggtggtgcccgcggcgacgcggggttcccgtggaaggacgtgtcagtgcttgtcatggtctggctctgcttcttcgtgctccatgtcttcattggcgataagcatggaaagggtatgatcaggataaaaccctgtggagttgcatactggttgatcaccctgtcccaggttcctttcgccgtggctttcacagcttatattatatacgcgaagaggaagaaacaagttctgcataatcaagaagatggcaaggcaaatccggagagcactaaaatggataccttgcccacgcttctattcccactggctgcttttgtcaccggtgctctgagcggcctctttggcattgggggaggcctacttctgaaccctgttcttcttcagattggaataccaccgcagactgcagcagcgacgtcttcgtttatggtccttttctgcgcatccatgtcgatggttcagttcatcctgctaggcatgcaaggcatcggagaagcttctgtttacgcagggatctgctttgttgcttcggttgttggagcggtggtgattgagcgagctatcaggaagtccgggagggtgtcgctgatcgtgttcttggtaactggcatcatggcggtcagcaccgtgatcatcaccttcttcggagcattggatgtatgggcgcagtatactagtggagcttacatgggtttcaagttaccttgctgacattgtcagtaagctaaatatgtgcacacagttacacaac

SEQ ID NO: 3568 - DNA, 1210 bp, Oryza sativa
  ref <308>: DATABASE ACCESSION NUMBER: AK061236
  ref <309>: DATABASE ENTRY DATE: 2001-12-06
gtgcttttagcggttgcgttgcgttagccttcctgtgctattcatagcctagctactccgttagttcgggcaagcaaaagttgagttcactctactactccgagactcctgagtgtttctgcaaaaacttgaggagaggggagagggtgatatccatggagatggccgacccagctgagagaagacggacgatcctgcgtcgtcgtctcgtcgacgagaaaactccatagcgtttcatctccgcttggcgatcatgttggtgatgatgctgagaaagctattactaaataccttcgtttaccctatgcccgtaggcatttgggatgaacaatgccagctggtttataagacaattatggcggtactccatgcgctcaatccgatactacggccacgtacacttggtcacaactcaggaacgcgtcgtgatatcttcggctcatcgccaggaggaggagatgccggccggcacgttttgttccgaagcgaggaatctatggccgtcagttgtcagcagaacgagatacgacttggccacagctcatcaggggaacgagtactacaccctttcgctagaggtggtgcaggtggcggcgctcctttcgctcatggggaggagcacattgccatcgatattgatctgctactgcaagccactcccaatatattttctgcgcgagaagctagtccaactcctgtgactccagatgaccgggtcgttgttgcacaaactttgcagacaatattagctagtattttacctttatgtgctgcatcgcggcctctttttaaggatggtcctgagtacgccaaggtcgtgacgtttggttttctgggtactatcgttcttgtcgcttatgctggggtgtttgccaaggcggccaacagcaaggccgcgttgaggctggtggtttctgcagctattgctgccatgacatttgccgtggcctctcagctatctggaatagggtacattgttaccgcttcacttactggtgccatcatggcggccttcataatgctggcagtataattcacgcccggcccccgctgctgtgaacgcagatggagcgggcgccggccacctgagttccaggagaaagaagcaatggaaaccaattgtatttgactgggtgattatgttgacaagatttttgctgtgtagtccttttcaaaatgtaaaaaatgtacgacgtcgttcatttttttt

SEQ ID NO: 3569 - DNA, 1148 bp, Oryza sativa
  ref <308>: DATABASE ACCESSION NUMBER: AK104446
  ref <309>: DATABASE ENTRY DATE: 2002-08-28
accaagtttaatttggagcacacatttcagctcaccactgctagcttgggaagaggaggaggagcttgagcttggagagagacaacaatggcggctcaggctcttctctctgggaggcagctgctggggaggccattgcaatcttcagtctccaggtcttcttcctccaggaaggcacccttcatggtcagggcagaggccactccccctgccaagcaaggtgctgacaggcagctgtggttcgcatccaagcagtccctgagctacctggatggcacgcttccgggagacttcgggttcgacccgctggggctatcggacccggaggggaccggtgggttcatcgagccacggtggctggcctacggcgaggtgttcaacggccggacggcgatgatgggcgtcgtcggcatggtcgccccggagctcctcggcaagctgggcctcgtccccgccgagacggcgatcccgtggttccagaccggcgtgatcccccccgcgggcacctacacctactgggccgacccttacactctcttcgtcttcgagctcgccctcgtcggcttcgccgagcaccgccgcttccaggactggtacacgccgggctccatggggaagcagtacttcctcggcctcgagaagtacctcgccggctccggcgagccggcctaccccggcggcccgctcttcaacccgctcggcttcgggaccaagagcgaggcggagatgaaggagctcaagctcaaggagatcaagaatggcaggctcgccatgctcgccttcctcggcttctccgtccaggcgctcttcaccggggttggccccgtgcagaacctgcttgatcacctcgctgatcccgtccacaacaacatcctcaccagcctcaagttccattagagatgccatcaactacgtatttaattaattacgagtttttaattatgtatgtatgtacgtgcgtatgcgtatatgtgtgtacgtatgtatgtacgcaactttgtacgatcgatggtgcgtgtgatcgagaggggtatgtatgtacgtacgtatatacgatgtattattatgcatgggtgtagggtgtgggtgtaacatgtaaatttgtgctccaactgatttgcacgcatggtcgcatggatcgatttgct

SEQ ID NO: 3570 - DNA, 1480 bp, Oryza sativa
  ref <308>: DATABASE ACCESSION NUMBER: AK104447
  ref <309>: DATABASE ENTRY DATE: 2002-08-28
cattcgcacgcccgcgccaccacaaaaccctagccgccgccgccgccgccgccgccgccgccatggccacccaaacccgccccctcgtctccgtcaaggccctggagggcgacatggccaccgacaacagcagcagcctcgccctcgccgaggtgttccgcgcgccgctccgccccgacgtggtccgcttcgtccacaggctgctctcctgcaacaagcgccagccctacgccgtgtcccgccgcgccggccaccagacctcggcggagtcgtggggcacggggcgcgccgtgtcgcgtatcccccgcgtccccggcggcgggacgcaccgcgccgggcagggagccttcggcaacatgtgccgcggcgggcgcatgttcgcgccgaccaagacatggcgcaagtggcaccgccgcgtcaacgtccacctccgccgcgtcgccgtcgcctccgccctcgccgccacctccgtcccgtccctcgtcctcgcccgcggccaccgcatcgagaccgtccccgagctccccctcgtcatttccgactccgccgagtccatcgagaagacctcccaggccatcaagatcctgaagcaggtcggcgcctacgccgacgccgagaaggccaaggactccgtcggcatccgccccggcaagggtaagatgcgcaaccgccgctacatcaaccgcaagggccccctcatcgtctacggcaccgagggatccaagatcgtcaaggccttccgcaacctccccggcgtggatgtcgccaacgtcgagcgcctcaacctgctcgacctcgcacccggtggtcacctcgggcgcttcgtgatctggaccgagagcgccttcaagaagcttgaggaggtgtatggcaccttcgaggcgccgtcgctgaagaagaaggggttcatcctgccgaggcccaagatggccaatgctgatcttggcaggatcatcaactctgatgaggtgcagtctgtggtgaagccgctcaacaaggaggtcaagcgcagggagaagaggaagaacccgctcaagaatgtcgccgctgtgctcaagctcaacccctacttcggcactgcacgcaagatggccacccttgctgaggctgcccgcatcaaggccaggaaggagaagcttgactccaagaggaccaagcttagcccggaggaggctgctaaggttaaggctgcaggaaaggcatggtacaagaccatgatctcagacagtgactatgctgagttcgacaacttctcgaagtggctcggagtgacgcagtgagcgttgtcttgttttaagttttgagtagcagcgttaccggatcttatctcaaggatttatcaatctgtttttacctgaacatctccataagaagttatctgtgggattttgagactagtttctctgttttgttaatgtgctgtcgtgagaacatagagtatgtggtttggaccagctatctaaattatgtatgcacttcc

SEQ ID NO: 3571 - DNA, 1100 bp, Oryza sativa
  ref <308>: DATABASE ACCESSION NUMBER: AK061237
  ref <309>: DATABASE ENTRY DATE: 2001-12-06
atcagatcaaagcaagcaaacaacaacaaaaaccacttctcgtgggtagaagagagagagagcgaggcgatttcgaccaagaagatggccgggatcgtggtggtgttcgacttcgacaagacgatcatcgacgtcgacagcgacaactgggtcgtggacgggctcggcacgacggaggagttcgagcggctgctgcccaccatgccgtggaacaccctcatggacaccatgatgggcgagctccacgcgagcggcaagtcgctcgccgacgtcgcgggcgtgctcaggtcggcgccgctcgacccgcgcgtcgtcgccgccatcaaggcctgctacggcctgggctgcgacctccggatcctcagcgacgccaaccgcttcttcatcgacaccatcctcgaccaccacggcctcacgggttacttctccgagatcaacaccaacccgagcgccgtcgacgccgccaccggccgcctccgcatcgcgccgtaccacgacttccacgccggcccgcacgggtgcggcctcgggatctgcccgcccaacatgtgcaagggccaggtgctcgaccgcatccgcgcctccgccggcgccgccggcaagagggtcatctacctcggtgacggccgcggcgactactgcccgtcgctccgcctcggccgcgacgacttcatgatgccacgcaggggcttccccgtgtgggagctcatctgcgaggacccgtcgctgctccacgcggaggtgcactcgtgggccgacggcgccgagatggaggagacgctgctgcggctggtcggcagggtgctcctcgaggagaggaacctgccgccgctcgactgcaagctcgagtcgttgccggccgtcgccgtgcaggacggcatgcccatgacgctccggatcaagaactgatcaatggcggcgacgaacgtacgcatgatttcgagcgcgaaacggctagctcgaacaatgtgtgtgtgaggattgcgatacgggtataattttaactattgactgatttttgcgctacgcgtgattgagcctgcgattagtagaggctcattgtatcttgtccgatcaattgaagtaaaacatttggcttg

SEQ ID NO: 3572 - DNA, 1123 bp, Oryza sativa
  ref <308>: DATABASE ACCESSION NUMBER: AK061238
  ref <309>: DATABASE ENTRY DATE: 2001-12-06
ctcaactcaaccacttctcctactacagccaacctcctcttgcctcgcctcgccacggatcgcgccgccatggccgcctccgcctccgcgccgccgcattcgctgctgctggccgccgtcgcgctcgcggcgctcgcgtcggtggcggcggcgagggacgagaacggggtgtacgacccctgcagcgacacgcggatccagcgcggggacgggttcagcttcgggatcgccttcgccaccctcggcgccttctactccggcggatccgtgcagctctccccctgcgaccgccgcctcagcctcgcctcctccggccagctcgccgtcttccgccccaaggtcgacgagatctccctcctcaccatcaacaccaccaccggcttcaaccccgccacagctggtgggtacatggtagcatttgccggtaggaagtatgcagcccggtctgttccaacctttgtgtccaattcctcatatacagtctccagcttcaccctggttcttgagttcaataaaggcaggcttcaaaacttgcattggaagaaggatggctgtggtgcttgcgcgaaatcttcaagccttgtttgcatcggcaagcaaacctgtgccttcagaacacagagctgcaagagccagggacctgttgactgcagtatcggcatccagctggctttctcaggcaccgataaacacgaatcagttctgaactcgtggtatgaggtgtctaacctgcggcaatactccctctacgggctgtactcgaacctgaaggacaccctgagcggccagttcaacaagttcttctaggcttttggtgcacccgttgttcatactcttctgccactatttctctggagctccctgcctgatgctgtacctattgctcgttaggtttgcccgatctgattttagcttgtgtggagatgctcttctgcgtcattttccactagtattctttccattccagttcccacttaacttcaattatctgatgggttgctatatgttaatgtcatgtacgcaagaaaggtccttgtccggtttgcgcgtttgtaaaaaaacttctggagtgaatcatgatattaacagctttcatctatgtaccagtcgccacatgtttcag

SEQ ID NO: 3573 - DNA, 935 bp, Oryza sativa
  ref <308>: DATABASE ACCESSION NUMBER: AK061239
  ref <309>: DATABASE ENTRY DATE: 2001-12-06
agtgcagtgcagggaatcatttcatttcttcttcttcttcgccgccgccgccaccttccaccccttcagccgccactccaatccaaggaggatgagtgaagaggacaccaatgctgctgctgggcagcccaggcgcgcccctaagctcaacgagaggatcctgtcctccttgtcgaggagatcagtagctgcacatccgtggcatgatcttgagatcggccctggtgctcctgctgtcttcaacgttgttgttgagatcaccaagggaagcaaagtgaaatatgagcttgacaagaaaactggactgattaaggtcgaccgtgtcctatactcatcagttgtgtatccccataattatggtttcattccaaggacactttgtgaagacaatgatccaatggatgttctggtcctgatgcaggagcctgttattcctggttccttcctccgtgctagagcaattggccttatgcccatgattgaccagggtgagaaggatgacaagataatagcagtatgtgctgatgatcctgaataccgtcattacaatgacatcagtgagctgtctcctcaccgcctccaagagattaaacgcttctttgaagactacaagaagaatgagaacaaggaggttgctgttgatgcattcttgcctgccaacactgctcgtgacgccattcagtactccatggacctgtatgcgcaatatatcttgcaaagcttgaggcagtagagtgctacccgatctttatcgtgaaaatattgtatttgtgccaactgcaaaactggagtagagactttgttcacaaaaatggagtgctatggggctggctatgatttcctttaccctccagctgtgtatcaatttgcatgtggtttcatacttacaaattatgaataagtgaagtttgggcagacatgaatttgttctgtgt

SEQ ID NO: 3574 - DNA, 1236 bp, Oryza sativa
  ref <308>: DATABASE ACCESSION NUMBER: AK061240
  ref <309>: DATABASE ENTRY DATE: 2001-12-06
aaaaacaagctttgttctactctgccctacgatgctcacgagaaatgcttgttatgaacgatgggtcaaaaaacctccttcgtgccattaataacaggctgagtgcgctgtcctttcatattagggaatactactgggttgacatgaagaagataaatgagatatacagatacaaaacagaagaatactctcatgatgcaacaaacaaattcaacatttatcctgagcaaatcccttcttggcttgttgactggattcctgaaaaaggtggctatctcatcgggaacctgcagccagctcacatggatttcaggttcttctctctcggcaacctttgggcaataacttcatctctaactactccaaaacaagctgagggaatacttagccttattgatgagaaatgggatgatctcatagcaaacatgcccctcaagatatgttaccccgcaatggaagatgatgaatggcgcattattaccggcagtgatcctaagaacaccccatggtcatatcataatggtggatcctggccaacgctgctgtggcagtttacattggcctgtatcaaaatgggaagaccagagttggcccgaagagccattgctgtggccgaggagaagctggcagctgacaaatggccagagtactatgacacccgctctggaagattcatcgggaagcaatctcggtcatatcagacatggactattgctggttttctgacctctaagatgctattggaaaaccccgagctggcttctattctgacctgcgatgaggacctcgagctgcttgaaggctgtgcatgctgcctttctaagaagagaactaggtgctcacgccgtgcagccaagtcccatgtcgtcgagtaaaacagcagagtcccttttatacatgctactctgcacgcacaagtatactacgagtacttgtcgacaattaacttgagacgaacacactatagccatgtacattagtataggtttacactagatatccatccattcattttcctcgatgcgcgctcattcgtttttgctgagctgccatcgatgggattggagctaccctgggtgataccggtggtcgacgagagcaacaccgattcaggtctgtggctctcgtgtacacaggaaattgaagtttgttgttgtgttcggtccaccagcagctcctaattcgggagtgctgcgaagccctaaccattgtatccattgtcattatttaagctgt

SEQ ID NO: 3575 - DNA, 1632 bp, Oryza sativa
  ref <308>: DATABASE ACCESSION NUMBER: AK061241
  ref <309>: DATABASE ENTRY DATE: 2001-12-06
catcaaatcaatctgggcaaatgggaaactttattcactatatggcctaatttccatgtcagtatcgctacccacgtttgcatggtgttctcaaaatcaaacttccggatgtgaaaaaccttaattggatgtgttttagtgcttaacaccatactgtgaatagtaaacaatgaacaaatgaaggttaggtcatcattaccttgtgagtcaatcaaaggtagtggtggggaagttcagggaggggaggtgaatcggggaagacgacgccggtggcgaaagcggcgtgggctcgtcgggacatgcatgcaagcacgttgtctcgtgcggaggaagatgaagctcgtcgtctcccaggtagccccttgtagccccatcctcatcgctagtctgccatagatctggcgcctccgagctcgcggccgctagatctggctctccaagctaggcatgtctggatcctgcgtgaggactggtgttggcggctgtggcggaagacgtgcctgtgttccaccatactatcaaccgggaggtggagggaaacgccaacaacaggaaggagatgtctggatcccatggcgctccctaataagctcgtgtggattggaagatgaattaatggctagggcgaagccaggataaatggtcgacagggtcaatactaacctagtttttgatgcatttttagatcttctaaaataggtgtatttttcttttcaagaatggctccagaatgtttttgcttgcctatttatctctactacataatatctctactacataaaaacagaatttatcatccacccttctcacctacatcatgcgcatcgcacgcccctcataaaaaacaaaagaaacaaaataaaaatggaaaaaaccagaccccacaaaaaactaaaaactaaatagtgctactcattggcccatagaaaattaaatctctcgttgcaatgcacagacatgtctataaattattaaaatcggacataattaatatgtaaacaaagtagatattaaacacacaaatactcaccgctaagattaccaaaatcatggattttctatattcccctctgctggaaagaacaaaattgtgttttaattctcctccttgcacatgagtgatgaccatttaactgaagtataaaggaataaaaaaaattcatatttcataaccctaactttcaaattgtgataatctagaaattgtgatagggttaatcggttacccaacaactcgccatcagtgcgaggcaaagaacattgcagatcggtagctcaccccctcggcagctcgaccttccaattgccctcatgttgtctgccgatcctcgcccttgtcgctccatacctctgcctcctggaatctggatgtggtggcaatgtgcatgtgctcgactagaggacgacaagatgaaaagtcaagacgtgcggcggtgctgggcaaaacactccgaggaaacgatacaataggagaaattgtggactcgtgggctgctcgctaccagccttgtgagctcaaatctcaaacatatatgtatattgggcctttgggctgatgtataatcatcattggcgctagctaattcctatttgctgcttgctaatctcaaacgcgccgtttcttgtttttct

SEQ ID NO: 3576 - DNA, 1233 bp, Oryza sativa
  ref <308>: DATABASE ACCESSION NUMBER: AK061242
  ref <309>: DATABASE ENTRY DATE: 2001-12-06
atgcttgcttgttgcagtggttttgccacggagaagggtcaccgggaaattattgtttaggctgacgtgatgctccagggagtcctgtcgcgagctcccggcgccgacgcggcagcgatgaaggcgaagcgcgcggccgacgacgaggaggaaggcggcgagcgggagcgcgcgcgtgggaagcggctggctgctgaggggaagcaagggttagtggtggtgagtacgggggaggaggaggaggcggcggcggagacgcgtgggctgcggctgcttagtttgttgctgaggtgtgcggaggcggtggcgatggaccagctgccggaggcgcgggacctgctgccggagatcgccgagctggcgtcgccgttcgggtcgtcgcccgagcgcgtcgcggcccaccacggggaggccaccgttgtgcactggatgcaccactgcctctacgacgtgacgggctccgacgccggcacggtgcgcctgctcaagagcctccggccgaagctgatcaccatcgtggagcaggacctcggccacagcggcgacttcctgggccgcttcgtggaggcgctgcactactactcggcgctgttcgacgcgctgggcgacggcgcgggggccgccgaggaggaggcggcggagcggcacgcggtggagcgtcagctcctcggcgcggagatacggaacatcgtcgccgtcgggggccccaagcgcaccggcgaggtgcgcgtcgagcggtggggcgacgagctgcggcgagcggggttccggccggtgaccctggccggcagccccgccgcgcaggcgaggctgcttcttggcatgtacccatggaagggctacactctcgtcgaagaggacggctgcctcaagctcgggtggaaggacctgtccctgctcaccgcctcgtcgtgggagccgacagacggcgacgccgacgccgacgtcgccgtcgccggcgatacccaccatgagagccacgattcttgatcacatgatcgcagtagcagccaggtcgattcacctgtcgcagcttttcttggtcatattcattatcctctttctgctagctacttcattcgatcgttcttcctcctgtgagtagtattttggccgatgattaagcttgtaatataatcgtataggcttcatcattcgttccctctccaggttgccatgaacaacaccatttcaattacaaaatagaactcttctacctccaaaaagaacttg

SEQ ID NO: 3577 - DNA, 1103 bp, Oryza sativa
  ref <308>: DATABASE ACCESSION NUMBER: AK061243
  ref <309>: DATABASE ENTRY DATE: 2001-12-06
cacggccacagccgccacacccaacctcccgccgccgtcgccagccagccagccatggggagccggctgggtcgccgcgtgatccacttcgccaacctccccctcaagctcatgctccctcccgcgccgctctcctccgtccaggagttcgccgtcaagaccgtcccctccgcctccaaggtcgacatccgccgctgcctcgagtccatgtacggcttctccgtcgccgaggtccgcaccctcaacatggagggcaagaagctgcgccggggccccttcctcgccgccaagcccgactacaagaaggcctacgtcaccctccgcgccccgctccccgtctcccccgacctcttccccattgggcttgtcctcggcgagagggagcgcaaggccagcgccgccgccgccaggaggaaggcggtggagggcgccgaggtggaaggggagggcaaggggaagcactggatggaggatgagaaggtgggcttctccagggccggccgcggcaaggtggtgtacggcaaccccgggaggctggggaagaagaggaatggaggtaccaaggtgaaagacagagccggagaggaagtggggaagttcccatggagcgggacgcgtcttgctaccgagaagaaacctgctaggaaacagcagtatgcccccaagaagaagggcatagtcctgaagcagaagtcatggaagggatccgtgcatcggcaaccaaagaagaaggtggaagcttagaaccttgagtcgctgcattgcgatcatgagtgcactgtgccacagagcaggacgcgagcggtagatccatgaatcacaatgccagatcagtcttgtttttcattcacagaataaagagcaatattttggcatatgtatggctttggttactttgatatctcaggcttggttttctgacacatgaggccaggaaggtgaatggtagtcaagtttgtgccaacctgttactgatgtccttagatttcttttgagatgtctatttgtcatcaatcacaactgagtatgtacaactgatgcctcctcattttttttttgttcttgtcaattacatatacctgttattcccgtggattggtatc

SEQ ID NO: 3578 - DNA, 1036 bp, Oryza sativa
  ref <308>: DATABASE ACCESSION NUMBER: AK061244
  ref <309>: DATABASE ENTRY DATE: 2001-12-06
agatgccccggacccaacaagataggggggagccaaaatggcgctgctctcaccaccctccccgcctcctccgctcccgccacttcgccgccgccccgcctctcccacactcctcgccgtcgcgacgagacctagctctctcctctccctgccccactgccactgcggcctccccctcccttctacagccaacgcacgggcgtattcccgtagcagccgccgccgccgccgcgtagctgcctcgctcggccaggacgaacctggagtgtcagacacagctgtcgctcctgagggagaaggggattccgaaccgccggcttcctccgatggagccgcaggcgacatcgcggcttccgccgagcagccggaggcgagccccgaggacttggaggttaagctaactatcatgattgaggatcctagagatatagaaaggaagagattactcggcatagaggatcctgatgaaatcaccagggatgatttggctgatgctttggttgaggttaatgaaggccggattccagaaaaccgtgttgcccttcagttgcttgcgaaggagatgactgaatggccagatcttgagatggaagctccaaaaaagaagagtaaacctgggaaatctgtctatgcaaaggctacagatacaggcattgatcctgagacagctgctaaaagacttaacattgattgggattctgctgctgatttggatgatgaagaggaggaagatgatgaaactgaagtgccctccgcagtgggatattctgctctatatctgttaactgcctttcctgtcattattggaatatcagtcgtgttgattcttttctacaattctctacagtagttcagccctgctcatctttgcttcccgaggcagatatcctcctccttttattttcttttgtaaatctgagtcagcttaatcttcattattgtgaagaaatgaagatgtgaaatagtttctgtggtgatatgacaactgacaagatagtaaatccgtgaaatgcatattaccaaaatagaaggcttg

SEQ ID NO: 3579 - DNA, 1117 bp, Oryza sativa
  ref <308>: DATABASE ACCESSION NUMBER: AK061245
  ref <309>: DATABASE ENTRY DATE: 2001-12-06
gaaaaaaaaactcccaaaaagtggccgcggaaaatttcgaattccccccacccgtcgtcggcggcgaccgcgggtgcccaagcccaaccccccgccgccgctcccctcgccgtccgccgacccacaccaccaccactcaggaccccctcataccaggcatggaggagagcgacgagaccgccgtggaggcggcgctggggctgagcgcctcgttcttcgtcaactcggtcctcaacgcggtcgacgacgtccgctacggggccttcgagtactgcctccaggaaggcgcccccgaggccgtcggcgccgccatggcgacccagaaggccgaggagctggagcggggtgtaatcagcattcacaacttggtgaaggatgtattggataagagaatgagcaattgggagaaatactgccttcgacattgtttcgcaatacctgaaggattcctgacacgtgaagatgatattcctgcaaaaaatcactcaatgatgggaattctgattcggatctcgatgctgaacttgtttctcttaggaaaaaacttgaagatgctaacaatgaatctgaagaacttcaaaaagagctttcttccttagaaagacaagctgagtgccagagaaatttggattcctctatggctgaattattgaaggtgtttgaaagcaaggcctttcaagacaattttcaagatcttgtgaacgtaataccactatttcagcggaaactggaaggtatgaaaaggaagattgttgagaacattgacgatcaaattgattggaacgtcaatggacaccacaagcggttagcatcaggtttcactgccagaacagaagacagtcaagatgttgtgaatgtcttaaagaagtattagtagctcccacttttatgcgacctgtgcgataacaggacgcctgctatgtgctatccttcgtagcacgggataagctggttatatgtttggactcttgctaactgagtaccgccaatgcagatcttcaatgtaatcctgaactgcgattccttccgaacaatttgtacgtaaacgtaaagtacatgggctttccataattggtttatacgtggttatttctccggatggccggatagaaccact

SEQ ID NO: 3580 - DNA, 1312 bp, Oryza sativa
  ref <308>: DATABASE ACCESSION NUMBER: AK061246
  ref <309>: DATABASE ENTRY DATE: 2001-12-06
aaccccgactcacgcggagccaccgccctcgactgtcgccgctccgccgtcttcgcatccgtcatctccgccaccgatccccgcgccaccgccgtcgccgccgccctcgactgccgccgctccgccgtcatcgcatccgtcgtctcaccgccaccgattctcgtcgccgccgacgccttcctcgcctggtagctgccgagaccttcctcgcgtggcggggcgcagccgcgcaggcgtgcagcacaggcgccaagcagggcaggggcagggcggatggcgcagcagcaccaagcagcaagcaaggcaagcagaagtagtagcagccatcaggccatcacgcccaatctcccatcagcagaaaatggacagaaagagaaaagggaaggcactggcatcacaaagaggttgtacttttttttatttgacaatttcagaacattgcaatttcaaagtgtacaaatttattactgaaattgcaattaaatattttatttttaggatgcttgtacattttgtttcactcattgctttttatcttatcaaactaatcaatctttgctatttgtttttcagattctacatatgtatctatcctcattagtttatatatgtgatgtacggctgaaagcttgaatcagtgaatcttgaggacgaaaattcagattgccgaagaaaaattcaggctgacaggacaccatgtcaactactattgtttgctgcacaatcaacgaaatttttggctgattctactaaatttctatttggtatagtaaggcatggcatccatggatgatgtggatttttcaccacatcaagccacacctaaggagtcaatgaactccaaggatgatgcgaaggtgcagccttcgtcagggcaaacaccaaacaaggggaattattacatgggccacgcgaatgccatcatgatgatgtttcaatacatacgtgatggttgccgacgtgttgagagttccatggaagactacacgtgcaagaaggtagaaaaaggatacggtgaaaaaaggaaggtgggagaagggtatgatcctcgctggtcttctcccatcgagataacaatgaagatctgcaatgacgacgtctccgatgaagcaaccgagaaggaaccatgatttagtattatcactactgtgttttggctttagaataaaataacatttcttgtgaattacacaagaaaattcagtaaacaatgtcgttcgggcctattcagtattgcttgtgaaatgcacaaccaaattcgatgaaactttgttgttatgatgcctattcagtattgtttgtgattgagttg

SEQ ID NO: 3581 - DNA, 1262 bp, Oryza sativa
  ref <308>: DATABASE ACCESSION NUMBER: AK061247
  ref <309>: DATABASE ENTRY DATE: 2001-12-06
aacaaacagaccacagaccagagtgaggctagtacatctcatttcaatggcaggtcaggctcccaacatgttggcaccaccgaccgacgacgagctgctgcacgcgcaggccgacctgtggcgccacagcctctacttcgtcacgtccatggcgttccagtgcgccgtcaagctcggcatccccaccgccatccaccgcgctggtggcaccgcctcgctgcccgaccttgtcgccgccctgtccctcccgcccgccaagctcccattcctccgccgcctcatgcggctgctggtccactcgggcgtcttcgccgccgccgacgacaccaccgggtcggccgggacgtaccgcctcaccccgctgtcgtggctcctggtggaaggcgaaggcggggcgcccgtcgtcgacggccacccgtgccaggtgcccgtggtgctcgccgggacgtccaggcacttcgtcgaggcggcgatggggctcgcggagtggttcaggaaggacgtgccggcggccgcgccgccgtcgccgttcgaggaggtgcacggcgcggtgctgttcgacgagagcatggcgagcctccacccggaggtcgacacggtcttcaaccaagctctcgcggcgtacgaccactcgggcttcgccacggttctgagggagtgttccgaggtgttccagggggtgcagtcgctgaccgactgccgcggcggcgatggcgcagcggcgaaggccatcgtcgaggcgttcccacatatcaagtgcaccgtgctggactttccccgggtgattggcaataaacgcggtgatggtgtggtgaactatgtagcgggtgacatgttccgcgccatcccacctgctcaagctgtcatgctcaagcttgtgcttcaccactggagtgacgaggattgtgtgaaaatactaactcaatgtaagaaagctattccagcccgcaaagatggagggaaggtgatcatcattgacatagtgattggagctccttctggaccactactggaagcccaactccttatggatgtgggtatgatggtggcgaccaaaggccgacagcgagacgaaaatgactggcgtgatctcttcaagaaagcaggcttcaataactataagattgtgaaaaaattgagagctcgagctgtctttgaggtctatccgtagggtgctcctaaataccatggaggatgtgatctaagtaaataaatgaagggagtgcatactttatgaaataaagttttatataaaaaaaaac

SEQ ID NO: 3582 - DNA, 1063 bp, Oryza sativa
  ref <308>: DATABASE ACCESSION NUMBER: AK061248
  ref <309>: DATABASE ENTRY DATE: 2001-12-06
gggaattttccttaacgagagcagcgagcaggggctgggcctaaaaccctaacaacagaaccgccgccgccacggaacccacccacgccggaatgtcgccggcggagccccggccgtccgccgccgccacccgcaagcggaagaagccgcacaaacccaccaaaaccctcgccaagaaccccaccaatcccgtctccacgaaggcgaagaagaagaaaccgccgccgccctccaaggcggaccaatccgcctccgccgccgccgccggtggcgtcctcctgtcggccgagatgccccctgcgcggcagctcgagttcctcctccgcagcttcgagcgcgccgccaagatgcgcctctccccgctcgagctcgacgcctactccgagggatgcatggtgccgctcgcggagggggcgagccaggacgtggagggattcggtgaccatgtgaaaggggcctttggctcctcttggaaggaggagctttgtgagggggagctcgatggcggcgccgtggacgcgggcagcccggcgctcctggttatctgctcagctgctctgagatcgttggagcttcttaggggtttaaagatgtttactaaagagtgccgccctattaagctctttgctaagcacatgaaagtggaggagcaggttgcgttgcttaaaactcgagttaatattgcttgcggtacaccaagcaggatcaagaagctaattgacatggaagcattatctctgtcacgggtgaaactagttgtacttgacatgcagagagatgcaaagtcatttaccttattcacgttgccacaagtcagcaacgagttctgggacttatacaagggctatctcgatcagaaagttcgaggaggagatacaagattatgtttttatggtgctgtctctgagaaagatgtgaaaaaagcccttccatctgcggagtaaaaatggctgatacgatgaatttgtgtcatgtgcacattgtagtcaatgtactagatatgtatttttgacatactagaagtttgtagaagcaggctgggcaagaaaattttggaattttg

SEQ ID NO: 3583 - DNA, 1037 bp, Oryza sativa
  ref <308>: DATABASE ACCESSION NUMBER: AK061249
  ref <309>: DATABASE ENTRY DATE: 2001-12-06
attttccaacttccgctcagcctcacacaggaagtggacgtcgaccaacaaacaaccagttcttgttcgcgattacgctgcctccgttcagccagttccagcttgcgaacccaacggtcacgtgtcccactgcgtgaatatttctgaagccatcctaggttatttcagctcgtgtgacacccgttcggacaaagacacaatcgccaacggcatattccaatttactacctcccaacgccaacaacgccaacaatgcctcgcttgtctgttggccacaacagccctcatcgcttccccacgcccaccggctccacgccgctccgcgccttccaggccagcgatctctcgcatctccacgtccgcgtggctgagctacgacccgtgaccgacggccgcaagggctggctctacattcttgacgtgggctgcgccggtcgcgcttggcaaatcgccaagcggtacagcgagattcgtgaattctgggagaccctgtgtgatcttctggttgagaatcacgagacgtgcaccgagaaatgccattttctcgctggctgcgagacctacaagttccccaagaagcgcctggtccacacacgcggcgttctggaagagcgcgcgacggagctggaccagtttttcgagcgtgtggcgatgcggctcaatctctgtgacgcgcgcgcacttgctctctgctatgccggtggctgctcgacccttggtctgctctcatcgttcctcgaaatcccgactcagttccagaacccgcggccgtacccgtacaacacgctggagcagtcgtctagcgtgccgctcttcaaggacatcttgtccaaggatggccgcctgacgctcaaccacggtcgactctcactgacgtctctgcgagaactacaatacgctgcttaatgcagtgtcttgcatacgaccatatttattggagtgcttcagaggactcgccgcagctactggcggaatcgaggctggctgagctttgtacataacgtaagaatagattatatcgcccatctgcctcctcc

SEQ ID NO: 3584 - DNA, 1083 bp, Oryza sativa
  ref <308>: DATABASE ACCESSION NUMBER: AK061250
  ref <309>: DATABASE ENTRY DATE: 2001-12-06
acaccacgcagacgcgcaccaacccgccggcattcgcgtccggatgctttgctttgcccgccgcgattcgatccacgcctgagcgagcgagcggggcgagcaacgcgcccttccttcccttgccatggcctcttcaccggcgagcagctacgactgctccttcaagatcctgctcatcggggactcggccgtcggcaagagcagtctgctcgtcagcttcgtctccgcctcccacatcgacgacgaaatcgctcccaccataggggttgactttaaaatcaaatttctcactgtcaatgggaagaaactgaagctaacaatatgggacactgctggccaggaaaggtttaggggaatcacaagttcttactacagaggtgcccatggcatcattctagtgtatgatgtcacaaagagagaaagtttcacaaatttggctgatgtatgggccaaggaaatagaattgcattcgacaaataaagagtgcatcaaaatgcttgtcgggaacaaggtggacaagaatgaggaaaggatggtgacaagggaagaaggtcttgcctttgcccaggaatctggatgtctttttcttgagagcagtgccaaaacaagagaaaatgtggagaaatgctttgaagagcttgcgttaaagattcttgaggtaccaagtctcttggaggaaggttcttcagttgtcaagaggaactctctgaaacagaagcacgagaacaaagcaaaaaatggaggatgctgtcagtagttccggttgctgtatgcgagctcatgatgcttagacctagcatgttcttgtgtactgatgtaaatgatttgtacctaaatgcttgttggtgtagctgatgcgagttaagaaggaaataaccacacgaagtttttggtgcgaacactgggaattgatttgtacaaaagaaaaagttctcccttctaacttccttcaggtagcagtttggtgtgctgaatgtgccaggatcatgtcgactagtcttgttttctggaaatgtacatgtaatgggatcctgacaatttgtcttgcatatggtggaagtatatatctggtgcataattctg

SEQ ID NO: 3585 - DNA, 1136 bp, Oryza sativa
  ref <308>: DATABASE ACCESSION NUMBER: AK061251
  ref <309>: DATABASE ENTRY DATE: 2001-12-06
tccaagctgccactcaaaatgagaccaattatctgaatttgcatctctctctctctcccttgattttatacaattccccaagtcaagatccgtctcttctgctgctttgctttatatacaccccattagtccactccaccaccccatagtatattctctcctcacttaaactaatcatctctctctctctctccccctccaaattgtcaatctcatttctgaactcatgttcaggtttgaccttgcaaaatagcagtagctactatttatccaggaataggagttgcaggggaggcatgaggctgattgggagaggaaagagttccaaggccaagaagggctcttcaactccattgcaatccaaggagaagattgctgcaaatgtggagactgttgctgttggttccaacaacaggcaagtggcacctgatgataacatgcccctgggagaagctggctatgctagcagcagagatgaggttttctttgaagcttgcccttggttagagtctgactgcgaggatgaattctacagtatcaatggagatggcacccctgcaagatcattcagaacgaactccagcaaccatgcgatacaacctgaacctcgcaagctgcccacactgggtgccatcctgaaggccgagccgctgaggccgccaccaccaccgcaggagacgcagccaacgccgccgtcgccggcgacgacaatgcgactcgccgacctcctccgggagaggcaagaatcgttcacctgctacgacggccctgcctgcgccatctcccggacgggctcctcctgcggcgccggcaacggcgagcagtggagccattgctgcattccgagcttcgtcccgcgtaccagtgtgagctacgcgaaggggaggaggaagcgcaggtgaagaagcgatcgatcgagagagtgtgcaaagaaatcaagtggtttttgggatgataattgttcagaatgtgcagtgtctcagagagagtccacctgcttgtgtattgtaacaacaactacagtacaacgacgttaattagccgcccaaatcaaatgtatatatgtgatgtgacagtgagatacctaccaaaatactccaaataggaaagaccacctcttgggtgcgatgtcaggc

SEQ ID NO: 3586 - DNA, 1051 bp, Oryza sativa
  ref <308>: DATABASE ACCESSION NUMBER: AK061252
  ref <309>: DATABASE ENTRY DATE: 2001-12-06
agagtggggagtgggagacaacaatggcgagcggtgtggaggagagagtgaggggcgaggtgagaggggaggaggatgaccggccgcagctgagcgcggcggcggcggaggcgctgcgggagtttcttctggaacaggggcgggacggtggggaggaaggggaggaaggcggcggcggggtggagctggtggcggaggactggcggctgagccagttctggtacgacgagcgcacggcgcgggcgctcgccgaggaggtcgcccgcctcgtctccctctccggcccggcctcctccgcagcggtggcctgcgtcgcgtgcccgacgctctacacctacctcaagacgagcagccctgatgtgaccgcgcagctgctggagtacgacgtgcggttcgggcagtacggcggcgacttcaccttctacgactacaaccagccggaggagcttccggcggcgatgaagcacgcctaccggatcgtcgtcgccgaccctccctacctgagtaaggagtgcttggagaaggttgccaagacggtatctttcctcgcacatcctgaaggctcattcctgctgttactgacaggggaagttcagagggacagggcatttgagctcctaaatgtgcgtccctgtggattcaagcctcagcattcaaacaagctaggaaatgaattccgcttgttcacaaattatgatcccgaagatagacttggcggttgggagcaaaatgatggcgctaccgtttagctgtttcaaatgttcaagtcttgatgcctagggatggattcatgctttcacagttcctgcatttttgtttgtaggtcactgaagcaatagcatcagtaggaatctcggcaatgttttactgaatccctgaatctgtccgttgtgatgtgtttgttggattaaactttacacaatgtaccccttttagtttcatgattgtgcttaaaggatttgtggtttcttgcaatgttcggccttcgaaagcagtgatttggggcatgtaagccgtgtttagggtaacaacttcatcacaagaaccgaat

SEQ ID NO: 3587 - DNA, 1154 bp, Oryza sativa
  ref <308>: DATABASE ACCESSION NUMBER: AK061253
  ref <309>: DATABASE ENTRY DATE: 2001-12-06
ctcatcgactcgacgacgacgacgcattccgaattattcaagaaattcaagtggaaggctgactttggttccaccctcggcagctgtgtcatactcggcgcgtcatctgtaacgtcgaagccacccccaccaccggccgcgccgcccccaactgctgcagacagctcggctgcctctcccgattccagcagagagcccgatgaattagggaacatcccagagtcactctatacgaatggagggcttaagctccgtgttgtctggacgatcagctcactcatcgctgcttcggcacggcattacttgctgcagccaatcatcgcagatcactcaacactcgagagcttggacctgacggatgctgatgggcagggcgtcctcactatggacaagaggcagctgcaggagctgcgtgtgcggcctgtgtcagcttctgggaactcgcaccgcacactcatgccagcacttagtatgcggctatggtacgctccgcatattgagcttcctgggggccaactgcttaagggtgctacactggtagcaatcagaccaagcgaggatgttctaagggaagggggaggaattgaggttgctggcccgacaggagctagctggattttagatgcctttgaggagccatatcgaacagcggcacaggtgcttctcaagcggcggacatatagtcttgaaatgaactcattctgaccatcagagaggcagcttcagagagctctacactttggggaggatatgatgggatgctattgagacgtatctaggagtcatggtggacatcaggcatctgtaagtatatacacctgtttatgttgggctgtttggcatagagttggaatggaatgtgttatctgcagcaaaagcaccctgaagaaatgccatgaaatacatctacacatgaggttggagtgcccggtcatgcagacaacgcatctgttgattgtctcttctacgaggaggccccatcgattattagatttaatagtgtcattttttgcttttagttgcccgcactgtgctgttagctctgtatcaaattatggacaaaacatgctctgctttccagaaaagtttgagccgtgctgcctcatgtgaccttgtaaccttttgtgtatcagactacaaagttacttcccgac

SEQ ID NO: 3588 - DNA, 1230 bp, Oryza sativa
  ref <308>: DATABASE ACCESSION NUMBER: AK104448
  ref <309>: DATABASE ENTRY DATE: 2002-08-28
atgcatgccaagaggtttaacaagatggctcggccgtcgtcgtcgtggtggatggcgctgctcgtcgtcgccgccgtggcgcagctcggcgcgtccgacctgaggacggactactacaacagcacgtgccccaacgtcgagagcatcgtgctcggcgtggtgaaggacaagatgcaggccaccatccgcaccatcggctccaccgtccgcctcttcttccacgactgcttcgtcgatgggtgtgacggctcggtgctgatcacgtcgacggcgggcaacacggcggagagggacgcgcccgacaacctctcgctggcgttcgagggattcgagacggtgaggagcgccaaggccgccgtcgaggccgcgtgccccgaccaggtctcctgcaccgacgtgctcgccatcgccacgcgcgacgccatcgccctgagcggtgggccattcttcccggtggagctgggcaggctggacggcatgaggtccagcgccagcaacgtcgccggcaagctgccgcagccgaacaacaccctcagcgagctcgtcgccatcttcaaatccaacggcctcaacatgtctgacatggtcgcgctctcagcggcgcacagcgtcgggctggcgcactgcagcaagttctcggaccggctgtaccgctacaacccgccgtcgcagccgacggacccgacgctgaacgagaagtacgcggcgttcctcaagggcaagtgccccgacggcgggccggacatgatggtgctcatggaccaggccacgccggcgctcttcgacaaccagtactaccggaacctgcaggacggcggcggcttgctcgcctccgacgagctgctctacaccgacaaccgcacgcggccgacggtggactcgctggcggccagcacgccggacttctacaaggccttcgccgacgccatcgtcaagctcggccgcgtcggggtcaagtccggcggcaagggcaacatccggaagcagtgtgacgtcttcaactgagaaaaatggcactacgacggcgacgactacggaccatttgtagattgtgtatacacgatcgattgaaaatgtgtgtgttgacacgtatataaattgcaaaggagtgattcgttgggtttgccagttttctgtttgtacatcgatcgatcggtcttgttcaattcgttgtgttaaaatatgtgtgtttctgcacataatttggattcaatgaagtaataagtgaat

SEQ ID NO: 3589 - DNA, 961 bp, Oryza sativa
  ref <308>: DATABASE ACCESSION NUMBER: AK061254
  ref <309>: DATABASE ENTRY DATE: 2001-12-06
gcgccgatctccatctcgcgactcgcgagcagagcagggttggtaggggcgcccatctccatccggcgagcagagcagagcggaggaggtgcgccatcgtcccgctgcatcctgttttgagcctggatcttgccaaacaagtggttgatcttactgctttcggtggccgtgtctcctccacaggaaggaaggcaccggggatctagaggaggccatgggagaattctccaaggaatcttgcccttctgtgaagaacattttgcttctggattctgaagggaaacgtgttgccgtgaaatacttctcggatgattggtctagtaatgcgtcaaagttggcctttgaaaagtctgtctttactaaaactctgaagacaaatgcacgctcagaagctgagataacattgtttgatggctatattgtcgtttataagtttgtacaagaccttcatttttttgtcaccgctggtgatgatgagaatgagctcattatagcaaatgtactacagggcttctctgattctgttggtcttttactcaggggtgatgttgagaagaggactgcactcgagaatctggacttgatacttctctgcatcgatgaaattgtagatggcggcataattctggaaacagatgcaaataccattgccgggaaggttgcaaccaatgctgttgatggttctgcccccttctctgagcagacgatatctcaggctttagccactgctagggagcaccttgcaagatctctgctcaagtaaatcatttatcttttgactccttaaaacttctctgcgttgaggattgggcgagtgtacgttgaagcatgtaattgttaccttttactcataataaagtgtaattgtgacggaaaaaatagttgaatatgatataatacttgtactcagatttatctcatcaagtgctaatgatagtttccatgattgcttctgcgttgc

SEQ ID NO: 3590 - DNA, 1353 bp, Oryza sativa
  ref <308>: DATABASE ACCESSION NUMBER: AK061255
  ref <309>: DATABASE ENTRY DATE: 2001-12-06
gatttttcttgtttagctcgcttgatcactggagtgagcaattttcattccttgagcttcattctttccatccttatagaaaatggacaattggagttgttacttcaaaagtactctgcaactgactcagccactggggcacctgcatcagttagagggtttaggatggctgttatcacctcactgaaacattttatcccaagtgatgacgacgctctttctctggtatataagcactttgacatgaagcatgaggctgcttctctccttgagtcacgtgcagaacaatacatgaacagctggttatctcgatatgacaaagaaaggaggaatgatgagctccttgaggctatgcatcaccttgttgagatggctgaggttctttcaacaattgatgctggccaaaggacacaccgggcgtgtgcgcgagcttctctcctatcacttcagatccgtatacctgaccttctgtggattggtctttcggaaaccaatgctcggcggattttcgtagaacaatctaggttccaagaggccctcattgttgctgaagcatacaacataaatcagccgatggaatgggctccagttttttggaaccaaatgctgaaaccagatctaattgagcaatttgtggctgagtttgtgttggtgctgcccctgcagccaccaatgctactcgagcttgcaagattttaccgggcggaggttgcagccaggggggaccagtcacacttctcggtctggctttcgcccggaggcttgcctgcagagtgggtgaaacatcttggcagatcgttcaggagccttctccgtcgaacgagggatatgaggctgaggctgcagttggcaactcttgcaacgggatttagtgacgttcttgacgcatgcaatagtgttttggacaaggttccggagaacgctggccctctaatcctgaggaagggccatggtggtacatacctccctctcatgtaaatccttccattttgatccatcttgttcaactttcggcagactgaatcttacaggagttcagtatatagtgaggtgagaatttttcccgtcctttctttgggcctgcgttcagcattctagttttttgatacatatggatgaagccatgggagatattcggtttgtatatatacaagcattctgagtggataagatgaacatagccgattgagagtgagtttttgcggcttcagtcggtggaagttttcgtgtgggttgtagcgccgtactcgtggtgcctgatgtctgtagtttgttgtaaattccattgacccaaccatgaaattttgtacaattttcttcacgtcacttatgcttcacaagatactcattgat

SEQ ID NO: 3591 - DNA, 1122 bp, Oryza sativa
  ref <308>: DATABASE ACCESSION NUMBER: AK104449
  ref <309>: DATABASE ENTRY DATE: 2002-08-28
aaaaaccactccatcagtccaccacccaccttccccgaccttatctgcgacgagacgacggcagcgagctccaccaccaccaccaccaccacctcctcctcctcccggcggcgaccgcctcggctgcgcccactccggcggcgcgcggcgacgaatcaccgggccgcactatccggcaaggatggcgcccgccgcctccgcctccgcctccgccgtcgtcacaccgtcctctttcagatgcgtccccacggcgtcgtgcggtttgggggcccggggtaaagcccccgcgccgcgccggcttctccacgaccacgcgcaaggtaaaaaacgggctgcggcaacttggtccttgaaggctggtctgtgggactcccttagatccggatttttgaagagtaataacagtacagagacagtagagccaccatcagcaccaattgaagaggaagaacctttgcccgaggaactagtactcctagaaaggacacttgctgatggcagcacagagcagatcatattttcttcagctggagatgttaatgtgtatgatctccaagctttatgcgacaaggtgggatggccacgcagacccctaaccaaaatagcagcatccttaagaaacagttacctggttgctacactacattcagttactatgccttcaaaagcagaagttatttgacagagggagaagagaggaagcaactaattggtatggcgcgagcaacttcagaccatgcctttaatgctaccatttgggatgttctcgttgacccttcatatcagggtcaaggtcttggtaaagcgttaatggagaaagtaatccgaactttgctccagagagacatcagcaatattacgctgtttgcagataacaaagttgtagatttctacaagaacttgggattcgaagctgaccctcaaggcatcaagggcatgttctggtaccccagattttagtgccagcggcctgacaccttcctgttcatcagtaatgcctggttctcaccgcccagggaccatagttttgtccagttgagtcgagctcagctgtgtaacagcaactctaactgaatggtggtgatatctgcaatatcttgttgtctgcaccacgagccatac

SEQ ID NO: 3592 - DNA, 1109 bp, Oryza sativa
  ref <308>: DATABASE ACCESSION NUMBER: AK104450
  ref <309>: DATABASE ENTRY DATE: 2002-08-28
aaaaccagaaaaggaagattttttttgcatctcatcctctcgctctcgccgtctctcgccgctcccccccctttccaggctccaatcccgccgccgcgtaggatggccaagacgcggcagccgcagaagcgggtgctggagtcgttcaccatcaaggggcccgacggggtcatcaagcctggggatactgtgctaatgatggcacctgactcatcaaagaaaccatatgtggcaagggttgaggaaattgaggcaacaggacctcaagcctctcaagtgaagatcaaggtgcggtggtactaccgcccagaagagtccattggtggccggcggccattccatggttcgaaggaagtatttctttctgaccactatgattcgcagagtgctgacaccatagagggcaagtgttatgtccacacctttcgagattacaccaagcttcgatctgtcagcgctgaggacttcttttgccgctttgagtacaaatctgccacaggcagctttgtgcctgaccgtatagctgtgttttgcaaatgtgagatgccatacaatcctgataaccttatgatccaatgtgaggattgctctgactggtttcatccttcctgtgttgaaataaccatcaaagaagcgaagaaactagagcatttttactgtaaaagctgtattgctgaaaatggaaaggatctacaaaagtccaatggtgctactgtgcaatctgaagaaaaggtgcagtccaaacgacggcggaggtgatgccatggagacagaatctcaatacctccaaagtggatgtaacaattctgtggggagcaaagcctcatcactcctctagatcttctctcttctcttcctgtgcaaggctgcttgcagccagtgaccagtgtactgtgtacatatttaccagtgttttctttttgcatcgtttgcatggtcgtcgtagcgtcgtcgcatgtactagcttggagtcagtcagtcagttagctcgagcaaagggatcaaactccctcttggtcataaactcataagcgatgatgatagatgaaactgggcactacctaccgtggttgtgttgttgtccatcaataataccttgacgacttgct

SEQ ID NO: 3593 - DNA, 973 bp, Oryza sativa
  ref <308>: DATABASE ACCESSION NUMBER: AK061256
  ref <309>: DATABASE ENTRY DATE: 2001-12-06
attagcattctatctcatcagcaatggccaccatgccgctaaccttctccccgcctcgcctcctccaccgccaccgccgccgcgaagccaagccccaacgccgctccgccacccgagtctccctcctccctcgacggggagcggcctcggcgcggcggccgctgtactgcgcccccggtggcggcggcgaagtctccgcccctccagccaccgagcagcaggagcaagcggcgaaggaggaggaggaggagtacacgctcctcgccaagaccggagtctggaccaactcatattgggatgagttcgtgagcctaccagctgttgttccacgtggtcctgttgctcttctaggattgggtgctgggactgcagcacatctgatgctaaaattttatccttggttgcaacttgttggatgggagattgatcctaagataattgaactgtcaagggattattttggtttatctgatttagaaaaggcaacagaatcaggtggttcactttctgtgcgcattggtgatgcactttctccgtcagctacaattgaaggagggtttgctggtattgttgttgatttgtttgctgatgggaagatcatacctcagctacaagaagttgaaacctggttggaaatcgcgaaaaagctaatgccagatggacggatcattgttaactgtggtggagctgatgctgctgtatctcttgctaatgatacgggcctttcgtcctgggttcagaattccacaattaaggcactctgtgctgcatttccggggcagctcaactggaagagactatcagagaaagagagtgtaaattacgttgcattgacgggtcctcttccaaacttggatgagtggtctacctcagttcctagtgagatgagcacaaaagtgaaacagtgggtaccttgcgaacttgcttgaggttgagaatgaacaatttcttctagatgtaccctatttgcttc

SEQ ID NO: 3594 - DNA, 1027 bp, Oryza sativa
  ref <308>: DATABASE ACCESSION NUMBER: AK061257
  ref <309>: DATABASE ENTRY DATE: 2001-12-06
tcccagccatttcgatcgatcaaggagagcaaagaggggatgtcggtgatcaaggattgtggggggcacaaggggtgcgagtgcgagaaggagaaggtgcaccggcggctgtgctgggcgctggtggcgctggtgctcctgacgctcttcatcgtgctggtggtgtggctggcgctgcggccgcacaagccgcggttctacctgcaggacctgtccgtgctgtgcctcaacgtgacgccgccggcgtccgcctacctcttcaccaccatgcaggcgacggtggcggcgcgcaacgacaacggccgcgtgggcgtctactacgacaaggtggacgtgtacgcgcagtacaaggacgtggccatcacggtgccgacgaggctccccgtggagtaccagggccactacgaccagtccgtctggtcccccttcctccaatcgctcgaccacgtcgtcctcccccccaacctcgccgtcgccctcgcccaggacgagaccgccggctacgtcctcgtcgacatccgcctcgacggctgggtccgatggaaggtcggcacctggatctccggccactaccacctccgcgtcaactgccccgccctcctcaccgtcaacgacggcaagggcagctacggcgtcaactacggcggcggcgatggctacttccgcttccagcaagcagctgcatgcgccgtcgatgtctagctgtgtcttctttcttcatttcctcctcctccttctcttcttctttttaattagtttcacggcttctcttcttcttcttgcttaatttttctcaccggaatcaatcatctcatatcaatgaagaaaaaccgatcgatgatagtactagcttcttaatttagaccgtagttggtttggagctagtgtagcttggagtgaaagggaaaattggggtattctgaaaagatgcataatagacgtacagctgggagtagacgtgaagtgtctgcataattcgatttgcatttggcaataattatattccaatgtgagtacatcaataatt

SEQ ID NO: 3595 - DNA, 1390 bp, Oryza sativa
  ref <308>: DATABASE ACCESSION NUMBER: AK061258
  ref <309>: DATABASE ENTRY DATE: 2001-12-06
aaaagcctaactaatcgggggcaagacgaggaggagagcggattctcgtcggcttcggcgaccggaagaggagaggagaccgaccccgcgccgtgttccgccgccgccgccgccgccgacgacgacgacggcaagtaggaatttgattctcctggggaattaacttgttaggagaaaaggaatttgggatgggcgaccatgtggtggtgaatgtggaaggcttgggaaacgatggaggggctgtggagaagccatctgaggccgtgaacagctcagtggtggctgctgcgtcgctttctacgactgttgatacggtcgaggagggcggtggagaggaggagccgctcatccaggcggcggagtgccgtatatgccaggaggaggatagcatcaagaacctcgagaagccttgtgcttgcagtggcagcctcaagtatgctcatagagcttgtgtgcaacgctggtgcaatgagaaaggagacattacatgtgaaatctgtcatgagcaatataagcatggatacacagctccacctcgtgttgaaccagacgataccatcatagatatcggtggtgattgggcacgtgacccaagaattattgctgtagcggctgcacaacgtcgtcttcttgaaactgagtatgatgaatatgctggtactgatgctagtggtgctgcattctgccgttctgctgcacttatactaatggccttgttgctattgaggcatgctttgtctatctcagacaatgaaggagatgatgatgcttctaccatgttctcgctctttctacttcgagctgctggatttctgctgccatgctatatcatggcttggatattcagtattttgcatcgccggcgacaaagacaggaagcggctgcaattgctgcagcagaggtggcattcatcctgcaatcagcccaaggccatgcccttcagttcaccatcgctccagactcccccgccactccacagcatgagccacagcagcagcagccgcagccgcagccgcagcaatagctagttacttcagtagcgtctctcaactactgactcgcacatgcagaagaagaggatacctcagctagtggccgctttgttgtttcctgttgcaactggcccagggacgctaagaacctggcctcgccttgtgtggccgggtagaaaccttgtaaaacgccagagattcatttgttgcaagcgaccgcagcttaagccccgctacccttcgatttgtctctgtgtaactcaagcattgatttattgtaaatttgtcgtctgttggagtccatttttttagttcctttgccaagtgttttactgccatgtacagtattattacatgggagcttttatctttcaaagaattaatctgagtgagtgtg

SEQ ID NO: 3596 - DNA, 1323 bp, Oryza sativa
  ref <308>: DATABASE ACCESSION NUMBER: AK061259
  ref <309>: DATABASE ENTRY DATE: 2001-12-06
atccatcattacgtacgttttgttgacttgtgttatatttctaacttaaaagcttggcaaaaatacttgattgtgcatgcagaattgagcgtgctgaacaattctgagaaaggattgcttccaaggaggatagattaacatcatatcactggtcagaaagacaagattccatgaaggttcacacaggcctcaggtgcattatgaaccggaagaggtcccgaacagtcacaagctggcgatcagagagtgcccagtacagagcaatcgtgttctgcagaggggtccgaatgggctggcgatgtgagaagtacaacgcgagttgtataccggaaagcgtatccactgcctcttggtaagtatctgaggttagtgcaaagctaccagcgccaaacttgtatccccattcaccataccaaggatggccacttgtgatggcatgcagaagcctgtattccattccatgcttcttggatatgtccatgacagttactttcctgcagtgaggttagtgaaattttcagggttatggcatgctgaataaccctctttttgtaggaacgacacatgaaccaaaacatatcgatcaatttatacctcacatgtagcaccttgcacaagcgatcccagaaactcattatgtcacggcccgtgagacatcttgagccaccttcacggccatttaccctcagaaggtggccataaccatttgcatgcaccacagcgtgcagcaggtgggtgttgtcgtccagatgcatgtacccgcactcctccagctcctcgccatccatatcaaagttgcataggaggcatctggaaaacattgcatccaaagttagcacgaaccacaattagcatagggcagcatcattcgatcaccaaatctctcacaagtttaatctttgcatctaggcacgataagaacaactcgacaactacaccacgatatgaaataaactaggcacattatcatccttccgcccgaaaccaatcgtggtgttacagttgactatatttatcttctctgaaactaacggtgcttgttcttcccaccttgattctccagcgactgtgggagtcccgcagcggaggcagcagctgtggcgcttgccgcacacctggttgttgtcgttctcgatgatgaaatggtaccgcttcccacagaccgggtgaccactccatcctgcaaccaaacaaatggcatcgcgcaagattacatcactgcttctgtaggattgaatttttttcttctcttttgcaaaaggattgtgacagcaatcaaatgtggaaattgtgcatcaaaagcaacaggccaacaatacttgc

SEQ ID NO: 3597 - DNA, 1105 bp, Oryza sativa
  ref <308>: DATABASE ACCESSION NUMBER: AK061260
  ref <309>: DATABASE ENTRY DATE: 2001-12-06
aaaaaaccaaaccctgtataggctcgtataggccaaggcagaagcttcccaaaccctcgctctgcccgtcgatctccgtcgccttctgatccccgcgcgcgcggctgcctatatataagttgcggtgatcggcgggcggctgcaccggcatggggctggagatcatgacggacgaggctgctgctgcgccttcgcccgctgcggcggcggcgcgtgtcgagatttacccgctctgccgctactacttcggcgccagggatgttgccgctggtggcgcgggtgcggggttggagaccgccgccgaccgcgccctccgcctcaaggccaacttcgcggcgcacgggctccggaccagcgtccatggcgtcctgctggttgagctctttgatcatccgcacgtgctgctcctgcaagtcaggaactcctccttcctcctccccggtggccgcttgagaccaggggaacaagatgtccaagggctcaagcgcaaactttcaaccaagttatcggtagctggacatcaggatgacgaagacggcgacggggacgacgaatggcagattggagagtgcattgggatgtggtggagatctgagtttgatgctgctccatttccatatctacttccaaatgcccgtgcaccaaaggaatgcataaaactgttcttgattaaactgccggtgtctcgccaatttgtcgtgccaaggaacatgaagctgctagctgtgcctctatcccagattcatgacaatgctcaggtatatggctcaatcatagctggaattccaaacttgttatcgaagttctccatgaacatcatcagtgactgagatgcatgccacatgccgttaagagctgtcacggctttacatgagactagcatattcgatctagtagtagaacatgttgtgtataaactgtacctggtagaaatataaactttggaattcacgagctggtgctgtcctgtatgttgtgcaatctttttttttttcttttactgtatagaggtaatgtattgtatttgtatatgttatcaacaccaggtgtggtgttatttttgtaacccttctgatatggctgtagaaatgaaacagttctgtac

SEQ ID NO: 3598 - DNA, 1125 bp, Oryza sativa
  ref <308>: DATABASE ACCESSION NUMBER: AK061261
  ref <309>: DATABASE ENTRY DATE: 2001-12-06
aacctccacctcctatccgccgccgccttcttcttcctcctcccacccgcgcaagctatccgccgccgcatcgcgtcgtcgacgaggagatggtggggccaggcctgtacccggagatcggcaagaaggccagggatctgctgtacagggactaccagaccgaccacaagttcaccctcaccacctacaccagcaatggcgtcgcaatcactgctaccagtacaaagaaggctgatctgatttttggtgagatccaatcacagataaagaacaagaacatcactgtagatgtgaaagcaaactcagactcaaatgttgttactactgtaaccgttgatgagctaacaccaggattgaagtccatcttgagctttgctgttccggatcaaagatctggaaagtttgagcttcaatactcgcatgattatgctggtgttagtgcaagtattggtttgactgccagtcctgtagtcaatctctccagtgtttttggaaccaaggctcttgctgttggtgctgatgtctcacttgataccgccacggggaacttgaccaaatataatgctggattgagcttcagtaatgatgatcttatcgcgtcattgaacctgaacaacaagggagatagtctcactgcatcttattaccacattgtgaaccattcggccacagctgttggagctgagctgacccacagcttctcgagcaacgagaactccctcaccttcggtacccagcacactctcgacccgcttaccgtcgtgaaggcccgcttcaacaattccggcaaggccagcgcgctgctccagcacgagtggaggccaaagtctgtgtggaccatctcagcagaagttgacaccaaggccattgacaagagctcaaaggtcggcattgcggtggccctcaagccttgatttttctcagggtgtacttacatttcaaagatgaaattgagatgagttgaaaaacatcttggcgcatgcgcatcttttggttgttgcagtctattagattccaagaactgccatgtttaatttgaggatttttttttttctgttatcggtgttagcacttgttcaatgagcaacccttgcaccccaataattcaagctcggcaaaattatg

SEQ ID NO: 3599 - DNA, 1179 bp, Oryza sativa
  ref <308>: DATABASE ACCESSION NUMBER: AK061262
  ref <309>: DATABASE ENTRY DATE: 2001-12-06
gtcctcccctacctggaggctgcagctcctggcctcccgggcaactagggttcggcaaatcccccgcaaggagggtgaaacccttccccaaaactccccaatccccacccgaccttcttcgaaatcggaggcaaaaccctaatcgcaaacagctcgtcctcgcgcggccgccgctccgcagcaatggcgtccctcttcaaggacccgaccaagctgtccgcgtaccgggacaggcggttcaccgggacgcaggaggagtacgaggcggcgctgcaggcgtcggtgacggtgtacgtcgggaacatgtccttctacaccacggaggagcaggcctatgagctcttctcccgcgccggcgagatcaggaagatcatcatgggactcgacaagaactccaagaccccctgcggcttctgcttcatactgtactactccagggaggatgctgaagatgcggtcaaatatattagtggaacaatgcttgatgatcgcccaattcgtgttgattttgattggggctttgaagaaggcagacaatggggtcgtggacggagtggtggacaagtaagggatgagtaccgcacggactacgatcctggaagaggtggctatggtaagatggttcagaaagagctagaagcacaacgtgagttagttgactatggaggtgcttttcaacctaatgcaccacctcaatatgacagaggtgacaggaagagaaggtatggagattcttaccggaacgacagagattaccaacggaaacgttaccggaacgatgagcgatcgtcgcaaagagcacctgactctgagttcaagagagatgcgattgattcggagaagaatcctaggtttcgtgagaaaggtgattctgatgaagaagacgatgattatgataagagacgccggcgctgaactgaaagaaacaattgctgataaatgcaaatgggcagttgcagtgactacactagtaaagcccgtcgagcttatgttttttaccctgttgtgtaccatatgacttatatatctgtcgtcagctcatttctatgttgcggttcatcaccacatgcttgcataggtctcgcatgcgactgggaatggattttgtgtttattgacacttcagcttatgtattgacctgttatttaggttggcaactaattgattttggtcggtaac

SEQ ID NO: 3600 - DNA, 949 bp, Oryza sativa
  ref <308>: DATABASE ACCESSION NUMBER: AK061263
  ref <309>: DATABASE ENTRY DATE: 2001-12-06
ctctgtttcactttcacacctctctctctctcctctctcttctttctctctcctccattttctctctctagttcttgggatctttgagtggaaattcttggacatggacgacgacggcgactggatcacagcgaggtacctcctctcgtcgatcctcgggcggaacccgctcgtcgtcgattacgtggacgaggagtccttccccgtcgaggaccctcccccggtggccggtggcgcccgtggagggaggcaagcggtggtgtcgcagccgccggtggtgcgcgcgacggcgggcgtggccgggacggtgtgctcggtgtgcacggaggagatcgcggtggcggacgccgtggtgcgtctcccctgcgcgcactggtaccacgccggctgcatctccccgtggctcggaatccggagcacatgccccatgtgccgcgccgagctgccggccagcgacgacgccgccgaggaaggcggtggtgccggccgggagaagccgccgcgcgcgggccgcgccgggactagcgccggcggcggtgtcaggcgtgacgcgtcgtatgagctcctcgccggcggcggcgtcttgtctggctgagtcgctgagcgtgtgggcccaagggattacgcgtcgttgtttggccgctcgcgttttcgtttgtacagaagaagaattgattaatgagaagggaaaaaaaacataaattttgatccgaatttaaacgttgctttagttcagttacttagctagtactaatactcctagttagcttgacgttggggttgcgaaatcgcaacgagaaagaaaagcgttacttgtgagtgtgcgcgttgaaatgttatgctacgatcgaaagaagcgtgcgtcctggtgatcaagtgggaaccagattccttcctaactatcaatcatttattggttattatatctataatataaagattggttttc

SEQ ID NO: 3601 - DNA, 1051 bp, Oryza sativa
  ref <308>: DATABASE ACCESSION NUMBER: AK061264
  ref <309>: DATABASE ENTRY DATE: 2001-12-06
aaaatctttgtttttcttctaaccttgttcctctctctttctcgcccgagccatttctccgcgacctcttcttctccctcgcttggcacggtgtgctagcttccatatctcttcctcttttgattagttccttcttctgccgtctcgcggttgcttctgtgtttgtttgcatcagaagcggccggaggagaggcagatagataaacagtgccagccatgtcgcctcctctgtgacttaaattggactgaattgatcaggtggctgcgcctcacctgaagccaacaaagtaagcagcgagaggacgcgccgccagggtagggggagcaagctatatatctagctgtgctgtgctgtagtgatcgatctctccctgttgttttgcggggatggcggccgcctcgtccgcacccttctttgggctcggcgacacgcagatgccgccgccgcagaatcccaccaatccagccctccaccaccaccccaacccctcccccgctcccgtcgccgccgccgcgcccgcgccgaagaagaagaggaaccagcctggaaacccaaatccagatgcggaggtgatagcgctgtcgccgcggacgctgatggcgaccaacaggttcgtgtgcgaggtgtgcaacaaggggttccagcgggagcagaacctgcagctgcaccggcgagggcacaacctgccgtggaagctgaagcagaagaaccccaaggaggctcgccggcgcgtgtacctgtgcccggagccgtcgtgcgtccaccacgacccgtcgcgggccctcggcgacctcaccgggatcaagaagcactactgccgcaagcacggcgagaagaagtggcgctgcgacaagtgctccaagcgctacgccgtgcagtccgactggaaggcccactccaagacctgcggcacccgcgagtaccgctgcgactgcggcaccctcttctccaggtccgtatgcttcgatcttgatcttcctcgtctcgtccatggattgattcgttcacgatctaagttaattaattcgagtaattgatccatatctttgc

SEQ ID NO: 3602 - DNA, 1002 bp, Oryza sativa
  ref <308>: DATABASE ACCESSION NUMBER: AK061265
  ref <309>: DATABASE ENTRY DATE: 2001-12-06
atctcctctcgctaccctcatccgcgccgcgctctcgcccgcaatcgaggccgcccctctcgccgcccgccgccgccgccgccgcctcctgctccttcgacctgccccggccccgccgcctcgtcgccgacgggagccggaggaaggggacgatggctgcggcgatcccgcccgaggcaagcggcctggcccacgacctcgggtccgcggccgtcaccgcaggcgtcgccctcgccctcctccgcttcttcgaggagctcgccaagcgcggggtcttcgagcagaaactcaatagaaaacttgtgcatataactatcggtatggtattcttgctcttttggcctcttttcagctcaggaagctatgctcctttcctggctgcagtagcaccagggattaatattataaggatgcttctgctggggttaggagtaatgaaaaatgaagctatggtaaaatcaatgagccgatctggagacccgagggaacttctcaagggtccactgtattatgctaccactataacttttgccacttctatattctggagaacctctccaatcgctatagcccttatttgcaacttatgtgctggggacggaatagcagacatagtggggagacgtcttggccaagaaaagcttccatacaaccccaacaagtcatatgcaggcagcatagcaatggcactagctggtttcatggcttcaattgggtatatgcattacttccagtcattcggtttcattgaagaaagctggtccttggcttttggcttccttgttgtttctgtaactgcagcacttgtagagtcccatcccatcagcacacatttggatgacaacttgactgttcctttaacatcattcctagttggtagccttgttttctgatgtttacctttgaaggaaaattactgggagatcttctgacatgtaaggaatatttcaataaggaactttggttccaatggtatgaacaaaattgcccactggtactttt

SEQ ID NO: 3603 - DNA, 1142 bp, Oryza sativa
  ref <308>: DATABASE ACCESSION NUMBER: AK061266
  ref <309>: DATABASE ENTRY DATE: 2001-12-06
atcctcccaacccaaaccgagcgcagcgcacggaccgagatctgcgcccggcagcggcggcgaactccggtgaaccaaccatggccgtggacctgatgggctgctacgccccgcgccgcgcagacgaccagctcgccatccaggaggcggccaccgccggcctccgcagcctggagatgctcgtgtcgtccctctcctcctcctctcaggccgccggggctcacaaggcctcgccgcagcagcagccgttcggcgagatcgccgaccaggccgtctccaagttccgcaaggtcatctccatcctcgaccgcaccggccacgcccgcttccgccgcggcccggtcgagtcgtctgctcccgccgcccccgtcgctgctgctccccctcctcctcctccaccaccggcgccggtcgctgccgccctcgcgccgacctcctcgcagccgcagaccctgacgctggacttcacgaagccgaacctgaccatgtcggccgcgacgtccgtgacatccacgtcgttcttctcgtcggtgacggccggcgagggaagcgtttccaagggccggagcctgctctcctccggcaagccgccgctgtctgggcacaagcggaagccctgcgccggcggccactccgaggccaccgccaacggcggccgctgccactgctccaagagaaggaagaaccgggtgaagaggacgatccgagtgccggcaatcagctcgaagatcgccgacatcccgccggacgaatactcgtggaggaagtacggccagaaacccatcaagggctccccttacccacggggctactacaagtgcagcacagtgagaggatgccccgcgcggaagcacgtggagcgcgccaccgacgacccggcgatgctggtcgtgacctacgagggcgagcaccgccacacgccggggcccctcccggcgccacccgccgccgccgccgtcgccgcgatgccggtgtccgtcgccgtgtccaccggcaacggacatgtctaacctaattagctccataatttttttcttctttttttttttagttgcttctcatcaatctaatgatgcgtgtaaagaagaaaagattgtagaaagaggacgagggaaacttgatgctagagaattaccgtctcc

SEQ ID NO: 3604 - DNA, 1407 bp, Oryza sativa
  ref <308>: DATABASE ACCESSION NUMBER: AK061267
  ref <309>: DATABASE ENTRY DATE: 2001-12-06
accggttttgatttgatctgtgtgatttgagtgagtgagtgagattctttggaggagggattttggtttggtttggtttggtggtttgtgcgggattttgtggggaggagagtaatggcgaccgcagggaaggtgatcaagtgcaaagcggcggtggcatgggaggccgcgaagccgctggtgatcgaggaggtggaggtggcgccgccgcaggccatggaggtgcgcgtcaagatcctcttcacctcgctctgccacaccgacgtctacttctgggaggccaagggacagactcccgtgttccctcggatcttcggccatgaagctggaggtattgtggagagtgttggagagtgtgcccactgcaagtcagcagagagcaacatgtgtgatctgctcaggatcaacactgacaggggtgtgatgattggtgatggcaaatcacgcttttccatcaacgggaagcccatttaccatttcgtcgggacttcgaccttcagcgagtacactgtcatgcatgttggttgcgttgcgaagatcaacccggcagctccacttgataaagtttgcgttcttagctgtggtatttctactggtcttggtgctacaatcaatgtggcaaagccaccaaagggttcgacggtggcgatatttggtctaggagctgtaggccttgctgccgcagaaggtgcaaggattgcaggagcgtcaaggatcattggcattgacctgaacgccaacagatttgaagaagctaggaaatttggttgcactgaatttgtgaacccaaaggaccatgacaagccagttcagcaggtacttgctgagatgaccaatggcggagttgaccgcagcgttgaatgcactggcaacatcaacgccatgatccaagcatttgaatgtgttcatgatggctggggtgttgctgttttggtcggcgtgccacacaaggacgccgagttcaagacccacccgatgaacttcctgaacgagaggactctcaagggaaccttcttcggcaactacaagccacgcaccgatctgcccaacgtcgtcgagctctacatgaagaaggagctggaggtggagaagttcatcacacacagcgtgccgttctcggagatcaacacggcgttcgacctgatgcacaagggcgagggcatccgctgcatcatccgcatggagaactgaggtttttcaggggattatggtgttgggtaataagattgggcagcttgagcagcctgccttgggtgaatgatgatatacggttcttctgtgtatcctgggcaaatttctggctttgtcaatcagtaatagtacggtatgaattccagtgtctgtagctgcaaagagtttgttaagaatcagtgatcttttggcgtaatattatcatatatttatacg

SEQ ID NO: 3605 - DNA, 1538 bp, Oryza sativa
  ref <308>: DATABASE ACCESSION NUMBER: AK061268
  ref <309>: DATABASE ENTRY DATE: 2001-12-06
aacaaagacagtagtatcatataacagcaagcaaataagaaagctaggtagggcattcctccctcctcaagtagagaagagctacagctgcagctgcagaggggggcataatggccgtcgggttgaggagatcggacagcattgccgacatgatgccggaggcactgcggcagagccggtaccagatgaagaggtgcttccagaggtacgtgtcccagggtaagaggctcatgaagaggcagcagctcttggacgagctcgacaaatccgtcgatgataaggccgacaaggaccagctcctccagggcttccttggctacgtcatatcctccacacaggtaggagaattacttactttcctaggtacatgcgcatctctctgtcaatccaacatcatccatgggccatgcaggaggctgcagtgctccccccattcgtcgcattcgctgtcaggatgaaccctggcatctgggagttcgtcaaggtccattccgcaaatctgtccgtcgagcagatgacaccgtcggactacctcaagaacaaagaggccctggttgatgacaaatggttagtcaattaaatattcacatttgctttccgtgtagctattactattgctatttaatcaacatccttttttgctttataatctcataatctggttggttatatctaaattaattaattggctgggtcaggggggcttacgatgacgactcccagctggaagtcgattttggcgccctggacctgtcgacgcctcacctcacgctgccctcctccatcggcaaaggcgcgcacttggtctccagattcatgtcttccaagctgaccgacaacaagaagccattgctggactacctgctggcgctcagccaccgcggcgacaagctgatgatcaacgacatccttgacaccgtcgacaagcttcagacagcactgcttctcgccgaggtttacgtcgccggcctgcatcccgacacaaactactccgaatttgagcagaagtacatgctgtattaccatacctggtcaactaccaaaagcatgcaacacgaatacatgatccaatatatatttgtaatgcatcatgcaggtttcaggagtggggactggagaaaggctggggtgacactgctgaaacatgcaaagaaacactaagcagtctctcggaggtgctccaagcaccggatcccatcaacatggaaaagttcttcagtacggtgccctgcgtgttcaccgttgtcatcttctccatccatggttactttggccaggagaaggtcctcggtatgccagacaccggtggtcaggttgtctacatcctggaccaagttagagctctggaagacgaactgctgcaaagaatcaagcagcagggcctgaatgccacacctaagattctcgtggtaatttaagttttcaactaacaattgcatgcatacctgggccatccatatctattatattattaagacagctcgaaaaggaggcaccacgttcgctgtggaggctagaaattcccatattaataggag

SEQ ID NO: 3606 - DNA, 1075 bp, Oryza sativa
  ref <308>: DATABASE ACCESSION NUMBER: AK061269
  ref <309>: DATABASE ENTRY DATE: 2001-12-06
ccttgccaaaagtcacgaacaccaaaggagagacccgagtcagattggggatcgacgaaggtggggaggggcgaacgccatggacgaggaggagcacgaggtgtacgggcaagagatcccggaggacggggacatggacggcgcggacgtcgacatggcctccggcggggacgacgccgcgaagctgcaggagctcgaccagatgaagcgaaggctgaaggagatggaggaagaggccgcggccctccgcgacatgcaggccaaggtcgccaaggagatgcaaggaggagatcctagcgcgtctacagctgaggcaaaggagcaggtggatgctcgatctgtgtatgttggaaatgttgattatgcatgtaccccagaagaagtgcagcagcattttcaagcgtgtggcacagtcaatagagtgacgatcttaactgacaagtttggacagccaaaaggttttgcttatgtggaatttctggaacaagaagcagttcaggaggctctgaatttgaatgaatctgaactgcatggtcgtcagataaaggtggcaccaaagaggactaatgtccctgggatgaagcagcgtccaccgcgtggatacaatccttatcatggttacccatatagatcgtatggggccccatatttcccaccatatggttacgggagagtccccagattccgccgtccaatgcgctacaggccatacttttgaagtaagaggttttcatgacgtggaacacaacaccaagcctagtcgctagtcagccaagtcggtcccagaaataattctactatctggtattttagtttcccagcagacatgctgggtgaatgcttccacccccaccatattccattttggtaacgtccgctcactagttatcagtatcttgtatcgttggttctgcagtacgcaaaacgtagtgttatcttattatattatatatacctgcatcatatgatattggtttgccatacttggtaatatgtctggatataagcgtgggattgtgatggttgattacagcccttatcagaagcgatgatgcttgggtacaacaagattgct

SEQ ID NO: 3607 - DNA, 1123 bp, Oryza sativa
  ref <308>: DATABASE ACCESSION NUMBER: AK061270
  ref <309>: DATABASE ENTRY DATE: 2001-12-06
gaggtgaaaaaaaagcagagcgttttcgaatggccacggccgtcctccgccgcccactcctcgccgccgccgccgccgccgccgccgtctcctccacctcctcctccttccgcccctcccgcttccatctccggcgatgtagatacccaccccctgtattcgccgtctcctccgactccccaaagccggttacctcctcttctaccggcggtgacaaccccgacgaggagcctgtccttcccctcttgcaagaactcgcggattgcttggttctcccgcccaaattcctgtcccagcttccccgcgaccttcgcctcgatctcaatgatgcggcatttgatctctccaatgggcctgttcttgacgagtgtggccaagaggtaggtgatctgctgctcaaccttgcaaaggcatgggagatggctgacacatcgacatcaaacaaccttgtcaagcaacttccttcaatggaaccctacttgaccggcagtgccaaatcagcatttggcaagcggctgatgtcagctggaaggaggtttacgtccatgggacaatacggcaagggagagctgaagaagattgctgaaacaatgagcaaaaccggtaagctgctatcaaaacgtccagtagttcaatctgaagtagaggctatgaaagtaaaaaggaaattgaagtttttagaacttgagtttgagttgacagcagaaaaggcaaatattggagctgcagttggacttgttttcggatttctctcatggcaactagcacgtggtatacaaaacattccagacggctcaatgcagtacgcaaacgacaacgcgttgcagatggccaagtcactcaaggtctcactgcttgttcttggctacacatctactgccctctctgttttcacatcaatcgggctgctgttgctggcgcagcagatcaactctgatgacaaaacggagtagctgcctaccagttgtctgaaactgtcgatgtgccattgtgtgtgctctaatcagtggatcatgatttcatgacacattcatagcgttctgttgtaccagtgtaattagcaacgcaactggataatctgtgtataaattacggaatgtttctgtacaagaattttaagttc

SEQ ID NO: 3608 - DNA, 1304 bp, Oryza sativa
  ref <308>: DATABASE ACCESSION NUMBER: AK061271
  ref <309>: DATABASE ENTRY DATE: 2001-12-06
acttgccactgaagagtggctgcttgcaggcttggcttgcagctggggagagagcatgagcagcggcggcgtcggcggcgggagcttgggcgccggcttgctgtaccacaagttcgtcagcttcgcgctggaggagacccgactccggaccaccctcacccctcacccctcccaggaaaagttcaagtctataaaacccaatgatgataatacagttttcaatgctctctcattcagtgcaccgaaaattagattgcttcgcagcttgacaatcgagaagaaaaactcatatcaggttcttgactttgccgctttctctgaacctgaatacgatcttcctatattttgcgccaacgtttttacaactcatgcacaaagtattgttgtattggacctcaatcctctatatgatactacagtgcacaaggattacaaagataagtactataggagtataatgcctcttgtacacaagtataacgaggtacatggatctttcctggctccacccaacctattgcctcataaattgttatttagctcgatatctttatttagaggatatgcagcttcttccttggggtggcaagattacgagtgagtcattgaagttcttctctccaattgtgatctggacaatatttgagtcaactgaacacaaccaccatgttctacattcagctttcgtggattattataaggtctggcttgaattaatggaccaagcaattaaagaaaataacaaagcaacaattgctcgtaaccaagaagaacaacataaatatctcacatggagggctgagaaggatcctggctatccccttttgaagaagttaattggtgaaagtcgtgccgaggatctggtgatggagtttctgtttgaaggagtaaatactcttggaacaaaatcatttctggattatttccctgaatacgcccgtgatgatgggtcagtgaacaagaaaaggagtatgatcggcaagtcttttgaaactaggccttgggacgccaatggagaattcattggcgatgccgaagcacagtaaaatgttcgctacgcctttcggcctgatcaatctctcttatgcttgtagtactgttttctttttttttagaaaacttacatttttcatgctcatatccctgaacttggattgaataagaagagattggtgaatctgagtcatgtattattgttctccggttgcactgattgtcgttgttagacgatggtctctgctcctggtagtagacatgatctgaaacaagaggggtcatcctgccctgcccggattaggatcctc

SEQ ID NO: 3609 - DNA, 906 bp, Oryza sativa
  ref <308>: DATABASE ACCESSION NUMBER: AK061272
  ref <309>: DATABASE ENTRY DATE: 2001-12-06
attgctgccctggttgccggcttcacctccgccgcgtctcctcccctctccgcctctccgctctctccttgctccgttgctctcgccaccacaaccaccatgggtccatggctacagccaaacctaggtcgtcgtcactcttgcctggccccgcctccggcatcgccgctcctccatcctgctcccggcaactaccaatagccgcgcagacagcagcgaaccaaccctagggtagtcacttcaaggaccggaggaagttggatgtgggaacaactccactcatggcgttggagctggcatctaggacttcaagcgaaaccagttccccaagatctgcgaggatactctcttgcaaccagttataactgaggttgagatgctgtagcttgggcagcttcagccctaccaagcctatgatagtttgtctgaaaatattagtcattgcaaaagcaaggagcaatcttggttattcaggatggacactgtgcacataccatcgatatttagagaactgggatagatactggacagatccaggaactgaagctccgggaatgaggagaagaccgtcgtgttgaaacgccaaaacgagtcaccatgtgcatttagcacttccagagaatcatacaggtttgagaagtagagatgtgatactcgcccagtgatgttgctgcatttgacgcgctcccacaagcagcagtcgtcgtcaccgtcgccgcgcccccatgatggcggcaccgtgccgtttgagcgcgtcagagaggagccaatgtccatcagcgccgtcctctcctccacgaagcagccatgggacgtggagatattggaatctagcaagcatggttgtgtacactaagaagatgaagaagaagatgatgtttttgcaataatgattttattcgtttc

SEQ ID NO: 3610 - DNA, 1114 bp, Oryza sativa
  ref <308>: DATABASE ACCESSION NUMBER: AK061273
  ref <309>: DATABASE ENTRY DATE: 2001-12-06
atttttggggccactccttttccatcgcgctaactcccgtcggctccccatcgccgccgcggaacaatcgcatcgctaccgccgtctccaccgcaccctcgccctcaccgccggctcaaacctccgcctcgtcgcccgcttcgcccatcgccatcgcgccgccgcctctcccctccaccccctaaccctaaccgcacctcaaattgcgtgaatattgcccgtctcgctgcagaatgatcctcttgaacgttgtcgcccgccgtttcccgccgctgtctcccgccggagccgcccctgcttccctgctcgcgccgcgatgaacaggaaggagagctggggtcggctcacaccgccaccacctctccctacggtgagcatactgtcacttttagtttttcattcattcatcagattcatttttcatccatctcatttagtttctccatctatatcagtccatgttcagctggtcacattcaacattgacacaaacaccttaactgatcgacatagtaatatagtatggatcaagacagtgttattttcaggaaattggtatgtcgagaggtggttctctcacctgaccatgcagacatgcagtacacattgaatccttcctctaaattatacgctgtgtgattctgatctgttaactttatacaggtcaattattcctgacagcagttgcttgaatgcttcaaagacttctggatccaacctgaagcccttattgtttgaggtcaacaagttcagggaacaatgaagaatcgttaaatacttcttttcaaaaagaatagttaaatactaaaagcaggaaggtttcatgaaaggtttcaacgagaggggaaccatgaatgagctttggttgcttatatcagattgctccttctgacgtaaattttgttacagcctttccacaacgtattatgcagctatcaaatttgtagctataaattcgatgttgtattatatacaagtattgaaatgaggtatgccctcatcttgtttcttggggaggaatagaggcaaatggcaaagggcgaaaaattggccatcagtacgtcaaatatcattaatttgattcttttcataaggaaagttgttgcttcagttg

SEQ ID NO: 3611 - DNA, 1022 bp, Oryza sativa
  ref <308>: DATABASE ACCESSION NUMBER: AK061274
  ref <309>: DATABASE ENTRY DATE: 2001-12-06
aagcgagaggccaccacaaagacgaggcccccgtcctccgccgctcgtcgacggcatgcagcagcagggcgccgccgcgctcacgccggcgaccggcctcgggagccggccatccctcaccgtcaaaaccagccgcgtgtgcaccaccgctgctctccctcccctctgccgctgtggccggcgccacctcatcggctccacctcggccaccgctctcctccccctgctcgccctcccgtcgcccgccgcctcgcccgtcgaccccgaagtgatgcttgagcgggtgcaccctgccaggccggagtggtacgagaagttctatgccacggccatggacaagttcatgaaaccttacgaggctgagattgcacagtataaatcaaagctcttttcccaattgatgactgctgggaagaacattcttgaacttggtgttggaacaggccctaatctcaagtactatgcaaatgccgatggcgttaacatagttggggtggatcctaataaacacatggaggagtatgccagagcagctgcagtgtctgctggacttccaccttcgaacttcaccttcagaagaggggttggtgaagctttgccagctgaggacaattcaatggatgctgttgttggcactctggtaatgtgttctgtaagtgacgttgaaatggcattgagagaaataaaacgagtcctgaagcctggtggtctctacatattcattgagcatgttgctgcgcctgatggatccttcctccgattcgtgcaaggtgcccttaatcctctgcagcagtttgtctctgacgggtgccacctcaccagagaaacaggcgaaatcatcagggatgctgggttctcgagcttggacctgaacacgactcgcttgtctactgcatttatcctcagcccccatgtttatggagtagcatgtaaatgatatttcctctcctttcgttgttccatctaattgtgtaaattgttatttgtcagcaatatgagctacagtatcacgctaggtttcc

SEQ ID NO: 3612 - DNA, 1201 bp, Oryza sativa
  ref <308>: DATABASE ACCESSION NUMBER: AK061275
  ref <309>: DATABASE ENTRY DATE: 2001-12-06
aaatcggctccctccatcacgcccctcttcccaaccgctctccccgctcccttcgccgccgcctcctctgctcgcgcgcctccgcccgtcgcgccgatccacgccgccaccgacaacgatctcctccgcgctgcccctccgcccattgcaacgatatcgcaccgccctccgtgcatcccctaacttgcgcccccatccctcccttcaccatcggtggccgcctccccttccaacctcgccgccctgcgattcccctaagcgctgcgcgttctcatccctcccctcaccatttccttcgaacctctccggccatccgccctcatccctcccctcactatccccttccaacctcgccggccatccacccgttgccccctgcccgtcggagatcgacggccgccggtttcactaaccgccacaatcaaccccatacctgagccgagattatttgtattttgcgggaggatcctgggagcaatttaaatcaatgcatagtatttgattttgaccaaatccactatagtgatggcagatgaacagtgatactacttcaacatcagaaaatttctgggcaacgctggtgccaacatcagctacccgccgcaaacgcctctggatctcgcatcccaccacgtcgaggcagggtcggttaggccggcaaaacattgacagcatcgcccaacactcaccacagtaaattactttcgatgtgatactggaatcgaccatatgtaccattacatatgaattgcgatttgcatttcatgttactatggcactatgctaagtgaatcttgtttactttctttaatcaagcacaaggaaattgtgttggaattagggtttcagttctctaccattagcttgtgaacttgttaccttgccatcatccatctgcctcatagcaccacttacattggtcggctgccagccttggtcttcttcaagacaagcatgctaacacaagtggtttgcgtggtatctgagaaagaaagattgatggtgcaaattgcgtggtatctgagaaagaaagattgatggtgcaaattatgcggcaaaaattgacagatgtttgatacatgtctttaatggattgtatttgatcatgtaaattcagtctctatccgtcgatttaaaattgtagcattcattcataatctctggagataattttcgttttaaaatataatctgtcctacgc

SEQ ID NO: 3613 - DNA, 811 bp, Oryza sativa
  ref <308>: DATABASE ACCESSION NUMBER: AK061276
  ref <309>: DATABASE ENTRY DATE: 2001-12-06
cgcctccgaatcgtagcgccggcgctgccacttccctcgctctcgcatcttctcctcgcgcccaggggccaggtaagcgaagatgtacaccgcgaggaagaagatccagaaggagaagggcctcgagccctccgagttcgaggactccgtcgcgcaggctttctttgacctcgagaatggcaaccaggagctcaagagcgagctcaaggacctgtacatcaacaatgcagtccagatggatattgccgggaacaggaaggctgtggtgattcacgtgccgtaccgtctgcgcaaggcattcaagaaaatccatgtcaggcttgtcagggagctcgagaagaagttcagcggcaaggatgtggtgattgtatcttggaagatgtagtctacccagctgagattgttggcaagcgcatcagataccgtctggatggtgccaaggtcatcaagattttcttggacccaaaggagcgcaacaataccgaatacaagcttgagaccttctccgcagtctaccgcaggctttgtgggaaagatgttgccttcgagtaccctatgactgaaactgcttgaagatgcattccttggattgttcccaatgtattccagaaatcatagttttgatgccaaagttggtcttcggtatttgttacttggagatggcaaatcgacttgagcaatgttaaagttttgggcatttaaattatagacctttgcttggcacggttagcttgtttcaaatccgttgtttgttgtggaatgtgtttcacatatgtggtaggtgaagaatctcattatggttcgctgtttc

SEQ ID NO: 3614 - DNA, 1404 bp, Oryza sativa
  ref <308>: DATABASE ACCESSION NUMBER: AK061277
  ref <309>: DATABASE ENTRY DATE: 2001-12-06
aatcaagcatcaatccctcattagcatcgctggttgatactaaactaacagtagccataatcatgggaaggccagtggcaacgctgctggtgctgtgcttcatctctgtcacggcgcgcgccgccgcgttccgcgtgcacggccgcctcctcgccgacgccgcgacggagggaggcgccgtcgtgcccatccactggacccaggcaatgaactacgtcgcgaacttcaccatcggcacgccgccgcagccggcgtcggcggtcatcgacctcgccggggagctcgtctggacgcagtgcaagcagtgcggccgctgcttcgagcagggcacgccactgttcgacccgaccgcgtcgaacacctaccgggcggagccgtgcggcaccccgctctgcgagtccatcccgagcgacgtccgcaactgctccggcaacgtgtgcgcgtacgaggcgtccaccaatgccggggacaccggcggcaaggtcggcaccgacaccttcgccgtcgggacggccaaggcgagcctcgcgttcgggtgcgtcgtggcgagcgacatcgacaccatgggcgggccttccgggatcgtcgggctagggaggacgccgtggtcgctagtcacccagacgggcgtcgccgcgttctcctactgcctggcgccgcacgacgccgggaagaacagcgcgctgttcctcggctcctccgcgaagctcgccggcggcggcaaggccgcctcgacgccgttcgtcaacatctccggcaacggcaatgacctgagcaactactacaaggtccaactcgaagggctgaaggccggcgacgcgatgatcccgctgccgccgagcggcagcaccgtcctgctcgacaccttctcgccgatcagcttcctcgtcgacggcgcttaccaggccgtcaagaaggcggtgacggtcgccgtcggcgcaccgccgatggcgacgccggtggagccgttcgacctctgcttcccgaaatcgggggcgagcggcgcggcgccggacctcgtgttcacgttccggggcggcgccgccatgacggtgccggcgacgaactacctgctcgactacaagaacggcacggtgtgcctcgccatgctgagctcggcgcggctgaactcgacgacggagctgagcttgctgggaagcttgcagcaggagaacatccatttcctcttcgacctcgacaaggagacgctctccttcgagcctgcagactgcactaaactctcctagctaatcaatggctgctgctacttaattactttcttcatatgtatgtgtacttctgaataacgcagccttgcggcatgagctgcagcatgctcatgttggtgaaaataatactccattcttattattattctgtggcgatctggcctacttcgatttc

SEQ ID NO: 3615 - DNA, 946 bp, Oryza sativa
  ref <308>: DATABASE ACCESSION NUMBER: AK061278
  ref <309>: DATABASE ENTRY DATE: 2001-12-06
gaatgcatttcatcgagcaccttgtgtgcgtgcctccatagccattgcttgaagccggagccggtactgacgaccgcgggagctgtggcttcgggatgcctctactgttgctaccttggatcaactccgggtgccggtgtgacccgaggacctgcagtcgaacacctgcgcgctcgccgccatcgtccacctctgcttcactaccgtctccccaccacggcatcgaacatcgccgttttgccacctctcgagtgttgaagagaagcccttgtttgtacgcttgcgtacctaacaagatgatcggagtgcggttccattctaggtctcgttccctagtcgactgcttgtgatgcacgcctctttctgggatctatagagttctttcggggttctatagagttctttcgggatttctggtgggcatcaagcaattttttacgtgatcaagagattactcttttcctgctgaatattaaagcaaagttgattccatctgttgttgcatttatttcggtttccataagcctcttcatgaaggattcattgccatacatcccaatcatattatttggcaactatataagctgaatttacctgcattgcttccgaaagaggctggaagcagtcttttaaaggctacccaagtgatgaagtcttattctcttgcttcttctctgaatttttgaggtactgattttctcttgggatctgtgttgtttctgtaagccagctgctgctgaagcctcaaggcaaggatctttactgtggagtatgcataattactgaacacaattacataaacttgtctgattcaggaagaggacaaattgggacttgggagcaagagatgtggtaggactagaggagagagccaattgtttgtcatgtacaggattctgttcttggtaattaattccgaaaggaaatcgataaaatttgagttagt

SEQ ID NO: 3616 - DNA, 923 bp, Oryza sativa
  ref <308>: DATABASE ACCESSION NUMBER: AK061279
  ref <309>: DATABASE ENTRY DATE: 2001-12-06
atgcactacttcatcatcatctttaattaattcgatctctccgggactatctatctccatttctctccaaggcgagctcgctcctcactcgatcgccgtgtcgcagttcatcctgactagcttcacttcagaaagctgcatatatatacaaagatgccaacgctgatcatcaccgtggacctgcagtgctgccgctgcaacatcaagatccagaaagtcctctgctgcatgcaagagcgaggcgagttggagatcgagaagatcgtgtacgagaaggacacggtggtggtgtccggccccttcgacgccgagaagctctcctgcaagctgtggtgcaaggccggcaagatcatcaaggacatcaagatcaagccgccggaagagaagaagaagcccgaacccaagcccgatgagaagaagcccgatcccaagcccaagcccgacccatgcaagctcataccattcccgtacccttacgtgtacccgccgccgccgccgtgcggcggctgcgccaccccgcactgctgcgactgccaccccaagccacctccgccggcgccggcgccagcgaagccagcgtgcggctgcccggcttggtcgtcgccgtgccactgctacccgccgccggccatgctgccgtacccgccggtgctcgtctgcgacgagggcccgcagtacggcgcctgcgccgtcatgtagccagcgctggtcatctccttccccgttcatatatccgtccatgaatgtgttcttgaaagtctcaccggacgtttgttattatgaagttcatcactttgggctttgattgggtgtgggaggattgcttatgttttttaagatgatggaaattaatattactccatgtatttagagaatgcttttatgtgataatgttaaggaaataaataattgagcttagtagt

SEQ ID NO: 3617 - DNA, 1111 bp, Oryza sativa
  ref <308>: DATABASE ACCESSION NUMBER: AK104451
  ref <309>: DATABASE ENTRY DATE: 2002-08-28
aaaaaactcatccaccacccaaagacaaagcaagcaagtacagtagccatggcgaagcatctcgcgctgtccgtggccgccgcggtggccgtgtcgtggctggcggcgtcgtcggcggcggcggcggggttctacgagaagttcgacgtggtgggcgccggcgaccacgtgagggtggtgagcgacgacgggaagacgcagcaggtggcgctgacgctggaccggagctccgggtccgggttcacctccaaggacacctacctgttcggcgagttcagcgtccagatgaagctcgtcggcggcaactccgccggcaccgtcacctccttctacctctcctccggcgagggcgacggccacgacgagatcgacatcgagttcatgggcaacctcagcggcaacccctacgtcatgaacaccaacgtctgggctaatggcgacggcaagaaggagcaccagttctacctctggttcgaccccaccgccgacttccacacctacaagatcatctggaatccccaaaacatcatattccaggtggacgacgtgccggtgaggacgttcaagaagtacgacgacctggcgtacccgcagagcaagccgatgaggctgcacgcgacgctgtgggacggcagctactgggcgacgaggcacggcgacgtcaagatcgactggagcggcgcgccgttcgtggtgtcgtaccgcgggtacagcaccaacgcgtgcgtcaacaacaatcccgccggcgggtggtcgtcgtcgtggtgccccgagggcacgtcggcgtggatccaccgcgagctcgacggcgccgagctcggcaccgtcgcgtgggccgagcgcaactacatgtcctacaactactgcgccgacggctggcgcttcccccagggcttccccgccgagtgctaccgcaagtgattttgaactcgatcgattcaaatcctcctccattgatgagttcttggcaatgatttgtaattgcttcttgttcttgttttcgtcttcgtcttcgtcttcttcttcttgatccatgtacattttgccatccattcgttctccatttgttacagttacagagacaggttgatggtgaattactattgccgcc

SEQ ID NO: 3618 - DNA, 1169 bp, Oryza sativa
  ref <308>: DATABASE ACCESSION NUMBER: AK061280
  ref <309>: DATABASE ENTRY DATE: 2001-12-06
acacacactagctacttctacttctatcataccaaacaaactagcttaatttgcattgcatcacattgccggccgccatgagagctctcgctctcgcggtggtggccatggcggtggtggccgtgcgcggcgagcagtgcggcagccaggccggcggcgcgctctgccccaactgcctctgctgcagccagtacggctggtgcggctccacctccgattactgcggcgccggctgccagagccagtgctccggcggctgcggcggcggcccgaccccgccctccagcggtggcggcagcggcgtcgcctccatcatatcgccctcgctcttcgaccagatgctgctccaccgcaacgaccaggcgtgcgccgctaagggcttctacacctacgacgccttcgtcgccgccgccaacgcctacccggacttcgccaccaccggcgacgccgacacctgcaagcgcgaggtcgccgccttcctggcgcagacgtcccacgagaccaccggcggctggcccacggcgcccgacggcccctactcctggggctactgcttcaaggaggagaacaacggcaacgcccccacatactgcgagcccaagccggagtggccgtgcgccgccggcaagaagtactacggccggggacccatccagatcacctacaactacaactacggcccggcggggcaggccatcggctccgacctgctcaacaacccggacctggtggcgtcggacgccaccgtctccttcaagacggcgttctggttctggatgacgccgcagtcgcccaagccgtcgtgccacgcggtgatcaccggccagtggacgccgtccgccgacgaccaggcggcggggcgcgttccgggctacggcgagatcaccaacatcatcaacggcggtgtggagtgcgggcacggcgcggacgacaaggtggccgaccggatcgggttctacaagcgctactgcgacatgctgggcgtcagctatggcgataacctggattgctacaaccagaggccctacccgccttcctagttgatatttgatccgagcagacgaataaaatacaatgcacacgagattgtgagactcgtgaaaaacatatactacctctgaattttaatacatatctctaaaacaaagatttgatcattcttcttattt

SEQ ID NO: 3619 - DNA, 1186 bp, Oryza sativa
  ref <308>: DATABASE ACCESSION NUMBER: AK061281
  ref <309>: DATABASE ENTRY DATE: 2001-12-06
gtgcatgttgcttgcagccaagaacgttcgatcgatcgatcgatcctcgtgttgctgcttaattgctgtgcttctccatcgccatggccaccgaccgtgtcgaggtcgacacggcacgccctttccggtccgtcagggaggccgtcgccgtcttcggcgagcgcatcctcgtcggcgacggctactcccggcgacccagcaacggcaatgctgctgctgctgccgttgttgacatcgccattgccaagcatgaagctagcggcgatagtgatgatgctactgtttcttctccggatgccatggaagctgagcctgaggtggaggaggatgcagcgccggccgtcgtgccgatgatgtactcggcaccgtcctcgccgcagtcgtcgccgccgccgccgaacgacggcggcgacgccgacgacgagcgcgacggcggcgtggtcgacgagggggtgacggtggcgatgatgcggtcagtcaagaagctggaggcggaggtggcggagacgaggcaggaggtggcgcagctgaagaagcgggggagcgagatggagatggccgtggcgtcgctcaacgcgcagctccaccgcggcctctcgaagctggcggagatggaggccggcgacacggcagcggcggcgcggcgcagcgttggcggcgagaccgacgtgtcgtcgacggtggcgacgttcaggagcgagcggtggggcggcgtcggcggcggcggcgcggccgtgtcgcgcgcgacgtcgtgcgagtacctgccgtcgttcagccacgcgttgagcctcggcgaggtggacgacggcgagctggtcgggaggaggaggaaggcgaggaaggtgaagcccatcgtgcctctcatcggcgacatcatcttctccaagaggaagagcaccaaggacaagggcggcgatggcttctacggcaacaatggcgatctttacagcgttctgggctgacgtcatctcactctctctgtgtgtgtgatctcatcaacctgctcatgtgttgtggctgctttgtgtgcaatttggatgagcaaatttgtttttgttttttagttttggttttgtatttctttctgcttctggtttggtgtggattgtgcaggggagtttgtgtaaatgtaaagcactgttaagttgactgtttttatatgtttgtatcttcagaagttcagatc

SEQ ID NO: 3620 - DNA, 1181 bp, Oryza sativa
  ref <308>: DATABASE ACCESSION NUMBER: AK061282
  ref <309>: DATABASE ENTRY DATE: 2001-12-06
atcgggcaggcggcagggccatggcggtggtggttccggaggcggtcctgaggcacggcgacgcgaggcccatgccggcggtggggatgggcgtggcggagtacccaagcacgccggagaggaccagggacgccgtgctggcggcgctcgaggcgggcttccgccacttcgacaccgcctccctgtaccgcacggaggcgccgctcggcgaggccatcgcggaggccacccggcgcggcctcctggcgtcgcgggaggaggcgttcgtgaccaccaagctgtggtgcacccagtgccaccctgacctcgtgctcccgtccctccgggaaagcctacggaacctgcaaatggagtacgtggacctgtacctgatccacttgccgatcagcgtcaagcccgggccaatggtgttcccggtgaagaaagaggacgtcgtgccgttcgacttcggtggcgtgtggcgggcaatggaggagtgccaccggctcggcctcgccaaggccatcggcgtcagcaacttcaccaccaagcacatcgacaagctgcttgcagtagcaaccatcctccctgccgtcaaccaggtggagatgaatccgacctggcagcagaggacagtgagggaatactgtgacgctaagggcattcgtgtgacggcctactcgccgctgggagggcagaattggggaggcagcgccaattatgtgatggaatcctcggtgctcacggagatcgccagggccagaggcaagagcatcgcacaggtatcattgagatggatctatgagcaaggagtgacccccattagcaagagctacaggaaggagaggcttaaagaaaaccttgagattttcgactgggagctgaccgatgaggaccggctcaagatcagccagatcccacagagaaagagggttacggctgcaagcttgttctctccagatggggagttcacatcggttgatctcccggacatcgaaattgtggaggaataggtgttgaagatgcccgctcctgctgctgctgaacaactgtgcctggagaacttaaatatggtacactttttcattttttatgtttacggaaacattcagtaaggatttgtgtcggaacaacagttttctatggcatgcgatttaattcattttcaatgattggttatcaaatgaataattatttcagtt

SEQ ID NO: 3621 - DNA, 1082 bp, Oryza sativa
  ref <308>: DATABASE ACCESSION NUMBER: AK061283
  ref <309>: DATABASE ENTRY DATE: 2001-12-06
aacacatcggcaaccaaccaccctcaacctctcctctctgctccgctccgctccgtcctcccgttgattcgctcgccgcgccgcgccccgcccgcgcgctgagatccgaacggccgcccttcccccccgccgagatcgatctccacccccccacgaccgctaagacggcgccgacgaggcgggagccatggaggcgtcttcttgggacgcccttcgcaagcaggcaaggaggttggaagctcagttagatgatcaaatgattgcataccgtaaattggtgtctatgaaatcagatggttcagagaatgatatcgagtctgatatagaaagatcactgaagcagcttcagcaagtaaattctcaaatgcaaacttgggtatcatcaggaggctctgaagttctttctcacacattgacccgtcatatggagattttgcaagatcttactcaggaattctatcggcttcgatcaagcctcagagtgaagcaacaacatgcttcgctccttgacctaagagattttgacagagcaaagtttgatgttgagagtggagactcagccgatcaagctcttcttagagaacaagctgcaatcagtaggagttctggacagatggataatgtgatatcacatgctcaagcaacgctaggaactctcatgtcacaacgatcaacatttggtggcatcactacaaagataagcaatgttagtagccggcttcctacgatcaatcatatcctcgcgtcaattagaagaaagaagtcgatggacacaatcattctttcacttgtcgcgtctgtctgcgcctttcttattctcgtctactggttgtcaaagtaggggctgtcaacttgtcatagcaaaggcattagggtgttgtaagtttggatcacactgtcagtgcagataatcgagattggtgtttgtacaatattgattcaatgttatcctgttttgatggttcttcaggcattgtgcctctcactgcacagccgcatgacttctagtatcgactggacccatatactacatgtacttgtacatgaatacgtgtgatttcctgaatgaagattagtttggc

SEQ ID NO: 3622 - DNA, 1194 bp, Oryza sativa
  ref <308>: DATABASE ACCESSION NUMBER: AK061284
  ref <309>: DATABASE ENTRY DATE: 2001-12-06
agcacacgaaacagagggaagcagagtagccgagagcgagcgagagacgcagagaagcgagcagggcggggccatggccatggctcgctgttccttgctaccgatcttggccgccgtcctcttggcggcgtcgctgtcgctgccaccgcgcgctgccgcgtacgccgccatggtggacagcctcctccccgcgtcagcgacggctctctccttcgaggaaggctacacccagctgttcggcgactccaacctcatgctccacggcgacgggaagagagtgcacatctccctcgacgagcggacaggcgccgggttcgcctcgcagggcgcgtaccaccacgggttcttcagcgccagcatcaagcttcccgccgaccacactgccggcgtcgtcgtcgctttctacatgtcgaacggggacgtgtacgagaggacgcacgacgagctggacttcgagttcctggggaacgtgagggggagggagtggagggtgcagaccaacgtgtacggcaacggcagcacggcggccggccgggaggagaggtacggcctctggttcgaccccacccaggacttccaccgctacgccatccgctggagccatgacacgatcatattctacgttgacgagacgccgatcagggaggtggtgaggacggcgtccatgggcgcgcagttcccgtccaagcccatgtcgctgtacgccaccatctgggacggctcgagctgggccacctcgggcggccggtacaaggtgaactacaagtacgcgccctacgtcgccgagttcaccgacctcctgctccacggctgccccgccggctccccgccgccgtgcgagggcgccgccgcctccgcgacgatgccgcccgggcagcggtcggcgatggagaggttccgggcgaggcacatgacgtacgggtactgctacgaccgcgtccggtaccacgcgccgctgccggagtgcagcgtcggcgcggaggccgaggcgttcctcccgtccggcgaggcgaggtcgacggaccgccgcggcggcaggcacggcaagcgccaccggcgcgccggcggcggcgtggattccgcgctctgaccgattctgtgatccgcacagcgccgctcgcgatggtggcgcgcgtgctcgactgtactatcgtgccgtgtgtgatgtcgtacgtgattatagtttcctggtct

SEQ ID NO: 3623 - DNA, 1159 bp, Oryza sativa
  ref <308>: DATABASE ACCESSION NUMBER: AK061285
  ref <309>: DATABASE ENTRY DATE: 2001-12-06
tccctccgcacgcgccgccggaagcgcgaaaccctagcaatggcggcggcggcggcggagggtggcggcggcggaggtggggcggtgtacgacccgagctacgtgccggactcggtgaagacgttcgtggcgcacatgtacaggcacgtcagggacaagaacgtgtacgagatccaccagatgtacgagggcgggttccagcggctctccgaccgcctcttccgcgacgcgccgtggccggcggcggaggccgtctcgccctactgcgacggcgaccacgtcttcctcctcctctaccgggagctctggtaccgccacgcctacgcgcgggcctcctcgtcgtcgtcgtcgtccgcgccgctcaccgccggccagcgcgccgagtcgtgggcgaactactgcgacctcttcagcgtcgtcctccacggcgtcgtcaacatgcagctccccaaccagtggctctgggacatggtcgacgagttcgtctaccagttccagagcttctgccagtaccgcgccaagctcaagaacaagtccgacgacgagctccaccagctcaagcagttcgacaaggcgtggaatgtgtacggggttctcaattacctgcaagcgctggtggagaagtccatgatcgcgcagattctggagagggagaaggaagggctcgagcagttcactgccaccgacggctacgactaccagggtggcagcaatgtgctcaagatgctcggttattacagcatgattgggctgctcaggatacactgcctccttggggattaccgcactggcctcaagtgcttggcaccaatcgaccttaaccagcagggggtctacaccattgtgattgggagtcacatctctgctatctaccactatggctttgcaaatcttatgatgcgcaggtactaaagttcattgactgccttggaatcaatggatacttcaatctacagtgccatgttagacgcagagttttttgctcttctatgttcaaattgtacttaaatcacatgaaatgcgtcctaggatataaacattatttccagtaaaattagattgagtcatgttgtacagccacacctaggatataagcattcttttcagtaaaaccccattttatgaatttattttttaattcactttcttgaaattgccc

SEQ ID NO: 3624 - DNA, 1207 bp, Oryza sativa
  ref <308>: DATABASE ACCESSION NUMBER: AK061286
  ref <309>: DATABASE ENTRY DATE: 2001-12-06
atagcaagcggcttcgtctcctctcctcctccggcgacgcgatcgagaagcggcgccggattttgccgccggcgacgcgcggctgagggggcggcgggaagggggtgggggtggggaggagggattccgcaaccccgcgcccatggcaggaagtaatccaccacccaaaccatgggaacgtgctggaacttcatctggtccagcgcctttcaagcccccatccgggggtagcactagtgatatcgtcgaagcttctggcacagcaaaacctggggaagttgtttctgccgcagagagcaatgttgcttccaatgtgaacagcaccatctctaggcctgtgcccccacggccttggcagcagcaaggatacggaaattcttatggaggttatggctccagtatgtatagttcgcttggtgggtttggtggaccttatagtagcggcggactttacggaaataacatgtattcaagttatggaggaggttatgggggtatgtatggaagttctggaatgtacggtgggtccatgtataatagcgggatgggaggtccctatggtggctatggtatgggcatgggtgcttacaaccaaggtccaaattcatttgggccaccagcaccaccccctggtttttggatgtccttcctgcgagtgatgcatggtgttgtgaatttttgtgggcgagttgctttcctttttagccagaacacacaggcattccacatgtttatctcagctcttttgcagctatgtgatcggactggaatgctttatggtgaacttgcgaggttcgttctacgcttgcttgggatcaaaacaaaagcaaagaagggtggggttcagggcgcagaaacttcttcgtttgaaggtccagggcatcattttgctgaggcaccaaaagctaacaactcctgggacagtgtctggactgatgatggtagtgggaagtaaggcaatgtttgtgcagagtgagtgttttgtgagagaatcatgatgagtttgtttatgggggagaaataatctgttgacatctgttcatatgctatttgcatttgaatgagagagaaaaaaaagaagtaatcactaatgctttttgtatgtaatgctcttccctagtaacatctgtagctctgtaaaaacaagctgttaaagcacctccctggaaatgccagagtgctagtaatatagcaatatctgtgtagt

SEQ ID NO: 3625 - DNA, 1399 bp, Oryza sativa
  ref <308>: DATABASE ACCESSION NUMBER: AK104452
  ref <309>: DATABASE ENTRY DATE: 2002-08-28
atgccctcaccctcgcgcactcccattcccatcctccacatcccgcgccatcgacctcctctccccgggaccgcgtcgctcgcgcgttgcctccacctccagtagcaagtatcaatggcggactccggcaagaagcgggacgggtcggccaacggcgccgagaagaaggcgtcgccgacgccgaagccgccgtcctcctccacatccggtttctccaagaatgtccccctcctcgtgtttgtgttattgctggggctgctgtaccggcagcttcagcctccggttccgaaaatctgtggaactccgggaggccctccggtgaccgggccaagattgcagctcaaggatgggaggcacctggcctaccacgagtacggcgtccctaaggatcaggccaagcacaagatcatcttcgtccatggcttcgactcctgcagatacgacgccctccaagtgtcacctgagctcgcagaagagctgggtgtctacatggtctcgttcgatcgtcctgggtatggagagagcgacccacaccccggtagaacggaggacagcattgcgttcgacatcgaagggctcgccgacgggctgcagctcggccccaagttctacctcatcggctactccatgggcggggaaatcatgtggagctgcctcaaaaacatccctcacaggctcgcgggggtgtcaatcctggggccggtggggaactactggtggtcgggttacccgtcgaacgtgtcgacggaggcgtggtacgtgcagctcccgcaggaccagtgggccgtccgcgtggcgcaccacgccccctggctcgcctactggtggaacacccagaagctcttcccggcctccagcgtcatctccttcaaccccgccatcctctcccgggaagacttgaccgtcatccccaagttcgcctaccgcacctacgccgggcaggtgaggcagcagggggagcacgagagcctgcaccgggacatgctggtggggttcgggaagtgggggtggagcccgctggagatggagaacccgttcccggcgggcgaggcggcggtgcacctgtggcacggcgcggaggacctcatcgtgcccgtgcagctgtcgcggcacatcgcgcagcggctgccgtgggtgcggtaccacgagctgcccacggcgggccacctgttccccatcaccgaagggatgccggacctcatcgtcaggtcgatgctgctcaccgacgagtgagatcaccgaccgaccgaccgagacgcgcatctctctgttttttttggtttttggaattttgggtactgtcacgtaccgacgtacggtggtacgcgtagttgcttgctcctattatcctatcctatatagagaaatgacaataatattttgcggagtcattttgcct

SEQ ID NO: 3626 - DNA, 1694 bp, Oryza sativa
  ref <308>: DATABASE ACCESSION NUMBER: AK061287
  ref <309>: DATABASE ENTRY DATE: 2001-12-06
aagggaaggggagcgaccttcttgaggcagaagtcacgaaccaaccagcgccgccgccgcgatgacggacgtgcagatgagcgactccgagccgcaggcggcgcctcccgcggcgccggcggcctccgccctccaccatctgaaggagatcgcctcggtgatcgaggccggctcgctgtccaaggaggtgcgccggatctcccgcgccgtccgcctcaccgtcgccctccgccgccgcctcgccgcccgcgacgtctccgccttcctcgccttcgcgctcccgccttcctccgaggcctacacccgcctcacctccctcgtccccaaggaagatgacactgagatggacattgacatggcagctccagcaactcagatttcgatcaagcatggcctccctgagattgaaatatattgctatttgcttgtcctgatttttcttattgaccagaagaaatacgacgatgctaaagcatgtgcaaatgcaagcattgctcgtctgaaaaacttgaacaggagaactgttgatgttctggcatctagactgtacttctattactcatatgtgcatgaactcaccaacagccttgctgaaatccgtgggaatctgctagccttacacagaatggcaactcttcaccgcgatgaacttggccaggaaactttgctcaacctgcttcttcgcaattacctccattataatttgtatgatcaagcagagaaacttaggtcaaaagctcctcgttttgaagcccactccaatcaacaattctgtcgatacctgttctacttgggtaaaatcaggacaattcagttggagtacactgatgctaaggaaagccttctgcaagctgctcggaaggcacccattacagctcgtggctttcgtattcagtgcaacaaatgggctattatagtgagactacttctcggagagattccagagaggactgtgttcatgcagaagggaatgaaggaagcactgacaccctacttcgagcttacaaatgctgtcaggatcggtgatcttgaattgtttagggctgtcgccgacaaatttgtgagcacttttagtgctgacaggactcgcaatttgattgtgagattgcgccacaatgttattcgaaccggactgcgcaatattagcatttcatactcacggatctcccttgctgatattgccaagaagctaaggctcgactctgataatcctgttgctgatgcggagagcattgtagccaaggcaataagggatggcgcaattgatgccaccatagatcatgccaacggctggatggtgtcgaaagaaactggcgatgtctactcgacaaatgaaccacagattgcattcaactctcggattgcattttgcctcaacatgcacaatgaagctgtgaaagcaatgcggttccccccgaactctcacaaggaaaaggaaagtgcggagaagcgccgtgagaggctccaacaggaggaggagctggcaaaacacatggctgaggaagatgacgatgatttttagactggctggccacttctttggcactttgggctgccaaattgcaatgttgagttggttgatctgagagaccgtaacacacctatacatgccactcacaaatgatatttgagtcatgcaaaaaccctttgcttcatctgccggaaatttatgtcgatgagaaatttatgactcc

SEQ ID NO: 3627 - DNA, 1290 bp, Oryza sativa
  ref <308>: DATABASE ACCESSION NUMBER: AK104453
  ref <309>: DATABASE ENTRY DATE: 2002-08-28
aaaagctcccttcccagtttcccccaaagctcctttcccagagaccccaaaccaaagcagcttgcttgcttgcttgattgtttgttgcttcttgagcccctctcctccttgcccaagtctgtgtttttgtggcagacttcagcataagggtgaagcaaagcatagggtctggttttgggttcttgacagaagtcatgtttcatggtggcaggcctttgtccctcaggggctctctcaaggcgcttgaagctgatatccaccatgccaacaccctggcgcatgctatacacagggcctatgggggtgcctgtgtgcagatgaggctgtcttacagctccatggctccaatcatccttaacctcatccagtggatggattgcagctgctccctttcatataccctccctagttacctaggtctccttgaggttcttgtgtacaaggtatatgttgatgaggatgcctctatatccaccaacattgaaaggagagcaagcctcaaggaattctatgctgtaatatatccattcttgcaacaactcgaggggaatttgatggagaaagactgcaacgagaaaggatggtgcaaggaggcggcctccggtggcggcggccggaagctttacgccgacgataaggacgacgagagggaagatgagtgcggcatttgcttggagacttgcaccaagatggtccttccaaattgcaaccatgccatgtgcatcaactgttatcgagactggtacacaagatctcagtcatgcccgttctgccgcgggagcctgaagagagtccgatcaagggacctctgggtgctcaccggagacgacgacgtgatcgacaccgtgacgctggagaaggagaatgtgaggcacttccacagcttcatcgacagcctgcccctcatagtccctgacaacctcttgctggtgtactacgactacctagtctgacgaagctcagctctcctcttctgaaagatattgagattcagagttcagtacgtgttccgggcagccgaccatcctctgcagattgagtctggctagcgaaatgccatgccgtcaatggcgaagacgacgacaccattgctccttattagggctgggctctgcgtaatcgcattgtttgttgtaataagtgtatatacagaattaaaaagagatattggggaagatggttttctcatgtttaactacttgtttggcacttctgctctggcaaattgccaaatgattcagaaaagggacaggtgctgggtgtttattgacctgcaccaactgtcgattt

SEQ ID NO: 3628 - DNA, 846 bp, Oryza sativa
  ref <308>: DATABASE ACCESSION NUMBER: AK061288
  ref <309>: DATABASE ENTRY DATE: 2001-12-06
attcatcctagctctcgcagcagcaaccagcaaggtaattaaccaacaccgagcatcaagcgcagtagccaagtcagctgagctcagctagctagcatcctctggatcgatcgagatggcccgtgcacagttggtgttggtcgccgtggtggcagctctgctcctcgccgccccgcacgccgccgtggccatcacctgcggccaggtgaactcagccgttggcccctgcctcacctacgcccgcggcggcggcgccggcccttccgcggcctgctgcaacggcgtgaggagcctcaagtccgctgccagaaccaccgctgaccggcgcaccgcctgcaactgcctcaagaacgccgcccgtggcatcaaggggctcaacgccggcaacgccgccagcatcccctccaagtgcggcgtcagcgtcccctacaccatcagcgcttccatcgactgctctagggtgaggtgatcgagctatatcgatcggatcgatgatcatatatatacagcagcgcgccggttgccacctgggtcgatgtgtgtggagccgaattctgtatccaatactactagtagtatctgtattctggaataaaagatgagctagctaggtccatcgatcaccatgcatgcatgtgtgtatggttattgatcggcccggtcagtccagctagcttcctgttatgtgtgttcgtctcgtttaatttgctcctttttgaggtgtacgtaccagtgagagctagagattgagtttatacccatctacatgcatgtgcgtgctactagctccttgtactacgtgcttgtttggattattacacatacatgtagctctttttggtacac

SEQ ID NO: 3629 - DNA, 1144 bp, Oryza sativa
  ref <308>: DATABASE ACCESSION NUMBER: AK061289
  ref <309>: DATABASE ENTRY DATE: 2001-12-06
ccttctccttcgcgccgccactctctccgagctctcgcctctcctcctcccccgtcttcccttcgcgcgcgccacccccacacacgcgaccatggcggcagtggcaggaggcgcagcgcgggcgctgtcgcaggcggagcaggacgtgcagatgatgctcgccgcctacgtctacaagcgccgctccgatggtatctacatcatcaacctcggcaagacatgggagaagctgcagctcgcggcgagggtgattgttgccattgagaacccccaggacatcattgtccagtcggcccgcccctacggccagcgcgccgtcctcaagttcgcgcagtacatttaccaatcagctccagacctccttcagcgagccccgtctgctcatcctcactgacccaaggaccgatcaccagccaatcaaggagtctgctctgggaaacatcccgaccattgccttctgtgacaccgattccccaatgcggtatgtcgatatcggcatcccggccaacaacaaggggaggaacagcattgggtgcctgttctggctcttggctaggatggttctgcagatgaggggtactatcctccctggccacaagtgggatgttatggttgatctgtttttctacagagaccctgaggaggccaaggagcaggaggaggaagctccagcacaagactttgctgccatcactgattacaccgcacctgaacaatggtctgctgaccagtggacctctgatgtggctgctcccccagctgctactgttggtgattggggcgcagctccagctccagttgctgctgccgaaggatgggatcaagcaggagcacccgtagccactgaagccgccgtcgttccaccggttgcgcctactggatgggacccggcagctcaaccagctgctcaaggctgggattaggctaggcaatcactttgagatgtcttccgcagcttaagttaaatatttcccgaggcatgaatgaacacccaaaatccaatgtgatcatctatagctacaccatgaactcaactgtttttaggaatttctagctgaacctgtgttgtttgtccgtccctatttcgaacaacaatgctgtgagggtgagctcggcaagatgtgtggtatatgttaagctttct

SEQ ID NO: 3630 - DNA, 1054 bp, Oryza sativa
  ref <308>: DATABASE ACCESSION NUMBER: AK061290
  ref <309>: DATABASE ENTRY DATE: 2001-12-06
atcgcggcgatgcacacgtgttcaagcttgatactctactcaaattggttgatgtcaaaggcactgatggcaagactacacttttgcattttgtcgtgcaggagattatccgaacggagggctcccacctctctgctagcaaccaatcaactccacgaactcaggcaaaccctttacgggacgagctcgagtgcaaaaagcttggcctccaggtagtggctggcctcggaaacgagctcagcaatgtcaagaaggcagctgccatggactccgacgtgctaagcagctatgtctcgaaacttgctggaggaatagagaagatcactgaggtgttgcggttgaatgaagaagtcaagtccagggaagatgcatggaggttccatgattcaatgcagaagttcttgaagagggctgatgacgacatcatcagggttcaggctcaggagagcgttgcgctatcacttgtgaaggagatcaccgagtacttccatggtgactctgcgaaagaggaagctcaccctttcaggatcttcatggtggtcagggatttcctctcagttcttgatcaagtctgcaaggaagttggcaggatcaatgaccgcacgatcgctagctcggtgcgccatttcccagtacccgtcaacccaatgatgccacagttgttccccaggattcatgctttgagagctggaatctcagatgatgaaagttcagccacttcagcatcatcaccttgatcaccagtagtctgccaatagaaatttttcgcagagtactgtgggaaacctccatagggcagagggagaccaacggcgacggggtgtcaaatttttttttgaaccttttgtacctgtagattatagaatgtaagaagtttttttgcaaatatttatttctatatataagaggagataaaatctagatcagaggaggaaataagcagttcatgtgtttgtcatcttcagtctgtacatgacacgaggtagtgaaacagcctgtacaatgtactaacaatttcaagtatggccagtctgcagaattcaaaggtaagctg

SEQ ID NO: 3631 - DNA, 1068 bp, Oryza sativa
  ref <308>: DATABASE ACCESSION NUMBER: AK104454
  ref <309>: DATABASE ENTRY DATE: 2002-08-28
aacaagcaagaagaaatttctctccttgtagaaacaagcctagagagtactatggagcagaggaaatttttgttgtgcctaattcttggcttacttgcgacttcaggacctgccaagaccgtcaatgctgactcgccctttgatttttattatctcatcctcatgtggcctggagcatactgcactgacagcgagtatggttgttgcgtgcccaagtatggttacccgtcagaagatttcttcgtcaagagcttcatgacctttgactcgtcagagaacacagctgttgtcaggtgcaactccgacaatcctttcgacattaacaagctagactcaatcgagaacaacctgaaccactactggagcaacatcaagtgtcctcgcaccgacggcgtgaactcatggaagagcgagtggaacagctatggcgtctgctccggcctcaaggagttggactacttcaaggccggtctccagctcagaaagaacgcagatgttctctctgctctcgctgaacaaggcatcaagccggactaccaactgtacaacacggcgttcatcaagtgggcagtgaaccagaagctgggtgtgacaccaggagtgcagtgcagggacgggccatttgggaagaagcagttgtacgagatctacctctgcgtcgacaaggacgccaagagcttcatcgactgccctgtcctgcccaacctcagctgccctgccgaggtgctcttccatccgttccacacctggatgctcaacaccacatcggctgccaacatcgtgatgcccactgaaactgtgctggcctaattaagagcctttaatttgctagctaagctgccatgatctacttgatcaacctgtcctaagagcatgtagcatatgcttagcttgttgctttgggtgaataatcgcgcaacttttatacattgttgtgccctctgaataatatgtgcagtactatatatgaagtattgtaccgcatatgttatgtattacatgtgcaggtcttgtgcacacctgtgaggtgaatggatatattatgaatatataacgtgttgtattatg

SEQ ID NO: 3632 - DNA, 1368 bp, Oryza sativa
  ref <308>: DATABASE ACCESSION NUMBER: AK061291
  ref <309>: DATABASE ENTRY DATE: 2001-12-06
gagcaatccggcggtttgacttctccgtccgcacctactctagcctttgttcagtggtacgaggcgccgcgcgagcctgccggaatggccgcggcgtcgtctccggcggcggccatcacctgccgagcggcggtggcgtgggcgcccggtcaggcgctggtgatggaggaggtggaggtggcgccgccggaggccatggagatccgcgtcaaggtcgtctccacctccatctgccgcagtgacgtcacccagtggcaatccacggctcatgcacagcgatcagaagacccgcttctcgctcagggggaaacctgtgtaccattactgtgcagtgtcaagcttcagcgagtacacggttgtgcactccggttgcgcggtgaaggtcggcccaaccgtgccgatggacaggatatgcctgctgagctgtggtgtatctgcagggcttggtgcagcctggaaggttgctgatatctcgaaggggtcgagtgtggttatatttggccttggaactgtagggctttctgttgctcaaggtgctaagctgcgcggggcttctataattatcggtgttgatactaatcctgaaaagcaagaaaaggggaaagcttttggtgtcacagattttattaatccagaagaattgaatgaacctgttcagcaggtggtgaagcggctgaccaatggaggtgcagattactcttttgagtgcgtgggtgatacaggagtagtgtcgactgcactgcaatcatgttctgatggttgggggctgactgtaactcttggtgtgccaaaagcaaagccagaggtttctgctcattatgcactacttctgtctggaagaacattgaaggggtctttgtttggaggatggagacctaaatctgatctacctttgttagtggacaagtatgcaaacaaggaaatccaagtcgatgaccttgttacacatgatttgtcattcgattacatcaacaaggcacttgaactgatgctagaaaacaagtgtttgcgatgtgtgattcacatgcctcagtgacagggttggacaactaagtgttatcgtatctctacaattttttcgctttatctcagtcgtgaagttttcatcagcaaatcagattatcacatcattctatgtttccaccttggaagttttgatgctgtctaactttgtgtacctatctcaagaattattcatgctatttatcttgctgtaaaattagtttgtaatgactgcaattttgtattgatgttccatgtataggccaagatctatcttcttccagagcttcctgcttcaaatgaatcatgtaaaactgaaggacagcgtaaaggaaatgaaattacattcactgattttcatccgtc

SEQ ID NO: 3633 - DNA, 1589 bp, Oryza sativa
  ref <308>: DATABASE ACCESSION NUMBER: AK104455
  ref <309>: DATABASE ENTRY DATE: 2002-08-28
atcatagacgattttatcgatgaacctgaaatagacatggcttgccacttgagattatttccctttactcaactactagtattggttctgtacaaaatcgccgccgtaggggcagatcctgcaaacgcagaactatccacaaagatcacccaacactctccattgtacaacccacagcctcaagactttccaaacgaggagctctaccgcaactatctagtcatccagcggttcaagaagacaatcacttccgaccccaagaacatcaccgccacctggaccggccatgacatctgcggcaacacgacctacctcggtttctactgtgcagcattgcctgggcgtactaagaagcccacggtcactgtggtgatctttaacggttatggcctgcgtgcaccgaagctggaaggatttattgaccatctccccgatcttgcacttttccatgctgcctccaacgacttcggtggtgacatcccctacctcacaggcctcgcctacaactacaagatcaatgtcgacagcaatctccaaatacaggatgattttagtcgtgacatggtcgggtcgcatgtaacaactaaagttcatggttattgcgttaatttagatctagatatcacatttcacctccggcccggaaaagacgacaagaaaggacgaagcatccccggtgccacagattctaaggcgctcctcctcaactacaatcacctgtccgggccattaccggtgaacatcggtttctccaagttaagctacctggccctcgccaacaacaggctcaccggcgcaatcccgccatcaatcttgcatttgcaagactccctcctcgaggtgctcctcctgaacaaccagctctccggctgcctcccccacgagctcggcatgctcaccaaggccgcagtgttcgacgccggcatgaaccagctcaccgggccgatcccctcctctttctcatgcctcaccagcgtcgagcagctcaacctgggcggcaaccgcctctacggagagatccccgacgcgctctgcaagctcgccgccgtcccagccggccgcctcgccaacctcacgctgttgagcaactacttcacgtcagtcggaccggcgtgcttgtcgctgatcaaggacggcgtcctcaacgtcaggaacaactgcattccgggcttcgccaaccagcggcggccggcggagtgcgcgtcgttccacagccagccgaaggcgtgcccggcggcgagcgccacccacgtggcgtgccccgccggagctgccaacgctgcggcggcgccggcggacagggtggtcaaggactactccagctacgtgacgtacgccaccctgcacgagtgagcccggcgccacggcacgggcgcacgacgtgcgtgcatgcatgcagtaggggacagctagaagctagcgtctcggggtggtatttgctcttgtattcttgtgttcgtttgttgtgctcgtgagtcgtcattgtggtttgttttctctgcacgtgtggctagctatggctgtcacgtctagatctcacctcctgtactcttgtgtactgtactatgtgaaaatcattggtgattact

SEQ ID NO: 3634 - DNA, 1077 bp, Oryza sativa
  ref <308>: DATABASE ACCESSION NUMBER: AK104456
  ref <309>: DATABASE ENTRY DATE: 2002-08-28
agcggcgatttctcatctgaattgcaggccaattccagttgagtttctccacagaccacagatatggcttccggcaggatagctctgctctgccttcttggcttgctgctggtagcagcctcaccggctgccattgctgccaaagatgacaaaatcttctaccagattactttcatgtggccgggagcgtactgcgcgcagacgaaggccggatgctgcatgccgaagaccgacgtcgcgccggcgtccgacttctacgtcgccggcttcacggtctacaacgccaccaccaactcttccctgtccagctgcagcaacactccattcgacatgaaccaaattggggatgtcacgaggctgatgcagtactggaacaacatcaggtgccccagcaagagcggccagaagggctggaagaacgcgtgggagacgtccggcgtctgctccgacctcaccgagagcgcctactttgacaccgccctcgccctccgcgacaagatcaaccccctttctcgcctcgtcagcaacggtattaagccggactttgggctgtacagcgtgaagaagatcaaggaggtgatcgaggaggggatcggcgcgccggcgctgatccagtgcagcaagggcccgttcaacaagttccagctataccagatatacgtctgcgtcgcggaggacgccaagacgttcgtggagtgccccagcccgaggaagccgtacacctgcggcgacgacatcctcttccaccctttcaagaagtggatgctcaagaccaactccaccaaatcctacgccgccgccgacgccatcgaccagctgctcgaagcggtcatggaaatctgagctcgatcgatcgatcgatcaagaagacaaattaacccttgttgtgatatgcgatttgtgcgtgtgtgttgtctgtttcgatcgtgatgttttctgcgtgtttatttcgtgatgttctctcatcgcgcccgcgcgcggttgggtacgatccgggacacctacgtagcactgaatccgtctctgtgatgcattcagagaataagtccgaatatgtgcggccttgttaatgttttc

SEQ ID NO: 3635 - DNA, 1048 bp, Oryza sativa
  ref <308>: DATABASE ACCESSION NUMBER: AK104457
  ref <309>: DATABASE ENTRY DATE: 2002-08-28
aacagcagcagcagcagcagcagcaacttccactgaaacaacccaccgaggcagcagaagaaaggaaagaatcaagaaagcttcatcgtcttcatggggaggtcaccgtgctgcgagaaggcacacaccaacaagggagcatggaccaaggaggaagatgaccggctcattgcctacatcaaggcgcacggcgaaggttgctggcgatcgctgcccaaggccgccggcctcctccgctgtggcaagagctgccgcctccggtggatcaactacctccggcctgacctcaagcgcggcaacttcaccgaggaggaggatgagctgatcatcaagcttcacagccttttaggcaacaaatggtctctgatagccgggaggttgccaggaagaacggacaacgagatcaagaactactggaacacgcacatcaggaggaagctgctgagccgtggcatcgacccggtgacacaccggccgatcaacgacagcgcgtccaacatcaccatatcattcgaggcggccgcggcggcggcgagggacgacaaggccgccgtgttccggcgagaggaccatcctcatcagccgaaggcggtgacagtggcacaggagcagcaggcagccgccgattggggccatgggaagccactcaagtgccctgacctcaatctggacctctgcatcagcctcccttcccaagaagagcccatgatgatgaagccggtgaagagggagaccggcgtctgcttcagctgcagcctggggctccccaagagcacagactgcaagtgcagcagcttcctgggactcaggacagccatgctcgacttcagaagcttggaaatgaaatgagcacctcctcctctgtagtttcttctttcgttttgtcacttggatattggttagcttttcttctaggtgaaaacacacagagagagagagagagagagagagagagagataacatctcctctgctgctcttgctgctccattttgtctctgttgtaattaccatatattgactaatcatgacaaataatacttgatgct

SEQ ID NO: 3636 - DNA, 1120 bp, Oryza sativa
  ref <308>: DATABASE ACCESSION NUMBER: AK061292
  ref <309>: DATABASE ENTRY DATE: 2001-12-06
atattgcactcgtaatctgctcacttcttttctgagccatggatatgcttctctgtttcgtggagatcttctccatcctttgttgctgcatcatctactactaccaccttcaaaccaagaaagcaagtgcttcggagccgaccgaatggcccgtgctgggtcatctcttcggcatgttcgccaacatccaccgcttccacgactgggccaccgacatcctcgccggcggcatggtgatattcgacgccagcgagctcaagaacctggtgtacctgcaagcggcgctgtccgagtgcctgaggctgtacccgtcggtgccgttcgagcacaaggcggtggccgccgacgacgtgctcccgagcgggcacgagatgaaggccggagacaaggtactcgtgttctcctactccatgggcaggatggaaggcgtgtggggcaaggactgcacggagttcctgccggagaggtggatcaccagcgaagggaagctgcggtacgagccgtcgtacaagttcttctccttcaacgccggcccgaggacgtgcctcggcaaggagctggcgttcgtgcagctcaagaccgtggcggcggccgtgatgtggaacttcgccgtggaggtggtgccggggcacgccgtcgagccgaagctgtccatcatcctgcacatgaagaatgggctcgctgtcacggtcaagaggagggccaccatggctagctgctagctagctcatgagtcattagccatcagccatggctggttccgttcgtgacgtcctcgtcaatggccgcagcaacgtacgtcgtcagctaaacttacaatgacctaatgatcgtcatcgtataccacatcatttatggtaccaggactagagctacacgtaggtgacacgtatcagtatttcatcagttcgtatacgtatgtaagtgccatcaagtgtgttttccttttaatggtgtgtgtccttttttttttatttagaaaacgaactgaggcaactgtgcctcagagatgctcgggcctctcctatgcactatgcatgcttgcatagcttatagccgtatattggctatgtataggttggtgtgtccctgttagtgattatctgtttgtttcggtttt

SEQ ID NO: 3637 - DNA, 1150 bp, Oryza sativa
  ref <308>: DATABASE ACCESSION NUMBER: AK061293
  ref <309>: DATABASE ENTRY DATE: 2001-12-06
atctcatcacatcagcacacatcacacgcgccgattccgaagaaatcaatcaaccaactactaggcgaaagcaagagcggatcgggtgctgcatttcgcggtcgttttcttcctctgaattctggtgtttgcggttgcggcaatggcgttggtggcggcagcggcggcgaatccgaagcagaaacagaagcagcagaaggcgtcgatcgggaggcgggcgtggcggctgctgcgcctggcggtgctctgggcgaggaagggcagcgcggtgcacagcctccgcctgctcagcaacctgcggcgcgccggcgtgggcctcggcgtcgtcggccgaggcgaccgcctggggtacggcgagcgggagtactcgatcgaggagacgccggcgttccggttccgcacgccgtcggcgcgggtgctccgcctaatcccctgcatcgcccccgccgtcccggacacgcccgggctctacggcgacgaggaccgctacttcttcgcccgccgcgacacggagcccgagtgcggcggcggcgtcgggtattacgactacaatggcgagccgggcgagtgcggcggcgtggacgacgagagcttccgcgacggcgcgatggaggagcagctcctcgagctgtccatgctggaggcgagcgccgccgccgtgacggaggacgccggcgtggacgccaaggcggaggagttcatcgccaaattccacgcgcagatgaagctacagaggcaaatctcatggctgcagtacaacgagatgatggagaggagcctccgctagatgattattcctacccaataagatccattttttgcgttttgtttcaccgattcaaattcatacaccagctaaaaatacagagatattgaggagtagcttcgtatacgtacagtacagatcaatacatttttaaatttatttttcttccttgagcattgatattggtttggttcattggttgcgaattgatatctgtacattttgtgcattgagaataaacgagcagagcagaaatttcagattcaggaggaggcttcttcttggacgcgcagaagaacatgcagttgctttggctcaatgtaagctgtactgctgtgtatccgcatggtacacttgcttgattcaattgtggtattactcttt

SEQ ID NO: 3638 - DNA, 1129 bp, Oryza sativa; identical to SEQ ID NO: 1707
  ref <308>: DATABASE ACCESSION NUMBER: AK104458
  ref <309>: DATABASE ENTRY DATE: 2002-08-28

SEQ ID NO: 3639 - DNA, 1128 bp, Oryza sativa; identical to SEQ ID NO: 2215
  ref <308>: DATABASE ACCESSION NUMBER: AK104459
  ref <309>: DATABASE ENTRY DATE: 2002-08-28

SEQ ID NO: 3640 - DNA, 1081 bp, Oryza sativa; identical to SEQ ID NO: 2247
  ref <308>: DATABASE ACCESSION NUMBER: AK104460
  ref <309>: DATABASE ENTRY DATE: 2002-08-28

SEQ ID NO: 3641 - DNA, 1102 bp, Oryza sativa
  ref <308>: DATABASE ACCESSION NUMBER: AK104461
  ref <309>: DATABASE ENTRY DATE: 2002-08-28
agcttccactccacgaaaaccctctgcctccttcgctcgctgcaccctcgtctcggcgatccatccatggctgccaggaagttcttcgtcggcggcaactggaaatgcaatgggacaggggaggacgtgaagaagatcgtcaccgtcctcaacgaggccgaggtgccctccgaggacgtcgtcgaggtggtggtgagcccgccgttcgtgttcctgccgcaggtgaagggtttgctccggccggacttctccgtcgccgcgcagaattgctgggtgcgcaagggcggcgccttcactggcgagatcagtgccgagatgttggtgaacctgcaggtgccttgggtgattctgggacactctgagcggagagcgctgatgggcgaatcaagtgattttattgctgacaaaattgcgtacgcactttcccaaggtatcaaggtaattgcttgcattggtgagacccttgaacagagagaagcaggaacaacgatggaagttgttgcagcgcaaactaaagctattgcagagaagatatccgattggaccaatgttgttttggcatatgaaccagtttgggccattggaaccggcaaggttgcaacccctgctcaggctcaggaggttcatgatggtctgagaaagtggcttgtgactaatgttagtcctgcagttgctgaatcaaccaggattatttacagaggctccgtaaatggagcaaactgcaaagaacttgctgctaaacctgatgttgatggattccttgttggaggagcttcattgaagcctgaatttgtggacatcatcaagtctgctaccgtcaagtcttctgcttagtgttctgggttgcaaccagatgatcgtaggagttaatgctgccaattttaagttatgacatgtttgaccagcttgctttgttatatctcgaagtcagtgaactccatatcgttccatagagcatgcagccacctgtggttgctttttttctttttgactttttctcccgagaggatcagatgaactgaaagtgccgttaatgtctgtattatcagaagtttgttgatggcttgatgctataatagttgaacctgatacttcctgagtg

SEQ ID NO: 3642 - DNA, 1204 bp, Oryza sativa; identical to SEQ ID NO: 3451
  ref <308>: DATABASE ACCESSION NUMBER: AK104462
  ref <309>: DATABASE ENTRY DATE: 2002-08-28

SEQ ID NO: 3643 - DNA, 1092 bp, Oryza sativa
  ref <308>: DATABASE ACCESSION NUMBER: AK104463
  ref <309>: DATABASE ENTRY DATE: 2002-08-28
aaatcccgacccgatcaaaatcgaagcttccgccgagttccccgtcgccgactcgcctggatcggcccgccgtcgagctcgcccccgaccatccgctcgattggaggccggggagctgcgtctggtggtgaatcgcatccgccgcggagcggttcgatttcggcggcggatttcgcgggggtagaggagatcgaaggggggcagagcagccatgagcgaggtgttcgagggctacgagcggcagtactgcgaggtgtccgcctccctcttccgcaagtgcaccaccgcctccgccctcgatggagagaaaaagaagcagaagctgtccgagattcagtccggcgtggaggaggctgagtcgctgattcgaaagatggacctggaggcgaggagcctacaaccgagcgtgaaggccggtttgcttgcgaagctgagggagtacaaatctgacctcaacaatctcaagagtgagcttaagaggatctcggcgcccaatgcaaggcaggctacacgggaggagctccttgagtcaggcttggctgacactctcgcggcgtctactgatcagaggggaagattgatgatgacaacagaaagactgaatcagtccaatgataagattaaagagagccgaagaaccatattggagacagaagaacttggtgtgtcaattcttcaggatcttcatcaacaacggcagtcactgctgcacgctcatactactttgcatggggttgatgataatgttggcaagagtaaaaagatcctggcggcaatgtcaaagaggatggacaggaacaagtggatcattggggggataattgcagctcttgttctagccatccttctcatactgtactttaagctcgcttattgagcttgctttctggtagggtcttcaaagcaatttccgctcagtaaatgtgtgataaaatagttgcctgaatgttgtacattgggcaacacatatctctgcaagcacacacttgtttccccaaacttatggtatttgtgtggctcatcgcccatgtcatgtaatgtacagttaacgtgcactccaatatgtgaaatgtctaaaaagggcttaaaatg

SEQ ID NO: 3644 - DNA, 1194 bp, Oryza sativa
  ref <308>: DATABASE ACCESSION NUMBER: AK104464
  ref <309>: DATABASE ENTRY DATE: 2002-08-28
attcttagtgaccaccccccatatcacatcctctccttcctcttcctctgctcactcagctctcccccgcgcgcgccaccgtcgtcgccatgtcgggcaacatcgccttcggccgcttcgatgactccttcagcgcggcctccctcaaggcctacgtcgccgagttcatctccaccctcgtcttcgtcttcgccggcgtcggctccgccatcgcctacaccaagttgaccggcggcgcgccgcttgacccggccgggctggtcgccgtggcggtgtgccacgggttcgggctgttcgtggcggtggccatcggcgccaacatctccggcggccacgtcaacccggccgtcaccttcggcctcgccctcggcggccagatcaccatcctcaccggcgtcttctactggatcgcccagctcctcggcgccatcgtcggcgccgtcctcgtccagttctgcaccggcgtggcgacaccgacgcacgggctgtccggcgtgggcgcgttcgagggcgtggtgatggagatcatcgtcaccttcgggctggtgtacaccgtgtacgccaccgccgccgaccccaagaaggggtcgctcggcaccatcgcgcccatcgccatcggcttcatcgtcggcgccaacatcctcgtcgccggccccttctccggcggctccatgaacccggcgcgctccttcggccccgccgtcgccagcggcgactacaccaacatctggatctactgggtcggccccctcgtcggcggcggcctcgccggcctcgtctaccggtacgtctacatgtgcggcgaccacgcccccgttgccagcagcgagttctaattacccatttcgccatcggcaacacgcataaaaatggtggtcactccatcgtcagaatcttgtgaggatgtgttgtgaaggactgatttggttcagatggggaagaaggcttttgttgcgaggatgtgacacttgggtgatgatcgatccatgtttagtttcttcttgattaatttgtaatgtgatcagtgtggagcaagttggatgagatgcatgtttaagatcgaacacttctgttgagtttcattgtgagatttcatttgattcgggccatgtcatttcagtttgtttgtagcctccaaaataagcttgtgtcttctcctcgcaaataggaaatcagaaataaaattgttccggg

SEQ ID NO: 3645 - DNA, 1012 bp, Oryza sativa
  ref <308>: DATABASE ACCESSION NUMBER: AK104465
  ref <309>: DATABASE ENTRY DATE: 2002-08-28
agagtagtgttagtcttagcgaatccagcagcagaagcagcagcagcagctcagccgccgccgatggcgtccacgatcatggccccaacctcccgcgtcctcgccgccaagacccccttcctcggccatccccgcccctccaatgcccccgtccgcgacatcgccgccgccgccaccggccgcatcaccatgagcaaggagctgtggtacgggccggatagggtgaagtacctggggccattctcggcgcagacgccgtcgtacctgaggggcgagttcccgggcgactacgggtgggacacggcggggctctccgcggacccggaggcgttcgcgaggaacagggcgctggaggtgatccacggccggtgggcgatgctcggcgcgctgggctgcatcacgccggaggtgctcgagaagtgggtgcgcgtcgacttcaaggagcccgtgtggttcaaggccggcgcccagatcttctccgacggcggcctcgactacctcggcaaccccaacctggtgcacgcccagagcatcctcgccgtgctgggattccaggtcgtcctcatgggcctcgtcgagggctaccgcatcaacggcctccccggcgtcggcgacggcaacgacctctaccccggcggccagtacttcgacccgctcggcctcgccgacgaccccgtcaccttcgccgagctcaaggtcaaggagatcaagaatggccgcctcgccatgttctccatgttcggcttcttcgtccaggccatcgtcaccggcaagggccccttggagaacctgctcgaccacctcgccgaccccgtcgccaacaacgcctgggtctacgccaccaagttcacgccgggctcgtgaatggcccagccgccattgtagactactctctctctccatcgctcgatgtaccaatgcttgcacagattgtacgatgctgtgatgaatctgatatgatccatccagaattcagaaactgaaaaaagttggggtttgcaacttatgtgtc

SEQ ID NO: 3646 - DNA, 1020 bp, Oryza sativa; identical to SEQ ID NO: 2183
  ref <308>: DATABASE ACCESSION NUMBER: AK104466
  ref <309>: DATABASE ENTRY DATE: 2002-08-28

SEQ ID NO: 3647 - DNA, 1383 bp, Oryza sativa
  ref <308>: DATABASE ACCESSION NUMBER: AK104467
  ref <309>: DATABASE ENTRY DATE: 2002-08-28
agagcatccatccttcgttcgctcatcgcgtctcgactccactactgtggttgcatatactactacacttgcagttgcatccagagcccgccccgcgtctctactcgctccgccgcgccgtcgtctctcccgacttcggcgacaagcgagcgacgcaggccaccgcgcgcggttcgttttcgcgagggaggccgccgccgaccagccgccatggtctcgccggacaccatccgcacggccatcggcgtcgtaggcaatggaaccgccctcgtgctcttcctctccccagtgccgacgttcatacggatctggaagaaggggtcggtggagcagtactcggcggtgccgtacgtggcgacgctgctcaactgcatgatgtgggtgctgtacggcctccccgcggtgcacccgcacagcatgctggtcatcaccatcaacggcaccggcatggccatcgagctcacctacatcgccctcttcctcgccttctccctcggcgccgtccgccgccgcgtcctcctcctcctcgccgccgaggtcgccttcgtcgccgccgtcgccgccctcgtcctcaacctcgcccacacccacgagcgacgctccatgatcgtcggtatcctctgcgtcctcttcggcaccggcatgtacgccgcccccctctccgtcatgaaaatggtgatccagactaagagcgtggagtacatgccccttttcttgtccctggcgtcactggtcaacggcatctgctggactgcctacgccctcatccgcttcgacctctacatcacgatccccaacgggctgggagtgatgttcgcggtggcgcagctgatcctgtacgccatctactacaagtcgacgcagcagatcatcgaggcgcgcaagcgcaaggaggccgaccatgtcgccatgaccgatgtcgtcgtcgactccgccaagaacaacccctcctccggcgccgccgccgccgccgccaacggccgctactagctcacgccgccctctttacttcaccagctagccagtcactcaggaggcatggccaccgatgaggccttcatgacttactagcaaagtggagtactacctttagctaagccgtcccaaagggatattactacatgtctcaaattaattagctaatctaatcaccatcaccctgcctaatccgctgctgttaattagtatggcagagagcaaaagaagaacaaattgagctgcacttcttatatgtactctcaagtgcagtgctactattgtcagtcccattgggggtaatttactgtcttatttacaggaggagggcctggctgctcttgttaaaaacagctagccctgccttttcttttttcaatatcatcatcatgccgtgcttttcgatct

SEQ ID NO: 3648 - DNA, 1407 bp, Oryza sativa
  ref <308>: DATABASE ACCESSION NUMBER: AK061294
  ref <309>: DATABASE ENTRY DATE: 2001-12-06
cccgacctccacctccacctccacctctacctcctcctccgccaccggcaatggcttcctccgacgccgcggccgcgcaggcggcgacgccgctgctgaaggacgagctggacatcgtgatcccgacgatccgcaacctggacttcctggagatgtggaggcccttcttccagccgtaccacctcatcatcgtccaggacggcgaccccaagaagacgatccgggtgcccgagggcttcgactacgagctctacaaccgcgacgacatcaaccggatcctcggccccagggcctcctgcatctccttcaaggactccgcctgccgctgcttcggctacatggtctccaagaagaagtacatctacaccatcgacgacgactgcttcgttgctaaagacccatcaggaaaggatatcaatgcacttgagcagcacatcaagaaccttctgaacccttccactccatttttcttcaacactttgtatgacccgtaccgtgatggcgctgattttgtccgtgggtaccccttcagcctccgtgagggtgccccgactgccgtttctcatgggctttggctcaacattccagactatgatgcccctacccagcttgtcaagcctcttgagaggaacagcaggtatgtggatgctgttatgacaatcccgaagggcactttattcccgatgtgtggaatgaaccttgcttttgaccgtgacctcatcggtcctgcgatgtactttggtcttatgggtgatggccagcctattggtcgttacgacgatatgtgggcaggatggtgcaccaaggtgattaccgatcacttgggtttgggtgttaagactggccttccctacatctggcacagcaaagcgagcaacccctttgtgaacctcaagaaggaatacaacggcatattctggcaggaggagctgatccccttcttccagtctgcgtccctcccgaaggaggccgacactgtccagaagtgttaccttgagctggccaagcaagtgagggcgaagctcgggaaggtcgatggctacttcaacaagctcgccgactccatggtcacatggattgaggcctgggatcagctgaacccaccaaagggagctgttgccaccgcaaacggcactgccaagagcaagtgagagggcggtagtataaaaacttcgtttgttcatgtgaactgcttatactgaaataccgaaatacttttggttttgttagtgctgattgaactgagatcgcttcagcgttgtaacttcaaatgtgtcacctccctggacaaccgtcctggctgttctatggtatttacaattttttttttctttttggtgtgatgaaacagttgtaatgtcaggatcgaatcaccttcaaattagaataaagatattggttatgttt

SEQ ID NO: 3649 - DNA, 1312 bp, Oryza sativa
  ref <308>: DATABASE ACCESSION NUMBER: AK104468
  ref <309>: DATABASE ENTRY DATE: 2002-08-28
gtgtctgcgtcgtcgtctctctcctctccgattcgcggcggcggcggcgtctccggtctccagctaattacaaggaaggatggagtggtgggtgtggtgatattttgtagtgtttcccaatgtgaaagaagcttttgcaatggccccaggaagcagcattgtgaccgatatccctgagtcggattgtgtatctgatgggctctctgaggcactcactggcattaggcttgatggagattctacatgcaagccctggtctacatcacttgtcacagttgagctatcatcgctgacgggcttgaatgatttgctcgagtgtccagtctgcacaaactcaatgcgcccacctatactgcagtgcccaaatggtcacacaatatgctctaactgcaagcatagggtggagaatcattgccctacttgtcgccaagaactgggtaatatcagatgtttggctcttgagaaggtggctgagtcacttcagcttccatgcaaatatcaaagcctaggctgtgctgagattcatccttaccaaaacaaacttaagcatgaggagctctgcaggttcaggccatatagttgtccatatgcaggttcagaatgcctgattgctggcgatgttccgatgcttgtctctcatctcataaacgaccataaggtggacttgcatgaaggctgcacctttaaccaccgttatgtgaagtccaacccttatgaagtggaaaacgctacatggatgctgacggttttcaagtgttttggacagcacttctgcctgcattttgaggcattcctgctggggatggcaccagtgtacatggcgttcctgaggttcatgggcgaggacagcgaggcccggaacttctgctacagcctggaggtgggcgggaacgggcggaagctgacatggcagggcatcccccggagcatcagggacagccacaagaaggtccgggacagcttcgacggcctcatcatccaccggaacatggccctcttcttctccggcggcaacaggcaggagctcaagctgcgggttaccggccgcatctggaaggagcaatgacgtgaacgatgcagcagcagtgctactgagactgatagcaaatgccaagatctccccattgatgattccacgctgatagcacattgtgatgtgctgggagaggagaaaaatggggagacttgttgtgcattgatgtacaaatacaatttgcggcatggtggactggctaggacacatctgtagcctagcatgtgttgaacttggaacctgatttattaacacgatggaaatgaacttacggaaggg

SEQ ID NO: 3650 - DNA, 1186 bp, Oryza sativa
  ref <308>: DATABASE ACCESSION NUMBER: AK061295
  ref <309>: DATABASE ENTRY DATE: 2001-12-06
aaaacgcccaccacagtctccccctttctgaacacagcaccaccccttctgctgcatctcccacctccctctgaattgtgggcctgaggcgatggcggcgctcgccccgtccaagatgctcggcacccggctcaacttcgccggctcctcccgctacgccaccgcggcaccgaccaccggagcgcagaagatcgtctccctcttcagcaagaagcccgccccgaagcccaagcccgccgccgtcacctcctcgagccccgacatcggcgatgagctcgccaagtggtacggccctgacaggaggatcttcttgccggagggtctcctggaccgctcagaggtgccggactacctcaacggagaggtccccggagactacggctacgacccttttggcctcagcaagaagccagaggacttctccaagtaccaggcctatgagctgatccatgccaggtgggcgatgctcggcgccgctgggttcatcatccccgaggcctgcaacaagtttggcgcaaactgcggccccgaggccgtctggttcaagaccggcgccctcctcctggacggcaacaccctcaactacttcggcaacagcatccccatcaacctcatcgtcgccgtcgccgccgaggtcgtcctcgtcggcggcgccgagtactaccggatcatcaacggcctggatctggaggacaagctccacccaggtggcccattcgacccgctggggctggcgagcgacccggaccaggcggcgctgctgaaggtgaaggagatcaagaacgggcggctggccatgttctccatgctggggttcttcatccaggcctacgtcaccggcgagggccccgtcgagaacctctccaagcacctcagcgaccccttcggcaacaacctgctcaccgtcatctccggcgccgccgagaggacgcccagcctgtaaacatctcgccgccggcgacgctggctggcctcaagttaattttaatcttacccgggaagaagaagggaggagtttgagaagggtggaagaatgtgttaaatgtacgtgtaaattatcgtcgagttgggagatgaatttgaaaacctgttcattctgatcttctgataggaaggaccaagtgtttggatttgtggctgagaaatatttgctacctgagtaaattgtctcgaagtggttttcatc

SEQ ID NO: 3651 - DNA, 1145 bp, Oryza sativa; identical to SEQ ID NO: 3095
  ref <308>: DATABASE ACCESSION NUMBER: AK104469
  ref <309>: DATABASE ENTRY DATE: 2002-08-28

SEQ ID NO: 3652 - DNA, 1270 bp, Oryza sativa; identical to SEQ ID NO: 3250
  ref <308>: DATABASE ACCESSION NUMBER: AK104470
  ref <309>: DATABASE ENTRY DATE: 2002-08-28

SEQ ID NO: 3653 - DNA, 1094 bp, Oryza sativa
  ref <308>: DATABASE ACCESSION NUMBER: AK104471
  ref <309>: DATABASE ENTRY DATE: 2002-08-28
aaaacatcagtagacgacggcgatggcgcccaagcgacttgtctgcttcttggccgtggccgccgcgctagccaccacctgccacgggtggggcgccggcgccggcgatgtcgtgtcgtcgtcggcggcggcgctctcgttcgtggacaggctgaggcagatgatgatcccggcggccgtgggcgacggcgactactgcgacagctggcgcgtcggcgtggaggcgaacaacgtgcgggggtggacggcggcgccgcgcaagtgcgacaactacgtcgagaactacatgcgcggccaccactaccgccgcgacagcaaggtcgtcgtcgacgaggccgccgcctacgccgaggccgccgtcctctccggcgaccccgccgccgacgccaacgccacctgggtgttcgacgtcgacgagaccgccctctcccacgtcaagttctacaagaagcacggcttcgggtaccacagaaccgacgagccggcgttcatggagtggctgatcgccggcagagcgtcggcgttgccgaacacggtgacgctgtacaagaagctgctcctcctcggcgtcaagatcgtcttcctgtcggacaggccggacacgccggagctgaggaacgccaccgccaccaatctcatcaaggaaggcttcgactgctgggacgagctcatattaaggtcggagaactcgacggcgacgggatcggtggtggagtacaagtcgggggagaggaagaagctggaggaggagaaggggatggtgatcatcggcaacatcggcgaccagtggagcgacctgctgggctcgccggagggccgccggaccttcaagctgcccaaccctgcctactacatcgacaactacaagcgcgccggcgccgccgtccgcgccgccgtagccattacagcctcctcctcgtcgtcgtcgtcgtgaagcaaacgatgcctagctagctatagtactcaactttgaattgcatttttttttcagacacataagttcagttaataatcggtcgtgtacgtacctgccgtgctgtgcactgttgtatctttttggtgagacgattgaaatatctttgggtttatctttt

SEQ ID NO: 3654 - DNA, 1124 bp, Oryza sativa
  ref <308>: DATABASE ACCESSION NUMBER: AK061296
  ref <309>: DATABASE ENTRY DATE: 2001-12-06
attcattactcactcttttactcttcttgacaagagtagaacaacaacaacatcatcatcatctatcacacacactatcagggcaggtgatcgaatagctaggaagcaagcaagcagagagtagtagatcgagtgatcggaggatggggtcgcggtacgaggtggaggtgacggtgtcgtcggcgcgggacctcaagaacgtcaactggcgcaacggcgacctcaagccctacgccgtgctctgggtcgacgacggcgccaagtgctccacccgcgtcgacctcgacaacgccgacaaccccaactgggacgacaagctcaccctccctctccccccctcctcccgcctcgacgacgccctcctctacctcgacgtcgtccacgccaacgccgccgagggcgtcaagccgctcgtcggctccgcccgcctcccgctccgcgacgtcctcgacgacgccggcgtaggcgcccgcgtctcccgctccctccgcctcaagcgcccctccggccgcccccagggacgcctcgacctccgcctcgccgtccgcgagtccgcgcgctactacgacccctcgccctacccggctccctacggccaacccgccggaacacgcgacccctatggcgccccgcctccggcctacagctccggctcaggcgggcagtacccgtacggtggtggctacggctcaggcgggtacgcggcgccgccggcagggtacccgagcgcctacggggcgccgccacagccagcgtacggcggcgcgcctcctgtggcggcgtacggtgcagcaggtggggcgccggtggttgtggaggagacgaagaagaagagcaagatggggatggggacagggctggcggtgggcgcggcggcgggcgtgctgggagggctggcgctggccggcggcgcgagctacctggaggacaagttcgaggagggcgtggcggagaaggtggaggacgatctcgacagagacgacgactacgccgccggcggctacgacgacgactattaattaattccattttcattttattcatccaaccacaccacgcctatccctgcacttcaaagttcaaactcatcctaatataaccgaataataatacctatacttact

SEQ ID NO: 3655 - DNA, 1182 bp, Oryza sativa; identical to SEQ ID NO: 3099
  ref <308>: DATABASE ACCESSION NUMBER: AK104472
  ref <309>: DATABASE ENTRY DATE: 2002-08-28

SEQ ID NO: 3656 - DNA, 1030 bp, Oryza sativa
  ref <308>: DATABASE ACCESSION NUMBER: AK061297
  ref <309>: DATABASE ENTRY DATE: 2001-12-06
agctttctcaaatcagatcgagcgaaaaaaaattggcaaagcgcgcgactcctggccgccgcccggccggtgacttgccgccggcgaccgcaccgcaccccgccctcccgtcgcccgtcccgtcgtgccgccgtcgacggtcgaccggcgcccatcgccgcatcagcgcatcgcgttgcgagcgtcctgcgccccagccgcccggtgacctcgtgggggtgacttgccgccggcgagagccctgcgccccgcccgtcgcgccgtgacaccgtcgacagtcgaccgtcacccgttgctccatcgcggctccacacacaagcgctgcgattccccatcgccgcttcaagccctaggcccctacatcgcgatctgtcgctgcctcagacaaggacgatcgtcggcctactgcagcaagtacaagagcacaaaacataattggaacatcatggataaagggtggatgaaagcatcgagatctagtattgaatataatatcggggttaataaatttatagacttcgccttgtccactatattccacggtgttaactgctgttagacacatctcatctgaccaatgagacatatctgcaccaaggagacaaatacatgatctaacatacaaggagaacataggacatgaagatgtacattctaggacaagtagtcttggaaaagccagcgctggtttttaagtgctatcaagttcagtaatagccaagtgctaacaacttcacggttctagcttatgaaagggaagcatattattttcgctgtatggttttcttcacatggcttgcaagtgcaacatagcaccaataagaattcgaagctatactatcaagattttgtacaaagtgcaatatagacacttgtgattgtgtgatcatcatatgctggaggatgaaaacaaattgcactttacagtagcatcatgtcattcttgttgattatagttttgtcctgtgactgagaaatcatcgttgttattagttttttatcataaatttgatttctctatttgagttgc

SEQ ID NO: 3657 - DNA, 1083 bp, Oryza sativa; identical to SEQ ID NO: 3089
  ref <308>: DATABASE ACCESSION NUMBER: AK104473
  ref <309>: DATABASE ENTRY DATE: 2002-08-28

SEQ ID NO: 3658 - DNA, 986 bp, Oryza sativa
  ref <308>: DATABASE ACCESSION NUMBER: AK061298
  ref <309>: DATABASE ENTRY DATE: 2001-12-06
aggaaaggcttgcggtggatacctaggtacccagagacgaggaagggcgtagcaagcgacgaaatgcttcggggagttgaaaatacacagctgcactacttgcactgaagtagctagagcttgcaagtaaagatggctaccaccaagcattttgtgttgctaataatccttgtcctccttagcataggaatgaccactagtgctagaactctcttgggttatggcattggaggagaaggtggcggtggtggaggaggaggtggtagcagcggaggaggtggttatggtggatcagggtacggctctggatcggggtatggcgagggaggtggtgctggcgctggtgggtatggccatggtggtggtggaggcggcggcggtggtgaaggtggtggttctggctccgggtatggttctggacaaggttctggatcaggatatggctctggtgcttttggagctggtggttatggaagcggtggaggtggcggaggtggtggtgcaggatctgggtatggctcaggtgagggttatggctctggatatggatcaggtgcaggtggtgctagtggtggtggaggtggacatggtggtggtggcggcggcggtcaaggtggtgggtatggtagcggctcaggctatggatctggcagcggatatggtcaaggtggcggtgcttatggtggaggatatggaagcggtggtggtggtggaggcggcggcggccaaggcggaggatctggctatggttctggctctggctacgggtatggatccggaggaggtggtgggcactactagtcctatactcggcaatggagcaattctaccgtgggacttgtgcactcatatatgatgattgtgtaacattggtatatacacaagcttgttttcgtgattatatgtaatgcttcttgattgggcttgctgctgcccaatatatgcgcttcccaagtataaataaatcaaaaataaggttgaaatac

SEQ ID NO: 3659 - DNA, 928 bp, Oryza sativa
  ref <308>: DATABASE ACCESSION NUMBER: AK061299
  ref <309>: DATABASE ENTRY DATE: 2001-12-06
atccatctctacacatcagcaatagctacacagagctaagctagggttagctcagcaatggcaggtgctcctcgaggactagttctcctcggcgtttgtgccgtcttgatggcggtcgccgtcggcggagaggcggcgtcggtcgtcgtcggcacggccaagtgcgccgactgcaccaggaagaacatgaaagctgaggatgctttcaagaacctccaggtggcgatcaagtgcaagaacggcaatggtgagtacgagagcaaggccaccggaaagctcgacggtaccggcgtcttcagcatccccctcgacgccgacctccacagctccgactgcgtcgcacagctccatggcgcgaccaacgagccatgccccggacaagagccatccaagatcgtgccaatgtcagagggcacctttatcgccgtcgccggccagacccactacccatcagcgttgtgcgcatcggcgaccatctgcggtcccatcaagaagaagatcatagaccacttccacaagaagccggtgccacccaagccagagccaaaaccggagccacccaagcccaagcctgagccggagcacccattcctcgaccacatccacaagaaggagaagcacttcttcgatcacttccacaagaagcccgtgccgcccaagccagagcccaagccggagcccaagccagagcccaagccgcagcctgcgcctgagtaccacaacccgagccctccggcgaagaattgatgaatatgatctgcattggatggacattagcatgtttgatcatgccgcagatgatgatcctgctcagcacaggagtgtaatttgtacttgattatcgggcatcagcagggatgtttgtactatttgcatatttttctctcccaaatgaaattatatatggtaaaataatttatttacattt

SEQ ID NO: 3660 - DNA, 1487 bp, Oryza sativa; identical to SEQ ID NO: 3090
  ref <308>: DATABASE ACCESSION NUMBER: AK104474
  ref <309>: DATABASE ENTRY DATE: 2002-08-28

SEQ ID NO: 3661 - DNA, 999 bp, Oryza sativa
  ref <308>: DATABASE ACCESSION NUMBER: AK104475
  ref <309>: DATABASE ENTRY DATE: 2002-08-28
gtgctgacctttcccaagtcctcctgccgccgcagcgccgcggaggaagaaagtagaaactgcttccccctcctcttcccctcttctcgcgggaatctccccgtctccgccgcgaaaccatggaagctgccgccggcgccggcgccggattggcggaggcagcgaacggcgggatcgagagctcggccgccgacccctccacctccggcaccgcctcgcggctctccgtccaccggatcgccggcggcgggaaagctgctgatatcatcttatggaagcgtggacgtgttacaattggtgttatatttggcgctacaatggcatggtggctgtttgagaaatctggactgtccttcttgacagtttgctctgatgtactgctcattttgattgttgtgcagttcatacggattaaagtagctggattgctaaataagcaacctaggccactacctgagttagttttatcagaggaaatggttagcaatgctgcagcttcattccgtgttaaagtcaacaacatgctgatgatcgcacatgacattactcttggcaaggactttcgactctttttccaggttgtgttgctcctatggctgttatctgttattggaaatttctgctcgtctattactcttgcttactttggaaccattgctttggtcacaatacctgcattatacagtaagaaccaggagcaagttgataggtatgctgggatggtccacaggaacatatcaaggcattacaagattgtcgacgaaaatgtgatgagcaggctaccaagaagctttatcagagataaagaggattgatttgtttagaagctgtgatagtagtcatgccactatatccacacccaagtgtgtgtgttttctacacttgtatttttatgccgtagattgtgcaaattaggaatttagggcaaaagctggagtatgctgtagatgccactgcaatgtgctactattctaactcttgagcaataaggttcgaaac

SEQ ID NO: 3662 - DNA, 1100 bp, Oryza sativa
  ref <308>: DATABASE ACCESSION NUMBER: AK061300
  ref <309>: DATABASE ENTRY DATE: 2001-12-06
caccgattctttttaaacctcgcacatgggttcgagtgggtgtatattatcctcgtgagtttaattcgaatagcagtggcttgaaaacaccacaaataaataaaatgacacattggcacgttttccctacctaacctttttacctttttccaaccatcgtgtgtatcacaaatttcaacatgtccttgttgcggggagtacagacatgtaggaattgctctgttagctgagccatcctttttggtgatccacttctgttatctaatgcttgcttaccttgctggcaatgaccttttttatgctttgtagttagtgctttttaattagagggagcatcagcaggtagagttatgaaatcttctgcatagtttaatggccaagttgggcatcacggttcaatggccttgtcatctctagatcacatccgctagcatttctctttcattgtgtgtggtagcaacaaacacatctttggcccatttaattctgctaatagagactgtttctgtctcaactggtgaagaaaaaggattcagatgcattattgttgattaaaaattgaaaacatctaacgttcttgccttttcaattcaggattttacaagcagctacctagggcatgctgcggggctcctgggtccgttgcgaaggccgcttacaacttcaatgtcacagccaaatgtggtgaggctggtgcaaccgcgtgtgatgatccatcaacccattggagctgggatggcattcacctgacagaggcggcttacggtcacattgccagaggttgggtatatggtcctttcgctgaccaaccgatcttccaatcttcatgagaaagtcacttcttccgttgtaattgtagaggtgtatcacgatagtgcactgaaatggagcagggaaagtagttcttccatatggttccaaggttgcatacatgtatattttcattctattacattcattgcagtcaggtacaaaggtggaatagggctgtcaaaagcttgattttgtttatttgtcaggcgacataactatgaaaatgtaacagacacatgattgtgtaaattgcctccggaaatatgatacaaattgtctttttgagt

SEQ ID NO: 3663 - DNA, 995 bp, Oryza sativa; identical to SEQ ID NO: 3091
  ref <308>: DATABASE ACCESSION NUMBER: AK104476
  ref <309>: DATABASE ENTRY DATE: 2002-08-28

SEQ ID NO: 3664 - DNA, 1351 bp, Oryza sativa
  ref <308>: DATABASE ACCESSION NUMBER: AK061301
  ref <309>: DATABASE ENTRY DATE: 2001-12-06
aaaggccgaagccgctcgcgcgcgctcactcgatcgaccagtcgcgcgcgcgacgagagggagagcgacgcggcgccgaaccggctagctctcgtaggcacaaaagcccaaacacgttgcttctgcagtagctagtgtgccgtgcccgtgatcggagatggcaggctcgttgtctgccgcgctgtgcctcactctcttctgcttgctgggggcatgcattgcgcccggggcgcgtgctaacggccggcacagccggcgggacctcgacatcaacctcggcaacggcaacggcgggggcatcagcatcggcataggaggaagtggtggtggtggtggtggtggctccagtggtggctccagcggcggcggcggcgatctgcggccgtgcgacttcgagaacgagcggctgtacaaggcgtacaaggtgatccagaagttcaggaggacggtgacgtgcgacccgcagaacatcatctcctcctggagcggcgccgacctgtgcagcacctacaaggggttcttctgcgagcggccgcccaacatcaccgaccggaccatcgcctccgtcgacttcaacggctacaacctgcaggcgtcgtcgctgaaggagttcgtggacgccctcccggacctggcgctgttccacgccaacagcaacaacttcggcggcgccgtgccggacctcagccggctgcagtacttctacgagctcgacctgagcaacaacaagctgtcgcccgccacgttcccgacggacgtgctcaagctgaagaacgccaccttcgtcgacatccgcttcaacagcttctacggcgagctccccggcggcgtcttctgctcgttcccgcaggtgcaggccatcttcgtcaacaacaaccagttctccggcagcctgcccgacaacatcggcgactcgccggtgaactacctctccctcgccaacaacaacttcacgggggagatccccaagtcgatcgcgcgcatggccaacacgctcttcgaggtgctgttcctcaacaacaagctcagcggcagcgagcaggacaagtacaggacttactcggcgctgcatccatgagcgcgagaaggaagggcaaaagcactgtgcttctcgtgaacgtgacacgattattgattgattcggttgctcttggctggttgtgttaattgatgtgttgtgtctacttttttgttacttttgtttcctttctcatccactgttacgtacggccaacttagtttcacatatatctgcatgtttaggtaaggtaatggagattttattttgatgaaccacagaagcttgtaataattcagatcaccatgaaagatcagctttaaatttccctgc

SEQ ID NO: 3665 - DNA, 1321 bp, Oryza sativa; identical to SEQ ID NO: 3430
  ref <308>: DATABASE ACCESSION NUMBER: AK104477
  ref <309>: DATABASE ENTRY DATE: 2002-08-28

SEQ ID NO: 3666 - DNA, 1176 bp, Oryza sativa
  ref <308>: DATABASE ACCESSION NUMBER: AK061302
  ref <309>: DATABASE ENTRY DATE: 2001-12-06
cgcagccgaaaagccagaaaggggggagatatcagacagaggaaggaggagggcggacatggaggcggcgatggatctgatgcggcggatgccgccggggagggcggagacggcgctgaacgcgctgctctccctcatccccgaccactccctcgacctcctctcccaggtcgacctcccgctccaggtttgcatggacaaggagagcgtgaaggaatacatcctatgcgagtacaaccgtgacgctgactcctacaggtctccttggtcaaacaaatacgatcctcctttggaagatggaacagttccctccgaagagatgaggaatcttgaagttgaggcaaatgatgttttctctgtctaccgtgaccagtattacgaaggtggcatctcttctgtgtatatttgggaggatgaagatgagagttttattgcatgcttcttaataaagaaagatggagaaggaaaaagagggcacatgcagattggttcatgggatgctattcatgtcattcaggttggtcctgaagaagaaggagcagcgcattactgcttgaacagcactgtgatgctatcattgacaacagataacaagcaatctggaactttcaacttgtcgggatcaatcaggcggcagatgagtatgactcttgctgtggcagatgggcacctggttaatatgggaaaaatgatagaagaaatggagggcaagctcagaaattcgttggaccaggtttattttgggaagaccagagagatggtttgcacgcttcggccaccacccgaagtattaaacaggaggctacctgacagctgagaaaacgcagagatgtgaatttttaacacaagaactatatattagtcttgcaatcatctccttagcgacctagagtctcttttcgtaattgatctgtatttaatagtagcagtctctaaaatggacaccactttgagccatcataggagtgtcttctccattgaattgtgaggaaactgggcaaagcttcttcatggcagctgtaacagagagtttaagcaaaagggagcaggagtttgcatttgccgaactcgttgtcactgcccctgagagcaatattctgtcatctttgtgaagatctacatcttcttgtgaccttacaatttgttaaatcaatgcaagaatatggttatctgctt

SEQ ID NO: 3667 - DNA, 927 bp, Oryza sativa
  ref <308>: DATABASE ACCESSION NUMBER: AK104478
  ref <309>: DATABASE ENTRY DATE: 2002-08-28
gagagagagagaaagggtctcctcctcaacatcaacaatggcggtcgcaacctccttcgccacactcgccatcgcgcggccggcggcggagcgggccctcctcgcctccaaaaccccctcgccgctcctctccatccgcaccggcaccggcaccgcacgcctcccctcatcggccgtctttggaggtttcactcctgcgctttccgctgctcacagccgcgcgcgcttcgtctcctccgccaccgctgaccccaaggaagtggacctccagtccaaaatcacaaacaaggtgtactttgacataagcatcggaaaccctgttgggaagaacgttgggagggtcgttattggcctatacggggatgatgttccccagaccgcagagaacttccgtgctctttgcactggagaaaaagggtttggttacaaggggtccagtttccaccgtgtcattaaggacttcatgattcagggaggagactttgacaagggcaacggtactggagggaaaagcatatatggccggaccttcaaagacgagaacttcaaattggttcatactggacctggagtggtcagcatggccaatgctgggccaaacaccaatggcagccagttcttcatctgcactgtcaagacaccttggttggatgggaggcacgtcgtgtttgggcaggttattgaaggcatggacatcgttaagatgatcgaatcgcaggagactgacagaggggaccgcccgaagaagaaggtggtcatcagtgagtgtggggagcttccagtggtctaataggtgccagagggctaatcttcttcccccggagactttgctgtttttggtttcatagtaagctgtgaacttatcgcatgttctccgcgcagtcagagatcatgctgagttgaggccaagatttctaagttgagaag

SEQ ID NO: 3668 - DNA, 994 bp, Oryza sativa
  ref <308>: DATABASE ACCESSION NUMBER: AK104479
  ref <309>: DATABASE ENTRY DATE: 2002-08-28
attcacattcacattcccaaacggccacctcactctccctctctctatctctctcttcacatttccattccaactcaatttcctcctctcttctcctctcctcttctcacacgaagccaagaaagccaagaaatccatccatccatagcaagggagctagctcgccggcggcgatgggcaaggactgcggcaaccacggcgacgacgacatccggcaggcgtgccggcggctgctgacgatcctcttcggcctcgccctgatcgtggccatcatcgcgctcatcgtctacctcgtgctccgccccacccaccctcgcttcttcctccaggacgccacgctccgccagctcgacctctccaattcctccacctccggcgtcctctccaccgccctccaggtcaccgtcgcctcccgcaaccccaatgaccgcgtcggcgtctactacgaccgcctcgacgtctacgcctcctacaagtaccagcagatcacgctcgccgcctcgctcccgccggtgtaccagggccacggcgacgtcgacgtctggtcgccggtgctctccggcccggacgtccccttcgcgccctacctcggcgacgccctcgccaaggacgtcgcggcggagtacctcatcctccaggtcaagatcgacggccgcgtccggtggaaggtcggcagctggatctccggccactaccacctcttcgtcacctgcccggccttcttcatcgcctccggcggcaacggctaccccggcgccaatggcctcaagttccagaccgccacctactgccgcgtcgaggtctagctgtctcgtcttctccggctccggcgacggcgaggtgtgcataaatgtcggtaattactgtagcgttgaggtggggggtatagaggtaaatttagcgtgggttaatcaaagtatattttgtgtttaagcgttgttaagctttcagttccacgtttaattgttaataaaaggatattataactatggtt

SEQ ID NO: 3669 - DNA, 1323 bp, Oryza sativa
  ref <308>: DATABASE ACCESSION NUMBER: AK104480
  ref <309>: DATABASE ENTRY DATE: 2002-08-28
atgcgttagagagagagagagagagagtgcatgagcatgatgagctctccttctccctctccttaatttagacataaacttaattagctatgccgctcctctctctaatctcccctccaaagattatggttggtaggagatggatgagttcctgatcatcttcttgctctaaaatggaaggtttccaatggattccagcttctgaatcttgcagctagctaggtaggtaggtagctggtagcttagctaggcagtcaggcagatggtgtgttgttgcttctgctgtgatcgctcgcatacgtagattaggttagaggttgatcgctcggtagatggtactgatggccgggatgcttcccggagtggagtgcgcgcggcggcgacgtctccggcagggcggcggggaggcgccgtgcgggacgcggcggccgtcattgtgcctgtacgccggcggccacgaccacgccctccttggctcctccgcttgtaagcagcagaggagcgcgtgcgaggagcagcagcccgggtggtggacgctggacagcaacgtgcgggaggcgaaggagaggctggaccagaagctgcggagccagagggaatccgccgtcgtcgtcgtcaagaggcataacaaagcgcaggtggcaggaacgagcagtgacggcggcgagcagtcaacggcaactacggcggcgccgcagtgggaggtgtacacgaggaaagaagggcggcggcggatgtggttcaggaggttggggcggaggccgacgccggaggaggaggaggagtgcgcggtgtgtctagaggagctgcgtgccggggaggcggtggcgcacctcccctgcacgcaccgcttccactggggctgcgccgtgccatgggtccagaccgcctcccgctgccccgtctgtcgcgccgccgtctacctcacctcaccggcgccggcggccagcaacaactacaactagctagacggaagcggatcctccaacgtaaactttctcctgacgcggttactgatatgtggacccgtgaacgatgggatctatatgtcagtcacatgttcctttgacttcctaatcccaactagacagcttattaaacggatcgccagttcgccgctgctaactgtcactggtcactactacccgcatcctttaattttgattgattccatcaacttaattatatatcgtcgtttcctctcgcatctcctggtctctctctaccatgcacatgtcgcctgcctatgctacagtattatgtctcgatcaaactctctgtaatagtgtacttcctccgtttaacaatgtaagttgttatagt

SEQ ID NO: 3670 - DNA, 1070 bp, Oryza sativa
  ref <308>: DATABASE ACCESSION NUMBER: AK061303
  ref <309>: DATABASE ENTRY DATE: 2001-12-06
aagaagaggtgttgtccgggcgtgaggaggatcggaggaagggaagctatggggatcgtggaggaggcgcacaacctgcgggtggtgggggaggggaagcgcggggtgatcgtgctggcgcacgggttcgggacggaccagtcggtgtggaagcacctggtgccgcacctggtggccgactaccgcgtggtgctcttcgacaccatgggggcggggccgaccaacccggactacttcgacttctcccgctacgccaccctcgagggctacgcgctcgacctcctcgccatcctccaggagctccgcgtcgcctcctgcatctacgtcggccactccgtctccgccgtcatcggcgccatcgcctccatctcccgccccgacctcttctccaagctcgtcctcctctccgcctcgcctcggtacctcaatgatgtcgactactatggaggatttgagcaggaggatcttgatgagctctttgaagccatggggtcaaactacaaggcctggtgttcaggctttgcgccactgtgcgtaggaggggacatggaatcagtggcagttcaggagtttagccgcacactcttcaacatacgtccagacatagccctgagtgtcgcccagacaatcttccagagtgatgtgcgaagcctcctaccacttgtcaccgtaccatgccacattgttcagagcaccaaagatcttgctgtgccggttgtggtgtctgagtacctgcacaagcacctcggtggcgactcaatcgtcgaggtaatgccgtctgagggccatctaccccaacttagctcaccggacatagtcatccctgtcttgcttcgacacatccagcatgacattgcggtctaggtggtgcaaccattccgcctagagctgttcatcagaagttgtataatttcagtatctgtactccactgaatcacccgacttaggatccatctactgttgttgtaataagattctccatatgttgtaaattgatggcggtggagaagtagtctatggtgtttgtaaaccactgcacgtatgatgttcattataatgttggatgtttt

SEQ ID NO: 3671 - DNA, 1121 bp, Oryza sativa
  ref <308>: DATABASE ACCESSION NUMBER: AK104481
  ref <309>: DATABASE ENTRY DATE: 2002-08-28
accacgcggcggcggcagcagcagcagctagggtttagagagcagcccccaatcccatggccccgccctccgactccggcgactcggccccgatccccgccggcgccatctccaagctcctcatcgtcatagcgatgcagacggaggcgctcccgctcgtcaacaagttccacctcgtcgaggcggaggaatccatatttcctaaaggtgccccatggattagataccatggcaactacaaaggccttcacgttgaccttgtatggcctggaaaagatcctgttctcggagttgactgtgttggcacggtatcagcagcacttgtgacttatgcttctattcagtcattgaagccagatctgatcatcaatgctggcactgctggtgggtttaaggccaaaggagcagacattggagatgtctacttagcatccgatgttgcattccacgataggagaatacctatccctgtcttcgacatgtatggaattggaacacgaaaaacatttgctacccctaatatattgaaggaactcaatttgaaggttgggaagctctcaactggcgattctctagatatgtctccccatgacgagtcagcaatattgaacaatgatgctacagtcaaggatatggagggagccgcggtggcatatgttgctgacatgttttcaacaccggcaatctttgtgaaagctgtgactgatattgttgatggggagaaaccaacagccgaggagtttctgcagaacctggttgctgtgacagcagctctggacaaggcagttacagaagtggttgatttcatcagtgggaaatgcatatcggatctttgaatgatgaagcttagaaacctgttcatcaaatccaagctctgctgcttcaatgcactatactatactacatcactgctgtatgatttttcatggggatgcgtatacaatttttaggttcccctgaggccctgatcccccgtatgtacaaaattcttggcaattacttggatcaatagcgtggaattttgtagaatattctgcaaaatgtgcagtgtaatgaaactaaataaggtgatattctgtcaaactaagataagtggtgggcggtggagttattttcttaat

SEQ ID NO: 3672 - DNA, 929 bp, Oryza sativa
  ref <308>: DATABASE ACCESSION NUMBER: AK061304
  ref <309>: DATABASE ENTRY DATE: 2001-12-06
aagtgctagctagctagcaaaagacaactcaagccaaaaccatctcagagcttcagagaggaagacaatggccggtggaggagatgagctgaagctgctggggatgtgggcgagcccgttcgcgctgcgagcgaagctcgcgctcagcttcaagggcctgagctacgagtacgtcgaggaggatctcaagaacaagagcgagctgcttctcacctccaacccggtgcacaagaaggtacccgtgctcatccacaacggcaagcccgtctgcgagtcgcaggtcatcgtgcagtacatcgacgaggcgttccccgacgccggcgttcctctcctcccatccgacccctacgaccgtgccgtcgctcgcttctgggccgcctacatcgacgacaagctgttgaagtcatggctgcaggcgtcgatgtgcaagacggaacaggagaaggcggcggcgatgaaggagacgttcgcggcggtggcgaacctggaggcggcgttcaaggagtgctccaaggggaagcccttcttcggcggcgacgccgtcgggtacgtggacgtcacgctcggcgccgtgatcgggtttgtgcgcgtcggtgaagccgtgcacgggatgaggctgttcgatgcgagccggagcccgctccttgacgcgtggctggaccgcttcgccgcgctggacgctgccaaggcggtgttgccggacaccggtaggctggccgagtacgccaagatgaagcaggcagagtgggcagcagctgccaccaactgagccagcatggccacgtctggtactctcgtggggagatgaagttggtgttggtgtgccacccgtaccgtacgtagctagtcctgtcacacgatgtgacgactgtgtgaactttgctactatacgcaataaaattgtgaagtcgttaagttttcgtaagtac

SEQ ID NO: 3673 - DNA, 946 bp, Oryza sativa
  ref <308>: DATABASE ACCESSION NUMBER: AK104482
  ref <309>: DATABASE ENTRY DATE: 2002-08-28
agctatcagcttatcaccacacacagacacagaaggaaatgtcggcttctgcggcgcccacgcacatccgcttctcctccgccgcacctccatcggccgccgctctccggcggcctcgccgccggtgcgccacgcccgtccgatgctccctcgccgcagcgccgggtctccgggcgccgcctgagctcatcgactccatcctctccaaggtgaagggaactgaccgtggagttttgctgcccaaagatgggcatcaggaagttgctgatgtcgcactacagcttgccaagtactgcatagacgatcctgtcaagtctccactaatatttggagagtgggaggttgtgtactgctcagtaccgacatcaccgggagggctctaccggactcctctcggccgcctgatattcaaaaccgatgagatggctcaggtggtgcaagcgcctgatgttgtaaaaaacaaggtgtccttctctgtctttggtttcgatggtgcggtatctctgaaaggcaagctgaatgtgctggatggtaagtggattcaggtcatattcgagccaccagaagtgaaggtaggctccctggggtttcagtatggtggcgagagcgaagttaagctggagatcacctatgtcgacgagaagatcaggctgggaaaaggatcaagaggctcgctcttcgtcttcatgagacgatgatatgagggcagcaggcaatgtttgtaccatcatgtcctttgagaccacaagagggtagcaccatagcactgatgctacgacaatatgtttgtgtgtacaatactgtattctgttgtaaaattcagaggtcatgttggctagtagtgttcttcagacctccgaattagagattgtattgtcatttccaatcaaaatgacaaaatgtttgtagtttttgtgattaatgtgatggttaaattgtccagact

SEQ ID NO: 3674 - DNA, 1216 bp, Oryza sativa
  ref <308>: DATABASE ACCESSION NUMBER: AK061305
  ref <309>: DATABASE ENTRY DATE: 2001-12-06
cgcatttgggtttgtccacaagatagcaacctttgagaaggctgctggtttccaggcacttatccaatatactgatgctccaactgcactagaagcaaaaaattcgttggatggaagaagcatcccgagatatttacttcctgaacatgtccccacctgtcacctgcgcataaccttttctgcgcacaaggatttgaatatcaagtttcaatcacatcgtagcagggattacacgaatccatatcttcctgtgaatccaacagcaatcgagggaatcgcacagcccactttaggccctgatgggaagataaaggagcctgagagcaatgtgcttttggcttcaatagagaacatgcagtatgctgtgacggtggatgttctacatactgtgttctctgcttttggtactgttcaaaagattgcaatgtttgagaagaatggtggaatgcaggccttaattcaatatccagacatcacaacggcagcagttgctaaacaagctttggaagggcactgcatatatgatggaggttactgtaagcttcatctgtcatactctcgtcatactgatctcaatgtaaaggcacatgatgagagaagcagagactacactgtttcatcagatcctagtgcacaaatgcaagctgcagcgcaagccccaggtcctagcactccaggagtggcatggcaaaacaccgcacccagtgcttccttttatggcagcactgcggcagcgactcctgttggacaagtgccagcttggaatccaaacatgcaggcaggtgcttttggatcggcatcgtctgcatacccaacccaaccaatgatgccaggatcagttccacactatccaggaattggatccagttccggagcactgccagtatcgttccaggcctcacatcagatgccacagtatggtgtacccccagctgctccacaccatgctccaccggctggccaaccaatgtatttcccgaaataatctatctttatccgatgtacaagcaattagagcaattgcaaatgttgcctgcaatactcgggtctgggtatcttctcttcaaattttgggttgtaactcgtctatgcagctattcatattgtaactcagtgagctccctgtcgcaaatgtgcctctgcgtcagtcgctgtctgtaaactgtccggcaattagaaattcccatccttagcatgcctggtattgttcagctcg

SEQ ID NO: 3675 - DNA, 1287 bp, Oryza sativa
  ref <308>: DATABASE ACCESSION NUMBER: AK104483
  ref <309>: DATABASE ENTRY DATE: 2002-08-28
ctccttcctccgctcgccgtcttctcgacgacgacccgcggccaccgccgcgccgccctcctcgccgccgccgccgccgccgtctccgcagaatctgatcgatggcgccgtcgtcgacgtcgtcggagggtgcctccgacgagtggttgccacccagccggcggccggagctggcggacgtggtccccgtgacgcaggacgacgggccccaccccgtggtggccatcgcctaccgggacgagttccgcgaggtcatggactacttccgcgccctctacttcgccggcgagcgcagcgtccgcgccctccacctcaccgccgaggtcatcgaccttaatcccggcaactacacggtgtggcattttaggcgtcttgttctagaggcactggatgctgatctgcgtgaggaaatggattttgtggaccgaattgctgaatgtaacccaaaaaattatcaaatctggcatcacaagagatggcttgcggagaaattaggaccagatattgcaaataaagagcacgaatttacaaggaagatactttctatggatgctaaaaattaccatgcttggtctcataggcagtgggttcttcaagcactgggtggatgggagactgaactacagtattgcaaccagctgcttgaggaagacgtcttcaataattcagcttggaatcagagataccttgtaataacaagttcaccacttcttggaggccttgcagcaatgcgtgactcggaagtggattacacagttggggctattctggctaaccctcagaatgaaagcccctggagatacctcaaaggcctgtacaagggtgaaaataacttgctgatggctgatgagcgcatctctgatgtttgtctcaaggtcctgaaacatgattcgacctgcgtatttgctttgagcttgctgctcgatcttcttcaaattggtttacaaccttcagatgaactcaaaggaactatcgaagcaataaagaactctgatcctgaagcagatgaagcagtagatgctgatcttgcgactgcaatctgctcaatattgcagagatgtgatcccctgcggataaattactggtcctggtacaggaccactatttcttctcaaacctgaagcatgcagtggcctccatgaggtcataatggagatatcttctatcttcgtgtgattctgggcgttgaggtgcctagctacatttgttatgaactttccttgggcataactgatcactgatattactccaatattgtgttcttgtgcatcgtatgttattccagat

SEQ ID NO: 3676 - DNA, 1040 bp, Oryza sativa
  ref <308>: DATABASE ACCESSION NUMBER: AK061306
  ref <309>: DATABASE ENTRY DATE: 2001-12-06
aattagtcattatcattattattacgagccgtatgcacgcgctgcctcgctctcgcctcggcttcgggttcttcgcgtcgatgagctcgtcggcggcgagggtgggcggcggcggcggaagggacccgagcaataacccggcggtggggaggctgcgggagctcgtgcagcgcggggacgcggcagatggctgggagaagtcgtgggaggccgccgtaaccccgtgggatttggggaagccaacacctatcatcgaacatctcgttaaatcaggaactctcccgaaggggagagctctggttccaggatgcggcacgggatatgatgtggttgctctggcaagccctgagcgatttgttgttggcttggatatttctagtacagctgtggagaaggctaagcagtggtcatcatctttgccaaatgcagactgttttacttttctggctgacgatttcttcaagtggaaaccaagtgaacaatttgatcttattttcgattatacgttcttttgtgcacttgatccaagcttgaggttggcttgggcagaaacagttagtgggcttctaaaacctcatggagagctaatcacccttatatatttgatcagtgaccaagaaggaggaccaccattcaataatacagtcaccgactatcagaaggttctagaaccattgggtttcaaggctattctcatggaagacaatgaactagctatcaaaccgcgcaagggtcaagagaaactgggaaggtggaagagatttgtacccggatcttctctataaagaagggatgcagcgttcatgtttctttcttgggctcgctttcgttgtcgatattcaattcttcatgttcaagatccaagaacatgtgtgtatgcgtgcagtccaagactcaacaaatgtactccaaataagctcgcgatgctgtcaacttgtcgttgtcaggcgatttcagcattcagaacaagtgaacagcctagtcttgcagctcaagatgtaactgaatgaattagggacaaaaggaataaaagatcctag

SEQ ID NO: 3677 - DNA, 1091 bp, Oryza sativa; identical to SEQ ID NO: 3113
  ref <308>: DATABASE ACCESSION NUMBER: AK104484
  ref <309>: DATABASE ENTRY DATE: 2002-08-28

SEQ ID NO: 3678 - DNA, 981 bp, Oryza sativa
  ref <308>: DATABASE ACCESSION NUMBER: AK104485
  ref <309>: DATABASE ENTRY DATE: 2002-08-28
gtgctcagtttcactcttatcagtgaattagatcatatacttgtgtccttgatagctcgttaattagcatggctaggtcactcgctgctgtcctactccttttggtcgccgccgcgggagccagccatgccgcgtcgccggcggagatgtactggaagatcgcgctcccgacctcgccgatgcccggcgccattcgcgacctcatcagcccagcgagctcagtgggctcagcttcgaaggaggacacggtgggcaacgtgttcttcctcgagaaggacctcttcccgggctccaagatgacgctccacttcacccgcgccaccgccggcgccgcgctgctcccccgcggccgcgccgagtccgtcccgttcgcctccgaaaggctcccggagatcctctcccagctctccatcccggccgtctcgccgaccgccgacgccatgtggtccacgctcgccgagtgcgaggccgcgcggctcgccggcgagacgaccaagcacaagcactactgcgccacgtcgctcgagtccatggtcgagttcgtcgcgtccagcctcggcacccgcgacgtccacgccgtgtccacggaggtgatcagcacgttgacgccgacgccgaggcaggcgtacagggtggaggccgtgaggcccgtggcggtgcccggcggcgacatggtggcatgccacgggatgccgtacgcgtacgccgtgttcgggttgcacgggctcaagggcgcaggcggtggccgcgtgccacggggacgtggacgggcacggcgcggtggcggaggcatacaagaggctcggcgtggcgcccgggagcgtggccatctgccacttcctgcctcaggacgacatgatctgggtgcgcaactgaattaatgaagcagctaccttgcgcgccatccatggctaattattttagacatgctccttcctatattttggatctacctgccggctatcatgttgtcataaattt

SEQ ID NO: 3679 - DNA, 1610 bp, Oryza sativa
  ref <308>: DATABASE ACCESSION NUMBER: AK061307
  ref <309>: DATABASE ENTRY DATE: 2001-12-06
atacgcaccactgaaccacctgcaagacggaggtggtttcagagtttagagataagatggcgctgcatcttcttcacctgcttgccttctccctgctcttcgcagtggcgacccctatcagggacatcaccgatgtgtgctcgtcacagatcaaggatttccagtacctgaacagcacgggcctgcaccttgagctgcaccacccgcggagcccctgctcgccggcgccggtcccggccgacctcccgttcacggcggtgctcacccacgacgatgcgcgcatctcgtcgctggcggcgcgcctcgccaagacgccgtcggcgcgcgccacctccctggacgccgacgccgacgccggcctcgccggctccctcgcgtccgtgccgctcagccccggcgcgtccgtgggcgtgggcaactacgtgacgcgcatgggcctcggcacgccggcgacgcagtacgtgatggtcgtggacacgggctcctcgctcacctggctgcagtgctcgccgtgcctcgtgtcgtgccaccggcagtccggcccggtgttcaaccccaagtcgtcgagcacctacgcctccgtggggtgctccgcgcagcagtgcagcgacctcccctccgccacgctcaacccgtcggcttgctcctcctccaacgtctgcatctaccaggccagctacggcgacagctccttctccgtcggctacctcagcaaggacaccgtctcgttcggctcgacgtcgctgccaaacttctactacggctgtggccaggacaacgaggggttgttcggccgatccgccgggctcatcggcctcgcccgcaacaagctctcgctcctgtaccagctcgcgccaagccttggctactccttcacctactgcctcccgtcgtcgtcgtcatcggggtacctgtcgctcgggtcgtacaacccggggcaatactcgtacacgccgatggtgtccagctcgctcgacgactcgctctacttcatcaagctgtccgggatgacggtcgccaggaatccgctgtccgtgtcgtcgtcggcgtactccagcctgccgacgatcatcgactccggcacggtgatcacgcgcctgccgacgagcgtgtactcggcgctgagcaaggcggtggcggcggccatgaaggggacgtcccgcgcgtcggcgtactccatcctcgacacgtgcttcaagggccaggcctcgtgggtgagcgcgccggcggtcaccatgtccttcgccggcggcgcggcgctcaagctgtcggcgcagaacctcctcgtcgacgtcgacgactccaccacgtgcctggcgttcgcgccggccaggagcgccgccatcatcgggaacacgcagcagcagacgttcagcgtcgtctacgacgtcaagagcagcaggatcgggttcgccgccggcggctgcagctgagaacgccgagagcgccgccgaacgcgcacccaggcatggtccgcatggatacttgggtaaattaatgggcaatccatttgctattggctatactagctagcacgccattcatcaattcaaccacacaagctgttacataagcatggggatgaacatatcacaaggtagataaaaacg

SEQ ID NO: 3680 - DNA, 1248 bp, Oryza sativa
  ref <308>: DATABASE ACCESSION NUMBER: AK061308
  ref <309>: DATABASE ENTRY DATE: 2001-12-06
aaaaaagtcagagaaagcagctttgagcttagctatggcaatggccgcgccgctgacgttggtggtggtggcggcggcggtggccgtcgtcttcgtcggcggcggcgtggaggggtgggtgctcaaggaggggttctacgagcagagctgcccgcgcgcggaggcgctggtgaagcactacgtggagcagcacgtccccctcgccccctccgtcgccgccaccctcatccgcacccacttccacgactgcttcgtcagggggtgcgacgcgtcggtgttgctgaacgggacggacggggcggaggcggagaaggacgcggcgccgaacctgacgctgcgggggttcgccttcatcgaccgcatcaagagcgtggtcgagagcgagtgccccggcgtcgtctcctgcgccgacatcctcgcgctcgccacccgcgacgccatctccgtcatcggcgggccgttctggcgggtggcgacggggcggcgcgacgggagggtgtcgatcaagcaggaggcgctggaccagatcccggcgccgaccatgaacttcaccgacctcctctcctccttccagagcaagggcctcgacctcgccgacctcatctggttgtcaggggcgcacacgatcggcatcgcgcactgcaactcgttcagcaagcggctgtacaacttcaccgggaaaggcggccccggcgacgcggacccgtcgctggacgcggagtacgcggcgaacctgcggcggagcaagtgcgcggcgccgtcggacaacacgacgatcgtggagatggacccgggcagcttcctcaccttcgacctgggctactaccgcggcctcctcaggcgccgcggtctcttccagtccgacgccgccctcgtcaccgacgccgccgcggaggccaacatcgccagcgtggtgtccagcccgccggaggtgttcttccaggtgttcgcgaggtccatggcgaagctgggcatggtcggcgtcaagaccggctccgagggcgagatcaggaagcactgcgccctcgtcaacgacatccactactagtattatcactagctcatcgatcttcagctcctcggtgcttgataaaatttcagtagaaatatatatacatgtaacttaattcgatcgtcatcctgtttattctctctctctatgtaattttgtttccaaattgtaactgttttattttggagcaactgtaactatttctgtatgtgcccatgaatatatttcaattatag

SEQ ID NO: 3681 - DNA, 1233 bp, Oryza sativa; identical to SEQ ID NO: 3124
  ref <308>: DATABASE ACCESSION NUMBER: AK104486
  ref <309>: DATABASE ENTRY DATE: 2002-08-28

SEQ ID NO: 3682 - DNA, 1314 bp, Oryza sativa
  ref <308>: DATABASE ACCESSION NUMBER: AK061309
  ref <309>: DATABASE ENTRY DATE: 2001-12-06
cactgcagcaaaaagcaagcaacctcaccgaggaggggaatggaatggagctgagccttctccccgccccacgcgtgtagccgccgccgccggcgagcaggtttggagtgggggcgacgcggccgtggagagcaggtctcgtgtccggatcgaatcgaagggcgtttctagtgtcaaaaagagaggagggatggcgatgacggggtacaagtaccaagctcaggagttgatgagagactacttgctggctgatccactggttccgtacacctcggtgctcgtaggcattgccctgtgcaagatggcatatgatctcacaagggtactgagctcattttacttcaagggatattcttcactgacaaagatacaacgtgttgaatggaacaacaggggtatgtccagtgcacatgcgatctttatcacagctatatcattatatcttgtcatgtctacagatcttttctctgatcgccttaaggggcctatcacattccgcaattcaatcatctccacttttgcattaggggtttctgtgggctacttcatcgctgaccttgcaatgatcttctggttgtatccttcccttggtggaatggaatacatcgtccatcatactctttctctagttgcaatagcttacacaatgttgtcaggggagggtcagttctacacatacatggttcttatttcagaaacaaccacccctgaaattaacttgagatggtttcttgacacagctggactgaaaaagtcaagtgcttacttggttaatggtattctgatgttcgttgcatggctggttgcaaggatacttctgttcatttacgtattctatcacatctatttgcactacagtcaggtaatgcagatgcatgcttttgggtactacttgacatttattgtgccatcggtgctctttgtcatgaacacaatgtggtttatgaagatcttgaaaggcgtgaagaaaacattggggaagtggtcatgatcgatccaggaatgcagatcctagaaccgccaacaagagttggtattccagcgatcatccgtatgatcttgatgtgtaaagttatggacatatatcaggttaactaggtaaagcgaatatgtaaagtgctagtagcaaaaacaagtttagattaggccaaattgccgctattttcagcaagctggaatttcctagcctgtttggcacggtactgaagttcccagcacgctgtttctcccctcccgcatcgtgtgtatatctgaagaaatttctgtggatcagttgcccaacagtacaacctcaaatgctatagtatttgtgac

SEQ ID NO: 3683 - DNA, 1114 bp, Oryza sativa
  ref <308>: DATABASE ACCESSION NUMBER: AK061310
  ref <309>: DATABASE ENTRY DATE: 2001-12-06
tttatctcttatctccaaaatcgattccccaaccctaacctcccgttctcaacgacggcgccgccgcacagatctggcactatccggcgaggcttgagctgcctggggccgggctccgtcgcctcctttgtcggcgcacggacgaaggaagccgaggctttagtctagcgtcgtcccttttctgtcaggaaaggcgaaggttatggttcgccgccgaacttcgtcggctgaaatcatggcgccgccgtggctgatgccacctgtgttcagccggaaggggtccggcacatcgcgagcgtcgctatatagggggcaaatagctccgatgccggcgaggttatcctccggcgatgaggtctttgcgggttttctcatcagaacgagctgtcatcgcatcgtggcggagtttgggtttctctgagacatgacggggagcacgagcttgaggaccgcggcgtcgtggcggtgtttgggtttctctgagacaggacgaggagcacgagcttgagctaggtccttcttttgatctctggatgaccgagagatgcgagatgccaccgacctgattatttggtggttgatccgtcacttgaatttgcatgatcgtccacaagcattcggagcacatggggaaatatatatgattatgctactggtttttctcctattgcctcttctactcggatcttcttctactagaacgattagaatcactacagcgttccgagcacatggtgaatagtctataggggagtgtgaagtaaacgagatgagtgctatacccagttacccactggagtggagagacatatcgcctctgcaagccttggacaaagttattcattcaatacatgttcttaacccaatctttcctgttgccatttcaagtacccatttccaatcacaggaataacaatacagatgaagagggagaagaaaaacaagctgtgaaggctgcataacaacaggcaggttgatttgaaatgcagatgaatccttccagttccattcgatcccaatccaaactcggtgtacacaataaattcaggatcctaattgcttgaaaaagtaatgctttttgatttttgacatcacgggtattataatgtttatt

SEQ ID NO: 3684 - DNA, 1159 bp, Oryza sativa
  ref <308>: DATABASE ACCESSION NUMBER: AK061311
  ref <309>: DATABASE ENTRY DATE: 2001-12-06
aaccgccacccttcacgccctcaatcccctcctctcctccgcgcatctctcacccggcgccgtaatcgccgcccgccttccgcgtcgcaagcggcggcccctctgcgccgattccccaccatcatcgatctcctccgccctctcagccaccgccgccagggaggcgacgccccaaccgaaccgcactgccgggacaccgacgcccatcccgttcactcgcctgcccctctgcgccgcgccgccggatcaacgtcagtcgcctgcctcttgcccggtctcctttgcgccattatcgatatccgccaagtgctgctgttccctccgccggaagctccaccgccgtcccgcgccgggacatcgacgcccgccttgctgatcccgttccatcccgtcctccactgccgctccactcgccctccactgcgccgccacggatctcagccgccggatccgctcccctcgccctcctccgcgccgccactgacctccacctcgacggacgcctgcccgtacacatcgagtccaccgcagctcccctgtcgacggcgaactgctttactcctggctggtctcctctgcgcctccaccagccccgcggtggccttcattgtcgatagtctcatctcaaaagatcatgcaagcacaggctgggatggtggagcagcctccacagatccgttctgtcaggcatcttggcttacgggtgaactacacagcgatggcatcaatttgcagttgacgtgaacaatcggataaaaggctagcattatccaatctgctgctttgactgcatggcgtgctttatatggtgagctcccagatttatgaaactatcagtagcacaactagaaaggaaagggacatttattttcagcagaaagagaaaggatagaggaagtacgtacagtcgaatgtgatgaatgaaatatctgatgatgctctcgtttcagctgtgatgaatgaaatatctgatggcaggtgattttaatttagggattcggttcaacctttttcttttacattttcttttacaatttgtagtttgtagagcctaaattattcaggtttacaggctgttatgtttgtttagataagacaatctttttatttgccagtttctcaaaaaactctggccagaaattaatgtaccattatatat

SEQ ID NO: 3685 - DNA, 1215 bp, Oryza sativa
  ref <308>: DATABASE ACCESSION NUMBER: AK104487
  ref <309>: DATABASE ENTRY DATE: 2002-08-28
aatgcaggtaattaagcagtacagcaccaattaagcaaagccacagcaacgagagagagcttgtgaagttgtgatatttcattttgaccatatgggttactcctactcttccgccgccgtggcggtgagcgttttggtggtggcgttggtggcggcggcgtcgggccagctgtcgacgacgttctacgcctcgtcgtgcccgaccgcgctgtcgacgatcaggagcgccgtgaacgcggcggtggccagggagccccgcatgggcgcctccctgctcaggctccacttccacgactgctttgtccaaggatgcgacgcgtcgatactgctggccgacaatgccaccttccggggggagcagggtgcgttccctaatgtcaactcgctgaggggattcgaggtcatctctagcattaagatgcaactcgaggcatcttgcaggcagaccgtctcctgcgccgacatccttgctgtcgccgcccgcgactccgtcgtcgccctaggaggtccatcgtacccggtggagctcgggaggagggacgggatgacgacgaaccaaaccatggcgaacaccaacctccatccaccgaccaccgacctgggtaacttcgtcactagcttcgccgggaaagggctcagccccaccgacctggttgtactcactggagcgcacacggtgggcgtggcgcagtgcaccaacttccggtcgcggctctacggcgagtccaacatcaacgcgccgttcgcggcgtcgctccgggcgagctgcccgcaggccggcggcgacaccaacctggcgccgctggactccacccccaacgccttcgacaacgccttcttcaccgacctcatcgccggccgcggcctcctccactccgaccaggagctctaccgcggcgacggctccggcaccgacgccctcgtccgcgtctacgccgccaaccccgcccgcttcaacgccgacttcgccgccgccatggtgcgcatgggcgccatcaggccgctcaccggcacgcagggcgagatcaggctcaactgctccagggtcaactgatctgtatatctctacgaaatgcgtcgatctactgtacctacgtggatagaatcgaatcgaataagactagactattaataagctaataagtgattagcgatatcgcgatatgtataagtgcgcaacgtgatattgaatttatgtaagggcttgtccggttt

SEQ ID NO: 3686 - DNA, 1219 bp, Oryza sativa
  ref <308>: DATABASE ACCESSION NUMBER: AK104488
  ref <309>: DATABASE ENTRY DATE: 2002-08-28
gaagcaacaagttgtagcagattgagagagagttgggaagaattacacaagaaatttagagaaatagtactagctagctagcaagaatatagatatataatgtcgatcaagcactgcgagcaacacaaggattgcgagcggcagcgcctgtaccggcgttgctgcgcggccatcttcggcatccttctcctcctcctcctcatcgtcctcatcgtctggctcatcctccgccccaccaagcctcgcttctacctcaacgacctcaccgtcgtctgcctcaacgtcaccaccggtggttcctacgccggcgccaccgcctcctccggctacttctccttcctcaccgtcaccatgcagaccaccctcgccgcccgcaacggcaacgagcgcgtgggcatctactacgaccgcgccgacgtgtacgccgagtacaagggcctccgcatcaccgtgccgacgtcgctgccgccggtgtaccagggccacccggacctcaccgtctggtcccctttcctctccggcaacaacgtccagctcccgccctacctcgccgtctccatcacccaggacgagaccgccggctacctgctcgtcaccatccgcgtcgacggctggatccgctacaaggccggcgccttcatcaccggacactaccacctccgcgtcaggtgccccgccctgctcatcgtcaacgacggccggggaagctacggctccaactccggcggcggcaacggctacttcaggttccagcgagccgccgcctgcgtcgtcgacgtctgatccatccatccatctcctcatcctcctctcatgcatccaacaaatcatatcatccttaattaattctcctccttccatatataattgcttgcttaattgatcgatctacattctacaagcacagccctgatgaagaagctatataattaaaagctcagctcaactgatcgagtgaggatcggagtaatcttgcatatatgcctgccaccagtggttttatgtatttacagtacgaattaatttgacctttttcttacttaattttcatgcctgtgtttttttttggtactacgtacagtgccatgcttgtggctagctgcatggttcaggtgtacagctacttgtagtaataattcgcatatagagaggggataattaagcaattgctacaatcttgtaattactactagaatatataataattgtacttatcttc

SEQ ID NO: 3687 - DNA, 1328 bp, Oryza sativa
  ref <308>: DATABASE ACCESSION NUMBER: AK104489
  ref <309>: DATABASE ENTRY DATE: 2002-08-28
ggcctcgcgcccctccacatcacacacacgacgccatcgccatggccaactccagctgcccctccacctctcccgccgcgctacgcctcgcgcgccccaagctcccggactccgccatgatcatgcagctccagctccagctccagcacgcgcccctgttcccccgcccgcccgcggcgcgcgcgcaccaccaccaccaccaccagcgacgcctcctgctcgcggtctccgaccacgtcgccgccaagcccgtcaccgtgccggtggggaggatgcgcatgcgcgcggcgacggcgatggtctcgcaggaggaggccgcggccacggctgtggaggagcaacaggaggaggaggtcgaagaggagcagttgcaagaggaagacggagcagctgtgcaggaggaggagcagggcggcgtcctggagggcagctcgggcggcggcgaggcggaggcggaggcagcgggcatcaccaccaagctctacttcgggaacctgccgtacaactgcgacagcgcgcagctcgccggcattgtgcaggactacgccaccccggagatggtggaggtgttgtacgatcgggcgacagggaggagccgaggcttcgcgttcgtgacgatgagcaccatcgaagactgcgagcaagtgatcaagaacctcgacggcagcctgtacagtgggcgcacgatgagggtgaacttcgcggacaagcccaagccgaagctgccgctgtacccggagactgagcacaagctgttcgtcggcaacctgtcgtggacggtcacctcggagatgctgacggagatgttccagaagtgcggcaacgtggtcggcgcccgggtgctctacgacggcgagaccggccggtcccgtggctacggcttcgtctgctactccaccaaggaggagatggatgaagctctttcctcgctcaatggaacggaactagaaggcagggagatccgggtcaacctcgcccttggaaagaaataatcaaagagtaatagatttacttcacatgcacaggagaaacttgcaatacaatgcaatgctgccttcagatgcgattttcaggcaaccatggatgcagcgattacttgtttgagcgcatcgcaagacggcaagagcaggcacaggaagaatgtattgttctgagttacagcagatgtatctctttttttttaacgaatcagatgtatcttttgtatgcatgggaaatttattagtttctatcagtcgtttatctgatagaagcttgactgaacattgaacagttttagtctgctggggttatcagtcagttccattctcttggagctgcattttttc

SEQ ID NO: 3688 - DNA, 1158 bp, Oryza sativa
  ref <308>: DATABASE ACCESSION NUMBER: AK104490
  ref <309>: DATABASE ENTRY DATE: 2002-08-28
agtcacaccacacgcttggcttgacgccgcacgcctccgctccgctccgccgccgcggccgatctctctagggcttccaacctcgccggcgacgcgacgccacgccatggccgccccggtcgtggacgccgagtacctccgccaggtcgacagggcgcgccgccacctccgcgccctcatcttctccaagggatgcgcgcccatcatgctccgcctcgcatggcatgacgcgggcacttatgacgtgaacacaaaaactggtggtgcaaatggttcaattagatacgaggaagagtacactcacggttcaaatgctggtctaaagattgctattgatcttctcgagcctattaaagccaagagccctaagatcacatatgctgacctttatcagcttgctggagttgttgcagttgaagttactgggggtccaactgttgagttcattcctggaagacgtgattcgtcagtttgcccccgtgaagggcgtcttcctgatgctaagaaaggtgcactgcacttgagggacatcttttaccggatgggcttatcagacaaagatatagtagctttatctgggggtcacactctgggaagggcacatcctgaaaggtctggatttgaaggcgcatggactcaggagcctctgaagtttgacaattcgtactttcttgagctactgaagggggaatctgaggggcttctgaagctcccaactgacaaggcattgttggaagatccttcatttagacgctatgtggatctttatgccagggatgaagacaccttcttcaaggactacgctgaatcgcacaagaagctttctgaacttggcttcactccacggagcagcggccctgcatctacgaaatctgatctttcaactggtgctgtactcgcacagagtgctgtcggggtagctgttgctgcagctgtagttatcgtgagctacctatacgaggcttctaagaagagcaagtaagattgctatgttcttcatcagcatggcctcatagtaagtatcagggtcaaataacagaattctagtgatgatccagccatacgaacacttccttcatgtctacatataccctatcaatatttcatggggaattatatggagatgacatagcttcactatttaaaagcactttggac

SEQ ID NO: 3689 - DNA, 1296 bp, Oryza sativa
  ref <308>: DATABASE ACCESSION NUMBER: AK061312
  ref <309>: DATABASE ENTRY DATE: 2001-12-06
atcagagaagagagaggtagagaagagagagcagagctaagctagctcagagtgagtagcgtgttgagcttgctgaagggagcggcaatgtcgaaggaggtgagcgaggagccggagcacgtgcggcccaaggactacaccgacccgccgccggcgccgctgttcgacgtcggcgagctccggctgtggtccttctaccgggcgctcattgcggagttcatcgccacgctcctgttcctatacatcaccgtcgccaccgtcattgggtacaaggtgcagtcgtccgccgaccagtgcggcggcgtcggcaccctcggcatcgcctgggccttcggtggcatgatcttcatcctcgtctactgcaccgccggcatctccggagggcacattaaccccgcggtgacgttcgggctgctgctggcgaggaaggtgtcggtgattcgcgcggtgatgtacatcgtggcgcagtgcctgggcggcatcgtgggcgtgggcatcgtgaagggcatcatgaagcaccagtacaacgccaacggcggcggcgccaacatggtggccagcggctactccaccggcaccgccctcggcgccgaaatcatcggcaccttcgtcctcgtctacaccgtcttctccgccaccgacccaaagcgcaatgcccgcgactcccacgtcccggtgctcgcgccgctgcccatcgggttcgccgtgttcatggtgcacctggccaccatccccatcaccggcacgggcatcaaccctgcccggagcatcggcgccgccgtcatctacaaccagaagaaggcatgggacgaccactggatcttctgggcggggccgttcatcggagcgctggcggcggcggcgtatcaccagtacatcctccgggcggcagccatcaaggcgctgggctccttccggagcaaccccagcaactgagcttagatggccatggctgctctgctgctgctggcctggttggacttggtcatatcgtttgcatgtgagggagtgtgtgtgagagagggtggggggtgccagtcagccaggtgcatgatttgttgtttccagcttaaattatcatcaccgttactgttgttaatcaaaccggtgggatttgttgtatgtatgtatgtactaccttgattaatttagtttcgcttgtttgtgtaaccggtgttagtaattattagagatacaaactgcttcggctttttaagttcagtcgaccacccttgtaaaaccgctgtaagaacttccaccaccaattgccatctgcttttgttgctgttggattgc

SEQ ID NO: 3690 - DNA, 1187 bp, Oryza sativa
  ref <308>: DATABASE ACCESSION NUMBER: AK104491
  ref <309>: DATABASE ENTRY DATE: 2002-08-28
gtgctcagtttcactcttatcagtgaattagatcatatacttgtgtccttgacagctcgttaattagcatggctaggtctctcgctgctctccttctccttctggtcgcagccgcgggagccagccatgccgcgtcgccggcggagatgtactggaagatcgcgctcccgacctcgccgatgcccggcgccattcgcgacctcatcagcccggcgagctcagcggcctcagcttcgaaggataaggaggatacggtgggctccgtgttcttcctcgagaaggacctcttcccgggctccaagatgacgctccacttcacccgcgccaccgccggcgccgcgctgctccctcgcggccgcgccgactccgtcccgttcgcctccgaaaagctcccggagatcctctcccagctctccatccccgccggctcgccgaccgccgacgccatgcggtccacgctcgccgtgtgcgaggccgcgcggatcgccagcgagacggcgcccaagcacaagcactactgcgccacgtcgctcgagtccatggtcgagctcgtcgcctccagcctcggcacccgcgacgtccacgccgtgtccacggaggtggtcaacagggccgggccgacgccgaggcaggcgtacagggtggaggccgtgaggcccgtgccggtgcccgggggcgacatggtggcatgccacaggatgccctacgcgtacgccgtgttcggggtgcacgggatcaagggcgcggcgtacacggtgacgctggccggcgccgacgggaccatggcggaggcggtggcggcgtgccacggggacgtggacgggcacggcgtggcggtggcggaggcgtacaagaggctcggcgtggcgcccgggaaggtggcagtctgccacttcctgcctcaggacgacatgctctgggtgcgcaactgaatgaagcagctacctgcgcgccatccatggctaattaagctccttcctatattttcgatctacctgccggctggctatcatgttatcatcgcgtgtgtgtgcgcgccgatccgacatgcccacactacacgtcgacactacacgtgttttattttgttaattaataagtctggacaaccaggtcatcttgtacggcacttctcccctctgtcccgaaataaaccaacttataaagattgaagtttgtcgcaaaat

SEQ ID NO: 3691 - DNA, 1130 bp, Oryza sativa
  ref <308>: DATABASE ACCESSION NUMBER: AK104492
  ref <309>: DATABASE ENTRY DATE: 2002-08-28
gtgtgctcagtttcactcttatcagtgaattagatcatatacttgtgtccttgacagctcgttaattagcatggctaggtctctcgctgctctccttctccttctggtcgcagccgcgggagccagccatgccgcgtcgccggcggagatgtactggaagatcgcgctcccgacctcgccgatgcccggcgccattcgcgacctcatcagcccggcgagctcagcggcctcagcttcgaaggataaggaggatacggtgggctccgtgttcttcctcgagaaggacctcttcccgggctccaagatgacgctccacttcacccgcgccaccgccggcgccgcgctgctccctcgcggccgcgccgactccgtcccgttcgcctccgaaaagctcccggagatcctctcccagctctccatccccgccggctcgccgaccgccgacgccatgcggtccacgctcgccgtgtgcgaggccgcgcggatcgccagcgagacggcgcccaagcacaagcactactgcgccacgtcgctcgagtccatggtcgagctcgtcgcctccagcctcggcacccgcgacgtccacgccgtgtccacggaggtggtcaacagggccgggccgacgccgaggcaggcgtacagggtggaggccgtgaggcccgtgccggtgcccgggggcgacatggtggcatgccacaggatgccctacgcgtacgccgtgttcggggtgcacgggatcaagggcgcggcgtacacggtgacgctggccggcgccgacgggaccatggcggaggcggtggcggcgtgccacggggacgtggacgggcacggcgtggcggtggcggaggcgtacaagaggctcggcgtggcgcccgggaaggtggcagtctgccacttcctgcctcaggacgacatgctctgggtgcgcaactgaatgaagcagctacctgcgcgccatccatggctaattaagctccttcctatattttcgatctacctgccggctggctatcatgttatcatcgcgtgtgtgtgcgcgccgatccgacatgcccacactacacgtcgacactacacgtgttttattttgttaattaataagtctggacaaccaggtcatcttgtacggc

SEQ ID NO: 3692 - DNA, 1123 bp, Oryza sativa
  ref <308>: DATABASE ACCESSION NUMBER: AK104493
  ref <309>: DATABASE ENTRY DATE: 2002-08-28
gtgctcagtttcactcttatcagtgaattagatcatatacttgtgtccttgacagctcgttaattagcatggctaggtctctcgctgctctccttctccttctggtcgcagccgcgggagccagccatgccgcgtcgccggcggagatgtactggaagatcgcgctcccgacctcgccgatgcccggcgccattcgcgacctcatcagcccggcgagctcagcggcctcagcttcgaaggataaggaggatacggtgggctccgtgttcttcctcgagaaggacctcttcccgggctccaagatgacgctccacttcacccgcgccaccgccggcgccgcgctgctccctcgcggccgcgccgactccgtcccgttcgcctccgaaaagctcccggagatcctctcccagctctccatccccgccggctcgccgaccgccgacgccatgcggtccacgctcgccgtgtgcgaggccgcgcggatcgccagcgagacggcgcccaagcacaagcactactgcgccacgtcgctcgagtccatggtcgagctcgtcgcctccagcctcggcacccgcgacgtccacgccgtgtccacggaggtggtcaacagggccgggccgacgccgaggcaggcgtacagggtggaggccgtgaggcccgtgccggtgcccgggggcgacatggtggcatgccacaggatgccctacgcgtacgccgtgttcggggtgcacgggatcaagggcgcggcgtacacggtgacgctggccggcgccgacgggaccatggcggaggcggtggcggcgtgccacggggacgtggacgggcacggcgtggcggtggcggaggcgtacaagaggctcggcgtggcgcccgggaaggtggcagtctgccacttcctgcctcaggacgacatgctctgggtgcgcaactgaatgaagcagctacctgcgcgccatccatggctaattaagctccttcctatattttcgatctacctgccggctggctatcatgttatcatcgcgtgtgtgtgcgcgccgatccgacatgcccacactacacgtcgacactacacgtgttttattttgttaattaataagtctggacaaccaggtcatcttgt

SEQ ID NO: 3693 - DNA, 1252 bp, Oryza sativa
  ref <308>: DATABASE ACCESSION NUMBER: AK104494
  ref <309>: DATABASE ENTRY DATE: 2002-08-28
aatgcaggtaattaagcagtacagcaccaattaagcaaagccacagcaacgagagagagcttgtgaagttgtgatatttcattttgaccatatgggttactcctactcttccgccgccgtggcggtgagcgttttggtggtggcgttggcggcggcggcgtcgggccagctgtcgacgacgttctacgcctcgtcgtgcccgaccgcgctgtcgacgatcaggagcgccgtgaacgcggcggtggccagggagccccgcatgggcgcctccctgctcaggctccacttccacgactgctttgtccaaggatgcgacgcgtcgatactgctggccgacaatgccaccttccggggggagcagggtgcgttccctaatgtcaactcgctgaggggattcgaggtcatctctagcattaagatgcaactcgaggcatcttgcaggcagaccgtctcctgcgccgacatccttgctgtcgccgcccgcgactccgtcgtcgccctaggaggtccatcgtacccggtggagctcgggaggagggacgggatgacgacgaaccaaaccatggcgaacaccaacctccatccaccgaccaccgacctgggtaacttcgtcactagcttcgccgggaaagggctcagccccaccgacctggttgtactcactggagcgcacacggtgggcgtggcgcagtgcaccaacttccggtcgcggctctacggcgagtccaacatcaacgcgccgttcgcggcgtcgctccgggcgagctgcccgcaggccggcggcgacaccaacctggcgccgctggactccacccccaacgccttcgacaacgccttcttcaccgacctcatcgccggccgcggcctcctccactccgaccaggagctctaccgcggcgacggctccggcaccgacgccctcgtccgcgtctacgccgccaaccccgcccgcttcaacgccgacttcgccgccgccatggtgcgcatgggcgccatcaggccgctcaccggcacgcagggcgagatcaggctcaactgctccagggtcaactgatctgtatatctctacgaaatgcgtcgatctactgtacctacgtggatagaatcgaatcgaataagactagactattaataagctaataagtgattagcgatatcgcgatatgtataagtgcgcaacgtgatattgaatttatgtaagggcttgtccggtttattgccattttcaacactatcgacttttaatattatt

SEQ ID NO: 3694 - DNA, 973 bp, Oryza sativa
  ref <308>: DATABASE ACCESSION NUMBER: AK104495
  ref <309>: DATABASE ENTRY DATE: 2002-08-28
agcagaagcagcagcagcagctcagccgccgccgatggcgtccacgatcatggccccaacctcccgcgtcctcgccgccaagacccccttcctcggccatccccgcccctccaatgcccccgtccgcgacatcgccgccgccgccaccggccgcatcaccatgagcaaggagctgtggtacgggccggatagggtgaagtacctggggccattctcggcgcagacgccgtcgtacctgaggggcgagttcccgggcgactacgggtgggacacggcggggctctccgcggacccggaggcgttcgcgaggaacagggcgctggaggtgatccacggccggtgggcgatgctcggcgcgctgggctgcatcacgccggaggtgctcgagaagtgggtgcgcgtcgacttcaaggagcccgtgtggttcaaggccggcgcccagatcttctccgacggcggcctcgactacctcggcaaccccaacctggtgcacgcccagagcatcctcgccgtgctgggattccaggtcgtcctcatgggcctcgtcgagggctaccgcatcaacggcctccccggcgtcggcgacggcaacgacctctaccccggcggccagtacttcgacccgctcggcctcgccgacgaccccgtcaccttcgccgagctcaaggtcaaggagatcaagaatggccgcctcgccatgttctccatgttcggcttcttcgtccaggccatcgtcaccggcaagggccccttggagaacctgctcgaccacctcgccgaccccgtcgccaacaacgcctgggtctacgccaccaagttcacgccgggctcgtgaatggcccagccgccattgtagactactctctctctccatcgctcgatgtaccaatgcttgcacagattgtacgatgctgtgatgaatctgatatgatccatccagaattcagaaactgaaaaaagttggggtttgcag

SEQ ID NO: 3695 - DNA, 1369 bp, Oryza sativa
  ref <308>: DATABASE ACCESSION NUMBER: AK104496
  ref <309>: DATABASE ENTRY DATE: 2002-08-28
aagctcagcctcagcgatcgacaagtaagtagatccaaatccatccatggaagccaccggcacacggctgacgcgctccgcctccctctccccacgcctccgccgctcccccacagccttgtgcgtctccccgcgcagcatgcatcatcatcatcagcagcagcagcagagcctccgccgcgccacctccgacgccgacatcgccagatccgcgcccgcgacggcatcatcgccgctgcccctcctcctccgcgacatcctggaggaggacgtggtcgtggtggtggacggcgccgggcgcggcaagggcaacgacgacgacgacaagacgtccgggcgcggcggaggcggcggcgggcacatggacatgggggagtactaccggcgggttctgagggtggagccggagaacccgctggtgctgcgcaactacgggaggtacctgcaggaggtggagggcgacctgggcggcgcggaggagtgctacgccagggcgctgctggcctcccccgacgacggcgacctgctcagcctctacggccagctgctgtgggagacgagtcaggacaaggaccgcgccgccgcctacctggagcgcgccgtccaggccgcgcccgatgactgctacgtgcttggatcgtacgcgagtttcctgtgggacgcggaagaggatgaagacgacgaagcagaggatgagatgaaaccgccgctggtgccggcgtcctgctaacccaacccggcgtttgcctttgcttgtgtacatatgagagcttgcttttgtcaaaggcagatcgagacacgatccatcctggtgtgcctgcctgcctgcctgcgcttgtacaaattaattactagcacatcgatccttgctccatcagtttgcttcttctgtacatactccagtagctagcgccttcttgatgatggatcgttggctacatccatcgtcaatacacacactgatgaacaccagagatcaattcaactgcagtgcaagccagggcgcgcggcggcgagcagatcgagcaatttggaagatgcaaatcaggccgccgagcagagcagagcagctcagttcaagtgcggacggacggctggatgattcatccacaccgtaccacactttgcacatggataaccagacttgttgcttctttatgtaacacctcataataaattcactctgctaattaattatactcgagtcaaatgctagctactactacctctttcaagctagtttcatttcatctccctcctcactgccaggatgtattccttcctaattgtattgtattgtatactcctacaatacaacttttgttttctatttccatgtccatccattaatacatccatccgttgggac

SEQ ID NO: 3696 - DNA, 996 bp, Oryza sativa
  ref <308>: DATABASE ACCESSION NUMBER: AK061313
  ref <309>: DATABASE ENTRY DATE: 2001-12-06
gaatcgcgattccacccaccaccaccaccaccaccactgagagaggcggaggcgctgaccaatcgcgatgcggccgccgtcgccgccgcggccgctggccttcccgacgctggactcgctggcggcgttcctcggctcgcgcctgccggcgtcggcgctggcgtcctggggcacggcgccgggaaccaagaccctcctcaacctcttcctcgagctctcacagggggagtgcgtcctcatctccgccgccgccgccgcggcgccgccatcgcagcagcagcagcagcatcccgtcgtccgcgccgtccacgtcgccagcgtccggatccgcaacgggcgcggcgcgctgctgatggagaccgggcagctcctctccgacggcacgctccgctcccgcggcgggctccgcccgctgtcggagaagatgcgccccggcgagacccccgaggccgcggccgtccgcgccgtccgggaggagctcggcgagcgcgtccgcgtccggatcctgggcggcgaggaggcccgcgtggaggagcgggactcggcgtcctacccggggctccacgccaggtacgttctccacgcggtggacgcggaggtggtcgagggcgtccccgaggacggcgagttcgacacggaggagggcggggagcacgaggacgaggtcgtcgtcgatggagccgccgccgccatcaccgtgaagcgccattactggaagtgggtggacgacaacgacaacgacgaggaggatgtcgccggcgccgaggagggcgcgcgccagagcgcgcactaggaagcatcagacatgcatctcggctggcaatttttaccttgcaaaattctgtaacttcgttcgtgtcgaccaacgattcggtgtcattttcgtgttgtgatcctctcctgctgctgtcaaaaatatggtgccaaattgtttcacagattgattactgtgtgttattgttggaataaaaaatgaatggtccatctttcctcgtc

SEQ ID NO: 3697 - DNA, 1022 bp, Oryza sativa
  ref <308>: DATABASE ACCESSION NUMBER: AK061314
  ref <309>: DATABASE ENTRY DATE: 2001-12-06
aagcaatccatattccgtccgtcagctactgctagtggtaggctagatcatcgatgaacgccatggatgaggaggagcaagagcagcctccccagcgctactggttcccgtactggaccagccctccaccgcctccgccgccgccaccgccaccgccctccagctccaggtacaggccgccgtcacctccctcatcgcgccatccccacccaaccatcccagctgcccgcgccgcaccaccgctcgggccaaccaaccgccgcttgcatcagcagccgccgccaccagcaagcagagatggtcgtcacgagcctcctcccaagcccaaggacgtcgtcgtcatccccaccgacaccgtactgcatcacaaacaaccaccacccacgcatcatcatcagcatcagcagcacaaggtgaaagatcaggaggagaagaagggcgacctgcgcaaggacctcaaggcggggctcgccggcatgctcagcgccgcctcccacggccagcaagggacaagcatcatcacgctggccggcgacaacaagggcgcatccatgaagatatcctcccccgccccaggcagcaagggcgccggcgacgacaagagaagcagtgcggatggcaaggggggcgtgaaggcgatgatcaacgcaacgtgcagtccatcaacaactcgctgcttctccacagctcctgcagcggcggcgacctcggggtgcacctcaagctcaagctctcctcaaactccaagtccaagtccaagaccaagagcaaggagaagcagcagcataatgtcgtcgccgataccagcaacaaggagaagaagcccgatagcagccaggagaagaaggaggctggtaccagcgccgccaaacccaacaagccatccgccgctgccaaaggcaacaagcccgccggtgcagctaacaagtgattctgcagacatactaatgtatgtatgtgctttgtactgatctgattgccttcgcctcatcataatgataatcgaattaaatttgcggtgt

SEQ ID NO: 3698 - DNA, 1014 bp, Oryza sativa
  ref <308>: DATABASE ACCESSION NUMBER: AK061315
  ref <309>: DATABASE ENTRY DATE: 2001-12-06
gcatctctctctcgtcgggaggagaaaggaaggaagagggtggcaggaggaggaggaggccccccccatccttcctccctcccctgcgctgagctgcgatggcggacggcaacccggacggcatcaagagatacacccctcccgtgcacaggaaccgtgctaacaatcgacgcaagtctggagatagggctgagaaggctagttatttgtacaataatgatggagagaagagccatgctccttcattaaagaaccttccaccaattatccctcatgagacttttttcagcaatcctcagaatgattacagtcaaacaagattaatacccttggagggatgttgtgccagtgaggctgcccagcttctcaatgaccgttgggctgcagcaatgaacttgtacaatgatcagtcatatgattcccctgataagccggtgatgtactctggatctagtggatcatcatggggtcatggtcacatgaaacttcctcatcagatgaacttctctgaggagttgcgccgtgccctagatgagcaaccagtcacaggaccgtctgtcaacacctggaactaatcaagctcaagctgcattggagtgctaagatttacaaaaaagcaatctattgccagttcgctgtgtgttgtatcttgtactgaaactgtatgcatgatgcgactataaatgctttactctaacttgcaactcctttggtttataacagaaacggcaatcctgcccatttgtaaccttatggatggaaagccagcctgctgtatcatgtggagtactttagcatgcagaagtgcagaaccaatgctatatatatatatccctcttcttaagggtgaacttttgcagttttgtcagatttgttgcttcgaaagcatttttttgagtaaccttatttatttaagtgaagaatgcaatttgatgtaacatgacaaaaggctcgaatattggcttaagtgaacagatgtatgataaatacacaagacacatctattcatcactg

SEQ ID NO: 3699 - DNA, 1163 bp, Oryza sativa
  ref <308>: DATABASE ACCESSION NUMBER: AK104497
  ref <309>: DATABASE ENTRY DATE: 2002-08-28
gtgctcagtttcactcttatcagtgaattagatcatatacttgtgtccttgacagctcgttaattagcatggctaggtctctcgctgctctccttctccttctggtcgcagccgcgggagccagccatgccgcgtcgccggcggagatgtactggaagatcgcgctcccgacctcgccgatgcccggcgccattcgcgacctcatcagcccggcgagctcagcggcctcagcttcgaaggataaggaggatacggtgggctccgtgttcttcctcgagaaggacctcttcccgggctccaagatgacgctccacttcacccgcgccaccgccggcgccgcgctgctccctcgcggccgcgccgactccgtcccgttcgcctccgaaaagctcccggagatcctctcccagctctccatccccgccggctcgccgaccgccgacgccatgcggtccacgctcgccgtgtgcgaggccgcgcggatcgccagcgagacggcgcccaagcacaagcactactgcgccacgtcgctcgagtccatggtcgagctcgtcgcctccagcctcggcacccgcgacgtccacgccgtgtccacggaggtggtcaacagggccgggccgacgccgaggcaggcgtacagggtggaggccgtgaggcccgtgccggtgcccgggggcgacatggtggcatgccacaggatgccctacgcgtacgccgtgttcggggtgcacgggatcaagggcgcggcgtacacggtgacgctggccggcgccgacgggaccatggcggaggcggtggcggcgtgccacggggacgtggacgggcacggcgtggcggtggcggaggcgtacaagaggctcggcgtggcgcccgggaaggtggcagtctgccacttcctgcctcaggacgacatgctctgggtgcgcaactgaatgaagcagctacctgcgcgccatccatggctaattaagctccttcctatattttcgatctacctgccggctggctatcatgttatcatcgcgtgtgtgtgcgcgccgatccgacatgcccacactacacgtcgacactacacgtgttttattttgttaattaataagtctggacaaccaggtcatcttgtacggcacttctcccctctgtcccgaaataaaccaacttat

SEQ ID NO: 3700 - DNA, 1709 bp, Oryza sativa
  ref <308>: DATABASE ACCESSION NUMBER: AK061316
  ref <309>: DATABASE ENTRY DATE: 2001-12-06
aaaccggaccgctcctcccaccagaagcgtcgtcgtctccgcctctggaggcagcgacgccggccggttgccgccgccgcctacccttcctcactccacctctccgactaatcgccgccgccttcgccgccgccggaggcctagaatggcgtccacatccgccgcggagcctggcgtccggttctccgaccgagcggcgaggaggtcgtcgctgggcctgaggtcgatggtgctcctgatgcacgtggtcttcgtcggcgccgtcttcctgctcgatccgaccctcgacaggcgaatccgcgaggagccctggtacataggggcatatggagcgcttgttttgatcgccttagtgcagtatttctacacagctggttcatctcctgggtatgttctcgatgcaatgaaagctggttcgacgatgcacgcaacctacatcaatactgccactctttcgaaataatcaagtccaaacaatggtagcttaaattcccctttgagcctccctcaacagcagaaacttaatccgaccacttctacatcaacatggttgcagcgagttgcagaattatacccccctgggtcaagtagcagggattggacttgcacttactgcagggttattcagccacctcgtactaggcattgccatgactgtgacaaatgtgtccttcagtttgatcatcactgtgtttggcttggaacatgcattgggaaaaagaaccactgcagattctggtggtacatatttgaagaaacaatcctgagtatctggacagttgctctctacattgactcgatacgtttagatgttgacaaggcctggtggaaggattttattggcgtaatcctgttggctgtgttgatctttattctcatattcttgctactattgttgatctttcatacttacatcgctcttacaaatcaaacaacctacgaagttgcccgaaggaagcggatattctacatgaggggtatacccgacaaagttcatccattcagtaaaggcatctgtaggaacatctacgtcttctgcttctctagacagaagggatatgatctagaagaggtgcccccacttgaagagttggaagccagagctgctccctacacatgccgcgatataatctgctgccggtgctgttgatcttgtacatgtcaatatatgttactaccatagcattctttttttcacatgtggaagcatatgcttagcctgtgtagtgtaattcctctgccttctttttttttagcctgtggaagcatgcatgcctttttcgtgagctgcacctatgtggttgttcatgtaaagagagtcaggcctggttgttcatgtaaagtacatgaccgcatgtacattttcaagcacaagacgtgtgtctgtgtgggcttagatccaatcgttgtggtagattagttccaccatttttctttttgaaatcagggatggttgattactgataagttggttttgagcacacaagctttagtaggaaaccgttactacttgtgtcgaaaatttgtattctgagttcgagttgtggcagtaaatgttacacgtggtatttgtcggacgtattgtattgtcaatgtcaggcacgtacgcaatgctgaagacaagtgctgcgtgttctcggtggtttttttgtatcagatttacctcgttggcttgccataatgttgtttgctattgctgaggctgcgtt

SEQ ID NO: 3701 - DNA, 1076 bp, Oryza sativa
  ref <308>: DATABASE ACCESSION NUMBER: AK061317
  ref <309>: DATABASE ENTRY DATE: 2001-12-06
ctcgactcgaccagtgactcgtccgcctccacacattacagctaccacgctgccgccgccaccgctgtcgccgacgaggaggagatgtggcgggcgttcgggagcttgtgctctcctcctcctccagtcttccatccacaggcctctcccgccaccgccgccatctccacttcgagccttaactagactctaccacctccgcgccccctctcccgcttcctctcctcctccccggagcccctgccggatgctgccggcggcgctgcttccacatcttctgatcccaccgatgatggggaggatagcctcgcctctgatcccaccgaagccggggaggataacctggcctcgctctgggaggacgccggggacgccgatgacatcttcgccgccgatgctatggtcgacgaggtgctggtcgaacgcgtctgcgctgttgtggagtccacccccgaggatcagatccccttcgccctcgctttcaaggtcgtggacttacaacgagccactcctcgccgccattctcgtgtccaccgccaagagctgctccgcacttgcagacttgagaagaatcaatttagatggtttgagatggtgtgtatttgacgcaaagggccaggtccttggacggttggcgtcccaaatagctgttgtgcttcagggcaaggacaagccaacttatgcaccacatgtggaaaacagagacatgtgcgttgtgcttaatggataagataactgaaatgtaactgtaattattgttgtacacatctttactatggtgcttctatgtcttaattcagttaagttttcacactagaagggttagatatacacttatgttagcaaacacttggatcttttcgtgaactataaggatggttgtgacttgcgaagggtcttgcttcgtatgtaccctgtatgcttttagggtctggtttctgcagtgcctttgctgaactagtgatctgcttctatatcttacaattcctctatgtggtggggattttcatgagaactgtttatattgaatatcaagttcaacataccataaaatccaaccatttcttcttggtttc

SEQ ID NO: 3702 - DNA, 1105 bp, Oryza sativa
  ref <308>: DATABASE ACCESSION NUMBER: AK104498
  ref <309>: DATABASE ENTRY DATE: 2002-08-28
actgcctgagaagccgagaccactacaagcagcaactagcttagctagctagctactggtgatcaggcacgagctagccggccatggcgaggcgtcgccatgcttgctttcttctcctgctgcctctgctggtgctgcagcttcttcttgctgggggaagcttggttgatgatcttcctgctgcaactcatcaggtgccgaggttagtagggccacagcgcaagttacagcagcttccaaacccaaggccacagccgcaaccattgccccagccaaacccaaatccacagccacaaccactcccacagccacagccacagccacaaccacaaccacaacctctgccacaaccgcagccgcaaccacagcctttaccgctaccaggcccacaaccattaccgcaacccggcccgcagccgaacccaaacccccaaccgttaccacagccaaacccaaatccccagcctttacctcagccagacccgaacgctccgccgttgcctctgccgcagcctaacccaaacaacccgcaacctctgccgcagccagaccctaacgcgccatcactacctctgccgcagccagacccaaatgcgccaccactgcctctgccacaacctgatccgaacgcgccaccacaacctttgccgcaaccagacccaaacaaccctcaacctttaccgcaacctgaccctaacgcaccaccacagcctttgccgcaaccagaccctaactcgccgccacagcctttgccgcaaccagacccgaacacgcctcctggccaacaaattaatgcaaagatatcatcacagccggattctattggtggagccagaactttatatccatacggtgtaatatacaatctcatgccattgtttagcctattcttctatatgttttgatagtaaggagaggcttattgttgtaaataagcgtgctgagttaccatttttagattgcatgtatatacacattgccatgttgataggtttgctatgttatcttttttttttgtttgagatggaggtttgctatgtactgcactggcttgtaccctgatatttttgtgtatgttaatacacacctatttacctctttgtgt

SEQ ID NO: 3703 - DNA, 1263 bp, Oryza sativa
  ref <308>: DATABASE ACCESSION NUMBER: AK061318
  ref <309>: DATABASE ENTRY DATE: 2001-12-06
gggtccgcgaatcgtggtttcccactagcaagcgcaagcgcaggcgcaaacgcaaacgccgccgccggtatgccggagcacgggtcgaagcccgacatctccttcgccggccgcttcaccgcaagcgccatcgctgcatgcttcgctgaggtgtgcacgatccccctggatacggccaaggtgaggcttcagctgcagaagaacgtggccgccgatgccgcccccaagtaccgcggcctcctcggcaccgccgccaccatcgcgcgcgaggaaggcgccgccgctctctggaagggcatcgtcccgggactccaccgccagtgcatctacggcggcctccgcatcggcctctacgagcccgtgaaatccttctacgttggcaaagaccatgtcggggatgtgcctctcaccaagaagatcgctgccggcttcaccactggtgccattgcgatcagtatcgccaaccccactgaccttgtcaaggttaggcttcaggcggagggcaagctggcgcccggcgccccgcgccgatatgctggggccatggatgcctatgccaagattgttaggcaggaagggtttgctgctttgtggactggcattggacccaatgttgcgcgcaatgccatcatcaatgctgccgagttggccagctatgatcaagtcaagcagactattttgaagcttcctgggttcaaagatgatgtggtcactcacctcttatctggtctgggcgcgggcttcttcgctgtctgtgttggttctccagtggatgtggtcaagtcaagaatgatgggtgactcggcctacacaagtactattgattgtttcgtgaagacgctgaagaatgatggacctctggcattttacaaaggcttcctcccaaactttgctagactgggatcatggaatgtgataatgttcttgacactggagcaggtccagaagctgtttgtgaggaaacctggtagttgaagattataacacatggtttttgccatcgtggaaaaagaggatgcgtacattttttttttcttaatcttctcttacacaagaagcaacggttaacatcctccctgagaattggggaacaaggaagaaacttgaatgctcaattgtgagaacgctgttgagtaataaatcttagcgggcctttgcatgacccctgacagaattggtgtagtgccttttttttgtggagaacctctcaatttgtggaaaatgatgaaagatgagctgcagaattgagctcggttgagactt

SEQ ID NO: 3704 - DNA, 1140 bp, Oryza sativa
  ref <308>: DATABASE ACCESSION NUMBER: AK104499
  ref <309>: DATABASE ENTRY DATE: 2002-08-28
ggccaaaacgtacccttgtgactacacccgcttcgcttcctcccctctctaagccggggaagctaagccatggcgtccgtcaccgcccgcaccccggtcgcagccctccgctcgtcggcgtcgctcaagtctaccttcctagggcaatcctccacccgcctcgcccgcgcaccgactacgaggcgtaatgttcgggcggaggccaagggagagtggctccccggcctcccttctcccacctacctcaacggcagcttgccaggcgataacgggttcgacccgttgggtctggcggaggacccggagaacctgcggtggttcgtgcaggcggagctggtgaacgggcggtgggcgatgctgggggtggccgggatgctgctgcctgaggtgctgacgaagatcgggttgatcgacgcgccgcagtggtacgacgccggcaaggccacctacttcgcgtcgtcgtcgacgctgttcgtcatcgagttcatcctgttccactacgtggagatccggcggtggcaggacatcaagaaccctggctgcgtcaaccaggaccccatcttcaagagctacagcctcccgccgcacgagtgcggctaccccggcagcgtcttcaaccccctcaacttcgagcccaccctcgaggccaaggagaaggagctcgccaacgggaggctggcgatgctggcgttcttggggttcctggtgcagcacaacgtgacgcagaaggggcccttcgacaacctgctgcagcacctgtctgacccgtggcacaacaccatcatccagacgctgtcaggctgagcgtgtgatcgatttcatcagggccagggcatctcaaggagcttgatgagttcaggctggtgaaaccgatgattgggcgatggaagatgttctcttcttgtttcttctttttttttttgtggagtatgcatgtataagatgttaatgaattggggggaggagagagagagagagatggatgtgatgagattcagacttactgtgtgtgttgtggtaattgtttcctgcatgcatggatctggatgcatgggtgagggggtgagttgagtggtgaatttctgatgtacagtactacagggggataaactatctcatggtagcagcagtgttctagct

SEQ ID NO: 3705 - DNA, 1073 bp, Oryza sativa; identical to SEQ ID NO: 3114
  ref <308>: DATABASE ACCESSION NUMBER: AK104500
  ref <309>: DATABASE ENTRY DATE: 2002-08-28

SEQ ID NO: 3706 - DNA, 1180 bp, Oryza sativa
  ref <308>: DATABASE ACCESSION NUMBER: AK104501
  ref <309>: DATABASE ENTRY DATE: 2002-08-28
ctctcgaggcccaggtgttcgtccgtgtcctcttctccactccacacacgcacacgcacaagccaagcagcaagcagcggcgccgatgagaggaggagtagctgggcccaccgccggcgagccgccggggacggaggcggaggcggaggaggtggaggagagctcagctggggacgacgaggagctggagctcgggctcagccttggctccaagaaacagcagcagcagcagcatgcgccgtgccgaatcctgacggccagggacctgcagccggcggcggcgctgtcaccggactcctccgtgtcgtcgtcatcccccgcggcggcggcggcggcgggggggaagagggctgagggccccaccgccaccacctcgcctgggacggttgcttccggccatccacacagcagctttggagtggtgggatggccaccgatccgacagttcaggatgaacagcctgttcaatcaggctaaagaaaacacatctgaaaccgacaccaagaagaccgccaccaatgaatctgatgtgcagaaggacaaggaggagggcgaaaagaaaggacgggttgctggatgggtgaaggtgaacatggatggagaggtcattggaaggaaggtggatctcaatgcgcaccgctcatacaagacccttgcattagcccttgaactcatgttcacgaagccgtccattggcctttgcgcttctcataatacaaactcgctgaaactactagacaactctgccgaataccagctcacctacgaggacagggatggtgactggatgctcgttggagatgttccttgggaaatgtttgtcagctctgtgaagaggttgaggatcatgaggacatcagatgcgaatggtcttggtcagcgataccagggaattcacagaaccattgcttcaacaagaggcagatcctgagagcgtgtgacaaggaaaagagctataccgctggtgaagcttggagcgtgcttgatggttaattacttgtccagttaaaatagcagaaggctagtaagaaagagccacagggctcacccggttctgttatatttttgcctttgtggtgcctgtttttgtttgcactgtcgatctgcaagagcatatggtcgccttgctctgcttgcatgtacaagtatgtctttctagtagtttttatggtgtttgatg

SEQ ID NO: 3707 - DNA, 1325 bp, Oryza sativa
  ref <308>: DATABASE ACCESSION NUMBER: AK061319
  ref <309>: DATABASE ENTRY DATE: 2001-12-06
attccgcaatccaccagcgactccacaagcccccaagctcctctctggatcaagtcaaccagccactcatcaggatgaacctcaccgccattaccgctctcctcattgccgcgcttgccgccgccgatgccgccaccattccacgtgagcaccatgctcgcttcctcgccgagcaggcgaccctcgcggaggagctcgctgcttggaaggacagcccggccgggcgctacgccaaggagaacaacctgtacaaggaggcctcgagcagccacaccgataccgaatcggccagcgtggagtctaacgaccatctcacccgcttcttcctctccaaggtgacggcggagaaggctcagcgtgagaacccggaagcgacgtatggcttgagctcgccattctcgctcatgactgaagaggaatttgccaagtacgtgagcaagacgcagaccctagggaaggccagtttcttccgcggactcgcagaagaagctacggaagttgttgaagaggttgaggtcgcccaggccacgacagttgactggaccacgtccggctgtgtcgccggtgtcaagaaccagggccagtgcggctcgtgctgggcgttctcggccattggatcgctcgagtcggcgtactgcctcaagtacggttcgctcacgctgctctcggagcaacaagtgaccaactgtgacccgcagtcgtcgggctgcgacggcggttggccgtcgtgggcgctctcgtacatcaagagcaacggcggtgtctgcacgtccgcgagctccccatacacgcttggttcgtctggcgtcacgggctcatgcagcacgtcgtgcaccaagaaggcgatcaagatcacgtcggtcgctagcgtgaccgccacggatgcgggctttgccacggcaatcaccaagcagcccgtcgcggtcgcggtcgcggccggcaacccgtcgtggaagcagtacaccggtggtgtcgtgtcgtcgtgctcgacgtcggcgctggaccatgccgtgctggccgtgggcttcgacagcaactcgttccgcttcaagaaccagtggggcacgtcgtggggcgctggtggctacatccagctcaagcgtacgtcgggatcgtcgggcacgtgcggcgtcatcaaccgcaacgccgtctacccggtcgtcgcctaagcagccatctcagaacgagggatggggccacagctcgaagtcctgtcatgaccccacagctttccccttccctgtagaagtggtgaagtgttagtattgatacttagcagtgcgttttaaagcccacaaatgatcgatgtgttttttccaactttg

SEQ ID NO: 3708 - DNA, 1036 bp, Oryza sativa
  ref <308>: DATABASE ACCESSION NUMBER: AK061320
  ref <309>: DATABASE ENTRY DATE: 2001-12-06
aaaagattatgtgatggagtggattagatcagagatcaagaaggagcgccccaagaatgactggattgcaggggcagctattaccaatccagctgcagacaggaagaagccaaagaggagggcacgagaatggtggcgagaagaatatgctgatgagcttgcgaaaaagcagaaacgacgtgcacttgctaaatcaaagagcgagcaggtagggttgcaatggtgggagcgggatattgacgatgacttggatgcaaagggacgatccaaatggagtatgatgaagagctggagtcggagaagcaatggcagcactggcaatggcaatggcaacggcaatggcagtattaactggtgggtcaatggtgcaagaagcacccgtgattgggcaagtggggaattcgttcccaagagtagtggcgcggtgagcagcacaccgagcatgcgcggcacggtgtgctatgtggctcctgaatacggtggtggtggtcctttgtctgagagatgcgatatctatagctacggtgtcttgctactggtacttatctcaggacgccggccgttgcaagtgacggcctcacccatgtctgagtttgagaaggcaagcctcatatcgtgggcgaaacatcttgcgcgcgtgagccgcttgattgatcttgttgatccagccctacaggatgtgaaccgtgatgaggttttactctgcattacagtcgcactcctttgcatccaaaggtctccagctcgtcgaccatcaagtgaggaggtactccgaatgctgtctggcgagggagaacctccgcacctcccattggagttctcaccgtctccacctggtgggttccctttcaagtcccgaaagaaagttcggtgagtttgtttagctcttacctagatgcaaaaggtagctttaactttgtcccttaatgtatgtctcttttggttcaagttcctattttatgtattcttttactcactactgtataaagttccctagggaaaaaggtaatgccgacctgaactcaaaattgacaac

SEQ ID NO: 3709 - DNA, 1209 bp, Oryza sativa; identical to SEQ ID NO: 3127
  ref <308>: DATABASE ACCESSION NUMBER: AK104502
  ref <309>: DATABASE ENTRY DATE: 2002-08-28

SEQ ID NO: 3710 - DNA, 1322 bp, Oryza sativa
  ref <308>: DATABASE ACCESSION NUMBER: AK061321
  ref <309>: DATABASE ENTRY DATE: 2001-12-06
aaaaattcgaagtcgatcgccatctccaattctccatcgatcatctatctctcacgatcatctcgccggagctgtgtagtggtggtgaggaggagaatgatgatgaggtgtggttggtcggcggcggcggtggttgcggtggtcgtcatggttggtgtgatggtggcgtcgccggtggcgggggagctagctcgggtggagcacccgacgaaggaggacgggtcgctggcggtgctcgtcgttggcgactgggggaggaaggggcagtacaaccagacgttggttgccacccagatgggcgtgatcggggaggagttggctgccgacttcatcctctccaccggcgacaatttctacaacgatggcctcaccggcgacaacgacacggccagcttccaggagtccttcaccaacatctacaccgctgatagcctccagaagccttggtacattgttctcggcaaccatgactacactggagatgccctcgcacagcagagccccgccattcgcgccgtcgatagccgttggacctccattaacaagtccttcatcgtcgactcagatatcgcggagttcttcttggtggacacggtgccattcgtgcagaagtattggaacgagagcaagttcgactggagacaggtcgcccctcgtgacacctacctctccactctactcacagatttaggagacgcgatgtcgcagtcgaatgcgacgtggaagatcgtggttggacaccacaccatcagcagcggctgcgagcacggcaacaccaccgacctcgtcgccatgctcctccctgtcctcaagacctatggggctgacatgtacatcaacggccatgatcattgtttgcagcgcatcaccagcattgacagcccacttgaattcatcacgagcgggggcgggtcgagggcgtgggcggggaagtttaagcaaacctcggacaagctggagttcatctacgacgggcaagggttcctgtcgatgcagctgacgatggcggaggccagcttcgccttctatgacgtcaccggcgccgtcctgtacagctggcagctcgccaagtcaacctccaccaactagtgatcaaagtcaacacttaattattgtgttaattagctgcttatgtgtgtgaaattggaacagtcaatgtactgcttcagttatcgatatatatactgtgacaaaagatgcacggtgtataaatagtgtgtgtgtttgtatacgtaagtatgcaagaatgttgctgtttgtaattgcatcctaagttcatgggataagttataatggctatctaaatgatattcagtgtgcgt

SEQ ID NO: 3711 - DNA, 1257 bp, Oryza sativa
  ref <308>: DATABASE ACCESSION NUMBER: AK061322
  ref <309>: DATABASE ENTRY DATE: 2001-12-06
cccgccacacctcgcagttcgtagcagcgaataagcgagctccatttgattctttgattacaatggagtccaccaaggtctcggcgatgctcctgctcgccatgctcgcgctctcctcctccccgctcgccctcgcgtgcggctcgtgcggctccggcggtagcggcagtgcaccgtcgggcggcggcggcagcgcgccctcgggtggtggtggtggtatcggaggagtcgtcggaggaatcgtcgggggtgtcgctcccgtcgtcggaggaatcgtcggcaaagttcctcctgtcgtaggaggagttgtcgggggagtagctccggtcgtcggtggaatcgtcgggaaagttcctccggttgtaggaggagttgtcgggggagtagctccggtcgtcggtggaatcgtcgggaaagtccctcccgtcgtcggcggtgtcgtcggaggtgtcgccccggtcgtcggtggagtcgtcggtggcgtcgccccggtcgtcggaggtgtcgcccccgttgtcggtggcgtcgtcggaggcatcgccccggttgtcggaggaatcatcggcggcggcagcggcggcggcggctacagcccgagcccgagcccgccgaagcgacacggcgggaggaaggcgtgcccgccatcgccgacgccgacgccgtccaccccgacgccgtcgtcctcggacacgtgccccatcgacgcgctcaagctcggcgtgtgcgtggacctcctcggcaacgaggtgcacatcggcgacgcccacgtgacgtgctgcccgctggtgaaggacatcgccggcctgtccgccgccgcctgcctctgcaccgccatcaaggccaaggtgctcgacatcagcatctacatccccatcgcgctcaagctcctcgtcaactgcggctgcgacgtcccgcctggctacacctgcgcctaagccatcctcatgcacgtcacgtcccaaaccatgcacgtcacgtcccaagccatgcacgcattcattattctctctcgagtacacagtttagcttcaatcaaattaaggtcggtcgttaatttggtcaaatcggtcgggtgatgaagccactcgcttctgggatgttcaattattcagtgaacttcttttttattggatttgcttttcttgttttgcaatgttaatttgtacatgtagtggctccggaaattgtcatcaattgtactgtatgcatgtattgtaaaactatttaatttaattcccagatgtaactcttgtttgc

SEQ ID NO: 3712 - DNA, 1110 bp, Oryza sativa
  ref <308>: DATABASE ACCESSION NUMBER: AK104503
  ref <309>: DATABASE ENTRY DATE: 2002-08-28
accaacaacagtaacccaaccagagagcttgcggaagcgggggtttggtgcgggcgcgcgcgtgtgaggggggagagaaggccaggaggaggcgacgccgtcgcccgagggaggcaaaaatccgatcctcctcctgccctgctcgctcgctcgctcgcctgcgctgcgcgcacttggccccgtcccgtccgttcccgctcgccaggcatagaaagatggtgctctgggtcttcggctatggctccctgatctggaaccccggattcgacttcgatgagaagatcctgggcttcgtcaagggctacaaacgcaccttcaatcttgcttgcattgaccatcggggcacgccggagcatcctgcgaggacctgcacacttgagtccgacgaggaagccatatgctgggggatggcatactgtgtcaaaggggggcttaaaaaggagcaagaagcaatgaagtacttggaaagaagagagtgtgagtatgaccagaagatctctgtggatttctacaaggaaggagattctttgaagccagctgtgacaggtgtactagtctttgtatccactcctgatccagtaggcaacaaatactatcttgggcctgctcctttggaggacatggcaaggcaaattgctacagccaatggccccaatgggaataacagggattacctgttctcaatggagaaggcattgtccaacatatgccatgaagatgattcaatcatcgagctagctaacgaggtcaggaaggtgttgagccggccgaaggagaagatcactggctccgatagcccacaaaaatctcacgctctcgtacacctgtctgcgcttcctgagggcactgttgtggactcaagatagcaagctcggcggtggaagagatgagatctcctctgacctactcactcttgacgctggattgaacgagtttaacagtctgcttcgagctccctggcacactggggaaccagaatgtgctgattttctttcgcaaccgctgcggcaatgctgtaactttcattttgctaatactagagccgagactggtgtgctgctgtttcctttgacacactaaataataaagggattccatgagcttttcact

SEQ ID NO: 3713 - DNA, 1486 bp, Oryza sativa
  ref <308>: DATABASE ACCESSION NUMBER: AK104504
  ref <309>: DATABASE ENTRY DATE: 2002-08-28
cattcgcacgcccgcgccaccacaaaaccctagccgccgccgccgccgccgccgccgccgccatggccacccaaacccgccccctcgtctccgtcaaggccctggagggcgacatggccaccgacaacagcagcagcctcgccctcgccgaggtgttccgcgcgccgctccgccccgacgtggtccgcttcgtccacaggctgctctcctgcaacaagcgccagccctacgccgtgtcccgccgcgccggccaccagacctcggcggagtcgtggggcacggggcgcgccgtgtcgcgtatcccccgcgtccccggcggcgggacgcaccgcgccgggcagggagccttcggcaacatgtgccgcggcgggcgcatgttcgcgccgaccaagacatggcgcaagtggcaccgccgcgtcaacgtccacctccgccgcgtcgccgtcgcctccgccctcgccgccacctccgtcccgtccctcgtcctcgcccgcggccaccgcatcgagaccgtccccgagctccccctcgtcatttccgactccgccgagtccatcgagaagacctcccaggccatcaagatcctgaagcaggtcggcgcctacgccgacgccgagaaggccaaggactccgtcggcatccgccccggcaagggtaagatgcgcaaccgccgctacatcaaccgcaagggccccctcatcgtctacggcaccgagggatccaagatcgtcaaggccttccgcaacctccccggcgtggatgtcgccaacgtcgagcgcctcaacctgctcgacctcgcacccggtggtcacctcgggcgcttcgtgatctggaccgagagcgccttcaagaagcttgaggaggtgtatggcaccttcgaggcgccgtcgctgaagaagaaggggttcatcctgccgaggcccaagatggccaatgctgatcttggcaggatcatcaactctgatgaggtgcagtctgtggtgaagccgctcaacaaggaggtcaagcgcagggagaagaggaagaacccgctcaagaatgtcgccgctgtgctcaagctcaacccctacttcggcactgcacgcaagatggccacccttgctgaggctgcccgcatcaaggccaggaaggagaagcttgactccaagaggaccaagcttagcccggaggaggctgctaaggttaaggctgcaggaaaggcatggtacaagaccatgatctcagacagtgactatgctgagttcgacaacttctcgaagtggctcggagtgacgcagtgagcgttgtcttgttttaagttttgagtagcagcgttaccggatcttatctcaaggatttatcaatctgtttttacctgaacatctccataagaagttatctgtgggattttgagactagtttctctgttttgttaatgtgctgtcgtgagaacatagagtatgtggtttggaccagctatctaaattatgtatgcacttccatgttc

SEQ ID NO: 3714 - DNA, 1040 bp, Oryza sativa
  ref <308>: DATABASE ACCESSION NUMBER: AK104505
  ref <309>: DATABASE ENTRY DATE: 2002-08-28
ctggtctcttctcgctcgcgcgactgaaaggagcgcctcgactcgcatctcgccgccgcgcagctaagctagggttttccgccaccgccgatctcgcccccgcccccggccagccatggacgcctctctcatgggcgccccctccgccgcagcgggagacaatcccacctccggggagcaccggatggggaccaccatcgtcggcgtctgctacgacggcggcgtcgtcctcgccgccgattccagaaccagcaccggaatgtatgtggcaaaccgtgcgtcggacaagattactcagctaactgacaatgtgtacatctgccgctctggatctgctgctgatacacaagtaatttccgattatgtacgctattttctccaccaacacacaattcagcttgggcagccagctaccgtgaaagttgcagccaacttaattaggttgttggcttatcagaacaagaacatgttgcaagctggcatgattgttggtggatgggataaatatgagggaggccaaattttctcagtcccccttggtggaacaattctgaggcaaccatttgcaatcggaggttcaggctctagttacctctatggattgcttgaccacgaatggaaggagggcatgtcccaggaagaagctgagaagtttgtggttaaggtagtttcccttgctatagcccgtgatggtgctagtggaggggttgttcgtaccgtcactataaacgcagatggtgtttcgaggaaatttcaccctggagacaaactacaactgtggcatgaagagctggagccccagaactcgttgctggacatacttgcagctgggaaccctgatccgatggtccaatgaatctgccctccagccatacacctcccttaagcaactttcttctgtatctgactttcactagatttactgaagaactggactgcagaattatgttcagctgtgcgcaattatctagtgcaagatgcttcttgtgctgtatgtaatttcttttcgttaaggaagttcaaaaatatcatttagactt

SEQ ID NO: 3715 - DNA, 989 bp, Oryza sativa
  ref <308>: DATABASE ACCESSION NUMBER: AK061323
  ref <309>: DATABASE ENTRY DATE: 2001-12-06
actagtagcgtacactaccacagctagcaatggagacctcgtgcttccttacctccaatgcctcgccggtgaagagcatggtgatgccgtcgccggccggcgtcgtgaaggccaggccgcacgtgctcttcggcggccggcgagcggcgagctcgtcggtgaccacctgctgcagctacaacggcgagggcgcggcgccggcgatcgacccggactggcggtcgttcagggcgcagctctacttcaacgagcagtacgcgaagagcgtgaacccggcggtggcggcggtgagggcgacggcgacgacgccggagccggtgaagatcggcgacaagtgggcgcacccgctagtggagccggagaaggggtgcctgctgatcgcgacggagaagctggacgggtcgcacatcttcgagcgcacggtggtcctcctcctgtccgccggcgtgctgggccccgtgggcgtgatcctgaaccggccgtcgctgatgtcgatcaaggaggcgcaggcggtgttcgcggagacggacatcgcgggggcgttctcggggcggccgctcttcttcggtggcccgctggaggagtgcttcttcctgctggggccgcgggcggcggcggcgggggacgtggtggggaggacggggctgttcgacgaagtgatgcccggggtgcactacgggacgcgggagagcgtggggtgcgcggcggagctggtgaagcgcggcgtggtcggggtgagggacttccgcttcttcgacggcttctgcgggtgggagagggagcagctgcgcgacgaggtgcgcgcgggcttgtggcgcgtggcggcgtgcagccccgccgtgctgggcctcgccaccgtcgtcaagggcggactctgggaggaggtgcagggcctcgtcggagagaggagggtgtggtgactgattacttctcaagggtgaccattatgtaattaattaattaattaatctcttaattaactcgcaagt

SEQ ID NO: 3716 - DNA, 1171 bp, Oryza sativa
  ref <308>: DATABASE ACCESSION NUMBER: AK061324
  ref <309>: DATABASE ENTRY DATE: 2001-12-06
ctctcaatctctctctctgctaggggtttatccctccgcgccgccgcccccggaagacgagagagcgccatggccggcggtcccgcggcggtgtcgttcctgaccaacatcgccaaggcggcggcggggctcggcgccgcggcctccctcctgtcggcgtcgctctacaccgtcgacggcggcgagcgcgccgtcatcttcgaccggttccgcggggtgctcccggagaccgtcggcgaggggacccacttcctcgtgccgtggctccagaagcccttcgtcttcgacatccgcacgcgcccccacaacttctcctccaactccggcaccaaggacctgcagatggtcaacctcaccctccgcctcctctcccgccccgacgtcgtgcacctccccaccatcttcacctccctcggcctcgagtacgacgacaaggtgctcccctccatcggcaacgaggtgctcaaggccgtcgtcgcgcagttcaacgccgaccagctcctcaccgagcggccccacgtctcagccctcgtccgcgacgccctcatccgccgcgcccgcgagttcaacatcatcctcgacgacgtcgccatcacccacctctcctacggcatcgagttctcgcaggccgtcgagaagaagcaggtggcgcagcaggaggccgagcgctccaagttcctcgtggccaaggctgagcaggagaggcgcgcggccatcgtgcgcgcggagggagagagtgagtccgcgcggctcatttctgaggccaccgccgccgctgggacagggctgattgagctgaggaggatcgaggcggccagggagattgctgccgagctggcccgttctcctaatgttgcatacgttcctgctggggacaatggccggatgctgctcggcctcaacgctgccgggttcggccggtgatccgtcactccaattttacccctttagttgcccaggcatccgctctgtgttacattaaactggaatgatggtatggggaattatgttatctgctacttttggtaatatttagtctggatgtctttgaacggaatgtgctaatctttgtgatccaaataagttctgggtctaagactcatttatgttttatgatttgtctgctgattaagctttatgttgctgttcaatacgcatgctagttatgctt

SEQ ID NO: 3717 - DNA, 1265 bp, Oryza sativa
  ref <308>: DATABASE ACCESSION NUMBER: AK061325
  ref <309>: DATABASE ENTRY DATE: 2001-12-06
acacacgctcgattgcatatttgcattagctctagttgtcttgctaccgatcgatcgaattcatcaatggcatccggtggcgaccagacgacgacgaagagcaggatcctggtggtcggcggcacggggtacatcggccggcatgtcgttgccgcgagcgcgcggctgggtcatcccaccaccgccctcgtcagggacctcgccccctccgaccccgccaaggcgcagctgctccacaccttccgcgacgccggcgtcaccctcctccacggcgacctccacgaccacgccagcctgctgcgcgccgtccgcgacgccgacgtcgtcatctccgcggtgcgcgcgacccaggtccccgaccagaccaggctcatcgacgccatcaaggaggccggcggcggccgcgtccggaggttcatcccctccgagttcggcatggacccggggcgcggcgccagcgcggcggtggagccggtcaggtccatgtacggcagcaaggtgggcatccggcgcgccgtggaggcggcgggcatcccgcacacgtacgtggcgtgcaactacttcgccggattcgcgctgccgtcgatcgggcagttcatgccaaaggcggcacccgtggatagcgtggtgatcctcggggaggggcacaccaaggtggtgttcgtggaggagggggacatcggcacgtacacggtgctggcggcggtggatccccgggcggagaacaagacgctgcacatacggccgccggcgaacaccatgtcgcacgacgagctggtgagcatgtgggagaagaagacggggaagaagctggagagagtgtacgtgcccgaggacgccgtgctcaccaaaatcaaagagttagagtacccgaagaacgttttggtgtcgatcgcgcacgcggcctactgtagaggggagatgagctcgccgctggatgatccgcaggacgtggaggccactcagctctacccggaaatccaatatacaaccgttgacgaatatctcaacaccctcctctaattcatttcgtcatgcatcatatcaccctaaatatgcatgcgccaataaaaacaagtcttgattttattttgttcattgctccatcttcagtcagtgtccactggtttgtctgtcatgcatggatcatttttactcttcaattcagttctgcatttcagttgagctgttcagctgagtgccttgatttgtaccacctatctgccttgttacaaatttatgtcaaagtcttcttgctctggtac

SEQ ID NO: 3718 - DNA, 1182 bp, Oryza sativa; identical to SEQ ID NO: 2212
  ref <308>: DATABASE ACCESSION NUMBER: AK104506
  ref <309>: DATABASE ENTRY DATE: 2002-08-28

SEQ ID NO: 3719 - DNA, 938 bp, Oryza sativa
  ref <308>: DATABASE ACCESSION NUMBER: AK104507
  ref <309>: DATABASE ENTRY DATE: 2002-08-28
atgcaaattaaccatatggcaactgcttcgttgagcctcctcctctgcctcgccgcggcggccggcgccgccgccgcggctgttccgccgcgcttgcagtgctttgagcacccgccggacatgaaggccggcggcggcgaggccggcgtggtcgtccacgacctggcgggctacgaggcctacgtcaccggcgccgcccactccggccgggccatcgtcctcgcctccgacgtctacggtttccaagcgccgttactgaggcaaatagctgataaagttggtgatgccggatattacgtcgtggtacctgatttgtttcatggagatccagcaaccacaactgtgaactttaccgaatggctcgagtctcactctccggtgaaagaagctgaaaaagctaaatcaatctttgcttttctaagaaacgaagggaaatcacttgttggagttggaggatattgttggggtggaaagtttgctgtggaggtagcgaaaaccaatgaggtagaagcggttgtcatctctcatccttacgcagtgactgctgatgatatgaaagaggttaaatggcccatcgagatccttggaggccagaatgacacagttacaccaccaagattagtctaccagtatgtgcatgccttgcgtcaaagaaacgatattgatttctacgccaagatttttccaggagtttcccatggatttgccggtcgatataacaccagcgacccgtttgctctcgaaaccgggaaacaagctctcgccttaatgctggactggtttcagaaacacttgaagtgatgaaacttaataaatacatgaaagaacatgcgactgtttattcagaataaattaccggtgtccgtgtacaaatttgcatgaacagccatgtatgcaggctgaatacaatgagtgtctgcaatctgaatttggttgct

SEQ ID NO: 3720 - DNA, 1270 bp, Oryza sativa; identical to SEQ ID NO: 3250
  ref <308>: DATABASE ACCESSION NUMBER: AK104508
  ref <309>: DATABASE ENTRY DATE: 2002-08-28

SEQ ID NO: 3721 - DNA, 1069 bp, Oryza sativa; identical to SEQ ID NO: 2190
  ref <308>: DATABASE ACCESSION NUMBER: AK104509
  ref <309>: DATABASE ENTRY DATE: 2002-08-28

SEQ ID NO: 3722 - DNA, 1182 bp, Oryza sativa
  ref <308>: DATABASE ACCESSION NUMBER: AK104510
  ref <309>: DATABASE ENTRY DATE: 2002-08-28
gtgctcagtttcactcttatcagtgaattagatcatatacttgtgtccttgacagctcgttaattagcatggctaggtctctcgctgctctccttctccttctggtcgcagccgcgggagccagccatgccgcgtcgccggcggagatgtactggaagatcgcgctcccgacctcgccgatgcccggcgccattcgcgacctcatcagcccggcgagctcagcggcctcagcttcgaaggataaggaggatacggtgggctccgtgttcttcctcgagaaggacctcttcccgggctccaagatgacgctccacttcacccgcgccaccgccggcgccgcgctgctccctcgcggccgcgccgactccgtcccgttcgcctccgaaaagctcccggagatcctctcccagctctccatccccgccggctcgccgaccgccgacgccatgcggtccacgctcgccgtgtgcgaggccgcgcggatcgccagcgagacggcgcccaagcacaagcactactgcgccacgtcgctcgagtccatggtcgagctcgtcgcctccagcctcggcacccgcgacgtccacgccgtgtccacggaggtggtcaacagggccgggccgacgccgaggcaggcgtacagggtggaggccgtgaggcccgtgccggtgcccgggggcgacatggtggcatgccacaggatgccctacgcgtacgccgtgttcggggtgtacgggatcaagggcgcggcgtacacggtgacgctggccggcgccgacgggaccatggcggaggcggtggcggcgtgccacggggacgtggacgggcacggcgtggcggtggcggaggcgtacaagaggctcggcgtggcgcccgggaaggtggcagtctgccacttcctgcctcaggacgacatgctctgggtgcgcaactgaatgaagcagctacctgcgcgccatccatggctaattaagctccttcctatattttcgatctacctgccggctggctatcatgttatcatcgcgtgtgtgtgcgcgccgatccgacatgcccacactacacgtcgacactacacgtgttttattttgttaattaataagtctggacaaccaggtcatcttgtacggcacttctcccctctgtcccgaaataaaccaacttataaagattgaagtttgtcgc

SEQ ID NO: 3723 - DNA, 1270 bp, Oryza sativa
  ref <308>: DATABASE ACCESSION NUMBER: AK061326
  ref <309>: DATABASE ENTRY DATE: 2001-12-06
ctatgaagaagaagtaaggttgttaaagcaaaagcatataaagcagtatgaacacaagtttgataagtcagtagtccatatttcagaagcatggcttgatgagcgtatgcagatgcaaaatgctgatcccaaggcaactttggcagaaagaatctcaatcaccgagaggcttagcagtgaaatccatagttttcttaataccaggaggtcaagtaaacccaaggatgataaattatacatcagcaatgaaaagcaagatgcaagcttgtgccggcaatcccttgagtccgttcatttgcatggagccactagtgctcctcggttagctgaagatgacaatgacaattctgttgcaagcgacttgcattgctttgaactgagcatgcatggtcacaccattcagaataatgaccttataggaactcggcagagggtcacaagctgcatgtactcaccaatgagaaggcttgaattttccaatggcatacccgttgaaggttcaagaatctcaaccatgtcaccttgttcaatgaaagacaaggcaaggcctaatggcatcagagaacaacttaatgcttcaacaccagaaattagcccatgcaacgatgccaaaaatgctccaagatgtgcgcaggatgaaactgtcatgactcaagtctctcaaagattgcatgatgacctgttgaagatcaaatcagaggctcctcagcatgcgtatctcgggcaaaaatccaatgatcatcactccagggcaggtcaattccgtgatcaatgtaccacctcaggaaatgtatacgatctttgcagcccagctcgtcagctcaatcagcgttcatcgttggatcatgagataaccgaggcttcaccgacgcatccgttagaggggaagagcacaaccctgaaagcaaaactactgcaggcaaggctggaggggcagcacgcccggatgagagcatcagggtattccctaaccagcacaagaaggaaatgagaagtgagctgatacactgagttctgattgtgtctgtttcttgcaagatcgtgttgcaattttaagagatctgacttctagctatggcacatatcccttgcaaccttctaggcgttcatgtaactatctcattgcagaatatgtgaattctagcggcatcctttttcttgttgtagattatatattttatctgtggactgtcagagatagattctggtaatcgcatattgtaatttttgtacagtatgaacgtctagctattgctttttttgccatcgt

SEQ ID NO: 3724 - DNA, 1130 bp, Oryza sativa
  ref <308>: DATABASE ACCESSION NUMBER: AK104511
  ref <309>: DATABASE ENTRY DATE: 2002-08-28
atctccattctcgtcgtctcctcagctgcttgcgccaagacgagtcgcggctcaacagggggaggggcggcgatctccatccatccggcgagcagagcaggggaggggaggggatcctggaaaatgctaaaccttattaagataaagggtcaaaagaaggaagatgcagccaatgcaaatggaaagcctcctgccaaaaagcaaagtccaggggagttgcgtcttcacaaagatattgctgaacttaaccttcctaagtcgactagaatttcttttcctaatggcaaggatgatttgatgaactttgaagttactattcgacctgatgagggatactatttaggtggtaaatttatttttactttccaagttcctcctgcctatcctcatgaaccacccaaagtcaagtgcaagactaaggtctatcatcccaatattgacttggagggaaatgtctgccttaacattctgcgtgaagattggaagcctgtcctgaatgtcaacacgattgtatatggcttgaatcttcttttctcacaacctaatgatgaggaccctctaaatcatgaggcggcagcagttcttcgagacaacccagaaaagtttgagagaaatgtccagagggcaatggctggaggctatgttggtgaaacccacttccctagatgtatgtaaggcctgaagatggtgatcggtacctgacttatctgctgctgccatttctcctaccaatgcactatggtaaaagcagtatatgtaaccaagaaggaacttctctgttatgtaacaacagcagttgctagaaagtaagttagtgaggcaattgaactcacgttcataacccgcaatccgaagactctgggttaacctgttgtggcaaatgttctcttttggccctcgcgcgcatctcagtcattctgattcataccagtttctgagatgcttttgtataatgccagctagagaaaatgctgaacagtatgtgtgtgctgcacttactgcctgttatgacttatggctaccaggaagtaagaacaagttcactaacattgcttaatgtaacatgctaccttgggtagttgtgttgttcttttttccaagctctgtaactggaaaagtcttctccacct

SEQ ID NO: 3725 - DNA, 1085 bp, Oryza sativa
  ref <308>: DATABASE ACCESSION NUMBER: AK104512
  ref <309>: DATABASE ENTRY DATE: 2002-08-28
gtacgccaaggccaagacgacgacgacttgggaattcatttgcatcggcaacgacgatgaagctcgccgtggtcgccgtcgcggcgctcctcctcgccgccggcgtcgcctccgccgatgaattcgacttcttctacctcgtccagcagtggcctggctcgttctgcgacacgcaggctgggtgctgcttcccggacaccggcaagccggcggcggagttcggcatccacggcctgtggcccaactacgccaagtgccgtcccgccgccggcgccgtcgccgacgacgacgacggcgtggtggagatggtggtcgacggcggcgccgccgtcgagcgccaccaccggcggcggcagaagtgctggccggagtactgcgacgacggcaacaagctgcggccgtgggagatcaaggacctcgtggcggagctcgatgcgaactggccgacgctgtcgtgcaagggcggcaagagcttcgagttctggagctacgagtggaagaagcacggcacctgctcgggcatgggccagcacggctacttcgcggcggcgctggagctcaagaagcggcacgacctcgccgccgtcctcgccggcgccggcatcgtcccctccgacgacgagagctactccctcggcagcatccgcgacgccatcgccgccgccacgggcgcggtgcccaacctcgagtgcaaccgcgacgccgccggcgagacgcagctgttccaggtgtaccagtgcgtcgaccgctccgggaagaagctcgtcgactgccaactcccgatgcagggcaagtgccgcgacaaggtcaagctgcccacgttctagctagctagctcccccgtcgccatcgtcgccggcgagagctcgccgtcgccggcatggcggcgcgccggcggctggctggtcttggatgtctgatggatgtcacgtgcgtttgcgttgttgcgtggtgcggttttcagattacgagagattcgaggatttgtccagttggattgctacatgtgtacgttacatttggcactatctgctgacttgctgaacagttgaataataacatatcaagttttaccagttgagatg

SEQ ID NO: 3726 - DNA, 1584 bp, Oryza sativa
  ref <308>: DATABASE ACCESSION NUMBER: AK061327
  ref <309>: DATABASE ENTRY DATE: 2001-12-06
accaacaagcaaaagatcaagagaacgtacagttcaccaatggagatcacgagcagcgcgatgctgaagccggcgccgacgccgacgccgcacccgctcgccggcgagaaggttcccctcaccgcctttgaccgcgcggccttcgacgtcttcgtccccatggtgttcgcctaccgcgcgccggcgccgtccagcgaggcggtcaaggaaggcctccggatggccgtcgccgcgtaccctctcgccgctggccgcctcgccgtcgacgtcgccgccgacggccaggggcgccggcgccgtcgtcgtgtcctgcacgtcaacgacgagggcgcgctggtcctcgatgccaccgtcgaggccgaccttgacgccgtgctcgccgccaacgtcgccaccgacctgtaccctgcaccaccggagcatagcttcggggcggcggttctgcaggtacagctcacccgcttcaggtgcagcggcctcgtcgtcggcctcatcgtccaccaccatgtcttcgacggacactccacgagcgccttctgcaccacgtgggcgagggcggtgcgcgacggcgaggcattcagcgttccgtctccatgcctcgaccgcgccatcaccagcgtgccacgcagcccgccggcgccggtgttcgaccaccggtcaatcgagttcaaggtaggtaataaatccagcgattcgtctggcgccgccgccgccgccgtggagaagatcacaaacatcggcgtgcgcttcacggccaagttcgtcgccgagctcaaggcccgcgtcggcggccggtgcagcacgttcgagtgcgttctcgcgcacgcgtggaagaagatgacggcggcgcgcggcctgaagccggaggagttcacgcgggtgagggtggccgtcaactgcaggcgcagggcgaacccgccggcgccggcggacctgttcggcaacatggtgctctgggcgttcccgaggctccaggtccggcgcctcctcagcgcgagctaccgcgacgtggtcggcgccatccgcgccgccgtggcgcgcgtcgacggcgagtacatccagtcgttcgtcgactacgtcgaggtggcggacgcgcgcggcgaggagctcgccgcgacggcggcggagccgggggagacgctgtgcccggacctggaggtggacagctggctcgggttcaggttccacgagatggacctcggcaccgggccgccggccgccgtgctgtcgccggacctgcccatcgaggggctgatgatcctcgtgccggtgggcggcgacggcggcggcgtcgacctgttcgtcgcattggccgacgatcgcgcacaagttttcgagcagatctgctactcgttggaggaacatgctatcccctctcatctttaaatcataaataaactacctgggttggcccgcataattccacggctaacatccacaaaattatctatttttacatataattaatttaaaatttattaaatagtcattttgttgtattatgaatttcaaagattgaaccttattatcattgagtttttaattttatagtttttaaaagttataccggttgttacccttatt

SEQ ID NO: 3727 - DNA, 1075 bp, Oryza sativa
  ref <308>: DATABASE ACCESSION NUMBER: AK061328
  ref <309>: DATABASE ENTRY DATE: 2001-12-06
acatgctaattaaacacttctattactacgtacagagcagggttacgtaggcagatactagaccacgcccggttctcaatctgatcgctattaccagtggctggcactctggactaggtaccggtgcggccgcgcctcgccgctgtgccggttgtgatgctgctgctggtgcagaacacgagcgggaggagacgacatctgatgcgccgcccaccgggatgcgcacgacggcgcgctgccagtctgacggtggtacagggcatggggtaccgtcctggacggcggcggcggtgtcgttgtcgtcgtccttgggaacaggaacgcccggatcttgagcggctggaggcggtcccggctggccgcgtcgtactcctccagcaggttggcgaggtcgtcgtcgccggtgacggagacgagcgcgtccaggtcctccgtcgggagctggcaccgcaggcacaccgcctcccacccgcacatctccctcagcttccgttgcaactctggattcacaatccaaacgtacgttgtaagagctccgatcgatcgagagatcgaactaccagtctcactcaggagcaggttgcaggtgtaccgtggaaagggagggagcggtcgacggagacgacgcggttgtcgccgccgacgtagcgcaacgcgccgtcggcgtggcgagggaggatcctcccgccgtagctgcagaggaacttgacgaacgtcccctcggctgcggcgtccgctgccttgacgacgcacgcgacgacgacgtcgtcgtcgagagagccgagcgacgacgtgcacgtcgaggacgatgaccaggaggaggttcccaccatggctctccttccttggacggacgaacggccggggacagctgagaatctcactggagaatcttggctagctatagctctctggccttgctgcccccatgagcgagccgcttcaagcctcgtctcgtcgacacgaacgccacatttataatgtgtggagagcgtgacggttttggagatgccaaatgactggttgaaacaaaactctctgaccggccaattttgtgaaacggcctattggactg

SEQ ID NO: 3728 - DNA, 1374 bp, Oryza sativa
  ref <308>: DATABASE ACCESSION NUMBER: AK061329
  ref <309>: DATABASE ENTRY DATE: 2001-12-06
acggcgcgcaccatttcttcccacccgctgctgcttcctcgcctttccgataagaagcttcgccgtctcctcctcctctttcccttcctccgccgctccatcaaaaaatctccacaaggcttaagcagagggagggtgagggattagaaacaaacaacccttcggagaaaatcacgagaggcttcccgagggcaaagtctccgattcattcaggtccgactcgatcggcgatccgacgaagctcgagcaggtgagggagacggactcggactcggagcacggaaccggtatattagggaggctgaagagggagcttgagagggggtctagccttaagctcgaacgcggggtggtggttgtaccagcagcagcagggaatcatggactcggagcactggatctcgagcctcgccgccgccaagcggttctacgcggcgcagctcggtcacgtcgacgatatggcggggattggaatggaggaggtggagatggagatggaggatgatggcgagggcatggagctggagctggagatgcagctggaggaggcgacgtggccggacgtggcctgcccctactgctacgaggaccacgacatcgcgtccctctgcgcccacctcgaggaggaccacccctacgagccccacacctcgccctgtcccatctgcttcgaaaagattacaagagatatgttaaatcatatcaccatgcaacatggttacttgttcaagagtggtcgcaggatgcgcagattcgatattcccgagagccaggcactttctttactgagccgagatctgcgggatgctcagttacaggcacttctaggaggtggtcatcgtcagcgaagaagcaacactactgccacaaacatttctgctgatcctctgctttcttcgtttggcctgggcttctcaacattggattcagaggaacgatcaaaagcaccagttcctattcctgatgatacatcaattcataaggatactcctgctcagccatgggaatcaaggatcgactcatcgctcacgagtgaggaaagggaacaaaagcggaaacaagccactgacagagcaacctttgtgcaaggcctggtgctctccactttatttgaagactgactgttcaagtagccctagtttttcttgctagatgcatgtttcctctcgctggttcccataaaagcgcaatgttccacctgatttggtgaatctgatttcgtcaacagtgagatggatgtgcttctggtgccccgttgttctttcgcttcagtaaagcgcgaagttgatttgggcatgatacacaccttaatttatgtcagctgccctgtaccattgctttttatgaattaacgggtagccacaccttgactgt

SEQ ID NO: 3729 - DNA, 1079 bp, Oryza sativa
  ref <308>: DATABASE ACCESSION NUMBER: AK061330
  ref <309>: DATABASE ENTRY DATE: 2001-12-06
ctggtctctcgctctcttcgctcgcggcggcttctccgcctccgcctccgccgccctctcctcctctcgcctcgccgccggcgccgccagccaccgcgcgggtcgggcgggccgtatcttcctttctgttccgatggcttccgcgaaggtggagaaccgcggcggcggtgggttcggttcgaagaggtcacgcaacgacgtgtctgtaagggagggggactggacttgtcctcagtgtggtaatgtcaacttcagttttagaaatgtttgcaaccgcggagcctgtggtgcaccccgtccatcaccgagtctaagcccaagagtgccacctcctcctgctgctggatatgatcggccacatcttggatatgatcggccacatctgttttatggtagtgctggcaccccacctcctattcctcttggatctggtagctatggtgccccctatccacatcttggcttgcggtatggatatggtccaccagtaggacctcctgcttcatatggcctttttttcttcttatggtcaacctggaccaatgggcagtccgatgggaggcatgggctatggccctggacctgagctaggccgatatggttatggttttagaggatctccaatgccggtttctagcccatggtctggtggagcattagtggaaaataatgacagctctgcttcacgcaagcgtcgtggaggcccagatggaatggctgagaatgactggatctgcccaaagtgtgagaatgtcaacttttccttcagaaacagttgcaatatgaagaaatgtggagctccaaggccaagccctggatctaatgctaccccatgtcgcaaagacaaggacgctccggaagggagctggacctgcccggagtgcaacaacctgaactaccctttccgcacggcgtgcaatcggaaaggctgcggaagcagcaggccggcagcggccacggcgaactaggaccctactaactttgcgccggcgattgggggcagagagagtattgttgtatcctagctatatacaagttaatttaaactgtaaacggctcaaatatattttcttgtggcc

SEQ ID NO: 3730 - DNA, 1287 bp, Oryza sativa
  ref <308>: DATABASE ACCESSION NUMBER: AK061331
  ref <309>: DATABASE ENTRY DATE: 2001-12-06
cttcttcttcttccccacccggccaaggccaaattgaggcctcccaccacggcggcgaagcgcggtacactcttcttctgcagcctcagcaccgatggtccgtcgtcgacgatgaccgtctccatcactggcgccaccggtttcgttggccgcagattggtccaaaagcttctctccgaagatcacaaggtttgcgtcttaacgcggtccgccagcaaggccacatcagtttttccgggtaagaacagcttccacatttccaggaattacaatagccgagcagggagactgggataagtgcatccaaggctccactgctgttgttaacttggcaggcatgcccataagcacaaggtggtcacctgagattaagaaggaaatcaaggaaagccgaatcaacgttacatcaaaagtggtgaattacataaataatgccagtggtgatgctcggccctcagttttcgtgagcgcaacagccattggcttctatggtaccagtgagatcagtagcttcgatgagtcaagtccgtcaggcaatgactatctagcagaggtaagagtaagatggacatcgataccatgaatgaatgcatgatcgatgtgtgaacctgtcaggcaatgactaatctttgcattgcatttacaggtgtgtcgagagtgggaggccagggcatgccaagtaaaccaagaggatgttaggcttgtgcttcttcggattggggttgttctcggcaaggacggcggcgctctagccaagatgattcccctttttatgatgtttgccggcggccccctggggacgggacggcaatggttttcctggattcaccaggacgacctggtggacctcatctacgagtccctcaagaacccatcatataaaggcgtgataaacggaaccgcacccaacccggttcggctgtcggagatgtgcgagcggctggggcgagtcgtcggccgcccctcctggctgccggtgccagaaatcgccctcaaagcggtgctcggagaaggtgcatcagtggtcctggaagggcagaaggttcttcctgtgaaggccaagcaactgggcttctcctaccgatacccctatgtacaggatgcactccgggccattgccagggacctatgactgatcgactcagatgaatactcaaatcgatcgatccgccgtgcacgcacaacagtagatatcaaaattgaaatatattatatataccaaaagcaaactattattgttgttggcttgtattatctctgattaaactaggccatacgtttcattgg

SEQ ID NO: 3731 - DNA, 1004 bp, Oryza sativa
  ref <308>: DATABASE ACCESSION NUMBER: AK061332
  ref <309>: DATABASE ENTRY DATE: 2001-12-06
agtgctgtgcatgcatgactccgccgctaaagtcaatgggggcgattaagaaggaaattgtcatcaggctgcagagctctgagaagggccacaagaaagctatcaaggttgctgctgcagtctccggtgtggaatccgtgacgctcgccggcgaggacaagaacctgctgctggtgatcggcttcggggtggactccaacgacctcaccgagaagctgcggaggaaggtcggccacgccgaggtggtggagctgcgcaccgtcgacgccgacgagctcatgcgcgtcgccgccgccaaccagtacccgtaccgctactaccccggcgcgccgcccccggccccgtactacggcaacggcgggtaccctcctcctcaccagcgcggcggcggcggcggcggcagcggcggtggctactacacgccgatgacgatggccacgggtggctactacggcggcggcggcggcgggtacccgcagtacgggcagtcgtcgtcgtacccgcagtacgggcagtcgtcgtcgtactacccgccggcggcggcggcgacgacgaacacgcacaccgtcgtgcaccaccagtacgccaacaacgacccggacagctgcgccatcatgtagctgcaccagctagtgtacgatcgatgctgcttctgctcgcgcgcgagcatgccggtcgtcgtcgtctcgatcgtcacgatgatcggatgatcggaggacatattgcgaccgaatctagtagctgattgtcccaatcgataactggcccaaagtacgtagatataccttgaattttctgtgtgatgatgaggccgatttgattccgtgtgattactgaacaacagacaggtacgtacctgttgtctgaaactctgaagtctgaacgttatatgtgcagtagtatatgtgtagtagctgctcccggcctccaagtgtatacggtgtgcaagtgtaaattaggtgtactagggagatatatataaggtgcaagcgactttatagttc

SEQ ID NO: 3732 - DNA, 1220 bp, Oryza sativa
  ref <308>: DATABASE ACCESSION NUMBER: AK061333
  ref <309>: DATABASE ENTRY DATE: 2001-12-06
accactcgtccactcctaataacctaccactctacttctccttgcaacatcgtcgttagtcctctaacccaaggcattgacctgagcttgttgtgcgcttctgccttatctgcatcccctcccggccgagacgcgaccatctttctttcccgcttcgttagctgtctctgccgatcgatcggactggacggggagacatgaaggtgcagtgcgacgtgtgcgcggccgaggccgcctcggtcttctgctgcgccgacgaggccgcgctgtgcgacgcgtgcgaccgccgcgtccacagcgcgaacaagctcgccgggaagcaccgccgattctccctcctccaaccgttggcgtcgtcgtcgtccgcccagaagccaccgctctgcgacatctgtcaggagaagagggggttcttgttctgcaaggaggacagggcgatcctgtgccgggagtgcgacgtcacggtgcacaccacgagcgagctgacgaggcggcacggccggttcctcctcaccggcgtgcgcctctcgtcggcgccgatggactcccccgcgccgtcggaggaagaggaggaggaagcaggggaggactacagctgcagccccagcagcgtcgccggcaccgccgcggggagcgcgagcgacgggagcagcatctccgagtacctcaccaagacgctgcccggttggcacgtcgaggacttcctcgtcgacgaggccaccgccgcctcctcctcctcagacgggctatttcagggtgggctgctggctcagatcggtggggtgccggacggttacgcggcgtgggccggccgggagcagctgcacagtggcgtcgctgtcgccgccgacgagcgggccagccgcgagcggtgggtgccgcagatgaacgcggagtggggcgccggcagcaagcgacccagggcgtcgcctccctgcttgtactggtgaaaaaaaaacgtgcgcttatcagccacagccagtacgaaatgtacgatgcttgtgtaccagtgtactgaggtagtagcgttagaagattaggaatttagtagtggatgttgattttgagcttaacgcgtgtcttggatgaatccctgactcctgaatgtttggggaattaatgtgagtggtagtgtcctctttgggcggcaaagaattatacgccccttgcgaacatgtcgaactgtacggtctgccatttaatctgcacgttcacccctc

SEQ ID NO: 3733 - DNA, 1123 bp, Oryza sativa
  ref <308>: DATABASE ACCESSION NUMBER: AK104513
  ref <309>: DATABASE ENTRY DATE: 2002-08-28
gtgctcagtttcactcttatcagtgaattagatcatatacttgtgtccttgacagctcgttaattagcatggctaggtctctcgctgctctccttctccttctggtcgcagccgcgggagccagccatgccgcgtcgccggcggagatgtactggaagatcgcgctcccgacctcgccgatgcccggcgccattcgcgacctcatcagcccggcgagctcagcggcctcagcttcgaaggataaggaggatacggtgggctccgtgtttttcctcgagaaggacctcttcccggactccaagatgacgctccacttcacccgcgccaccgccggcgccgcgctgctccctcgcggccgcgccgactccgtcccgttcgcctccgaaaagctcccggagatcctctcccagctctccatccccgccggctcgccgaccgccgacgccatgcggtccacgctcgccgtgtgcgaggccgcgcggatcgccagcgagacgacgcccaagcacaagcactactgcgccacgtcgctcgagtccatggtcgagctcgtcgcctccagcctcggcacccgcgacgtccacgccgtgtccacggaggtggtcaacagggccgggccgacgccgaggcaggcgtacagggtggaggccgtgaggcccgtgccggtgcccgggggcgacatggtggcatgccacaggatgccctacgcgtacgccgtgttcggggtgcacgggatcaagggcgcggcgtacacggtgacgctggccggcgccgacgggaccatggcggaggcggtggcggcgtgccacggggacgtggacgggcacggcgtggcggtggcggaggcgtacaagaggctcggcgtggcgcccgggaaggtggcagtctgccacttcctgcctcaggacgacatgctctgggtgcgcaactgaatgaagcagctacctgcgcgccatccatggctaattaagctccttcctatattttcgatctacctgccggctggctatcatgttatcatcgcgtgtgtgtgcgcgccgatccgacatgcccacactacacgtcgacactacacgtgttttattttgttaattaataagtctggacaaccaggtcatcttgt

SEQ ID NO: 3734 - DNA, 1090 bp, Oryza sativa
  ref <308>: DATABASE ACCESSION NUMBER: AK104514
  ref <309>: DATABASE ENTRY DATE: 2002-08-28
gttgctccgtcggtcgtgtgtcccccaaaggctccaagctccgtcgttcctctcctcctccgccgccgccgccgccgaagccgacgagcagtagccggtaggcatgacgaggctcgcggcagccgcgctccggagggccaccgccgcatctgggatcccctcgtcctcctcgcgctcgtccgtgcttgctccgttcgcgcctcgcctcttctccaccgaggcgtccggagaaacccccgcggcgggcgccgccgcccaggggtcgcaggacgagcctttcttcaagccttctgacgaaggtgtggcatatggaaggttctacagtgttattcctggaggcagccgtctccctaagagcatgctcaaaactgatattatccaccaccttgataaatctgaactgtcactggacgatgtgaagattgattataacaggggatattatccagtgggcgcgttgttgaggttttcttcagtgccattatttaacacagcagtcaggcaaacacgagaaggtcgtcagtacaggcttgagatgatcagtcgtgaggagtttgatctgaagcagtcttatgatggaaaagctatactattgcaaggagtccctcgaaatgctgtaccagaggacatagaacgattcctgtgtggcaccaatgttgaacctccgccatttgaaagctttctcagacctggtgtcccagatcctatcagagtggtgctggttaaattccgctcaaggactgatgccgccaatgctttcattactaagaaccggggtttctgcctgaacaaccctgtgagcatgcgtgttcttcaatagcccgtccatttttatcgtgcttatggcaatcagctccaaaatgaaccctctcagcctttggatctgaactcctatctgcaaatgtggtagaaagtttgactttgtacgtttgcactctactgtcagtcgcttttatgttattttgtttgtgcttttagttgtgctacttcatttctctaatttcatgtgtaaactggaagttgctgttgcccccagtttacaacagaaacatcagaaggaattatccgtaataaatgttcaaaattgcac

SEQ ID NO: 3735 - DNA, 970 bp, Oryza sativa
  ref <308>: DATABASE ACCESSION NUMBER: AK061334
  ref <309>: DATABASE ENTRY DATE: 2001-12-06
aacagagaaccgattctttcccccaatctcgctgcttctctctcgagtctacaggcggcggcggctagagcacagctcctcccaccggcgagcaggagaggggtcggcggcggcgagagggctaggctggggggagagggctaggttgggcggcggcggcggtggctgatagggtggttggaggagcgaggcgatcccgtccacctcgccgcgccatccctcgctgccgccaagcagatccatgcgcgggcgctccgggccggtgtgcccacctcccacccgctcctcgccaagcacctcctcttccacctcgccgtcctccgcgcgccgccgctccgctacgccgtggcggtactctcccgcctcctcccgcacgggccactagacccgttccccctcaacaccgtgcaccgcatcgctgcgggctcgttccgcccgtgcgtcgcgctcgagctccaccgccgccgcctcgcgccgcccgacacgcacacctacccgtcgctgctccaggcttgctcgcgcctcctcgcgctccgcgaaggggagtgcctccataccgaggccgccaagaacgggttcgtccaaaactcgcccgttcatctctacggcgcgtgtggcctgttcgagagcgtgcacaaggtgttcgatgaaatgccggtgcatgggcagaacctcgtctcgtggaattcgatgctcaacagctttgcggccaacgggcgccctaacgaggttctcactgtcttccgggagatgctgggcgtcaactttgcgccagatggagtcaccatagtcagtgttctaaccgcttgtgcagagattggggcgcttgctcttgggaggagggttcatgtgtatgcggaaaaggttgtgttggtggacaattcgcatgtgagcaatgccctgattaatctgtatgccaagtgtggtattgtcaacgatgcaaggctgatatgacttcatatgattgtgt

SEQ ID NO: 3736 - DNA, 1236 bp, Oryza sativa
  ref <308>: DATABASE ACCESSION NUMBER: AK104515
  ref <309>: DATABASE ENTRY DATE: 2002-08-28
aaattaagacacaagtggaagttgcacagctcctcctcgatccacccggcaccaaggtacggccggaagctatctaaggactgcagctatgggcaatttgttctgctgtgttcaagttgatcagtctacagtggccattagagaacagttcgggaagtttgatgctgtgcttgagccaggatgtcactgcctgccttggtttgctgggaagcgtatagctggccatctcacactcaggttgcagcaactggatgtgcgctgtgaaaccaagacaaaggacaatgtgtttgtcaatgttgtggcatcgatccagtacagagctttggctggcaaggcaaatgatgctttctacaagctgagcaacacaagatctcagatccaagcttatgtcttcgatgtgatcagggcaagtgttccgaagctgaacctggacgacgcatttgagcagaagaacgacatagcaaaggcagtggaggatgagctggagaaggctatgtctgcttacgggtttgagattgttcagacgctcatcgttgacattgagccagacgagcacgtgaagcgagcgatgaatgaaatcaatgcagctgcgaggctgagggtggctgcaaacgagaaggcagaggcagagaagatcgtgcagataaagagggcggagggagaagcggaagcaaagtacctgtcggggctgggtatcgcgaggcagcgtcaggcgatcgtggatgggttgagggacagcgtgctggggttctcagtgaacgtgccgggcaccacggccaaggacgtgatggacatggtgctcatcacccagtacttcgacaccatgaaggagatcggcgcctcctcaaaggcctcctccgtcttcatcccccatggccccggcgccgtccgcgacatcgccacgcagatccgcgacggccttcttcagggccaggctaccaccacctcccattagcatccatgtgggacaccagctgtgggattgctaagctgctgtttctcttgatttgtcctgtgtgattagatatgtcttgtaatttcttcatgctagctgtccgaccgacgtgtgtgcgcgcgcgggcaacattttcattttagttgtgaatgatatcctatcgtgtatgtatgtgtggaactatgccttgtgaaaactttgtgaaatttcagcgtcaaacatgtaaatgtgcatgtaatccggttctctgtattgtattacttgtatgatatgccgtctcg

SEQ ID NO: 3737 - DNA, 1909 bp, Oryza sativa
  ref <308>: DATABASE ACCESSION NUMBER: AK061335
  ref <309>: DATABASE ENTRY DATE: 2001-12-06
acttcactgccttctcatttactgcagaaggtgaaggtgaaggaggaggcggccatggcgagggagcaggcgctgctgttgacggagatcgtgaaccgcggcgtggagccgtcggggccggacgccgggtcgccgacgttctcggtgcgggtgcggcggcggctgccggacttcctccagtcggtgaacctcaagtacgtgcggctcgggtaccactacctcatcagccacggcgtgtacctggccaccatcccggtcatcgtgctcgtctgcggcgccgaggtcggcagcctcagccgagacgagctgtggcgcaaggtctggggcgaggccacctacgacctcgccaccgtcctcgccttcctcgccgtcctcgccttcaccatctccgtctacatcatgtccaggcctaggcccgtctacctcatcgacttcgcctgctacaaaccagccgacgaactcaaggtgtcgaaggcggagttcatcgatctggcgaggaagtcgggcaagttcgacgaggatagcctggcgttccagtcgcggctgctggccaagtctggcatcggcgacgagtcctacatgccgcgctgcgtgttcgagccgggcaccaactgcgccaccatgaaggaaggccgcgccgaggcgtccgccgccatgttcgccgcgctggacgagctgttcgacaagtgccgcgtccgccccaaggacgtcggcgtgctcgtcgtcaactgcagcctcttcaacccgacgccgtcgctgtccgccatgatcgtcaaccactacaagatgcgcgggaacatcctcagctacaacctcggcggcatggggtgcagcgccggcgtcatcgcggtggacctcgcccgcgacatgctccaggccagcggcgcggggctcgccgtcgtcgtcagcacggaggccgtctccttcacctggtacgccgggaagcgccgctccatgctcatccccaacgccttcttccgcgccggctgcgccgccgtgctgctctccaaccgccgcagggacttccaccgcgccaagtaccagctcgagcacatcgtgcgcacccacaagggcgccgacgaccgcagcttccggtcggtgtaccaggaggaggacgagcagcggatcaagggcctgtccatcagccgcgacctcgtggaggtcggcggccacgcgctcaagaccaacatcaccaccctgggcccgctcgtgcttccgttctcggagcagatcctcttcttcgccggcgtgctcttccgccacctgttcccgtccaagacctccgccccgccgccgccgtccgccgacggcgacgcctccgccgccgctccctacatcccggacttcaagcgcgcgttcgagcacttctgcatgcacgcggcgagccgcgacgtgctggagcacctgcagggcaacctgggcctccgcgacggcgacctggaggcgtcgcgcgccgcgctccaccgcttcggcaacacgtcgagcagcagcatctggtacgagctggcgtacctggaggccaagggccgcgtccgccgcggcgaccgcgtgtggcagctcgccttcggctccgggttcaagtgcaacagcgccgtgtggcgcgccgtccgccgcgtgcgccgcccggcgcgcagcccgtggctggactgcgtcgagcagtacccggctcgcatgaacgcttaagctgcagtggtaagtatgcagaggctaatgaacggaaaattactgcaacgtcaaaagacgggatcggcatgcgatgccggttaaggttcaagcttgattaatttgtgttggtgtattagcaagtcggtttatgagccatagactaccataaaagttgtgcgagacatgtgtactgaaccagtgtacgcgagttcggtgatatgtgaacttatctacgtttgattct

SEQ ID NO: 3738 - DNA, 1217 bp, Oryza sativa
  ref <308>: DATABASE ACCESSION NUMBER: AK061336
  ref <309>: DATABASE ENTRY DATE: 2001-12-06
attcttcttcttctcatcccaaatctctcctcctcccatcccgccgcgcccgcgagagatcagcagctactcgactcgactcgactcgaatcgaatccgaggggggcggcggcgaggggtggtggtggtcggccatggcgcaccgggtggacaacgagtacgactacctcttcaagatcgtgctcatcggcgactccggcgtcggcaagtccaacatcctctcgcgattcacccgcaacgagttctgcctcgagtccaagtccaccattggcgtcgagttcgccacccgcacgctccagatagaagggcagaccatcaaagctcagatatgggatactgctgggcaggagaggtaccgtgcaatcacaagtgcttactaccggggagctgtgggggcacttctagtctatgacataacaaagaagcagacgtttgaaaacatccagaggtggcttcgtgaacttcgtgatcatgcggactccaacattgtcattatgatggtaggcaacaaatcagaccttaaccacctgagatcagttccagaggaagatggtcaggcactagcagagaaggaaggtctatcattcctcgagacctcagctctggaagcccttaatgttgagaaggcatttcagactatccttaaagatattcatcaaatcatcagcaagaaggcacttgctgcccaagaggcagcaggcagtggacctcccactcaaggaaccaccatcaatgttactgattctgctgttaacacaaagagaggatgctgttcttcctaggtgcaaccgaagatttggtgatgctgcaaaaggaaattcccatggatcttacagcactaggtgttatgtaggtcgcttgactccttttggcctgtaattctggtggggttgtaatcacaatttaaatcgctagaaagaaatattccttttaaggtagataccatgtgtagttgcaaaattttggtagagactgttgctgggcaagactttctacagtttcatatctatatcatgttttctatcagtatgcttgtgttatatatcttgttatagtctaaattgttggagctgagaaatactatgatgttttccatgttggtgtaatatccagcatcttcctgctagaaactaaaaacatttatttttgcctttttggtggtattatccattccaacttatgaactgaacagctaatatatctccattctcacttgt

SEQ ID NO: 3739 - DNA, 1115 bp, Oryza sativa
  ref <308>: DATABASE ACCESSION NUMBER: AK104516
  ref <309>: DATABASE ENTRY DATE: 2002-08-28
ctctcaccaacaacagtaacccaaccagagagcttgcggaagcgggggtttggtgcgggcgcgcgcgtgtgaggggggagagaaggccaggaggaggcgacgccgtcgcccgagggaggcaaaaatccgatcctcctcctgccctgctcgctcgctcgctcgcctgcgctgcgcgcacttggccccgtcccgtccgttcccgctcgccaggcatagaaagatggtgctctgggtcttcggctatggctccctgatctggaaccccggattcgacttcgatgagaagatcctgggcttcgtcaagggctacaaacgcaccttcaatcttgcttgcattgaccatcggggcacgccggagcatcctgcgaggacctgcacacttgagtccgacgaggaagccatatgctgggggattgcatactgtgtcaaaggggggcttaaaaaggagcaagaagcaatgaagtacttggaaagaagagagtgtgagtatgaccagaagatctctgtggatttctacaaggaaggagattctttgaagccagctgtgacaggtgtactagtctttgtatccactcctgatccagtaggcaacaaatactatcttgggcctgctcctttggaggacatggcaaggcaaattgctacagccaatggccccaatgggaataacagggattacctgttctcaatggagaaggcattgtccaacatatgccatgaagatgattcaatcatcgagctagctaacgaggtcaggaaggtgttgagccggccgaaggagaagatcactggctccgatagcccacaaaaatctcacgctctcgtacacctgtctgcgcttcctgagggcactgttgtggactcaagatagcaagctcggcggtggaagagatgagatctcctctgacctactcactcttgacgctggattgaacgagtttaacagtctgcttcgagctccctggcacactggggaaccagaatgtgctgattttctttcgcaaccgctgcggcaatgctgtaactttcattttgctaatactagagccgagactggtgtgctgctgtttcctttgacacactaaataataaagggattccatgagcttttcact

SEQ ID NO: 3740 - DNA, 1361 bp, Oryza sativa; identical to SEQ ID NO: 1853
  ref <308>: DATABASE ACCESSION NUMBER: AK061337
  ref <309>: DATABASE ENTRY DATE: 2001-12-06

SEQ ID NO: 3741 - DNA, 1136 bp, Oryza sativa
  ref <308>: DATABASE ACCESSION NUMBER: AK104517
  ref <309>: DATABASE ENTRY DATE: 2002-08-28
actcatccattccatccgcgacagggagcgtagcatgcaggtgcagatgcagatgcagcaggctaccaccgttctcagcagcagcagcaaccggccttggacgctgtggtgccatcctgtcccagtagtctcctccccatcccacgccaaaaataagaagcatggcctccgactccgagcaggcatggccatggcctcctccgagcttcctgacctgagcgcaatacaacgcgtggtgctggacatcgagggcaccacgacgcccatctccttcgtggcggacgtgctcttcccctacgcgcgcgacaatgtccgccgccacctggccgccacttacggcagcagcgaggagacgcgcgctgacgtggccctgctgcgggcgcaggtggaggaggacctcgcgcagggcgtcgacggtgccgtggcggttccgccggatgcggaaggggaaggggaaggcgccgtggtggaggccctggcggcgaacgtggagagcatgattcgcgcggacaggaaggtgacggcgctgaagcagctgcaggggcgcatctggcggcggggcttcgacagcggcgagctgcggagcgaggtgtacgacgacgcggcggacgcgctgcggcggtggcgtgccaaggcctacatctactccagcggaagcagggaggcccagcgcctcatcttcgccaacaccgctgcacacggcgatctccgcgaccacctctgcggattcttcgacaccacaataggggccaagcgcgaggttagcagctactacgagatctggcagactctgggcacggaccgcccctcccagatcctcttcttgacagacgtctaccaagaagccgctgcagcaaagactgcaggccttgaggtgataatatctgtcaggcctggaaacgcacccctccctgataatcatggttttcacacaatcacatcattcgctgaaatctccatctgaacctagccagaaatgtcttgtactatacaatctgatccgaacaatattctaccgtacgctagcagcacagttagcaaatggtttggttaggtttaaggcaagacaatctggggtgtaaataaatgtgtaatagtcccaatcaagctaatactatcatgctcccattccatcc

SEQ ID NO: 3742 - DNA, 1039 bp, Oryza sativa
  ref <308>: DATABASE ACCESSION NUMBER: AK061338
  ref <309>: DATABASE ENTRY DATE: 2001-12-06
agaatccaaaactccagaggcgaacgcgatgcgacgagacgagacgaaccgaagaagcattccctccctccgctcgagcccctccgttttgatccgattcgctcgcgattgatatggggagaggctacagttacagcccatcaccacctccaagaagctatcggagaagggccagcagcccaattccccgtgaccgttatggtggacgtggtagagatctcccgaccagtcttctagtcaggaatcttcgtcgggactgccggccagaggaccttcgtcggccattcggacaatttggtcgtctcaaagacatatatattccaagagattactatagcggtgaaccgcgtggatttggatttgtccagtactacgatcctgatgatgctgccgatgcaaaatactacatggacgggcaggttattctgggcagggaagtagctgttgtatttgcagaggagaacagaaagaagccttctgagatgagatctcgcgacagaataagtggcagcagaggtcgttcctatgaccaaaggtactctaggtcaccgcgatactctcctcctccaaggggccgctcgccttaccgcagcccgagctactcaaggtctccttcgcctcggtatgcaaggcgcaggatgagggagaggtcctactcaccagttgagagcagatcaaggagcaggagcccggtcgaggaaggatacggtggtggatccacacggagagagaggtcgctctctgtcagtgaatgaggtctagagcgctaccggtaatcttcaactagtagtcgctatggctttgcgaaccatatgttactgtcgtgctgtagtggtatcaataacttggcaaatgttgcgtcattacgcctttcctggaagatcgcaaacatattaagttacaacgccggtgaattctgctcactttggagttgttcttgctttgtgcttattttgctgtggattctgtagaaaacgttttgatatggttgcccggtggatggggatctggcacgatggtcgaaccttggagcatttac

SEQ ID NO: 3743 - DNA, 1009 bp, Oryza sativa
  ref <308>: DATABASE ACCESSION NUMBER: AK061339
  ref <309>: DATABASE ENTRY DATE: 2001-12-06
acctcctcgcccctatcccccatccgtttccctcgccgccgacgagtccccgccgccggctgcagcccaggtatggaggaatccgacgcggcggccgcaagcgccaaggcccccaacggcgaggcctccggtggcggcggccgaccggtggaggtggaggacacgctccccggcgtgctccgcagcttcgtcgacggcgtctgctcgcagggcggcggcggcggaggggagccgctgctgcggaggatcagggcggcgtcctgcgagaccgccccgcggctgcgcgaggcgtcgaggaactcggcgcgggacctgctcgagtggaccagaaggggcagcggcctccgcgccatcctcgtcatctcggttggaacgatcacacttattgcattgactggccttctaatcttcatgttcttcctgctggttgcaaccaccaatgctgttgttgtttccgtcctgatgtcgctggcagctgctggaggattcctggctatgttctttgcttgcttggttgcagtgtatattggagtagtatcagttgctgtttttgtcatttccgccacagtcatctcagcaattgtcggcgtcatgattgctactggttggcttggattcttttggatgatttggtttgctgcaaggaagagcatggacctcacgaagcactcgatcggcgtgacaaattcggctatccagtcatactctgcttctcgccatgcaaagcagaagcctatcgactgaggcgatctgtgattcggttgtgagctatgtggctgccatatcgtctacgagttatgtgctgttgtctatgcctctatgtgaattacggcttgtctagtttttgggagtgtatagaacatgcattgtagcagagtacagctatggatgatctctctgtatattggtactttttagtgtgaggcactctctgaaacctctctagtttgtatgatttggcaccgtagttggtatatggaataagctgtgctgcaaagcacttgttcgt

SEQ ID NO: 3744 - DNA, 1433 bp, Oryza sativa
  ref <308>: DATABASE ACCESSION NUMBER: AK104518
  ref <309>: DATABASE ENTRY DATE: 2002-08-28
atggcgcccaaggtggcggtcacggaggcgacggggcggcaggcggcgtcgttcgtgctcggctgcgtggccacgctcaccgtcatgctgctcttccagtaccaggcgccgccggactacggccgcgccgccaggtcgccggtgcagttctccacctccagagaccagctgctgctgcactgcggcggcaatggaacggcgccgccgccgccggtgatcgcacgtggcggcgaggaggctaacatcaccggcaagcctccgacgactgctactgctgtcgccgaggagcagccgccaaccaagcctcctgcgacctctactgcatcttcaccaactcatcatattccagcaaccagtacagatcttgaagaagagggcggcgagttccgggggttggcggcggcggtggcgcgggcggcgacggatgaccggacggtgatcatcacgtgcgtgaaccacgcgttcgcggcgcccgactcgctcctggacatcttcctccagggcttccgcgtcggcgacggcacgccggagctcctccgccacgtcctcgtcgtcgccatggatcccaccgcgctcacccggtgccgcgccgtccacccccactgctacctctacaccatgcccggcctcgacgtcgacttcacctccgagaagttcttcgcctccaaggactacctcgagctcgtctggagcaagctcaagctccagcgccgaattctccagctcggctacaacttcctcttcacggacgttgacattgtgtggctgaggaatccgttcaagcacgtggcggtgtacgcggacatggcgatctcgagcgacgtgttcttcggtgacccggacaacatcgacaacttcccaaacacgggcttcttctacgtgaagccgagcgcgaggacgatcgccatgaccaaggagtggcacgaggcgaggagctcgcacccggggctcaacgagcagccggtgttcaaccacatcaagaagaagctggtgaagaagctgaagctcaaggttcagtacctggacacggcctacatcggcggattctgcagctacggcaaggatctgagcaagatctgcaccatgcacgccaactgctgcatcggcctccaatccaagatcagtgatatcaagggtgttcttgctgactggaagaactacaccaggttgccaccctgggcaaagcccaatgccaggtggactgtgcctggtaaatgcatccattgattttgattgtcgatcgggcagtatctggtgttgtaggctacgtacagtcaggaagatagctttatttgcacatgaaagggcgaattttgttttttttggtttgttgtagattgatgggtcgatttcaagttatattactgtatacctgacggcagacaagtatacgcatgatgggcaaactatatgatatgatatgatatgatagt

SEQ ID NO: 3745 - DNA, 1081 bp, Oryza sativa; identical to SEQ ID NO: 2247
  ref <308>: DATABASE ACCESSION NUMBER: AK104519
  ref <309>: DATABASE ENTRY DATE: 2002-08-28

SEQ ID NO: 3746 - DNA, 1338 bp, Oryza sativa
  ref <308>: DATABASE ACCESSION NUMBER: AK061340
  ref <309>: DATABASE ENTRY DATE: 2001-12-06
atgatgtcatagcaaaagggatgatcccatttgtcactatcttccactgggacacccccttggctctggaaagcaaatacggaggattcctcagtgaagacatagtgaaagaatacgtggacttcgcggaggtgtgctttcgcgagttcggcgaccgtgtcaagtactggaccacatttaatgagccattcacatatagcgcctacggctacggcaagggcgtgtttgcgccgggacgatgctcttcatatgtttccaagtcatgcggcgtcggtgactccagtcgcgagccctacctcgtggcacaccacatccacctctcccacgctgccgctgtccagctttaccgcaccaagtaccagccaacacagaagggacagatcggcatggtggtggtcacccactggttcgtgccgtacgacaactccgacgctgaccgtggcgctgtgcaacggagcctagacttcatctatgggtggttcatggaccctatcgtgcatggtgactacccaggcaccatgagaggttggctcggcaatcggctgccagagttcacgcctgaacagtcggcgatggtgaagggctcctacgacttcatcggagttaattactacaccacctactacgctaagagtataccgccgcctaactccaacgagctatcctacgacctcgacaaccgcgccaacaccaccggcttccgtaatggcaaacccatcggtccacaggtctccgtgagctcctcctctacaccaagaggagatacaacaacccgaccatctatgttacagaaaacggcatcgatgagggtaacaacagcacactgccagaggcgctcaaggatggacacaggatcgagttccactcaaagcacctgcagttcgtcaaccacgccatcaagaatggggtgaacgtgaagggctacttcacgtggacattcatggactgctttgagtggggtgacggctaccttgacaggttcggcctcatctacgtcgaccgcaagacgctcaagcgctaccgcaaggagtccagctactggatcgaagacttcctcaagaggcactgatccagccccacaaaatttcggattgatcacgagatcgatcggctggccaccagatttgtgtttcgtcagtctagctttcagctggttaatttgtgatttgtgcatcagtggtgatgaccgatatgatggcgtgatgaattatgctgcattactattgaatgtgtacctcagtacctgtgcatcattgctggctgatcccattgagccggacaataataagaagaaacaataatgctccctgtcgagcagtgttgggctggttcaggctt

SEQ ID NO: 3747 - DNA, 1048 bp, Oryza sativa
  ref <308>: DATABASE ACCESSION NUMBER: AK061341
  ref <309>: DATABASE ENTRY DATE: 2001-12-06
aattcagaaaaaaacactattagtaagtgggaaactagaggccgaccggaggtttctttctatcgttgggagcctctctgccttccgacctccatcgaattgggtgcagaccagcagcagccaataattaaggtcgtcggccgtatatatgatgatggagaatagcagggagcagcagccggagtcgtcgccggcgaacaacaatagcaagaagaagaagaagaagaagacggcgtcgcggttccggcgtgtgtgcgtgttctgcggcagcagccccgggaagaaggcgtcgtaccaggtggccgccgtgcagctggggcagcagctggtggagcgcggcatcgacctggtgtacggcggcggcagcgttgggctgatggggctggtgtcccgcgccgtccacggaggcggcgggcacgtggtgggcgtggtgcccaatggcgtgctgccacgcgagctgatcggcgagacgctgggggaggtgagggcggtgggaagcatgcaccagcggaaggcggagatggcgcgggagtcggacgccttcatcgccctccccggcggctacggcacgctggaggagctcctcgaggtcatcacctgggctcagctccgcatccaccacaagcccgtcggcctcctcaacgtcgacggctactacgactccctgctcgccttcatcgacaaggccgtccacgaaggcttcgtctcgccgcccgcccgccgcatcatcgtcgccgcacccaccgcctccgacctgctctgcaagctcgaggaatacgtgccgccgccgcacgacgccaccgccctgaagctcacctgggagatgtccaccgtatcggagcagcacgccggaagcatctactcccccaagcccgacatggcacgctagctagctagctagctactcgatccacttcattattacttatcttgtttcttctcatataatcttgctgctaattatttcttccatatattaattccctatatatatgtatatatactcgatcgtactatattgtatacatcatcaattacttgtaacttc

SEQ ID NO: 3748 - DNA, 899 bp, Oryza sativa
  ref <308>: DATABASE ACCESSION NUMBER: AK061342
  ref <309>: DATABASE ENTRY DATE: 2001-12-06
tctcgatcttctcgcttcctcctctcttctctcttctctcttctcctcgcttccacccacccaccatcggccgtcgccctgtccaccctccaccggctgtcgcttccccccacgacgaccggctgccgcggcctcccgcctccctcccatgaccgcgtcgccgtctccttcgctcgccgccggcctccaggagctcggggccgccgtctcctccccccgtctcccaatagccggtcgccggatccggcctcgacgagtttggaggatgcggatccagcgaccgccggcgtctgcggccacctcccccgcctcctgaccgtgagccgccgccgcctgccgccggatccgacctcaacaaatttgggggacgtggatccggcagcagccgcctcccccgccgaccgaccgtcgaccgccggcgtcctcggccacctcccccgcctcctgaccgcgagccgccggatccgacctcaacaaatttggaggacacggatctggcggcagccgcctcccccgccgaccaaccgccgaccgccagcgttcgcagccacctccctcgcctcctgaccgccagccggcgccgcctgccgcctcccccgccgaccaacggccagatctggtggacgtccgccgcctccatccccaactgttggtgtctgcggctcgtcccccgaccgccgacgtcctccacatctccttcacccacaagcgccgccaccatttccgattaggttggctatattcattgctaattttcattgccaaatttcagattaggctatatcttgattgcttgtgtggatttgtagtttgttaagatgggaatcattactgtgtgatgtatattgttacataagttgtgtgatctgtgatatatattacttgtgtggaagtgcttc

SEQ ID NO: 3749 - DNA, 1097 bp, Oryza sativa; identical to SEQ ID NO: 3139
  ref <308>: DATABASE ACCESSION NUMBER: AK061343
  ref <309>: DATABASE ENTRY DATE: 2001-12-06

SEQ ID NO: 3750 - DNA, 1099 bp, Oryza sativa; identical to SEQ ID NO: 3140
  ref <308>: DATABASE ACCESSION NUMBER: AK104520
  ref <309>: DATABASE ENTRY DATE: 2002-08-28

SEQ ID NO: 3751 - DNA, 1746 bp, Oryza sativa
  ref <308>: DATABASE ACCESSION NUMBER: AK061344
  ref <309>: DATABASE ENTRY DATE: 2001-12-06
tgtatcaaaaatctcagaagagcaggaggaaagaggaataaatcgggagcgagggagaaggcatgatgctggaaggcaactcctgcctcatctcgcgctccctgccgagctcctgcgagccggagtcccagtgggcgtacctctcccacgaggtgctcaacggcaagcgcccggcgccggaggatgcggaagccgaggacatggacgaggttgacttcggcggcgggaagcgcagcaagccgccatcgccgcagccgcacacgccggacatatctgagggccatggctccagtcgccatgttgccgcctctggcggcggagaggagcatggcaacgggagcagcctcattggtgcgattggccgtgaccttaccatcaattgcctcctccggctgtcacggtcagactatggctcggtggcctccctgaacaaggacttccggtcgctcgtgcgcaacggggagatctaccgcctgcgtcgccagagtggggtggcagagcactgggtctacttctcctgtaacgtcctcgagtgggacgcttacgacccatatcgcgagcgctggatccaagtgcccaagatgccaccagatgaatgcttcatgtgttctgacaaggaatcacttgctgtgggcactgaacttcttgtgtttgcgatggcacacattgtgttcagatatagcattctaaccaattcatggacacgggctgatccgatgatctcaccacggtgcttgtttgggtcaacaagtgttggggcaaaggcatatgttgctgggggcactgattcttctggcaggatattgagctctgcagaaatgtacgactcggagacacattcttggacaccccttcccagcatgaatcgggcaaggaagatgtgctccggggtgttcatggatggcaagttctatgtggttggtggtgttgccagcaacaacaaggtgttgacatgcggtgaggaatatgacctgaagaggcgatcttggagggtgatcgaaaacatgtctgagggtctcaacggagtgactggtgctcctccacttattgctgttgttaacaatgagctttatgctgctgattatagtgaaaaggatgtgaagaagtatgacaagcaaaacaataaatggatcactcttggtaagttgcctgaacggtctgtgtcaatgaatgggtggggccttgctttccgagcatgtggtgatcggttgattgtcatcggcggcccaaggacttctattggtggtacgattgagcttaattcatggaccccggatgagcggccgcctgtgtggaatttgattgccaggcggccatctgggaacttcgtgtataattgtgctgtgatgggctgttgaatccactgaataaagattcaatatggtggattatttatgaaggatggtatgcacaaaggcagcctgttcaattgcttcagtcctgatgctccgtagcgatttctgccttctgtccagtttcagattcaactgggcatctgctgagtggcagcagtcatgtaaccccctgagttcttctaatacttctgttttcctcgctaatccatttcaacatttgcatttggatcaactgctcgtgatttgaaagatacgagactatgcaaaacagtgttatattaataatctaggaacagctttcagaaggcttttcactattgatgaacaacctgttaagcaatactcgattcatatgtggctgcaacaaagatattcatcaattatgaacacc

SEQ ID NO: 3752 - DNA, 1360 bp, Oryza sativa; identical to SEQ ID NO: 3143
  ref <308>: DATABASE ACCESSION NUMBER: AK104521
  ref <309>: DATABASE ENTRY DATE: 2002-08-28

SEQ ID NO: 3753 - DNA, 1078 bp, Oryza sativa
  ref <308>: DATABASE ACCESSION NUMBER: AK104522
  ref <309>: DATABASE ENTRY DATE: 2002-08-28
acacatttcagctcaccactgctagcttgggaagaggaggaggagcttgagcttggagagagacaacaatggcggctcaggctcttctctctgggaggcagctgctggggaggccattgcaatcttcagtctccaggtcttcttcctccaggaaggcacccttcatggtcagggcagaggccactccccctgccaagcaaggtgctgacaggcagctgtggttcgcatccaagcagtccctgagctacctggatggcacgcttccgggagacttcgggttcgacccgctggggctatcggacccggaggggaccggtgggttcatcgagccacggtggctggcctacggcgaggtgttcaacggccggacggcgatgatgggcgtcgtcggcatggtcgccccggagctcctcggcaagctgggcctcgtccccgccgagacggcgatcccgtggttccagaccggcgtgatcccccccgcgggcacctacacctactgggccgacccttacactctcttcgtcttcgagctcgccctcgtcggcttcgccgagcaccgccgcttccaggactggtacacgccgggctccatggggaagcagtacttcctcggcctcgagaagtacctcgccggctccggcgagccggcctaccccggcggcccgctcttcaacccgctcggcttcgggaccaagagcgaggcggagatgaaggagctcaagctcaaggagatcaagaatggcaggctcgccatgctcgccttcctcggcttctccgtccaggcgctcttcaccggggttggccccgtgcagaacctgcttgatcacctcgctgatcccgtccacaacaacatcctcaccagcctcaagttccattagagatgccatcaactacgtatttaattaattacgagtttttaattatgtatgtatgtacgtgcgtatgcgtatatgtgtgtacgtatgtatgtacgcaactttgtacgatcgatggtgcgtgtgatcgagaggggtatgtatgtacgtacgtatatacgatgtattattatgcatgggtgtagggtgtgggtgtaacatgt

SEQ ID NO: 3754 - DNA, 1046 bp, Oryza sativa
  ref <308>: DATABASE ACCESSION NUMBER: AK061345
  ref <309>: DATABASE ENTRY DATE: 2001-12-06
tgcgcgtggtggtgtaattgatgaagatgctctagtcagggctcttgattcaggaatagttgcacaggctgctcttgatgtgttcactaaagagccaccggcaccagacagcaaattagtgctgcatgagaatgttactgtaacaccacaccttggtgccagcacagttgaagcacaggaaggagtggctattgaaatagctgaagctgttattggagctctgaaaggggaacttgcagcttcagcagtcaacgcaccaatggttcctgctgaggtgctgtcagagcttgcaccttatgttgtgctcgcagagaagcttgggcgcctggctgtgcagctagtggctggtggcggtggtatcaagtccgtgaaagtgacctatgcttctgcaagggctcctgatgatcttgacacgagacttcttcgtgcaatgatcaccaaggggttgatcgaaccaatctccagtgttttcgtcaatctggtcaatgctgacttcactgcgaaacagaggggagttcgtatcactgaggagagaatcttgttggatggctcacccgagacacctattgactacatccaagttcatattgcccatgttgagtccaaatttcccagtgcaatatcggagagtggagagatcactgttgaggggaaggtgaaggatggcatcccccatctgacaaaggttggatcattccaggttgatgtgagcttggaaggaagcctgatcctttgcaggcaggtcgatcaacctggtatgatcggcgcagtaggaagtgtccttggtgaggagaatgttaatgtcagtttcatgagtgttggaagaatcgctcctcgcaagcatgccgtcatggcgattggtgttgatgaggaacctaaaaagagcacactgacaaagattggggagattccggcgattgaagaattcgttttcctcaagctctagattcatgcgttgtatgtttgaagctgcaaacatggtgtgcaattttgatgtagctagctatttaatcaggatctagaggactgatggttctcgttggaat

SEQ ID NO: 3755 - DNA, 1165 bp, Oryza sativa
  ref <308>: DATABASE ACCESSION NUMBER: AK061346
  ref <309>: DATABASE ENTRY DATE: 2001-12-06
atttcgccaatcctccgcgccccatccgcatcagcatgagccaacccaagacgcacaagatcgcgctgctgccgggcgacggcatcgggcccgaggtctgcgccgaggccgtcaaggtcttggaggccgtcggcgcgctgcgcggccacacgtttgcgttcgagcgcgcgctgtgcggcggcgcgtcgtacgacgtccaccagtcgcacctgccgcaggagacgatcgacatcgtcgcgcgctcggacgccgtgctgttcgggtcggtgggcggcccgcccgacgcgcaggaagaccccaagtggaaggacgccgagaagaactgcctcttgggcttgcgcaagaactttgggctcgccgtcaacattcgtccggccaagatctactcgatgctgcccgatctgtcgccgctcaagcccagtctgattgcgagcggcgtcgacatggtcattgtgcgcgagctcatctcgggcatttacttcggcgagcacgcgacgaacggcgacgtggcgaccgacgtcatgcgttacacggaggccgagatcaagatccccatgcgctttgcctttgagacggccatgagccgcaccaagaagctcacggtcgtggacaaggccaacgtgctcgactgctcgcggctctggcgcaaggtcgccaaggagatgcacgccgagttcccgcaggtggcgctcgagtttatgtacatcgacaatgccgtgatgcagatcatccagaagccgtcgcacttcgacgtcatcgccacgggcaacatgtttggcgacattctctcggacgccgcgtctgtgctgcccggctcgctcggactcatgccgtcagcgagcctcggcgacaagatccacctctttgagcccattggcggctcggcgcccgacattgcgggcaagggcgtggccaatccgatcgcgcagatcctgtcggccgcgctcctgctccgctactcgtttgcgctcgaggcggaggcgcagctcattgaaaaggccgtcgaggacgtgctccaggacgggctccgcactggcgacctcacgcacgaccgcgcgagcgccgtcggcacggcggccatgggcgacgccatcgtcgccaagatccacgcgctccaccagcagcagtagccccaaacagaatccaaatcgtatgctttcaattc

SEQ ID NO: 3756 - DNA, 953 bp, Oryza sativa
  ref <308>: DATABASE ACCESSION NUMBER: AK061347
  ref <309>: DATABASE ENTRY DATE: 2001-12-06
aaattctccacaccaaaagacgccgcccaactcgcgaaggcggaaaaggaaaaaaagagagaaaaaaaaaggaagaaaaaaaaataaaactcgcgcacagcaaccgaatcatctgcctcctcctcaagtagtctagtcctcctctcttctccggagtctgcgtgcgatcgaagcagaggcgcggcgctcctcctcctcctccggctccgatccccatggcgttcatgcgttcccactccaatgcatcctccggtatgggggttgctcctgacatcagggacacatcccttgagcttcagatgaagaaagcatttcgctatgttatcttcaaaatcgaggaaaagcaaaagcaagttgttgtggagaagaccggggcaacaactgagagttatgatgatttcctggcatctctcccagaaaatgactgcagatatgccctctatgattttgactttgttactggggagaatgtgcaaaagagcaagattttcttcatcgcctggtctccatcaacatcccggatccgtgctaagatgctgtactccacctccaaggatcgcatcaagcaagaacttgatggattccactacgagatccaggcaaccgacccaactgaggtagaccttgaggtcctccgggagcgggctcattaaggccctggccctgatgatcgatcacctgcgaatctcaagtcaagacgcaaattcatcctatcagtgatgctcccttgcgatactattgttaataagaaagatatccatgtttcctgtaaaacgtatccccaccatcatcatcatcatcgtttagccttgcctgcatgattctagctgcagatggagtgttgtcggagatttacccgtatgaggtctcagagcctgtaaaacgtatgaaacaccctctcccaaactcttatattgtggtattaatatggattactgggtgtggattgtcct

SEQ ID NO: 3757 - DNA, 1105 bp, Oryza sativa
  ref <308>: DATABASE ACCESSION NUMBER: AK061348
  ref <309>: DATABASE ENTRY DATE: 2001-12-06
agatgcgctaatccacggacgagctgtgacgagcttgaccgcgagtccgcgacgcgtgggctcgggggtgagacatggcttccccggcgccgccgcccaccgcccggctccggccttctcaggccgccagcagtgcctcctcctcctccttccctacatccatctgcggccttggctcgctcggcgacgcctctagggtttcctccgtctccttccggcggcgtccaccagcatcgcctctcgtccggtgctcccaagaccctggcaagattgaagtgtttaatactgaaggaaccgagcagtcacaaggaggctccactggttcgataaatcatggcaaatactcaacaaggagtttctcctctaaagacttgcttgaaagactaaagaggtatggtgctgctggtgttttgtcatatggactactaaataccgtctattatgtcacgacatttttattagtttggtttattttttctcctgctcctggtaagatgggttatgctgcggcagtagagagattcctcaagttgatggcaatggtatgggctggcagtcaagttactaaaatttttcgagcaggaggggcacttgcattggctccttttgttgatagagggctaagatggttcacagtcaggttcaacttcaaatcagaaggaaaggcatttgctacaattgttgggttctgttttgcacttgctgctctactgttctttggattaacaatactttgggcgtaatacacctgtcgctgctgaagaatcacatagaagaccaagaacactggtgaaataaaaagattgggttcctcctcacattgcggaagtgaacctttatgcaatcagtaatgtggcttccactttactattaattggcttagctcttcaaaactatggttctctcggtaccatgtgtttgtttttgaaaacaggtttccatgtattcttgtatgagtagctattctcaattctcatttacataattcacctgcaagtctgcaacctggtgcttcattcgttaatcgttcataatctggaacatcttcagtgtacaactgtacatattcctgtaacatgatccttggggagttgtgtgtgttttc

SEQ ID NO: 3758 - DNA, 1776 bp, Oryza sativa; identical to SEQ ID NO: 3152
  ref <308>: DATABASE ACCESSION NUMBER: AK104523
  ref <309>: DATABASE ENTRY DATE: 2002-08-28

SEQ ID NO: 3759 - DNA, 1158 bp, Oryza sativa
  ref <308>: DATABASE ACCESSION NUMBER: AK061349
  ref <309>: DATABASE ENTRY DATE: 2001-12-06
tcctgcaggccgtgtcgaccgtcaccgaggaggcgccgtcgccgctccgcgtcgtgcagatggagggcctggctgtcctgaagatcattaagcactgtgaggagtttgcacctgctctagttacaggccaactgcttggtttggatgttggcagtgttctggaagtaacgaactgttttcctttcccaatgagagaagatgatgaagaggcagatgcagatggtgcaaattatcagcttgagatgatgaggtgcttgagggaggttaatgttgacaataacactgttggatggtatcaatcttgcttgcttggatcttttcagactgtggaactgattgaaacgtttatgaactatcaggagaatatccggagatgtgtgtgcatcgtttatgacccatctaggtcaaatcagggggttctagctctcaaggccttgaaactcacagattcattcatggatctttaccgtaacaatggtttaactggagagaagttaagagagaagaaattgtcatgggttgatatttttgaggagataccgattaaagtttccaactctgcacttgtcagtgccttcatgacggagctggaacctgaatcacctgtttcacagtgtgattttgaccgccttaaattgtcaactgctccattcatggaaaggaacttggaatttctgattggctgcatggatgatctttcatcagagcagaacaagttccaatattactatcgcaatgtctcaagacagcagtcacagcagcaggcatggctccaaaagagaaggcaagagaatatggcaagaaaagctgctggagaggagccattgccagaagaagacccatccaatcccattttcaagccgattcctgagccgtcacgtttggagggttatcttgtaaccaatcagatctccagttactgcaaccatattaatggggttgctggtcagaatttcaacaggctctacttaatgaaggccttgcaggaggactagatggctaggtgatgagtggcaactgttatgatatttgacttgctagatgtcaattttgccttgtgctttatgcctattataccttttgccaagaaaagccagagcctattgtaccaatcttacggatacaaagtccgcagtatgataaattgattttatcgct

SEQ ID NO: 3760 - DNA, 972 bp, Oryza sativa
  ref <308>: DATABASE ACCESSION NUMBER: AK061350
  ref <309>: DATABASE ENTRY DATE: 2001-12-06
gagaaaccaaagctccagcaatcggcggcggcggcggcggcccgtgagaggcggtccggcgacgatggttcacgtcagcttctaccgcaactatggtaagacattcaagaagccacgtcgcccttacgagaaggagcgtcttgatgcagagctgaagctagtgggtgagtatggactgaggtgcaagcgtgagctgtggcgtgttcagtatgctttgagccgtatccgtaacaatgcaaggcatctgctcacacttgatgagaagaatccacgccgcatctttgagggtgaggcactgcttcgccgcatgaaccgttatgggctccttgctgatgggcagaacaagcttgattatgtccttgccctcactgttgagaacttcctcgcaaggcgtcttcagactcttgtcttcaaggctggcatggccaagtccatccaccatgctcgtgtcctgatcaggcaacgccacatcagggtcggcaggcaaattgtcaacatcccgtcgttcatggtgagggttgagtctgagaagcacattgacttctcactgacaagcccattcggtggaggcccccctggtagggtgaagaggaagaaccagaagaaggcaagtggcggtggcggtgacggtgaggaggaagatgaggaatgagaacagaagtttgcaactagttgtttccgtaatgatcataaaactctgtgctgagtaactaggcccaaattctgtagcttgcctatctgggattcagaattcaagcaggttgtgcttcaggtgttggtttatgttaaccctttttggcattatgttaggtatagacttgtggttaatgctgttttatggattcgtttcatggtaatcctcatcgcaccagtgcgcttgaactagtgatactcactcgtaccaatgctgtttttaatgtttttatggattcgaagttgcaacatggattatggagttgttaagattaattt

SEQ ID NO: 3761 - DNA, 895 bp, Oryza sativa
  ref <308>: DATABASE ACCESSION NUMBER: AK061351
  ref <309>: DATABASE ENTRY DATE: 2001-12-06
atcatccctccgcgcaaaagcctatcaacagctaagccaaacagggtcaggagccggagccgtccgggagagggaacactcgagcgatccgtccgtccgcccgcccgtcgtcgtcgcgcgccatggctgaggaggaggccaagaaggtggaggtggaggtcaccgaggcgccacccgccgctgccgctggccatcgtcgagaaggttgcagatgaacctcctgccgagaaacctgctcaagggggctctaatgacagagatgttgctcttgcaagggtggaaactgagaagaggaactcattgatcaaagcatgggaggaaaatgagaagacaaaagctgagaacaaggcttcgaagaagctatctgctattctttcctgggagaacacaaagaaagcaaacatagaagctcaactgaagaagattgaggagcaactggaaaagaagaaggctgaatatgcagagaagatgaagaacaaagtcgcgatcgtccacaaggaagctgaggagaagagagcaatggtcgaggcaaagcgcggcgaggaagtcctaaaggccgaggagatggcagccaagtaccgtgccaccggccatgctcccaagaaactcatcgggtgctttggggcctaaagaaattttcgattcacaacgagcaaacgtgaaagtgttcatcagtggttgctttgcttctttcaccctcccaagtgcgtagtgtgtttgttggtgcaagaaaggtcgtgcctggtgtgtaaagtctggtgttgctgtatataacatattactcccaagacagatatgtttggtgctgtacatgtttgatgcttgacaggcaacattcttatgtgtagttaagaagccacattgttattgttattgacagtaagctgtttgttct

SEQ ID NO: 3762 - DNA, 1407 bp, Oryza sativa
  ref <308>: DATABASE ACCESSION NUMBER: AK104524
  ref <309>: DATABASE ENTRY DATE: 2002-08-28
gtatataggcatcagccaagaagtacagcggccgtggcaatggcagctgctgcaatggcgacggtggcggtgccgcgggtgaagctgggctctcaggggatggaggtctcggcgcaggggctcggctgcatgggcatgtgcccggccttcgagccgcccaagccggaggccgacatggtggcgctcatccgccacgccatcgccgccggcgtcacgttcttcgacacctccgacctctacggcccccacaccaacgaggtcctcctcggcaaggcgctgcagggcggcggcgtgcgcgacagggttgagctggccaccaagttcggcaagttcttcgccggcggcaagccggggatccgcggcgacccggcgtacgtgcgcgcggcgtgcgagggcagcctccggcggctcggcgtcgattgcatcgacctttactaccagcaccgcgtcgacaagaaggtgcccatcgaggtcacgattggtgaactcaagaaactagttgaagaaggaaagataagatatattggcttatgtgaagcatcggcatcaacaatcagaagggctcatgctgtacatcctatcactgcagttcagcttgagtggtcattatggtctagagacgtcgaagaagatattgttccaacttgcagagaacttggaattggaatagtagcttacagtccacttggtaaagggtttttttctagtggagctaaactagtggattctctaccagaccatgattttcgcaagcttatccctagatttcaaccaggtaatatcgagaagaatgctgaaatatttgagcgtgttaacgaaatggcagccagaaaaggatgcacaccgtcacaactcgcattggcctggatccatcatcaggggcgtgatgtgtgccccatacccgggacaacaaaaatcgagaatttcaaccaaaatgttgcagcactatctgtgaaactcacccctgcagaaatggctgaactcgagtcttatgctagcaatgtccatggcgaccggtatcctctgatgatggctaacactacttggcaggactctgagacccctcccttgtcgtcttggaaatccgagtaaatcattttcgtctgttcaaatacagttcctggttcaaaatagctggttcaaaatggaagagcgttgcacaagatttcatcagaagtgtttcatcagacgcgttgcttgctcctgttcttctacatcgcgtgtatttggaatgagctgacctgtcgatctatgcgtagcgtgttgtgtcatatgctttcgtgatgtttaatttgcgcgtaaaacttacttgagtgaagcgccgtttcataagcttgtgcattgcacgcagaatgtgtggtaatattaaataaagtgttgccatcaccagttttaatttgtgttatt

SEQ ID NO: 3763 - DNA, 1124 bp, Oryza sativa
  ref <308>: DATABASE ACCESSION NUMBER: AK061352
  ref <309>: DATABASE ENTRY DATE: 2001-12-06
gagcttcatcgtgcggtgctacgaggtgggcatcaacaagacggccaccgtcgagaccatcgccaacctcctccaggaggtagggtgtaaccatgcacaaagtgttgggttctccactgatggttttgccacaactaccacaatgagaaaacttggtctaatttgggtgaccaaccgaatgcacattgagatctacaagtacccagcatggggtgatgttgtggagattgaaacttggtgccaagaagatggaaagatcggtactcgtcgtgattggatccttaaggatctggctaatggtgaagttatcggcagagctaccagcaagtgggtcatgatgaaccaaaatacacgcagacttcaaagagtgagtgatgacgtgagggatgaggtttttgtacactgtccaaagactccaagattagcattccccgaggaaaataatggcagtttgaaaaagattccagttcttactgatcctgcacagcactcaagactaggcctagtgccaagaagagctgatctggacatgaaccaacatgtcaataatgtcacttacattggttgggtacttgaaagtatacctcaagatattattgatacacatgagttacaaacaatcactcttgactacagaagagagtgccaacatgatgacatagtagattcacttacttatatcgaggaaggagaggagaagagttccaatggatccgcatttgctgcaccgcacccagaagagcagcgacagttcttgcactgcttaagatttgctgggaacgggaacgagatcaaccgtgggcgcaccgtgtggaggaagctagctagatgaattccctagttttgatcatacagtcatatgtattctgatccttccatttgttccatcattttgctcttggtgtctggcatagccctttcagagaatcggttgtaccccaaattttgtgttaatttgttacctttgtaatgtaccgtggtaacaattacagtttgtgacattcgtcttacctgaagttgtgcgttgctgtatactttgtactagtagaatcagtgtttatgaatcttcaaataattctatcggcaacagatagcaatggcatgccaagtttggttcttcctgt

SEQ ID NO: 3764 - DNA, 1284 bp, Oryza sativa
  ref <308>: DATABASE ACCESSION NUMBER: AK061353
  ref <309>: DATABASE ENTRY DATE: 2001-12-06
aaaaaccgttaaaccatcatattttttctcgctccatttcagcaggagcagcaaccggaggttgccatggcggacgatgttgtggcctcgccggaggagtcgctaacagcgctgctactcgagccggcggcgagccctcgcgacgacccgtcggtggaggtgcggctctaccggcgtggcgccggcccggtcgccgtcttccggtcggccctggtgggcccccgccgcgaccgcctccaggtccgggccatccaggcggagcacggcctccgggcgctcttcgccttcaagcccgagtcctccctccgcggcatccggatccggcccggcccggccgccgccgccggctgctccgccgtgcccttccgcgacggcgccgtcatcgccctcgacggcgagcccaaggggtcgtggacgaagccggcggcggtgatcgtcgccggcgtgctcgtgccggcggtgatggtggcggtggcggtgaaggggtgccggagccgctgcggtcgtcgagggtggtcaacgccatcttcccgccgtggatcctcgccagcgccgtcatcatctacgctcgcatcaggacgcgcccaagggcggctgctccatgacccatcaccaattgcttgctcatcatcatcaccatcgacaacttctcccagtttattttttcctttgtccagaaatttgtacgaaaagaaatgaaccacaatgtaatggtatagtgaacactgaacaaggattgcactggacaactttccatgaaatttatccattttcattttagctgaaagtgccacaatcaatacaaggaacaccaggatacattaccaatttaccacatgtaccacaacaagctgctgctaaacctgagtttttgcagctcatcgtagagagaaaattcagcattttcagaacagaaccaaatatgagtacaattagtgatctcaggcaaaacttgacccacatcatcaatagtatcagtgaactgagacatactaggagagtatgtttagtcactatcgtcatcttcctcccgctcttcatgctgggcgacaaccttttcgatgaacttcctgcgaacgccttctatgacattgtcccgggatgaatcaccgccgctctgcccatcattcaggactggctctgactggcaaagggccaatgcaacagctgaaatagagtggtgatttagtacaaggagatgtagataattcataacgttgaagtaactcctggattcttgttttgttcaaagcaaacatcggaaaaatgttgcgccaaacgagt

SEQ ID NO: 3765 - DNA, 1138 bp, Oryza sativa
  ref <308>: DATABASE ACCESSION NUMBER: AK061354
  ref <309>: DATABASE ENTRY DATE: 2001-12-06
aggaaaaagaaaagcaaaaaggcaaaaaaaaaaaaaagaaagaagagttcgactgttcgagcgaggagggagaagaagagggggagagagagagccagcagctagccatggcggagcacaaggaggaggagtcgttggtggagtcggtgatggacaagatctccgacaagctccacggccgcgggggctcgtcgtcgtcgtcgtcggactccgacggggagaggacggccgacttgaaggccaagatctaccgcctcttcggccgcgagaagcccgtccactccgtcctcggcggcggcaagcctgctgatctctttctatggaggaacaagaaaatctccgttggggtactcgctggcgccacggccatctggctgctgtttgaagtcatggattatcatctcctcaccctgttgtgccactgtatcatcctcaccctggccatgctcttcctctggtccaatgcctcaactttcatcaacaagtcccctcctaacattcctgaagtgaagatcccagaggacctggctgttaatgttgctcgctcactgagatttgagatcaataggggctttgctaccttgagggagattggtcaagggcatgacctgaagaaatttctgattgttgtcgtgggtctctgggttctctctgttcttgggagctgctgcaatttcctgaccttgttctacatagtctttatggtactgtacaccgtgcctgttctgtatgagaagtatgaggaccaaatcgatgcttttggagagaaggccatgatcgaactgaagaagtactatgctattttcgatgagaaatgcctctctaagatccccgagggtccgttgaaaaacaagaagcattagaaattgtaggatgagccgtagaaggtactatgctaatttatcatccagcctgatcactaattgtcggttttaaaggatggctacgattccatgcctttactgatagtaaatacctacattttggtgtggctagtagttgcgatgtgctgaacttcaatgaattcgaattatgccagcatgctctatctatatcctgttttcaaactcatgtttaactcaacttccgcccctggaagctgttggtactaagtgctatcaatatgtgacttatcttt

SEQ ID NO: 3766 - DNA, 994 bp, Oryza sativa
  ref <308>: DATABASE ACCESSION NUMBER: AK104525
  ref <309>: DATABASE ENTRY DATE: 2002-08-28
agtcagaagctaaggaagaaaaagtatagacacagtgatacaatggcctgcatcaacacattccagagctgctccgtcctcaagggagcaaagatcaatggtaccaagatcggaggagggaggggatcaccaaccttccggtgccgggcatcgacgttcatggacgggagcctccggctagagatcgacgagaaccctgaagccatcatctccggtgagtggccggagaacttctccctgctcagctacgacgatctccgcgcctacctccagtcacaggaggccgctgctcaagccgacaaccagcgtgtggcgctcctgagtgaagccatgtcggcgcctgtgctggtagccactgccgagcagacgctggaggaggttgagtgccactttgagacggtctcaggtctcccagttatagatgccagcctcagatgtgttggagtgatcgtcaagagtgaccgggccagggcttctcatgggtcaaagacgaagattgcagaagtgatgacctctccagccatcactctaccatctgacaaaacagtaatggatgcggcagctctgatgctaaagaagaagatccacagattaccaattgtaaatcaggacagacaagtgataggtatagttacccgtgctgacgttcttcgcgagttggaagccctgctggaggtttagacgtgcagtggtccatatgcttcggccttgttgtatatatgtaaatatatgccatggtgtttttgaatagcaggcatctctaatctgtaagagtgttgtagcgcgaatcaccaagataagcctgagaaaataaccggagagcttttctttgtacaataagcacactatgagacctccagtgttgtatgcctgtgaaaaaatttacgttagtgaatggtctccacaacaacatagatgaatgaatatgcctagttatctttcagaacaaaaccaccaaggtgcttcaaagatggatataaaagtgaccttattg

SEQ ID NO: 3767 - DNA, 972 bp, Oryza sativa
  ref <308>: DATABASE ACCESSION NUMBER: AK104526
  ref <309>: DATABASE ENTRY DATE: 2002-08-28
atggcagctccaaatccttctgctactatggcggcggcggcggcgtccacgccggcgagggcttggtggcgggcggctgctccggcgagtgcctcaactgcagctgtaagctgcttccgagttggggccaagagcctcacagggcttcagatgacaagcacccgcgcgaacaaagttcggacagttcatgtcaaaagcggggaggcagaaggaagtccaagcacagagagcatcacccgcgacgaggaaactctgcagcgtgacttgcaaacagcgattcaggaagaaaactatgcccaggccgcgaagctcagggacgagctccgagtcctccaggaggacagcaggtcagcagtgctggcagcgaatgcgcggttctacaatgccttcaagaacggggatcttgtcgcaatgcactcggcatgggcgaagggcgaccatgtgtacgttgttcatccttcggcaggccggatatcgggctacgacatggtgatgcagagctgggagatggtgtgcgacgcggactacgagttccctctccagattgatctgcaggatgttgaggtccatgtgagaggtgatcttgggtatgtgacctgcctggagctggttaagaccaaagggagcagcagctggggaaggcaggttgcgaccaatgtgtttgagaaggttgatggcaaatggttcatttgtatccaccatgcctctcacttcgatgagtgaggctgaatttcttggagagaggaagagctgcaagtgcagatatggcgtgaggttttgcagtacaggcgtgagacatatacttcgctgttttcttaaggtccttgatatgacctttttgtagaaccctttttgtaccaatactatcatcgaatgatgctgctattttgaggagtattagtagtaggtacagacaaccagaaccctgatggaattgtaactcggcgtggctgagatattcgtcagactgtt

SEQ ID NO: 3768 - DNA, 961 bp, Oryza sativa
  ref <308>: DATABASE ACCESSION NUMBER: AK061355
  ref <309>: DATABASE ENTRY DATE: 2001-12-06
gaactccaataacccttcccctcttctcccctcgcctcggcccgccggcggccggccaccaccgccacctcctcctccgatggatctcgccgccgtccacgccgccctcgccggcaagtcctactcctccgtcgccccgctctgcgacgacctcttcctccaggccgcgtcccggggcgccgccaccgacggctggccctacgccgtgcacctcctcgcccacctctacctcaacgacctgaacagcgcgaggtttctgtggaagtcgacgccgcaggaggcgaaggacgcgcggccggagctcgccgccgtctggaggatcgggcagtgcctctggaaccgcgattacgcgggcgtctacgcggccgcgcaggggttcgagtggagccctgaaatcgccgacttcgtggccgccttcctagaaagctacagaaagaggattttccagttgttgacttctgcatattccacaatcagcgttgctgatgtggctcacttcatggggatgaatgaggaggatgctactaactatgccatgcaaaacggttggagcttggatgcggcagccaggatgcttactgtcgtaaaaccaaaggttaagactaaccagaagctcgatgcaagcaaacttcagcgattaactgaatgcgtcttccacctggagcactaaagtccagcattacgggcatcccgcatgactcttaagaaacctatttatcatatgatgccaagccgagattgccttttctccggaaatcagagttagttcagtgttgaatttccatctgcaattgatttctggttagcgaccttagcctttctctgtaatggttgcttgttgatatggttggtggtggttcttgccagacttacactgaagtaaatgacactgcttagtgtcaactcgtaagttaacgttgttttttgaagtatgagttgaaaattgtttcccgttttacag

SEQ ID NO: 3769 - DNA, 1074 bp, Oryza sativa; identical to SEQ ID NO: 3142
  ref <308>: DATABASE ACCESSION NUMBER: AK104527
  ref <309>: DATABASE ENTRY DATE: 2002-08-28

SEQ ID NO: 3770 - DNA, 977 bp, Oryza sativa; identical to SEQ ID NO: 3147
  ref <308>: DATABASE ACCESSION NUMBER: AK104528
  ref <309>: DATABASE ENTRY DATE: 2002-08-28

SEQ ID NO: 3771 - DNA, 1128 bp, Oryza sativa
  ref <308>: DATABASE ACCESSION NUMBER: AK104529
  ref <309>: DATABASE ENTRY DATE: 2002-08-28
atccgaacgctctagatcttatcaagtggcgtcggcggcgatgtgcgaggaggcgacgcggagcagggtgctggtggtcggcgccaccgggcggctcgggggatgcctcgtgcgcgccagcctcgccgccggccaccccaccttcgcgctcgtccgcccccaccacctcgctgtccccgactccgccccactcacgtcgctcgccggcgccacggtcgtgaagggatcgctcgaagattacccgagcctgctggaagcggtgcggcaggtggatgtcgtcatctgcgccgtgcccacgaagcaagcgctcgagcagaagcttctgattcgggctattaaggatgctgggtgcgtgaagagatttattccagcggaatatggacttgatcccacaaaggttcaaatttgtggcatggaccatggcttctatgagaagaaaattgaaatacgccatttaatagagagcgaatgcattcctcacacctacatctgctgcaacttcttgatgcgttatttgcttccgtcacttgttcagccaggactcgatgctcctccaagagatgaagttaagatatttggtgatggaaacactagaggagtttttgttgaagagactgatgttgctaaattcacgatctgcaccatagatgatcccaggacattaaacaatacgctgtatctgagaccctcgggaaatgtctactcaatgaacaaattggttgacctctgggagaaaaaaataaataaattcctgaacaagatatatatcacagaagaacaactcctgaaaaacattgaagatgcaccattgcccttgaagatggatttgatatttatatattcaacatttattaagggtgaccaaacatattttgaaattgactcgagaaaggaaggaactcaattgtatcctcatgtaaattataccacagtggatggttatttagataaattggtttagaatattaaatatttgttttttcctgtactagtaccattcctacctctattagttatattacctttcatctctagcctacctcaacttgctagggacttaaggttattattcttgtatcttgcccataaacaatacccttctgttaaatggtattttgaaagaattgc

SEQ ID NO: 3772 - DNA, 1071 bp, Oryza sativa
  ref <308>: DATABASE ACCESSION NUMBER: AK104530
  ref <309>: DATABASE ENTRY DATE: 2002-08-28
agctcccgaaatccaaaccacccccctcctcccctcacgggctcacggcctcacccacccaccaacccatccatccaactccgcggcggcggcggcggcgatgacgacccgatccaacggcgagcaccaccacgggccgccctcgtaccagcagcggcgcccgcactacgggggcgggtacggcggcgggtcggcctcgttccgcggctgctgctgctgcatcttcctgctgctcaccttcctggccctcctcgcgctggccgtcgcgctcgtcgtggtgctggtggtgaagccgcggaagccgcagttcgacctcaaccaggtgtccgtccagtacctcctcgtcaccccgccgtcctccgccgcctccgccgtgggggggaccgtggccgccgcggtccccgccgcggcctacctctccctcaacatcacgctcctcttcaccgccgtgaaccccaacaaggtcggcatccgctacggcgccacggcgttcgacgtcatgtaccacggcgtgccgctcggggtggcggccgtgcccgggttcgagcagccggcgcacagcacccgcctgctccagacccgcgtcatcgtcgaccgcttcaacgtgctccaggccgacgcccaggacctcgtccgcgacgccgcgatcagcgaccgcgtcgacctccgcatcaccggcgacgtcggcgccaagatcctcgtgctcggcttctcctccccaaaagtccaggtgtcggtggattgcgcgatcgccatcagtccgaggaggcagtcactgacatacaagcaatgtggcgtggatggcctaagcgtctagcagcagcaaccaaccaccacaccatcgcagcaacagcagcagcagaagaagaagaaggatgcagaaggcttaatctaatggagatagataagtggatgtgacccgtgtttgtcgattctaatctctctttctctatctaatcctgggttccgattcctgtacgtggggggtaaattttgagctctctcacctcaccctagaggaggaggtcgccgctgatttttgtgaattactgtccggtaattatcactatc

SEQ ID NO: 3773 - DNA, 1126 bp, Oryza sativa; identical to SEQ ID NO: 2058
  ref <308>: DATABASE ACCESSION NUMBER: AK104531
  ref <309>: DATABASE ENTRY DATE: 2002-08-28

SEQ ID NO: 3774 - DNA, 1533 bp, Oryza sativa
  ref <308>: DATABASE ACCESSION NUMBER: AK061356
  ref <309>: DATABASE ENTRY DATE: 2001-12-06
aaaaaaaaaaaagagacgttcagccatcagacctgcagaggcaatccatccatggcatctatcgttcctgtactcctgcgcctgctgctcctgctgctcccgcttcccctgatccgagaccacctctggccgagccaccgccggccaacgccgcaggacgatgcgggtgagctccacccgatcttcctggtgcccggggcgagctgcagcgacctggaggcgcggctcaccgaggcgtaccggccgtcgacggcgcactgcggcgcgatgaaggggaagggatggtttgggctgtgggagaacaacacggagctgctggtccacgactacgcggactgctcactggagcagatgaccctggtctacgaccccgccgccaacgagtaccggaacctgcccggcgtcgagacccgggtgcccaacttcggctccgcatggtcgttcggctacaagaaccctgttaaccgtctacagagagcacaatgccttggaaagctcagagactggctggaagaattgggataccgtgatggggacaccatgttcggagctccctatgattttcgctacgccccgccggtacccggccaaacatccgaggtgtactctcgctacttcagcgagttcatggcgctcgtcgaggcagcgaccaagaagaagcagaagaaggccgtcatcctggggcacagctacggagggatggtcgcgctcgagttcgtcaggagcaccccgcgggcgtggcgggacgcgcacatcgagcgcctcgtcctggtcgcgcctacgctccaagatgggttcgtaggctcggtgatgaagttcatcacggggacgggcataattttcgtcccgacagccacgtccacgaggcccatgtggaggagcttcgagtccgccatggcgagcttcccgtccccggccgtgttcggccgcgagccgctcgtggtcaccaagaggagggactactccgcgtgcgacatggaggatctcctagccgccctcggcttcggcgagggcgtcgagcctttccggcgacgggccgtccccaggatgtacagcctcgaggcgccgatggtgcccatgacgtgcatcaacgcggtgggcaacaagacgccgctgcaactggtgttgtgggacgacgacgacgatgacttattagacgcgtcaccggaggtggcagcgtatggtgacggagacggcgagatcaacctgatcagcatgttggcgtttgacacggagatgggtcggcagccaggacaggagaagcgattcaaatccgtcaagatagctaatgctaaccattccacgattgccatttatgattttgcactaaagaggatcattcaagaaattattgaggtgaatcaggtacgttagtagacactccgtacgttgggtttcacgtatatatgttgggtttcactgtgcgcggtaatcatatatatcacgtgtggaattctgtgtaataaatgaatcccatgcagctttgtgtataccgatgggttggttggtaaataaaaaccaaaaattactgct

SEQ ID NO: 3775 - DNA, 1004 bp, Oryza sativa
  ref <308>: DATABASE ACCESSION NUMBER: AK061357
  ref <309>: DATABASE ENTRY DATE: 2001-12-06
gagccatgtcgccggacggtcgccgcacacgccacagtcgtcgttgcacacacgcgccgccgttgttgtcgtcctcttctcctccgacgtcgtcgtcgccgtcgccgtcgtgaacatggcggcggaggcggagcagcagcaccagctgctgtcgacggccgtgcacgacacgatgccggggaagtacgtccgcccggagtcgcagcgcccgcgcctcgacctcgtcgtctccgacgcccgcatccccgtcgtcgacctcgcctcccccgaccgcgccgccgtcgtctccgccgtcggcgacgcctgccgcacccacggcttcttccaggtggtgaaccatggcatcgatgcggcgctgatcgcgtcggtcatggaggtgggccgcgagttcttccggctgccggcggaggagaaggcgaagctctactccgacgatccggccaagaagatacggctgtcgacgagcttcaacgtgcgcaaggagacggtgcacaactggcgcgattacctccgcctccactgctatcctctccaccagttcgtccccgactggccctccaatccgccctccttcaaggagatcatcggcacgtactgcacagaggtaagagagctagggttcaggctatacgagtcgacattaaaaccgtgaggcgaacactacacactgtgaccctgaccacctccgaattaagtttgagttctctcttggatgcctatttgctctctgttaattggacactaaattcctcagcggcctccattcctagcttcacttataaggaaaaagagagcacaaagagatttcgttaatagccatcatagggaagtgtggattgtgttgaaggtcctaatcagttggttttttgtccctggttttggatattaggagggtctcttagtatctttctttttgtggaacaactttcagtgtctgtaactctgtattcctttttttacttgcaaagggaatggcatcctttgtggttgtagaactccttttc

SEQ ID NO: 3776 - DNA, 991 bp, Oryza sativa
  ref <308>: DATABASE ACCESSION NUMBER: AK061358
  ref <309>: DATABASE ENTRY DATE: 2001-12-06
ctctctcctctcctctcgccgtcgccaattctctcctcctccttcccccgtggggatgcggcggctatggcggtggtaccagcagtgcctggccacccaccccgtgcgcacgcaggtggtcagctccggcatcctctggggcctcggcgacatcggcgcccaggccgtcacccactactccgcccccggacgcccccgccaccaccagcaccacgccaagaatcctcccgaggataaagataaagagttcaaaattgattggaagagggtgggcatcacaagctcatttggatttgcttttgttggaccagttggacattactggtatgaatacttggatcgcttcatcctgaggagataccagcctaagaccttcaaatttgttgcgtcaaaagttgctgcggatggtctcctatttggaccagtagatcttctcttgttcttctcatatgttggtcttgcatcaggaaggagtgtagagcaggtgaaggatgatgtgaagagggacttcattcctgctctagttctagggggaaccatctggccagccgtgcaaatcgcaaatttccgcttcatttctgtgcgatatcagctcctttacgtgaacctgttctgcctcttagacagttgcttcttgtcgtggatcgatcaacaaggagatgcaccttggaagcaatggttcacatcattccagaaaatcgaaggccagaagggcaaggtttgatgtggatcaggcacggtccttttgacatggtcctggatccagtaacatcacccggcaaaacaccgggcatcccagaaaatttgtcttctgtcatttggatcaacctttgtatgctttggctgatccatgaaaaaaacactggaaaagagaaacacttgctgctatggtagcaattgttttaagcgcaattgcagtaccaagcagagctgagcatcaatatctgtgtagagatttgtttcatgtttaatgccaaggaaaatattgctc

SEQ ID NO: 3777 - DNA, 1124 bp, Oryza sativa
  ref <308>: DATABASE ACCESSION NUMBER: AK061359
  ref <309>: DATABASE ENTRY DATE: 2001-12-06
gaatgccatctggtcaaactaggaaccatgggtgagtatggaactccaaatattgacattgaagaagggttcatcactattacccacaatggaagaactgataccttgccttacccaaagcaagcgagctccttctaccatctaagcaaagtgcatgactcgcacaatatagcatttacatgcaaggcttggggtataagggccacggatcttaaccaaggtgttgtatatggagtgagaacagatgaaactgcaatgcatgaagaactatccaacaggtttgattatgatggcgtctttgggacagcactgaataggttctgtgttcaggctgctgtaggtcatccacttacagtttatggaaaaggtggtcagacccgtggatatctggacatcagggatacagtgcaatgcgtagagctcgcaatcgccaacccagccaaaccaggtgagttcagggtcttcaaccagttcaccgagcagttctcggtcaacgagctggcaaagctggttacggccgccggtgcaaagcttgggctggaggtgcagaccaagtcggtgcccaacccgcgggtggaagcggaggaacactactacaacgccaagcacaccaagctcatggagctcggcctggagccccacctgctgtcggactcgctcctcgactcgctgctcaacttcgccgtccagtacaaggacagggtcgacacggcgcagatcatgcccagcgtgtcgtggaagaagatgggggcgaagccgaagacggtgtccgtctaagaggaggctggttttgccatggcggggtataatgtcaaccgtgacattgacattataaatttggtgtgtagtaatgcaataattatgtgcgtttagtataatgcacgttgtagtgggtgtggttacggtgttagatttcttttttgttcttcctcacgaatagatgctgcaatctgatcgaaggggattccttctgtatttctgttgtaaacttttatccagctcttgatcagcaaatgggtatccaggatgcaggggggtatttgagccttttttttttttttgagtgtttccgaactgaagatggtgtaataataccatacataccactaatttcttttattgtt

SEQ ID NO: 3778 - DNA, 1239 bp, Oryza sativa
  ref <308>: DATABASE ACCESSION NUMBER: AK061360
  ref <309>: DATABASE ENTRY DATE: 2001-12-06
gcggccgctcctcccctcccctctctctcttgttcccccatggcgatcgccaccgagtcgcgctgcgaggaggagaaggcttcgccgcattcgcaggaggtgaagcggtgggtgttgtctgattttgacatcgggaagcccctcgggaggggcaagttcggccatgtttacttagcaagagaaaagagaagtaaccatattgtggctttgaaagtacttttcaagagccaactaaagcagtcccaggtggagcatcagctacgtcgggaagttgagattcagagtcatcttcgtcatcccaacattctacggctgtatgggtatttctatgatcagacccgtgtgtacttgatcttggagtatgccttaaaaggtgaactttataaggagttgcagaggtgcaagcatttctctgaaagacgttcagcgacttacattgcatcactggcgcatgcgctcatctaccttcacggaaagcatgtgatccatagagacattaaacctgaaaatcttttaattgggtcccagggcgaactgaaaattgcagactttggttggtctgtgcacaccttcaacagaagaaggacaatgtgtggaacattagattacctgccccctgaaatggtggagaagactgaacatgactaccatgttgacatttggagcttggggatcctgtgctatgagttcctttatggagtcccacctttcgaagcaaaagaacactccgaaacatatcgcaggattgtgaaagttgacttgaagttcccactgaaaccattcgtgtccccggctgcgaaagacctaatttcacagatgctcgtgaagaattcggcgcatcgtctgcccctccacaagctcctcgagcacccttggatagttcaaaacgctgatccctccggcgtgtacagaggctagaacaatctcttccactctcctcaattcgaggagagacctgattctttttcatcactgttgttatggcaaaacaagaaaaaagcagtagccgtactactctacctgttgtttccgatcccagctgcgcctgtgtagttacgtgacaacgtgtatgctcaagcttcagatttcctcgatgaagatttgaagctgtgtgtgtgggtttaacgcgtatgtgttttagcgtgtgttcacagcatggggttgtgatatgttttctgtgcaacgccctgtacttaatgtactaatcgtatttcttattggacatcactcgattagtct

SEQ ID NO: 3779 - DNA, 1045 bp, Oryza sativa
  ref <308>: DATABASE ACCESSION NUMBER: AK061361
  ref <309>: DATABASE ENTRY DATE: 2001-12-06
atatacgaagtttttaagtgtgtgatacttgaggggacaaccttccctcgcgtcgtcctcccccaggggcggcacgggaggcgacgactcggccaccccttctctctcccccacctccctcctccgcctcgccgctgcccgagtggccgccggcaaagccgcgcggccacaaggacggcggcggcggggctcctctctcgcgccactcttaggagaccgggggtctctccggagaggcggcggcggtaaaccgccagattcgcgccgcttcggccggatctggcggggcggcgatgggcgacggtggcggggatggagatggcggcggtagtggcggcagcggccgatggcggcggggttggagacgggcggcggtggggtgaacagatccggcggcggcgcgtctggatccggcggtggcgcgacgtccggtggtgtttggagcgtgcggcgccggcagccaacctcgcccgtggctggcgatggtggtgaaaggaggacggccgatttgggctttaggtctagatccggcgcgttctcagtcggggtcaagggtggtgcagaatccggtcattgtgcaggtggtgtccatagtgcaggtacccttcggtgtgcaggaggcatttggaagcttccgttttggatgctttggttgacagggtctccgaggtgaaaaccttgctccgcttctggtgctactaacggcagcgccctcggacgccgttcaccttcttgaaggcgttgcgtttggagccctcgtttcaactccacttcaaggaaactcttcgggtgaaaaccttggattcgttaggatcggacgttgtcgccgttctgtcagcgtaaccttcttgaaggattcgttctaggagtttttttccttgttggacaattgtcatttggttcagttttgtcaatgccgggttttcgccagttttcctttaattaactgtgcagttgtaaggtttttgggtccggttttccttataaactggatcaactctctttttctatagtaaattgcaggagctccctgcctgtcccctcg

SEQ ID NO: 3780 - DNA, 1215 bp, Oryza sativa
  ref <308>: DATABASE ACCESSION NUMBER: AK061362
  ref <309>: DATABASE ENTRY DATE: 2001-12-06
attgcaaccacctgaaaactcctctcctttttttctttttttttctcttctctctccgcctcgcagagtcgcagcggaggagttgcatagacgaagcggaggaggaggcagcgaggcgaggcgagcccaatcggaaggcatggatagataccaaagggtggagaagcctcgcaatgagacaccaattagtgagaatgagatcaggatcactgcagaggggaggatgaggaactatatcagctatgggatgtcgttgcttgaggaaaatgggcatgatgagattgtcatcaaagctatgggaagagccatcaataagacagtcatggttgttgaattgatcaagagaaggatcggtggtcttcatcagattacatctactgaatcaattgacatcacggacacttgggaacctttggaagaaggccttctccccctagagaccacccggcatgtatcaatgatcgccataacattatccaagaaagcactggatacgttatctccagggtaccagccacctatcccagctgaagaagtgagacccgcttttgactatgaacacgaagaatcttccccactaatcgtggaagaggccgtggtggtggcagaagaggcaggggcagagccatgagcaatggtccccccgcttatgattatggcgaggagtgggaagaggaaggagattattacaactacagaggcagagggagaggccgatttagaggacgaggacgtggaagaggccgtggtggctactacggaggtggtcgacgtggtggatatggctatgattacggttatggcggcaggggggactattatgaagatcagggcgaatactttgaagaaccagaggactacccccctccaggccgtggacgtggcaggggaagaaggggcggaggaccgggaccattccgtggtcgcggccgtgggcgtggtcgattctaagatgaaatcaggaggaggtgcccttgaagcttgagaactcgtgtgcttaaattatctgataatgctgttctgtatgggggtttcgacatgaatccgtatgccccatcagtatgtttttacttcccgtggcggtgtgactgattgggcaaattttgtggctggatcttggttttgtagctaggcctgtcctgtcagcaaaagcaacaacaaacaaacaaacaccctgtgctgctgtttatttatcaacaacctaggtttccttcc

SEQ ID NO: 3781 - DNA, 1612 bp, Oryza sativa
  ref <308>: DATABASE ACCESSION NUMBER: AK061363
  ref <309>: DATABASE ENTRY DATE: 2001-12-06
aattccagacaatgaaacacatatgctactcgaaggaaacatgactgattaacggtacgtatgggggagccaacagggagctgcagtatagacatccaacgtctcgccgccgatctcgagacaaagctatgcaatgtggatttggacggcggccggcgatggcgccgctcgccggagtgcctcatttccaaggtgaagccgcaggtccgccgcgtcgacgactcgcagtacaccccgcaggtggtgctcgtcggcgcctaccaccacaaaccgctggacagcacggaccagctggcgaagtggacggcactccgccgtgtcctccccgacgacggcgagcagcgggcgtccacgctgaggcggtgcctggaggcaatcgccggcgttgaggacgaagcgaggagctactacgaagacggcgccaagacatggagggagaatcagatgttcgtgcagatgctgttgctcgacgcgtggttcgtcctcgacatcttcaacgtcggcggcgaggcggctgcggcggtgggtagccgcggcgggagcgcggtggactacatcttcgccgtgcgcgacgtgttctacctgctcgagaaccagatacccttcttcatcctcgagaaggtctacgagctggtgcgtgtcggaaattccggccaggatcaagatcaacgcacgcaaacgtgtacttctcctccgcctcctcagcctccgggagctacagccatcgccggcggcggcccgtcgtcctcctccaccgttgttgtggatggattcttgcgccatctccggtcgctgctccaggaccagggctactcgaatgtggaggtggacatcaccagcacacgcccctgtcacctcgtccacttactccacatgcacttcacacccatggcgatgtcgccggccgacgacaccgacgacgctgccgctgtccccaacaggcgcgcgcgcgccaccgtttaccggtggcgcggggcgacgcagtaccacgccgccggcgtgaggttcaagaaacgggccctcggcgccgccgccggcgacgcgcggtgcgtcctcgacgtggagctccggcggctgacgacgctgcacgtcccgacgctgacggtggacaacaacacgtggcgggtcctgcgcaacctgatggcgctggagcagaacaacccacacctgggcagccacgtcacggcctactgcctcttcgtgtcgcagctagccggcacggcgagcgacgtcgcgctcctggcgaggaaaggcgtggtcgtgcacttcatggccaccgacgaggacgtcgccgacgggttcgccggcctgtgcaggggcgtggcgctcgacgtcgacgacgcgcgccggaactacctgcagccgacgtgggagaggatggagcggtggtacagcagccggccggtcaactggatggcgctgctgcggcggcggcatttgagcaacccgctggtggcgatcgcgctgctcgccgccattactggcctagtctgtgaagttgtgcaggccgtatatgcggtcaagacctacaggcctacaatctagctaggccactgtgccatatgcctaccaactttgcgtagcctatcaagtaacaagtatgactctgttg

SEQ ID NO: 3782 - DNA, 1218 bp, Oryza sativa; identical to SEQ ID NO: 3146
  ref <308>: DATABASE ACCESSION NUMBER: AK104532
  ref <309>: DATABASE ENTRY DATE: 2002-08-28

SEQ ID NO: 3783 - DNA, 1328 bp, Oryza sativa
  ref <308>: DATABASE ACCESSION NUMBER: AK061364
  ref <309>: DATABASE ENTRY DATE: 2001-12-06
gttcgtctcctcgcccagatccgccaatcgcccatggagtccccaccccaccccctcctcctccttctcacgctcctcgtcgccgccggcgccgcctccgccggcgccgatgacctggtcgccgagctgcaatccctgcggtcccgctccccgtcgggcgtgatccacctcaccgacacctccatcacccgcttcctatccgccccggcgccgcgcccctactccgtgctcgtcttcttcgacgccgcctcgctccactccaagaccgacctccacctcccccagctccgccgcgagttcgccctcctctccgcctccttcctcgcccacaaccccgcctccgccgacctcttcttcgccgacatcgagttctcggagtcgcagcactcgttcgcgcagttcggcgtcaactccctcccccacgtccgcctcgtccgccccgagcacacccgcctcgctggctccgagcagatggaccagtcccacttctcccgcctcgccgactccatggcggagttcgtggagtcccgcaccggcctcgaggtcggccccatcgtccgcccgcccctcgtctcccgcaaccagatgatcctactcgtcatcctcttcttggtctccattccgttcctcatcaagaggatcatggacggggagaccttgttccatgaccgacgggtttggatggctggggcgctgttcatttacttcttcagcgtgtccggggggatgtacgggatcatcaggcacacgccgatgttcatcaccgaccggtccgatccaaacaagctcgtgttcttctaccaggggtctgggatgcagctcggcgccgagggttttgcggttgggttcttgtacactctcgtggggctcatgatcgccatggtgacacacttgctggtgagggtggagagcctgcagatccagcgttttacgatgctggcggtcatgataattgggtggtgggcagtgaagaaggtgattcttttggataactggaagactggatatagcattcataccttctggcccagcagctggaggtaaatgcttgtacaatggcagacgatatggatggtttcttccttcggtttctgaggttatggaattatccaactttgaccgtgctgagatagagcatattttggagtgttgggacttgccaagtttatttttgcaaatttctgatgctgtagtatgaaatatgtagacctcaagtcatgttagttatgcagaggaattatgacattgcacatctatcacttgaacaagaaagtttggcttttgaattattggtttggtttcttcgaatgatgtatcgtggttgatgt

SEQ ID NO: 3784 - DNA, 1014 bp, Oryza sativa
  ref <308>: DATABASE ACCESSION NUMBER: AK061365
  ref <309>: DATABASE ENTRY DATE: 2001-12-06
attcgatcgcttccccaaatcgctctcctctcctctcctctccaccgccgccgatctcctcctcctccggcgccgtcgccgcgtcgcctcccggagctccggtgctgccaccagcctacgcagcgccgcctcctcctcctcctccggcatccgccaatcgccgccgcctggttcgtcggggagccccgcgccctaacgttttctagaggcgccgcggatccagcgcgaatcgatcgagaggtaaaggggaagttgatttgagtcggcggccgaagaaggaagccatgaactcgagaagcaactaccgcagcaccagaacttctctttttgatggcattgaggagggcagaatccgtgcaacatcctattcttcacatgagatagatgagaatgagaatgatcaagctattgatggattgcaggatcgagtcagcattctcaagcggttgtctggtgatatccatgaagaggtggaaactcataaccgtatgctagaccgaatgggcaatgatatggattcgtcaaggggttttctgtctggaacagtggacaagttcaagatggtttttgagaccaaatcaagtcggaggatgggaaccctcgtagcatcattcgttgcgctttttctgctggtatactacttgaccaggtagaagaggaccatgcatcacttgcctactgttgtgaagcgatgtgaactgggttgggtactcaagaacacgctgaaaatgtctgtgtcaatttaccgtggtgtcgtatatacctccaatatctcgctgtcataaagcaaaatatgttgaccagaatgtttctaactctgcactgtgtgaggattacaacatgttcgtcgtttgctctggtgctgtaattacctttacagaaaatgtttcctgctgtgttctgtaacatctgtttctgtatgcggtcatgctatctgtattatattataacttcacaagagattgtactttggagtcttaattgccatatataagacgctattagtatgtggtt

SEQ ID NO: 3785 - DNA, 1271 bp, Oryza sativa
  ref <308>: DATABASE ACCESSION NUMBER: AK061366
  ref <309>: DATABASE ENTRY DATE: 2001-12-06
gctgctactagccgccagccaaaagcagcggcagcgacgcctcacctcgcctcgccctcgtctccggccgcgccgcttgctgggagctagctttggaggaggaggaggaggaggggcgcgagccatggcggagaaggaggagtcaacgtcgatcccgctcagccaggcggcggaggcggttgacccggaggacccggccaagtcgccgccgcggcccagctcgcccaccacctccacccgcaaggcatgctgcgctgttcttcaaagttgggtgtcaagaaaatttatgactggatgcgtcgttctgtttcctgttgctgtcacgttcttcatcacatggtggtttattcaatttgttgatggctttttcagcccactatatgcaaaacttgggatcgacatatttggtcttggttttctgacttctctggtattcatttttctggttggaatatttgtttcctcatgggtgggttcaaccatcttttgggttggagaatggtttataaagaaaatgccatttgttcggcacatatactctgcatcaaagcaagtcagcactgccatttcaccagatcaaaacacaacagcttttaaagaagttgcgataattcgtcatccacgtattggtgaatatgcatttggatttataacatcaactgttgttcttcagactgacaaaggcgacgaagaactgtgcagcgtttatgtgccaacaaatcatctttacattggtgacatatttctggtgaactctgaggagataataagaccaaatttatccattcgagaaggaatcgaaataattgtttctggaggaatgactatgccacaggtgatcgcgtcccttgaacccaccccaaggaagagccagaatatccgtctaaatagaataatgacataatgtcatacgagagctcaagtgctcaacacgatcgtgttatgtgtggaatcggtgtgactctggtgctctgaccattgctctgttcatcttcgtttctgttgtgtcaaaatgtggaggctggagaggagaacacggcgtgagattgatcgagccatcttaggctcgtggcattacagaaggtggcggaagcaccatatcgatgctcaggaatagtattggttgtgtgtcacatgccgcgctactctttggttgctgactggtctgaaatgttaacgtccctagtgcaagtgcaactgattaaattcatttgtaacaatatcatgtataacatcatgtcgacctcgtattacgtagagttgattatacc

SEQ ID NO: 3786 - DNA, 1055 bp, Oryza sativa
  ref <308>: DATABASE ACCESSION NUMBER: AK061367
  ref <309>: DATABASE ENTRY DATE: 2001-12-06
gtgtgtgcctccctcgccgccgccgccgccgggggcggttccctactctgcctcccccaccacgcctcccacatcgcgccgcccccatcgccgcgcccccacaacgcctccaccgtcggcacccccatcgcgacacccctgagctctgcatcgccgccgaccgccgctcctgctcgccctcatctacgacgccgccgtcactaccctctcttcgctgcgctgcctccctccccggcgtccccatcccctcctcgccgcgccacttccccatctgccgccccgcctgcttacctccccggcgtccccatcccttcctcgccacgtcgcttccccattcaccgcccccgctgcacgcctcacgccgcaaccccgcagcggaacccaccggcgagctaaccgccgtcccggcaggtcgccgtcaatcgccgtcgccccgcaggtcggcgttgcactgcagagggatttccccgccgaacggtcgccgcagcaggtctacgccaccttcttcccacgccgactccatgtctaatccctacctcaccacagtttcaacttgtggttccagctgaagcaattggagatttattaaatctaaggctacatgctaggctgctatgaggttgccatataggcatgctaaaaaaccgtcaggaagtgtacaagcttacaagctgtaaataaacggaatgaagagcaatagatcatctgttaggttgccttcggttttgaacaagcgctataaggtggtcgaagaaattctattattttatttaccattgattggctatctgttgatgcttttattattcaaccaaactggtggaggagccaaggtcacagtaatcttattaaaggtagtacgtacttatagaacctccattttcatcggtacatgtgagagtgagctttaataatgtattccatgatgaaatgtattccatagcattaggattggatgctacagggagacaaatctcggctgtgtcatgtattccatgatgcaaagttgatgttggctattgtctcggcgtttcgaataaagattgttaggagag

SEQ ID NO: 3787 - DNA, 1080 bp, Oryza sativa; identical to SEQ ID NO: 3157
  ref <308>: DATABASE ACCESSION NUMBER: AK104533
  ref <309>: DATABASE ENTRY DATE: 2002-08-28

SEQ ID NO: 3788 - DNA, 1102 bp, Oryza sativa
  ref <308>: DATABASE ACCESSION NUMBER: AK061368
  ref <309>: DATABASE ENTRY DATE: 2001-12-06
acatgcgcaattccgccgttttttcttgcactagaacctgcactgcgtgtaagagctctcctacacgatgggaccaggaagcaacaactccttcccggccgagaaaagggttgcagtggtgacaggagggaacaaaggacttgggctcgagatatgcaagcagctggctgccaatggagtcaccgtcgtcttgacagcgaggagcgaggagaggggcgccggagcagcggccgcgcttcgtcagctcgggctatcggaggtcctgttccatcagtttgatgtgtctgagccttccagcgccgctggcttggctgattttataaagcacaagtttggcaagcttgacatattggtcaacaatgcaggaattttgggggttacatttgattttggcaacttagatcttaataaagcgattgagggcaagagtgcaaacgagacgctggaatggttgatgcaacacaccgtggagactgccgagaatgcagaagaatgcttgaaaataaactatcacggcaacaaaaaaaccatacaagcactccttcctctcctccaatcatcacctgatggaagaattgtaactgtttcctctgtttttggacaactatcgtttttcagtggggagaaactcaaagaggagctcaacgatttcagcaagctaagcgaggagaggatagacgagctggcagagctgttcgtcagggacttcaaggacggagagctggagtcccggggatggccagccagagccgacgcgttcgcggcctacaagacgtccaaggcgctgcagcacgcttacacgagggtcctcgcgaggaagcacgcctcctcctcctcctcgccgttgcgcgtcaactgcgtgcatcctgggtacgtcaagacggacatgaccctcggcaccggggagctgacggtggaggaaggcgcggctggccctgtcgcactggccctgtcgccgccgggaggcgccacgggcgtgttcttcatccaaaccgaaccagcgtccttcgtctgagcgtgattcctccggaaaatcagacgcagcttgtttctcatatctaggggtgggcattcggtctaatcgagaaattcggttcggttc

SEQ ID NO: 3789 - DNA, 1039 bp, Oryza sativa
  ref <308>: DATABASE ACCESSION NUMBER: AK061369
  ref <309>: DATABASE ENTRY DATE: 2001-12-06
aaaaacacaagcaacagcttagctagtaacagtaggccactactagcatcactgcatttctagttaagtaacaacactagagagagtaaggagtagtgagaccatggggagggatcaggcagctgcagcagtgatgcatgagaaggtgaagctgttcataggagtgctggccctgcagttcctgcttgcaggattccacattgtgagcagggcagcactcaacatgggcatcagcaagattgtgttcatcgtctataggaacctcatctccctcgccttgctcgcgcccttcgcctacttcctcgagaagaaagatagaccaccactgaccttctctttgctggtggagttttttcttctagcactgtgtgggataactgcaaaccaaggtttctacctcctagggctgtatcacctttcaccaacttatgcttctgcaatacagaacacagttcctgccatcacctttgccatggctgccgtcctcaggcttgagcaagtagacctaggcaagaggcatggggtggccaaggtggtgggcacggtggtgagcataggtggtgccacagtgataactctctacaagggcctaccactgttcaatcacaatctgaacatcaagtccctgtcttcctcgagcctcatcctcaactggactctgggctgcgtcttcatccttggccactgcctctcatggtctggatggatggttcttcaggtgccagttctgaagaggtacccagctaggctgtcagttctatcactgacctgcatctttgggctcctccagttcctggtcattgcagccttcactgaagaagacctgagcagatggaaggtgaactccggaagcgagctgttcacaatcctctacgctggtcttgtggcatctggcgtggcgtttgctctgcagatatggtgcatcgacaggggagggccgctgttcaccgccgtgttccagccggtccagaccgtcgccgtcgccgtcatggccgccatcattctcggagatcagctatactcaggagggtaagatgat

SEQ ID NO: 3790 - DNA, 1187 bp, Oryza sativa; identical to SEQ ID NO: 3690
  ref <308>: DATABASE ACCESSION NUMBER: AK104534
  ref <309>: DATABASE ENTRY DATE: 2002-08-28

SEQ ID NO: 3791 - DNA, 917 bp, Oryza sativa
  ref <308>: DATABASE ACCESSION NUMBER: AK061370
  ref <309>: DATABASE ENTRY DATE: 2001-12-06
atcaaacacacacacacataggcaacaatggcaagcaaacaggcaatgaactctgccttgttctctgcattggttgttgtggtcttggcttctgctgtgaatgggcaactaaacccatgccaagcaccggcaccaaccccgactggaactccagccccagcaccagccccggtggtgacaccgacgcccgcaccaactccagtcccgacgccatcgccggcaccaacaccttcacccaccgttgcccctgtcaatccgccatctccgacgccgcctcccaagtgtccgctggcgttaattaatctcaacgcgtgcattagtgtcggtcttggcaacccgctcttgaaccaggcgtgctgctcgcagctctccagcctcccgagcgacaccgctgctgtctgcctttgcgaagccatcaaggttaatgctctcgtcaatctgaaggtcaaaatccccgacatccttaaagtatgcgggaaggtctccgctgtagtttgtgtttaataagtacgtcgagagatagcgtgcatatatatacgtacgtacgtatgtatgtacatgctatacataggtgtgcagcatatatatatatatatatatatatatgctgtgtgcttgcctctacatatatactgtattaaacttttggacgacccaaatatatatccgccagcagcatgcgtgcgcgtacgtgccgtgcttcatggaggtagggtcttaatatccatatatgtttaagaataattaagttacaggatctgggattgtgctatatatgtatgtgtacacacacgtggcttgatcatatcattatgtgtacgtgctagaagatttgattgtgtactgatctgtgtgtatgcatgcctgcctacaaaatcaaaatatagtgggtaccagtgtatgtgatatatttcctc

SEQ ID NO: 3792 - DNA, 1148 bp, Oryza sativa; identical to SEQ ID NO: 3569
  ref <308>: DATABASE ACCESSION NUMBER: AK104535
  ref <309>: DATABASE ENTRY DATE: 2002-08-28

SEQ ID NO: 3793 - DNA, 1097 bp, Oryza sativa
  ref <308>: DATABASE ACCESSION NUMBER: AK061371
  ref <309>: DATABASE ENTRY DATE: 2001-12-06
aatgcaggggtgtgatgcatccgtcctcctgaccaagaaccccgccggtggccagacggagcgcgacgcgacgccgaacaacccgagcctccggggcttcgaggtgatcgacgccgccaaggccgccgtcgaggcggcgtgcccgcgcaccgtctcctgcgccgacatcatcgcgttcgccgcccgcgacagcgtcaagctaaccggcaacgtcgactaccaggtccccgccggccgccgcgacggcagcgtgtccaacggcaccgaggccctccacaacctgcccccgcccaacgccacggcgcagcagctcgccgacacgttcttcgccaacaagttcctcaccctcgaagacatggtcgtcctctccggcgcccacaccgtcggccgctccttctgcgcctccttcttcaaccgcgtctggaacggcaacacccccatagtggacgccgggctggacccggcgtacgcggcgcagctgcgggcgctgtgccccacaagggacacgctggcgacgacgccgatggacccggacacgccggcgacgctggacaacaactactacaagctgctgccgcaggggaaggggctcttcttctccgacaaccagctgcgggtgaacgccaccatgaacgcgctggtgacccggttcgcggcgaacgaggcggagtggaagcagcggttcgccgacgccatggtgaagatgggccacatcgaggtgcagaccgggcggtgcggccagatcagggtcaactgcaacgtcgtcaacccgtcgacctcctcgccggaggtcgagctggccggcgaggatcaggagaccggaggcgccgtcgcggcaagctagctagctaaccaatctaatcatgcatgtcggccgttggatgcgagtgatttcctttaatttcctttttttgacgtgcacgaacatttaatttgcgtgtactagtgtcgtcgtgtcgtgtcgatcgatctttcgtacgtgcatttgctcttggaatgttttaggtcggattccagtgatgaagaataagtactacgtatgtacacgtaccatgtgtgttttattaatcgtgctactaatatattcgctactccac

SEQ ID NO: 3794 - DNA, 1075 bp, Oryza sativa
  ref <308>: DATABASE ACCESSION NUMBER: AK061372
  ref <309>: DATABASE ENTRY DATE: 2001-12-06
aattattctctcgccacgtcaccatcgctacccctctccctcccgaatctccggccgcccctcgcctcgcctcgcctcgccgccgcatccgctgcccgccggccaccgtagccgcatcgacgccgcggccgcgtcgccgcccctctccctaccttcctccgcccctcgcgacatcgcccctcctcccgctaggtccggccgcttcaccggctggccgtccatggctgcagcgatgggcgcggcggtggtccggcggctccacgcggcgcaggcgcaggcgcagcccccgcggctgacgaagctcgcgcttcgcgcgcccaaattcgtagaagttgaatttgaggatggcagctcattccatctgcctgctgagtttcttagagtgtacagcccagcagctgatagcaaaatcagatcagtagctggtgagaaggttatatttgggcggcgacatgttggaataatgtcagctgaatcagtaggaaattacggagtacggatattgtttgatgatctgcacaagacagggatctttacatgggattacttgcaccacctaggttctaacaagtttggtctgatgcgaagctatatcacaactttgaaaaagcacggccttactcgggatcctcagagaaggaaatgacgctggcagtcagtctttatgtgagttcattttgacgtaccatgaaacctcatagaagaaatgctgcttggagccctgggattgagcttccagataccaaacgcataatgcatgaagcttgacaagtaaagtactaaatacagtcactctatgaagattggcaccagataacaatcttggaagcctgttctttcaccttgaaatgatggcctttgtcgaaattttggcatatcttcagttatattagatggaaagaatgacatttgttggtttgaggcttaagggtgtgtttgttttgttccgtaacaaaactaaacaaatttgtgtaatgctaacctgagcaagaccaaaaatagtttatgtgtgtgttttgacgatgaacttttctaccgatatttggttatgtaatagccaaatcttgttggtgtt

SEQ ID NO: 3795 - DNA, 1081 bp, Oryza sativa; identical to SEQ ID NO: 3171
  ref <308>: DATABASE ACCESSION NUMBER: AK104536
  ref <309>: DATABASE ENTRY DATE: 2002-08-28

SEQ ID NO: 3796 - DNA, 1010 bp, Oryza sativa
  ref <308>: DATABASE ACCESSION NUMBER: AK061373
  ref <309>: DATABASE ENTRY DATE: 2001-12-06
agcagacgccgccgccgtcgttcacgagacccatttcgccacccacccgtgctctccctcctctcctcgtgctcgtggtgggtagggggactaggatactgctagggttttgcgagccatggcgtggaccgccgccgcagccaccgtcaccagggccgccgcaacgccggccgcggagctccgcctgccgctcgccgccggcctcggccgcgcctccttcgccgtcaccggccgtctccgccgcgctgtctccgcgtccctctccaccgccgcggccgccgttaaaaaggaggctgttcagacagagaaggccccggcagcattaggcccgtattctcaggccatcaaagccaacaatatggtctttgtctctggagttcttggcctaaaccctgagactggaaagtttgtatctgaaagcgtggaggagcaaactgaacaggttatgaagaatatgggtgaaatattgaaagcaagtggtgctagctactcttcagttgtcaagacaacaatcatgttggctgatctacaagatttcaagaaagtgaatgagatctatgccaaatattttccagctcctgcaccagcacgctcaacttaccaagtagcagctctgccgctgaacgccagaatcgagatcgagtgcattgctgctctctagttacctgctactgtctatcaatcaaattgccaataagcattctgtggtgccgttctagttggtcactatcctggaagaatgcactgccattctgaacctgatcttgtagtaccaattaagatcttgaactgcctgcaataaacgttgatgcccaggaaaaaagaagtcccatctgttgtccaagagttccctttaatctccatcatgaattgatcatcccaatggctcacagtgctatgttgcagaggtctcctgctgcaatatctgcaagaattggtcttgccaagcgtcatgagtctaataaatcattaaaaggtttatcaacatgatgtatctccatgttactatc

SEQ ID NO: 3797 - DNA, 873 bp, Oryza sativa
  ref <308>: DATABASE ACCESSION NUMBER: AK061374
  ref <309>: DATABASE ENTRY DATE: 2001-12-06
caaccaaccaaagaaagaaaagctcgactcgagctcgccgcgattgaatcgcgcatgggcacggcggcgggcgacgcggcggagcagccaccggcggcgccggaggcgaagagggcggcggctccacggacgctggtgttcacgtacggcacgctgaagaggggcttctccaaccacggcctcctccaggacctggcccgggacggcgacgcctccttcgtgggcgccgccaccaccgcgccgcgcctcccgctcgtctgcgggccctaccgcgtccccttcctcctcaacctccccggcgccggacaccgcgtctccggcgagctctacgccgtcacgccgcgcgggctcgaccgcctcgacgagctggagggcgtctcccgcgcgcactacgagcgcctccccatctccgtcctcctcgccgagggcgcccaggtcgacgccgtcgcctactacgcgcaccgcggctacgccgacgacctgtgggcgcgcagcggcaagaaggggtacccggagtactcgccggccgtcgccgacggctacatccgccgcaaggatcggccgcagcagctcaccttcctggagcagattcgggtgttcgtctcatcgcagtcatcgtagaacccatcaattaatctcttttcttttcttaatctatttttcttctctttgcaatcactcctcctatttgtgcgatagcgtgcatgggccatgtgacaatctcttgtgatgaatggatgatcacgcgtgctacctaacctaccagatcgccatatcaggctatcgctgatcgcgtgatctgtagtatcacatccgtttgtgtgggggtaaaatcagccatcttcctgtaataaaatagaatgattttccatt

SEQ ID NO: 3798 - DNA, 1117 bp, Oryza sativa
  ref <308>: DATABASE ACCESSION NUMBER: AK061375
  ref <309>: DATABASE ENTRY DATE: 2001-12-06
atgcaatggatttcaggcggttttcgcttcggtctcccctccggccctccctacgtcccgagcccccgccccgttcctcccccacgcacgcggaagcgcagcggcggcggcacaccgcgggttgaggccaccggcgacagcgctgcacagcgcggcgggactcctctcctattctcgttccatccccacgtacgccgagggaaccggttgacccaggtctcagccccgattcctgtcctccccggtccagttccccccattcgaagctagattgctccagtacaatgagctggagatttcctcttttcggcagctcgcagcagcagcaacctgatacaaatttccaggacaaccctacacaaccatggtaccctccgtctgtccttggttcatcttcacatccatccctgcccagctcgtccagtggtagtccacatcaaagagcttctgataatccccaatcattgcatggtcagccatctccagctgaggctgcagggataattgctcgcttaaaggacaaaagtgttgatgacttgcagagactgttgaaagacaaagaggcatacagtgctttcttcaattcactcgatcaagttaaaacccagaacaatttgcgggatgagcttaaaaaggagacagtgcaacttgcaagggataatttggaaaaggaacagcggatctcggagattaggaatcagtgcactattataagaactacagaactagctgctgctcaggataggttggctgatttagaaaggcaaagggatgaggttatgaagtcgtattcccctgctgcactgctcgacaagctccaaaaattgatggcgaagttagatgaggagtctgaggagctgcatcagaagttcctggagaaggacattgacctccctacctttgtgcagaagcacaagaagctccgaactgcctaccacaagcaggcattgctccatctcgccggcaagacctcggttcgctgagatccgtcaccctattgttgtatgtatcccattttcctgtattctgtactgcgataggctgtttataagtgctgcttaaaattgtagagcttgccaaacatcatatttggactgcatgtagtatttaaagcgtg

SEQ ID NO: 3799 - DNA, 1323 bp, Oryza sativa
  ref <308>: DATABASE ACCESSION NUMBER: AK104537
  ref <309>: DATABASE ENTRY DATE: 2002-08-28
acaatcaagaaatccacatttctcctcggaaagtcaaaggcaagaaacaccatggatgccactgccatcggcaacggcgccctgcactccaatggcgccggcgccgacaccaaagggaagccgatcaaatgcaaagcggcggtggcgcacggccccggcgaggcgctggtgatggaggaggtggaggtggcgccgccggcgaggatggaggtgcgcctcaaggtgctcttcacctctatctgccataccgacctcagcgcctggaaaggagagaacgagcttcagcgaaagtttcctcgcatattgggtcatgaggcagcaggggtggtggagagcgtgggagagggtgtggaggatcttgcccctggagatcatgttgtccccatcttcaccggcgagtgtggtgcgtgcacctactgcgagtccagcaagagcaacctatgcaaaacctaccgtgtcaacccattcaagagcaccatggtcaccgatggtggcacgaggttcaccatgatcgaccgctcctccggtgcacgcaacccggtctaccattttctcaacacttccacctttgctgagtacactgtgattgactccgcttgcgctgtcaagatcaaccctaaggctcccttggagaagatgagtctcctcagctgtggggtctccacaggagtgggagctgcatggaacactgcaaacgtctccaaggggtccacagtggcaatatttgggcttggtgccattggtcttgcggttgccgaaggtgccagattgagaggagcatctcgaatcatcggagttgacataaaccctgaaaaattctccaaaggcaaagagatgggcatcactgacttcatcaactcgaaggcatctggcaagcctgtccacgaggttatcatggagatgacagatggcggtgtcgactacagcttcgagtgcaccggcatcaccgatgttctacgggaggccttcgtttccacacatgatggatggggcctgaccgttgtgctggggatccatgcaacgcccaggatgctgccgctgcatccaatggagttatttgacggccgtcggatcactggctgcgtttttggtgacttcaagggaaagtcccagctgcctgaaatcgtggagaagtgcatgcagggtgagattaacataaattttgatgggttcataacacaagagttgcccttcgccgacatcaacaaagctttccagctgctggaagaggggaagtcactcagatgtctgctccatgtctgatgaaacttgtggattgtaaatttgaatacacaataaatgaatcataaatgttttcgcggt

SEQ ID NO: 3800 - DNA, 1828 bp, Oryza sativa
  ref <308>: DATABASE ACCESSION NUMBER: AK061376
  ref <309>: DATABASE ENTRY DATE: 2001-12-06
atagctaagctcactgactatgcatgaagcttccagaggcagtgaggcaccacaaattttcagacacatgctggctggagtagtgtaaatatacacacacacacactctctctctcatagtaacagggctcaagggccaacaagattagcactcactggttcttcttccttgtttatttggtaattactctgtccctgattcttctccggctccggcgagatcatgtatcttgtgaaggatatcggcggcgccattgcgctgatgggcgtgtcactggtgctcctgggcacatggccggtggtcctcgccgtgctggagcgccgcggccgcctcccgcagcacacctacctggactactccatcaccaacttcctcgccgccctcctcgtcgccttcaccttcggccagatcggcgccgacacgccggagacgcctaatttcctcacacagctcacccagatgcaggacaactggccttcaatcttgttcgcgatgtcgggtggcatctttaacggcctagggacactggccacgcagtacgggtgggcgttcgtcgggctttcggtcaccgaggtcatggcgtcaagcctgaaggttgtcatagggacaacactgaactattttctcgatggccggatcaacaaggcggagattcttttccccggtgtcggatgctttctgattgcagcctgccttggatctcttgttcactcttccaatgctgctgacaaccaggagaagctgtctagtgccatggtgaaccacagcaacaccaatggggacactgaaaatgaagaactcaccaagcacctccttgagatagaacaacccaaggattgtgaagaacaagagcctgaagtggcaccggctgcccaggctgtggaaaaactagaggcaggaacagctgatttcctggttgaccttgaggggaagagatctattaaagtgctcggatcgaacaccttcctgggcctcggcatcgtcaccttcgccggcgtgagctactccctcttctcgccggcgttcaacctcgccaccaacgaccagtggcacacgctcggggagggcgtcccccacatggtggtgtacacggcattcttctacttctccctcgcctgcttcgccatcggcatcgccctcaacatctggttcctctaccaccccatggtcggcgtgccgcggtcgtcgctcacggcctacctgaaggattggaaggggagggatcttgctctcgtcgcaggcatggtgtgtggccttggcaatgcgttccagttcatggctgggcaggctgctgggtatgctgctgctgacgctgtccaggcgttgccgctggtgagcacggtgtgggggatcgtgctgttcggcgagtaccggagatcgtcgcggcggacttacactctcctggggagcatgctgttcatgttcgtcgtcgccatggtcatcctcatggcgtcgtcggcgcaccggaggccgctctgatggcggccggccggcggctgccgtcgacctcctcctctcctcatggacatgaccgagaaacatcagaagaagaagaagaagctgcatatgtacagctccattgatctgaccacatcagtgtgtagttcctgaccttctcgacgtaggatctatgcatattgcctcccggtgcttgcgcatcggcgaggctacacatcaattaatttcttctgcaatgagcaaccatgggatgggggagtgaatttggagatgtgattggactagtatatagtgtaatgttgtaatatatgtctcagcttctttgtgtgaagcttctgtgaagggaaccaaaataattttcaaatgtat

SEQ ID NO: 3801 - DNA, 1467 bp, Oryza sativa
  ref <308>: DATABASE ACCESSION NUMBER: AK061377
  ref <309>: DATABASE ENTRY DATE: 2001-12-06
agctagcttctctgtaggctgtagctgcggtggcaatggcggcggcgaggttgtgggtggttgcggtggcggtggcggtggcggtggcagtgatggcggcggcggtggaggggaagagctacaacatcacgaagatcctggcggcgcacccggagttctccaagttcaacgagatgctgagcaagacgaggctggcgtacgacataaaccggcggcagacgatcacggtgctggcggtggacaactcggcgatggcgtcgctggaccacttcaccctccccaccatccgccacatcctctccctccacatcctcgtcgactactacggctccaagaagctccacgccctctcccatggcgccaccgcctcctcctccatgttccaggcgacggggtcggcgccggggacgacggggtacgtgaacatcacgtcgcacaagggcgggaagatcgacttcatctcggaggacgcggacgagagcgcgaagccgtcgaggtacgtgaagtcggtgaaggagatcccctacgacatctccgtgctccaggtgagctccgtgctgtcctcctccgaggccgaggcgcccgtcccgccgccggcgccggtgaacctcaccgagctcctctccaagaagtactgcaagtccttcgccggcctcctcgccgccaacgccgacgtcttccgcgccgtcaacgagaccaaggacaacggcctcaccctcttctgccccgtcgacgccgccgtcgccgccttcatgccctcctacaagaacctcaccgccaaggccaagaccgccatcctcctctaccacgccgtcccggactacttctcgctgcagctcctcaagtccaacaatggcatggtcaccacgctcgccaccgccagcgagtccaagaaggactacagctacgacgtccagaataagggcgagaccgtcacgctcgacaccagggtcgtcaactccgccgtcaccgccaccgtcggcgacgccgagccgctcgccgtctacgccgtcaccaagttcctcaagcccaaggagctctacaaggtcgtcgaggcccccgcgcccgcgcccgagccgtccaagaagcacaagtcggcggccgacgacagcagcgacgactcgtcggacgattccggcgacgtcaaagcccacaagggcgccgccgctccggcgccgctcgcccggtgggtgaccgccgccgcggccgccgccgtagcagcattgatgctaatggcttgatgcatgagtcagtcaatctacactctacagagcagagtgtgtcgaatttgttttttttttttcctttttggtatggctggtcaattacaaataagaaacatagatgtgtgaatgatttgtagttctttgagttttttctttctttctgtggtggtttgatgtaattactttgtaattaatatagttgtccataatccacggaaaaagctaagaatgatttcatcat

SEQ ID NO: 3802 - DNA, 871 bp, Oryza sativa
  ref <308>: DATABASE ACCESSION NUMBER: AK061378
  ref <309>: DATABASE ENTRY DATE: 2001-12-06
aatcaacccaaccccaggagaagaagagaacacaccgttcagttcatcctcacctcttgttctccacaattgcagataagttgcttcctctttttttgcagagaggagtggtggttttggtggtgcagatgatggctggcttgcaaagatcagcgacaacattcagaaggtccggttcgtcaggcctggtctgggacgagcggttcttgaccgaggacgcagaggcggccaaggccggcgatggcgatggcggtggcggcacggaggagccccagccggagctccggcattccaagagcgtcgggagcatcggcatgatgcgccgtgtcgctgccgacgacggcgacgacagcgagaagacgacgaagcagcagaggaagaagaagaagaagaagaagaaggacggtcagaaggaggacgacaaccgcagccagcaggtgttcaggaccaaggacatcgccccggacgtcgacccgccgtcgccgagggtgtccggctgcatcctctgctccatcttctccggctccggctcgtcgtcgtcggcgacgtcgcgccgcgccaagccgaggaagaagtgaaacaaacggggtgacatataaaaaaccatacataccttcccggtggtgctgcatcatctgttactgtaaagccgtgtgagccatggatctggggcatgtctatacactcgagtgacacatgagtttgtactgcttataaacacatatatatttgtcaggttagtttttttttcttttttttaccttctcttttgttcatcagctcctcgatccagatccatggctcaaacccatagttattagagcttattagtactagcaaccagcagctattgagatttgggttgttcttc

SEQ ID NO: 3803 - DNA, 1292 bp, Oryza sativa; identical to SEQ ID NO: 3185
  ref <308>: DATABASE ACCESSION NUMBER: AK104538
  ref <309>: DATABASE ENTRY DATE: 2002-08-28

SEQ ID NO: 3804 - DNA, 1181 bp, Oryza sativa
  ref <308>: DATABASE ACCESSION NUMBER: AK061379
  ref <309>: DATABASE ENTRY DATE: 2001-12-06
aaggtgagagggtgaggaagagattcctcttccttgctgccgccatcgaaaccgctcttcttccctgctgcggggtgagggatggagcgcgtgaggagggcttcgcacgccggctcttggtacaccaacaatgccaggaaactggatgaggaacttgatggttggctgagggctgctggtctcaccaagtcccctgatgtgagggcagtaattgcgccccatgctggctattcatactcagggcggtgtgcggcttatgcttttggcaacattgatccaactaacatttctcgggtcttcctgttaggcccttcacatcactactatactccaaaatgtgcattaacaagagctactatttatagcaccccaattggggatttgccagtagaccatgaagtaattgaggaactcaacgctacaggaaaatttgattttatggaccttagtgtggatgaagctgaacatagcatggaaatgcatttaccctatctttctaaagtttttcagggacataacgtaaaagttgtccctatccttgttggtgcccttaactcccaaaatgaagccatgtatgggcagttgctctctaaatatcttgacgatccgaagaacttcttttctatctcctcagatttctgccactggggaacccggtttagttacacatactacgataagagccatggtgctatacataaatcgatagaggccttggaccgcatgggcatggagataatagagactggtaatccagatgcattcaagcagtacctgcaagagtatgagaataccatatgtggacgccaccccatcagcgttttcctcagcatgctgaaacattgtttgacaaagatcaagatcggatttgttcggtatgagcagtcaagccagtgcaagagcatgagggacagcagcgtgagctacgcttctgcggcagccaaggtggatactccagccgaagaagagaaggattagattgtggattttgcacggatcacttgtacaacccccgcctgcagctagcatgatcggtttgcaatccattgtatctgcctgccaaactctataaagtaataacaggttcttgttgaagaccgatcgttgcagcaaggtgaacaccaggtaacaacaatgaataaggaatactcatatttctggatacatttaccctagcatct

SEQ ID NO: 3805 - DNA, 1058 bp, Oryza sativa
  ref <308>: DATABASE ACCESSION NUMBER: AK061380
  ref <309>: DATABASE ENTRY DATE: 2001-12-06
acacacacacccaaacccaacctcccaaaacacccacccggtttaccagagatccgcgcccgccacttgtaaacctgctgcacccatggcgcccagagcagctacggtggagaaggttgctgtggcgccacccaccgggcttggtcttggcgtcggcggaggtgtcggagccgggggtcctcactacaggggcgtccgcaagcgcccgtgggggcgttacgcagcggagatccgtgaccctgccaagaagagccgggtgtggctcggtacctacgacacggcagaggaggccgcccgcgcctacgacgccgccgctcgagagttccggggtgccaaggcaaaaacaaactttccgtttgcatcacagtcgatggtcggctgtggcggcagccccagcagcaatagcacggtagacaccggtggcggcggggttcagacgcctatgcgggccatgcctctgccgccgactctggacttggatttgttccaccgcgcggctgctgtgactgcagtcgccggcaccggcgttcgctttcctttcagaggatatcccgttgcacgtccagcaacgcatccttactttttctatgagcaggctgcagcggctgccgcagctgaggctggataccgtatgatgaagcttgcaccgccggtcaccgtggcggcggttgcacaaagtgactccgactcctcgtcggtggttgatctcgcgccgtcacctccagcggttacggcgaacaaggcggcagctttcgatctggatctgaaccggccgccgccggtagagaactagctcaggatgggttagctgacgactttgtagtttctctcttattttcttctttgatggatatttctctccgatgttttggtcctctgtgtttttgtttagtagcctgtgagagacggaagagccttgtaaatagtttttctgccgagggcgaaattcatcttgggatctgttaattagaacagatcatgccggcgatgagatggactaaaccgtggagtgtatgtattcctttatattagtatgaagaaattattcagaaagtcac

SEQ ID NO: 3806 - DNA, 1196 bp, Oryza sativa; identical to SEQ ID NO: 3167
  ref <308>: DATABASE ACCESSION NUMBER: AK104539
  ref <309>: DATABASE ENTRY DATE: 2002-08-28

SEQ ID NO: 3807 - DNA, 1292 bp, Oryza sativa
  ref <308>: DATABASE ACCESSION NUMBER: AK061381
  ref <309>: DATABASE ENTRY DATE: 2001-12-06
gctctaagctcacaccgatccagtaatcgagctccagacatccatcaatggccatggagctctctaacctgacgaggtgccatctgccactgctcctgctcttcctgctggcaggatcctcctccatggctttgccagtgcatcctgcaatggacagggtgagatggcaggtcgacaaggtcaaccggcggggccattccatcgggctcgtcatgtcgtacatcgatgaggccactgctcttgaatcctccggctacttcagaccttggcatgtcctccccttcgttgacctctacggacgaaggtatcacatcgggagtattagaggtgtcaatgttatatatgcactgacaggacaacgcaggttaaatgcggctgtgactgtacagactctcatcgacgtctttactgtgtctggcattgttcattatggcacagcaggaagttctaatgattcaatgtcatttggcgatgtcagtgtccccaaatttgttgcttatacaagtgcttggacatggaagaagttcaaatcaccaaaagagtcggatacagaacttagctttggagattttactgtcccaaatggaggagagaatcttctaggagctctgaaattcagaaatgaggagctatactcagtgggtaagcctatgaaagaagttttctggttacctgtagattcagcatggttcaaaatcgcagaaggacttaaggtttcacttgaaagatgtaacgacactttctgcttgccaacaactccaaaagtagtctgtgggctaaaaggatcgtcagctgatatgtttctagacaatgcagaatataggaagttccttttcagagaatttggtgtatcaacagtagatgaggagagtgcagcagtggtgatgacaacaacatctcctggcatacctgtgattgtattccggggagtttctgatttggctggaggggagccaacatggtcgtcaacaagcctgatgaacctggcatctattaatgcactcaaagtggcagtggagtttattgctacagtcgggaaacagaagtcaacaatgtcagcaggaagtgctaataactgaaggaaaaagatcacatccatgctgatccaataatgccctggaataacattttacagcagtagctgcattcagaataagatgctttcctgagcttcaagtgcatgtcctctcccataaaggatattagtgttgaattattttgttgaaacttgtaagcatgcatgtgcgatcattttattgcaaatggaatagcagatgatgttgctttttacg

SEQ ID NO: 3808 - DNA, 1106 bp, Oryza sativa
  ref <308>: DATABASE ACCESSION NUMBER: AK061382
  ref <309>: DATABASE ENTRY DATE: 2001-12-06
atctctttttcctcgttctccccttctctccctcacggctcacgctctcccagtgccgccgcttcttaggcagcgccggcgacgccgccgctctccctagcgccggctaccgcgccccactccggcgacccctcaagcagatgtcccgcagccgcgaatcggtttattggctccacgcttctctgcccctaagctaaccccagccaccagtctcctgctgctgctgccgccgtggagatggctggtggaaacacagcgcaactccggtggctgcatccctttcccccataggatctactctcctcccctattttaattttttggttacctcggttgattctaccgtgattgaaaaatgtgtggttcagctcctcctccagaactccaagtcttctcttctactgctgctcttctggatctaaggtgattttgctagaactgagcttctccaccttgagcttgactgattgtttcccccctcttgaactgaaccccccatgctctacttggaactcaggtaattctcctccttggctcttgctctactggtaatatttgactgcttcctgacatcttccttgatctgcttctggtgattctcttcctcctcttcagactgatcctcttgcttgattttcgctccatcttgcttcttgacctgagtttcatctcttcctagagctgaaacccttcttcatccaagaactaaacaaccctgcttctccttcagatttggttttcctctctctgattacttggccatggttactactactgttggttcatgtattggtttgagctggacttcagttgagctatttctctctgggtggagctaacacttaagctaatttttcctggagcttggttctatggttgtaactactactgccgcagctgctgcttgttttggtttgcacgaccaacccgagacttgggttggaaatgattcacacaaattattttatcaatgataaatattgtactggtgattcacctgcttgcatggctattcccatcctgtacttgtgacacctcaacatggcttgttcggtgggataacctaaagctatttgttaatttccttaattaatggaaattggtag

SEQ ID NO: 3809 - DNA, 1230 bp, Oryza sativa
  ref <308>: DATABASE ACCESSION NUMBER: AK061383
  ref <309>: DATABASE ENTRY DATE: 2001-12-06
ttctctctccctagcacgcaaccgagtcgagactagacaaggggagcagccgccgcgatccaagtcctcctccgccgccgccgacgccgccatggatccgaagctggtggaggtgacgcagctcttctcccgcttcaaggcagccttcgccaggaacgacttcgacacctgcgtagacctgctgtcgcagctcaaggtccgcctcaccaagttccccagccttcctccatcatttcagcagacaccgaatgcagtggaagagctgaaaattgcgagggacatctatgagcatgcagttgttctgagtgtgaaaattgaagaccaagatgcatttgaaagggacttttgtcaactcaaaccttattacatggatacatgcggcataattccaccatcaccacaggagtatccaatcttgggtcttaatcttctaaggctgttagttcagaacagaattgcagagttccacactgagctggaacttctgccggtcacagcacttgaaaatccttgcatcaagcatgcggtggagcttgagcagtcatttatggagggtgcttacaaccgagtgttgagcgctcgccaggctgtgccccacgaaacatatgtgtacttcatggatcttcttgccaaaacagtcagagatgaactggctggttgcagtgagaagggttatgattatatgtcaatagctgaagcaagacaagtgctgatgttcagctctgacaaagaattgcaccagtacatcgcagaggagcaccctgaatgggaggtaaaggatggttccgtcttcttccagaaggcgaaggagacccagccctgcaaggagataccatctttgcaggttatcaaccaaacgctcagctatgctagagagctggagcggattgtatgatttgttaatgaatatcatttgagatcatttgggacggcatgttcatgctatgtacacatcaggtgtcacggttgagatgcgcatgttgcagctttgaacgtttgagatgcccatgttaccttatgatactttttttaaaaatttcatttaatgggctggatctgtgtctgatgtttggctgcccagtaactctgatcgtgttttgatatgtcagttcgtgatcaatttactttgctgaatagctgtcctgaaaatgttcagtattagtcgtgaattgcaactgcaaactgttgggcttatgatgatgaaatgagatcgtacttattttgatgatc

SEQ ID NO: 3810 - DNA, 1232 bp, Oryza sativa
  ref <308>: DATABASE ACCESSION NUMBER: AK061384
  ref <309>: DATABASE ENTRY DATE: 2001-12-06
actctcccactccacgagacggcttgactttcttcgtcttctcctcctcctccgcttcgcctcctcgcgcagatcccgacgcacacctcgcgcccgcgccgcctataaattcccccgcctcgccgttgccgccgccgcgggaagcgaggcgaagcgagggagcgcgtctagatccgcaccggcgaaacgacccaagctgcctttcccgtcgccgcacgcatcatccgggctctgttgctgctgctataccgcgcccgttcgctgtagcagcaggaggaggaggaggaggagcggagtggtggcgatggcggcgaggaagaatgccggtgtcctcgcgctcttcgacgtcgacggcaccctcaccgcgccccgcaaggtggtgacgccggagatgctccagttcatgaagcagctgcgcgagcatgtcactgtgggcgtggttgggggatctgatctggtgaagatttccgaacaactcggcaaatcagttactactgattacgattactgcttctctgaaaatggcctggtcgcgcacaagaacggcgaactcattggaactcaaagtttgaaatcgtttcttggagatgatcagctaaaggaatttattaacttcacgcttcattacattgctgacttggacatcccaatcaaaaggggtacattcatagagttccgaagtggaatgctgaatgtgtcgcccatagggagaaattgtagtcaagaagaacgtgatgagtttgaaaagtatgataaggtacataacattcggcctaaaatggtctcagtgcttcgtgaaaagttcgcccacttgaacttgacattttctattggagggcagattagttttgatgtgttcccacaaggctgggacaaaacttactgcttgagatatcttgaggaatttcaagaaatccatttctttggggacaaaacctacaagggaggcaatgattatgagatatttgagtctgaccggacaattggacatacagttaccagtcctgatgatacagcagagcagtgcagatctctcttcatgtcgaagtgacctgattaccgtgcattttatttattttacatagcattcctcacatttcctgtatttccctttcttttataccatacaagtgctgcttcttacagaatgtacttctccgtattcacaagtttcagattatatgtgtacactttggttcaaataaatgagagctggcattgtttaccccgtc

SEQ ID NO: 3811 - DNA, 1133 bp, Oryza sativa; identical to SEQ ID NO: 3176
  ref <308>: DATABASE ACCESSION NUMBER: AK061385
  ref <309>: DATABASE ENTRY DATE: 2001-12-06

SEQ ID NO: 3812 - DNA, 1159 bp, Oryza sativa
  ref <308>: DATABASE ACCESSION NUMBER: AK061386
  ref <309>: DATABASE ENTRY DATE: 2001-12-06
aaattccccaatccaaatccgccctcgcctcgccccgatcgatcccctcgattcgattcgatcccgcccgatgcgagtggaggcggcggcggcggcggaggaggccgtggcggcgtgcgcgcgagcttagggtttctagggtttgcgctagggtttgggggcgcgcccgcgatgggccggtctcgcggggtgcccaattccggcgacgatgaaacgaaccacaggtcgaagcggaggagggtcgcgtcgagcggcgatgcgccggactcgctctcggcggcctgcgggggagccggagagggtggtgggaagaaggcgctgtaccactgcaactactgcaataaggatatttccgggaagatccggatcaagtgctccaagtgccccgacttcgacctctgcgtcgagtgcttctcggtcggcgccgaggtcaccccgcaccgcagcaaccatccttacagggtcatggacaacctgtctttccctcttatttgtccagattggaatgcagacgaggaaatccttcttctagagggaattgaaatgtatggtctgggaaattgggctgaagttgcggagcatgttggcaccaagaccaaggcacaatgcattgatcattatacaactgcatacatgaactcaccttgttatccccttccggatatgtctcatgttaacggtaagaacaggaaggaattgcttgctatggctaaagtacaaggcgagagtaaaaaaggaacttcagtgttaccaggggatttgacccctaaggacgagtctccattttctcccccaagggtcaaggtggaagatgcacttggagaaggtttagctggtcgatcaccttcacacatagctgggggtgcaaataagaaagcatcaaatgttggacaattcaaagatggtgctaatgtagcaaaagttgaagatggtcatgtggatagaagtataggtgtgaaaaaaccccgatattctgcagatgaagggccttctttgactgaactgagtggatacaattcaaagagacatgaatttgacccagagtatgataacgatgctgaacaggcactcgctgagatggagtttaaagaaactgattcggaaactgatcgtgaactgaagctaagggtattgcgtatttacttgtcaaggcttgatg

SEQ ID NO: 3813 - DNA, 950 bp, Oryza sativa
  ref <308>: DATABASE ACCESSION NUMBER: AK061387
  ref <309>: DATABASE ENTRY DATE: 2001-12-06
atcgccaccgtcgttcacaccacaccacctgctgcacacagctcgatcgagttagcccactagctaccaaccaagctgccggcgagaggtatggcggcgtggcgcggtctggcgttggcagcggtggtggcgtggtgcgtggcggcggcggcggcggcgccagacgcggcgctgcagagcaaatgccagcaggacttcacgaagctgacggactgcatggactacgcgacggggcacgaggaggcgccgtcgtcgacgtgctgcggcgacatgtcggcgacgcagcaggcgcggcccgagtgcctgtgctacatcatccagcaggtgcacggcggccggaacgaggtccagtcgctcggcctccgcttcgaccgcctcctcgccatgcccaccgcctgcaagctccccaacgccaacgtctccctctgcatcaacctgctgcacctgaccccaagctcaccggactacgctgtcttcgccaacgcctccaaggcggctacgacgccgtcaagcaccaccccgggggcggcggcggccaccgccggcggcttcaaggttcaggcggggctcagctacggcgtcgtcgcggcggcgatggtttctgccgtcttctcatccatcttctgatccgtgaaacaagctagtcacccacccatttttctttgggaaaaaatcttttctgtctcttgatctctacgtcgttcagcttttactctgcaagaaacgaatgcacactggatggatggatggatggttggtttgtgatgtgctacacgaagattcgttctgatgttgtactcttttgtaccctgataaatagatttgagacttgatttttgttcttctgtggcttgatgctagctagctacattctgaatactgatacacgcatatgctagtactaaatctgaataatcaataatgtacctcattttttcttctgaatattg

SEQ ID NO: 3814 - DNA, 1123 bp, Oryza sativa; identical to SEQ ID NO: 3692
  ref <308>: DATABASE ACCESSION NUMBER: AK104540
  ref <309>: DATABASE ENTRY DATE: 2002-08-28

SEQ ID NO: 3815 - DNA, 1392 bp, Oryza sativa
  ref <308>: DATABASE ACCESSION NUMBER: AK104541
  ref <309>: DATABASE ENTRY DATE: 2002-08-28
agctcacctcgcacccagatcccaatgcaccaaccagccataatgcagcgggctctcgccgtcgtcgccctcctcgccgccgcagccgccatcgccgccgcccagggggagtcgccggagttgctgccgttcgcggtgggggcggcgccggaggggtgcgacgtcggggaaggggagtgggtgttcgacgaggcggcgcggccgtggtacgccgaggaggagtgcccctacatccagcccgacctcacctgccaggctcacggccgccccgacgccgcctaccagcgctggcgctggcagccgcgcgactgctccctcccaagcttcaacgcgacggggatgctggagatgctgcgggggaagcggatgctgttcgtcggggactcgctgctccgggggcagtacacgtcgctgctctgcctcctccaccgcggcgctcccggcggcggcggcgggtccagatccttcgagacggtggattcgctcagtatcttcagggccaaggactacgacgccaccatcgagttctactgggcgcccatgctcgccgagtccaactccgacggcgccgccgtccccgacgaccgcctcatccgcggcgcccccatgaacaagcactcctccttctggaagggcgccgacgtcctcgtcttcaactcctacctctggtggatgaccggcgacaagatccagatcctgagaggcgcggacgaggacatgagcaaggacatcgtggagatggaggcggcggaggcgtacaggctggtgctgcaccaggtgacgcggtggctggagggcaacgtggaccccaagagcgcgcgggtgttcttcgtcacggcgtcgccgtcgcacgccggcgccggcggcgagtgctacgaccagacgacgccggtgggcgcggccgacgcggcgtcgtactgcgggagcacgagccggcggatggtgcaggtcgccggcgaggtgctgggggcatcgcgggtgcccgtcggggtggtgaacgtcacccggatgtcggagctccgccgcgacgcgcacacgcaggtgtacagggagcagcggtgggcgaagccgacggcggagcagctcgccgccgacccgaggagctacgccgactgcacccactggtgcctccccggcgtccccgacgcgtggaacgagctgctctactggaagctcttcttccccgcgcgcgacgaggcgatctgacctcatgacgtcacgccgccgccatcgtcgtcgtcgtcgtcgtcactaatcggtgtaatctgctccgttcccgccatttcttttcttggcgatcgatgtaatcaaatctctctatacttgctcctcttctctcctcttctctttttgaacgaagtgaaaatacagaagctagcattatttgcttgc

SEQ ID NO: 3816 - DNA, 1008 bp, Oryza sativa
  ref <308>: DATABASE ACCESSION NUMBER: AK104542
  ref <309>: DATABASE ENTRY DATE: 2002-08-28
cattcagagttagcaagctcttctaattcatatatagaactcagaatggcaggtgctcctcgaggactagttctcctcggcgtttgcgccgtcctgatggtgctcgccgtcagtggcgaagcggcgtcggtcgtcatcggcacggccaagtgcgccgactgcacccggaagaacatgaaagccgaggatgctttcaagaatctccaggtggcgatcaagtgcaagaacggcaatggcgagtacgagagcaaggccgctggaaagcttgacggctccggcgctttcagcgtccctctcgacaccgaccttcacagctctgactgcattgcccagctccacagcgcaaccaacgagccatgccccgggcaagagccatccaagatcgtgccattgtcggagggcacctttgtcaccgtcgctggcaagaccagctatccgtcggctttgtgtgcgtcggcgaccatctgcggccccatcaagaagaagatcatcgaccacttccataagaagccggtgccaccgaagccggatcccaagccagagccgcccaagccgaagccagagccagagcaccccatcctcgaccacttccacaagaaggagaaggacttctttgaccacttccacaagaagcccgtaccacccaagcctgagccaaagtcggaacccaagccacagcccaagccacagccagcgcctgagtaccacaaccctagcccaccagcgaagcactaaacattatctacgtttggtcttgtatgatttcgtgccatatcagtgtgtccgcagaataacgctttctacccccgtgtgagattatacattgaaatataatgtacttgctagctttcatccgcaggagttttttttttaaagtgtgaccgggttcatttattggatatcgcatgcatattagcagggcacgatgtgtactgtaatatctgcctgttgtttttatttctctacctaaatgaagttaaccacaaaggacaaacataaattcacatg

SEQ ID NO: 3817 - DNA, 1221 bp, Oryza sativa; identical to SEQ ID NO: 1770
  ref <308>: DATABASE ACCESSION NUMBER: AK104543
  ref <309>: DATABASE ENTRY DATE: 2002-08-28

SEQ ID NO: 3818 - DNA, 1008 bp, Oryza sativa; identical to SEQ ID NO: 2515
  ref <308>: DATABASE ACCESSION NUMBER: AK104544
  ref <309>: DATABASE ENTRY DATE: 2002-08-28

SEQ ID NO: 3819 - DNA, 1062 bp, Oryza sativa
  ref <308>: DATABASE ACCESSION NUMBER: AK061388
  ref <309>: DATABASE ENTRY DATE: 2001-12-06
aatgctagcgttgctgttcacgtcgttgccaagccacaaggagaaggaagaaggaagagaaggcagaaggaagcagcaggagaaggagaaggccagaagaaacaatggattgctgcgtgtgcagtcccatggcgtccatgtacaggcttccaaggaacgccatctgcgctgcgtgctatgaaggtgccaaggccatcatcgccttcttcaacgacgacgacgacgagcacgccgatgctgatcaaggctcggtgaagcccagcagattgacaaagctcaatagcacaaccaagggattgagagatgcgtgggaggaggtgaagcagatgcgatgcagagaggaggagaccaagcagagggcatcgtttctccagcaaggcttcgcggcggcgtggaaagacggcatccacaccgacatcgccgtcaggcctggaactgggcccccaatccaagcccataaggccatccttgcgaccaggtcggaggtgttccgccacatcctcgccggcgacgacgactgcaaggcccccgccggcgactctctgtcgctaccggagctgacccacgacgagctctcccacctcctcgccttcctctacacgggctccctggcgacgtgcacggaggagcggcacctgcacgcgctgctggtcgccggcgacaagtacgacgtgccgttcctccggcgagcgtgcgaggcgcggctggcggcgggggtggaggcgggcaacgtgctgcggacgctggaggtggcggagctgagctcgagcgcggcgctcaaggagcgcgccatgggggcggtggtggagcacgcggaggaggtggtgttctcgccggagtacgaggagttcgccgtcaggaacgccgccctttgcgtccagatcacccgcgctctgcttgccaataaagcatttcccgccaagacgccttaatatcccttttatttttcttcgtttagaatttagttagacgacgtacgatgtataagtgtaattaaatgatagtacatgcatatctctggaattaatgtgatcaatatatacaatttagattctttgcacg

SEQ ID NO: 3820 - DNA, 1105 bp, Oryza sativa
  ref <308>: DATABASE ACCESSION NUMBER: AK061389
  ref <309>: DATABASE ENTRY DATE: 2001-12-06
accagcagcagcagcttcacgcctctcctactgcacattgcacctcgagtccagaggctgagagagctcacggggagaagcaaaccaaaagcccaaaggacttttctaccatggcgtggcaactcctcgccggcgtgctgctgctgcagctcgcggcgagcgcggcggggcagcagcagtgcctgtccgcgacgttccagaacgggcagacgttcctgaagtgcaacccgctgccggtgctcggcgccagcctgcactggacgcaccacgccgagaacggcacggcggacgtcgcgttccgcgccccgcagcagagcagcggctgggtcgcctgggggatcaacacccgcggcaccaccatgcccggcagcagcgtgttcatcgcctcgcaggacggcagcggctccgtgtccgtcctcatgaccgtgctggagaacaccagcccgagcctgaccaacggcagcctcagcttcgacgtgctgtccccgcccaccgccgactacaccaacggcgtgtacaccatcttcgccaccatcgcgctgcccaacaactccacgacgcagaacaccgtgtggcaggccgggccagggagcaccgggaacgtcggccagcacgcgacgtccggccccaacgtgcagagcatgctgaggctcgacttcagctccggccagagcaccggtaccgcctccaactccaggctgcaccgccgtaacgtaagttcttctcctcctccttgttgatcgattcagtgaactttttcaattagaggatgttgcttctcgagtttattttagacgttaggcatgtcaccaactaacgataggtaatcaactagaggtcagtcatcggtgtcatccttttaaagattttcattttaggatcgccgaattgttttgatcagatattccattccagttgagttgaggatgactggaggattgagaattaatcctgttggattgatcaattgacatgatgatatacataacctaaccaaatagataggcaattttggcggctaacttttaataacacgatgtggttagttcaacaaccggatagagatgggattaggagacgttatcccttctgctcatctgtttct

SEQ ID NO: 3821 - DNA, 1204 bp, Oryza sativa; identical to SEQ ID NO: 3451
  ref <308>: DATABASE ACCESSION NUMBER: AK104545
  ref <309>: DATABASE ENTRY DATE: 2002-08-28

SEQ ID NO: 3822 - DNA, 1051 bp, Oryza sativa
  ref <308>: DATABASE ACCESSION NUMBER: AK104546
  ref <309>: DATABASE ENTRY DATE: 2002-08-28
aacgaacagaacacacacccactgtgctcatggcttcctcttcctcctcccttggccttggcgccatcttccaaagcggctgccccctcctcccgcctcgccccgccgtccgccgcgcgcccaccaggcgccgcgccgtcgccaccaagatctcctgcatcggatgggaccccgagggcgtcctcggcccgccgcagggcggccacatcgtgcgcctcgagttccgccgccgcctcgagagggactccgacgcccgcgaggccttcgagcgccaggtccgcgaggagcacgagcgacgccgccaggagcgcgaggcgcgggtcatccctgacacggacgccggcctcgtcgagttcttcctcgacacggaggcgcgcgagatcgaggtagagatcggcaggctccgccccaggctcaaccagcccttcttcgactacatccagcgcgagatcgcccagatcaagttctcaatcacccgaacagcggaaatggaggaccgattgatcgagttggaagcgatgcaaaaggttctgcttgagggagtggaggcctatgacaagttgcaaaatgaccttgtcagcgcgaaagaacgcctcacaaagatcctgcaatcaagcgacaaaaaatcgacacttcttgaaatggttgaacggaatgagctcaacatgtccatactaacactcctcgatgaaaatatagcaagcgccaagaccaacaatcaggaagaagctgtggctttcatggagaatgttcgctcatccatcctgaaatatattacagtatgaaattggtaggcatgtggacttagccctgtcacatggttatcaaaattaggtcatgaacctgtaatttgcaaggacatgtcacatattcaagggtctgattatgtttctctcttgtatttagttattgtgttccatatatgctcatgtcagtgtcaatagttttttggtaaagagaaattgtacaatcatatacttgtaccaccaacatatacttgaaccagtttcctggttggacagctagttttacctgttgcaaaaaaaaaaac

SEQ ID NO: 3823 - DNA, 877 bp, Oryza sativa
  ref <308>: DATABASE ACCESSION NUMBER: AK061390
  ref <309>: DATABASE ENTRY DATE: 2001-12-06
acaaaatttgtctccacgttttcttggatagttagttgctcacccgatcctgtatccatggcggccgtgtcggaggtggaggtcgacggcgtcgtgttcccgccggtggcccgcccgccgggctccggccacgcccacttcctcgccggcgcaggtgtgaggggagtggagatcgccggcaacttcatcaagttcacggccatcggcgtgtacctggaggagggcgcggccgtgccggcgctggccaagaagtgggccggcaagtccgccgacgagctcgccgccgacgccgccttcttccgcgacgtcgtcaccggcgatttcgagaagttcacgagggtgacgatgatcctgccgctcaccggcgagcagtactcggacaaggtgacggagaactgcgtcgcggcgtggaaggccgccggcgtgtacacggacgccgagggcgcggccgcggacaagttcaaggaggccttcaagccccacagcttccctccgggcgcgtccatcctcttcacccactccccgcccggcgtcctcaccgtcgcgttctccaaggactcgtcggtgccagagggcgccgtggcggcggcggcgatcgagaacagggcgctctgcgaggcggtgctggattccatcatcggcgagcacggggtctcgccggcggcgaagcggagcatagcggcccgcgtctcgcagctcctgaaggcggaatccaccggcgacgtggcggcggcggagcccgcgccggtgtccgcgtgaaaatcgagctgcgaattaaccgcgcatctaagagctcctcctacacttcttgtacacttctactgccctcgtgtttgacaatgaaataaaaggaaaggagaaatcgcggctgttcttc

SEQ ID NO: 3824 - DNA, 1065 bp, Oryza sativa
  ref <308>: DATABASE ACCESSION NUMBER: AK104547
  ref <309>: DATABASE ENTRY DATE: 2002-08-28
gaatcattccggccgcagcctacctctgcctctctcctctcctcgcggcgtcggcagcgagttctcctcggatcgggagtggaggagaagcgggaggaggaggaggaggagggatgagtctcttcgggctcggccggaatcagaagacgttccgtcccaagaagagtgctccttcaggaagcaagggtgcacagcttcggaagcacatagatgccactcttggcagtggaaaccttagggaagctgtaaggttgccgcctggagaagatatcaatgaatggctggctgtgaatactgtggatttctttaaccaagttaacctgctgtacggcacactcgctgagttctgcacacctgagagctgcccaacaatgactgctggcccaaagtatgagtacagatgggctgatggtgtacagataaagaagccgatagaagtatcagcaccaaaatatgtggagtacctaatggactggattgaaggccaacttgatgatgaatctatatttccccaaaagcttggcacaccattcccgccaaacttcaaggaggttgtaaagacaattttcaagcgcttgtttcgtgtttatgcccacatatatcactcccattttcagaagattgtcagcctcaaggaggaggcccatcttaacacgtgcttcaagcacttcatcctgtttacaactgaatttggcctgattgacaagaaggagctggctccactccaggagctcatcgaatcgattattccatactgagaagaatacagggacggaacggagcgtggataacgagttctttacatggacgatcgaggaatcaggctacttgcaacactattttactggcatagagcttactgttccagatatcagacataaaaaaggacatttgacattgctaatgctatgttttttgtgtactgatgttcgttcgtcctgattcagtattaccttgtgtaagcgtgcttgtaatgtaataacaggattggtggattgggatatattgcaaagaacgatctattaatccaatcgtgagttgcaattgttgcttccttttcccagt

SEQ ID NO: 3825 - DNA, 979 bp, Oryza sativa
  ref <308>: DATABASE ACCESSION NUMBER: AK104548
  ref <309>: DATABASE ENTRY DATE: 2002-08-28
atcgctgctgctacactgctccggccatggccatcgtcgccgtcacggccggaggacggcgccctccctgccgccgcgtgccgcccgccgcttccccgcccgcgaggctctcctgccgctgtgccacccacaccgttcccaggaggaatgtactatccacaatgctatccacttcaacagtcttcctcttcggaccgaaacagatcacactggccgagacaactggtggtacattcagggagtacatcgacacattcgatggctactccttcctctacccaaagagctggatccaggtccggggagctggtgctgacatattcttcagagacccgttcttcctcgacgagaacatgtcggtcgagatatcgtctccttcgtcgtcgaagtacatgacggttgaagatcttgggcccccagagaaggctgcagagagagtgctgcagcagtacctgacagagttcatgtcgaccaggctaggcgttcgacgaacgtcgaacatcctgtcagcgtcgtcgaaggtcgctgacgacggcaagctctactatgaagttgaggtgaatatcaagtcatttgccagcaacaacgagctggcggtgatgccgcaggacagggtgcagcggctggagtgggaccggcgctacctgtcggtgctcggcgtcgagaacaagcggctgtacgagctccggctgcagtcgccggagaaggtgttcaaggaggaagaaggtgacctgaggagagtcatggactccttcagggttaacaagactgcctagcagcagtaagaagcagtgctttgtcatagttgagagcagaattttttgtatagctagcagattgtctgttctctgcattattctttcaccctccttttgttatcttgtacaagattattgccatatagtaccttatgtgtaagattatatatagtacctctgtaagatgctctggtgaggagcaaaaaaagatccaaacttgc

SEQ ID NO: 3826 - DNA, 1165 bp, Oryza sativa
  ref <308>: DATABASE ACCESSION NUMBER: AK061391
  ref <309>: DATABASE ENTRY DATE: 2001-12-06
agctcggtggctcctccgccttcgtcggcaagtttggtgatgatgagttcgggcacatgctggtggacatcctgaagaagaacggggtgaacgcggaggggtgcctgttcgacgagcacgcgcgcacggcgctggcgttcgtgaccttgaaaagcaacggcgagcgcgagttcatgttctaccggaacccgagcgccgacatgctcctgacggaggcggagctcaacctggacctgatccggcgcgccaagatcttccactacggctccatctccctcatcaccgagccgtgccgctccgcccacgtcgccgccatgcgcgccgccaagtcggccggcatcctctgctcctacgaccccaacgtccgcctcccgctctggccgtccgaggacgccgcccgcgccggcatcctctccatctggaaggaggccgacttcatcaaggtgagcgacgacgaggtcgccttcctcacccagggcgacgccaacgacgagaagaacgtgctctcgctctggttcgacggcctcaagctcctcatcgtcaccgacggcgagaagggatgcaggtacttcaccaaggacttcaagggctccgtccccggcttctccgtcaacaccgtcgacaccaccggcgccggcgacgccttcgtcggctccctcctcgtcaacgtcgccaaggacgactccatcttccacaacgaggagaagctgagggaggcgctcaagttctcgaacgcgtgcggagccatctgcaccaccaagaagggtgccatcccggcgctgcccaccgtcgccgtcgcgcaggagctcatcagcaaggcagccaactagagctcctcggtttcgtcgtcgatcgccgccattgggggcctcggaattttaggtcgatttaatttagttgctgcttcgttttagacaaggaagaggaggggcttgggtgtgttcatgtctgtcttttgtgtgctaagttagttgcttccgtgtgagaacttttggcgtttatttttactattattattaataagaagctcttggatttgcggtggatattttggtctgaatttgtgtaatgaggcagctacttggcgaaatttattgtgtcatgtctttgttcagaggaaaagaaaatcttttcgtgtgctctgtttcaaatcagttaacagttc

SEQ ID NO: 3827 - DNA, 1240 bp, Oryza sativa
  ref <308>: DATABASE ACCESSION NUMBER: AK104549
  ref <309>: DATABASE ENTRY DATE: 2002-08-28
catgatgctgaaatgatggacaagaaatctagtgatacaaggtcgagtgacccccctagaacatttgattataatgtgatatcagataacacagttgagagtccaagaaaagagggtactgacatcaagagatttgaggaatcaaacgagagtgaactgaacataactgtcagaaataggaatgtcatattgaatagctgtcaagatcatggaccaagcatttccaggacatatcatcaggatgaaatgagtcaaatggaagaagttccagagataaatggcccttccgtgtcaatcaagaatttacaacagatgtcctcttctctacttgagatgcttgatgatccagaggaatccaccagagagcttgcacttactctattggttgaaattcttgaaaagcaacgaaaggcaatggagaactgtatcgatactcttatagttaaattgctgcatgcaaccaaagatgctgccttgaaggttgtaaatcaagcccatatctgtttgacaacggtggttactcaatttgatccgctgacatgcctaagagcaattgcttctcagttggccaaccaggatgaaaaagttcttattgtcagcatcaacagtttgagcaagcttgttattcgattatcacaggacaatcttatggcacatttgtcgatatttcttcctgcactcctggacgccttcgaaaaccatagtccatatgtccgcaaggctgtggtgttgtgcttggtggatacgtacctgaagctcgggccagcgttcttgccgtatttggagaggctggacagcgcccagctgcagctggtaaccacgtacgccagcaggctgtcccagacgagctttattgctgtggacgcttgatgcaggcaacccagcagcaacagcagcagcagcagaagacgcaatgcttgtttcaacgataactctccaccgttggttagccttagccttctctttctttttatttatggccatgtgtgcacaataagggcagcagctcagctctctccccctttctccaaatttatgagcatagtagaatagatctctatactgtaaatcataattacctgtttttactacccagaaatgagatacatgcatgtaggcagtgcagattgtacaaccaatggaagaatagtagtactagcattttcatcctgtttgctacagcttatgtgatctaaaggaaaggaagaaaaaaatataatgggtgtgcagttcataggct

SEQ ID NO: 3828 - DNA, 1209 bp, Oryza sativa
  ref <308>: DATABASE ACCESSION NUMBER: AK061392
  ref <309>: DATABASE ENTRY DATE: 2001-12-06
atctccctttctccactcccaaatcgtatttcttgaacttcccagcaacacagcacaaatatggccaggagatggggtctcttcttctttctccccctcctcctcctcctcctcctctcctgctcctgcatcatctcccacgcgcttccctgctgctcaggcaaacaaactgcccacgatgacctgaatccagaacaggcaactaatccaacgatgccaatcacagtcccatctacaaacccagcaccaattatcatcactgttccttccacaaaccctaccatcacaattccttccttgaatcctctccctacacccattactgccccctcaatggtgaatccttccacctcacctgcacctgcggcatacccgctaccgacgccttcaacctctcctccttctgcatcattaaccaacccaacatcaaacccaatgacgcctgctatcagcatgccacctcctgctctcaccacaactccacccactgccccaggtctttctgggcagcaactatggtgtgtggccaaggctgactcagcagatattgcacttcagaatgcactggactacgcatgcggcattggaggagcagattgcttagcaatacaaccatcaggcacttgttattatccaaataccttaggtgcgcatgcatcctatgcttttaacagctattaccagaggagccctgcaacctccagctgcgattttggggggacggcaattcttgtcaatgtcaatcccagctcaggaagctgtgttttggcatcgtcaatgtcgttaccatcaagctccgtgtctgggtacaatcctgcattgacaactcctacggcatcatccactattactcctactacgttatctggttcaggtccatcagtgctgaacccggatggctcaggctccgccagtagttctgagtttggttcagacattccagccacgagcaattcttggcgttcaatctcccccaatggctggtccttggcagcttcgttttcaatgcttgcatgggcatacatgatgaaaggaacaattttggaaacagagtgattaaaacgatgtaaagagctagggaattcactcggccaagttgtatggcgcgcaggttgggccggaactaggaaatacttcctccatttcatattataagactttctaacattgtccacattctaatgaattttgatatatatgtgtgtcttc

SEQ ID NO: 3829 - DNA, 1089 bp, Oryza sativa
  ref <308>: DATABASE ACCESSION NUMBER: AK061393
  ref <309>: DATABASE ENTRY DATE: 2001-12-06
gcaaaatgcttggaggccacagaggggactgcccgaaaactcagtttcaattcttcgtgcttggctttttgaacacttccttcacccgtatccaaaagattcagaaaagctgatgctagcgagacaaactggcttaacaagaagtcagatttcaaattggttcataaatgcccgtgtccgcctgtggaaaccgatgatcgaagacatgtataaagaagagattggggaggcggatctcgactcgaactcctcctccgacaacgtaccaaggagcaaggacaaaatagcaacatctgaagataaggaagatctgaaaagctctatgagccagacttatcaaccaagccaattaggtgaatccaaagccaacatcgggatgatgagccttggtggggcaccagccggcttccacaacgaaggcaaccaggatgacagcttcatgaacctaatgctgaaggaccaaaggccgggcgaagccgaaggcagcctcctccatgatgccgtcgcccatcattccgatgagaacgctcggttcatggcttaccatttgtcggggctcggaagatacgggaacagcaatgtgtcattgacacttggcttacagcatcctgacaacaggctttcggtacagaacactcatcagccaggtttcgccggtgctggagaagaaatttacaactccaccgcttctctcggtgtcgctgcagcttcctcttcggactacgaatccacgaaccaaatagatcaaaggcaacggttcgaaccatcgcctctaatgcatgattttgtggcctaagatgctcaaaataccaaaaatatatggaggcaagatttgcctggggggagcatttgtaatttgtagtgccagaataacatgcctcagaaagcatggaaattgttagctgtagttgcatttggtacagaagaggggggtatagcatgaaatgtaatataattaagtttagcaggtgggggtttatagggggtaaagaatcctgtaaaaatggaatacatcatacatgtaaaagattatgattttcagaaccattctgtaaaaaaaaacacacctgtaatgactacttatcatcc

SEQ ID NO: 3830 - DNA, 1241 bp, Oryza sativa
  ref <308>: DATABASE ACCESSION NUMBER: AK061394
  ref <309>: DATABASE ENTRY DATE: 2001-12-06
gtatgcgcacgatcctcctctcttctatcaaatcctccagcctgaaacccccctaatcccctcccgcgcgcgaaagcaaaaccctagcaatcttgatccgtccctttccgcgagacccttccgccgccatggccgctgccgacgccgtggcacccgacgacggcgatcacgccgtcctccgcgacgacgagcgcgggatccctcgatccctatccctcctcgccgcgctcgtggaggccgaagccctccgccacgccgccgccgccgccgacgccgacgccgactccgaccgcatccgcgccttccgcggcggcgcgacgcccaccgtccggatcggtgagttcctggagcgcatccacaccttcatccagcgggagagcgtccgccacgtgatcgagctccagggcgcgtgctacgtgctcgccgggatctacctgttccggttcatacgcagcggcgccgcgcgggaggcggggatcctcgtcgatccttccatcgcgcaccgcctcgtcgccgtcgcgatcttcgtgggcgccaagttcggtgggcccatcgacaggctcccgacgaggtgaaccgtggtgttcgagaccagctcggacgccgcgatctgtgccagggagatggccggcctcgaacggcgcttcctcattgtcgtcgattaccgcctgttcgtcagtgctgacgagttcgactggttctgccgtgtcctggagcgagggccgcgtccaagcgggagatgcggcggcggcggtggtggtaggaagaggacggcggcagaagctgtggagggagaagcggaggacgaccgccgccgcgtctgggcctccttgccgccgccatcagttgtcgccaactaggtccacgatttctgcatccactggttcaattatttacataatgtattttcttttgctgcttgttgtctacgagttgtttgcaggtggcaagggtggagaagatgcagttggcgttggaagagttcgatcagacgaggcaagggtggagaagatgcagccggcgttggaagagttcgatcagcggccatgagtagagtgaaaaaaacaccagttttactcataggatgtttagcaactgttagctctgtcaaattatcaatccctgtcttgaatttccatcttattggaagtagataaagaaatgttaatgatgtccttttttctatctttctgttgtatgaaatctatatcaatctggaaaataataaagaagtcttttcc

SEQ ID NO: 3831 - DNA, 1034 bp, Oryza sativa
  ref <308>: DATABASE ACCESSION NUMBER: AK104550
  ref <309>: DATABASE ENTRY DATE: 2002-08-28
aatgctagcgttgctgttcacgtcgttgccaagccacaaggagaaggaagaaggaagagaaggcagaaggaagcagcaggagaaggagaaggccagaagaaacaatggattgctgcgtgtgcagtcccatggcgtccatgtacaggcttccaaggaacgccatctgcgctgcgtgctatgaaggtgccaaggccatcatcgccttcttcaacgacgacgacgacgagcacgccgatgctgatcaaggctcggtgaagcccagcagattgacaaagctcaatagcacaaccaagggattgagagatgcgtgggaggaggtgaagcagatgcgatgcagagaggaggagaccaagcagagggcatcgtttctccagcaaggcttcgcggcggcgtggaaagacggcatccacaccgacatcgccgtcaggcctggaactgggcccccaatccaagcccataaggccatccttgcgaccaggtcggaggtgttccgccacatcctcgccggcgacgacgactgcaaggcccccgccggcgactctctgtcgctaccggagctgacccacgacgagctctcccacctcctcgccttcctctacacgggctccctggcgacgtgcacggaggagcggcacctgcacgcgctgctggtcgccggcgacaagtacgacgtgccgttcctccggcgagcgtgcgaggcgcggctggcggcgggggtggaggcgggcaacgtgctgcggacgctggaggtggcggagctgagctcgagcgcggcgctcaaggagcgcgccatgggggcggtggtggagcacgcggaggaggtggtgttctcgccggagtacgaggagttcgccgtcaggaacgccgccctttgcgtccagatcacccgcgctctgcttgccaataaagcatttcccgccaagacgccttaatatcccttttatttttcttcgtttagaatttagttagacgacgtacgatgtataagtgtaattaaatgatagtacatgcatatctctggaattaatgtgatc

SEQ ID NO: 3832 - DNA, 1283 bp, Oryza sativa
  ref <308>: DATABASE ACCESSION NUMBER: AK061395
  ref <309>: DATABASE ENTRY DATE: 2001-12-06
acgcgagttcgcgaaagaaagaaactgaaatccgaattcgattccaatcctctcgaccagcgagaggcctcgccttcctcctctcccccacgttggcgtagctcgcgcgcgcgcgcgcgcccgcgcccgaatccacaaacagcgtggtcgcgggcgggggttctcgatgaggcggatgctggaggtggcggcggacgccggctcgtctgcggcggcggcggcggcaaacggcgcggtggactggtggcgcgacgtgaacgagtcgccggtgtggcaggaccgcatcttccacgtcctcgcggcgctctacggcttcgtctccgccatcgcgctggtccaattgatcagaatcgaatgtagggtgcccgaatacgggtggacaacacaaaaggtgttccatttcctcaacttcctcgtgaacggcgtgcgatccatagtgtttgtgctgcgacgaaatgtgcagctcatacatccagagatacttcaacatgtgcttctagatatgcccgggctcgcattcttcacgacgtatgcacttttggtgctcttctgggccgagatttattatcaggcgcgtgcaatgtccactgatgggcttaggccaactttctattggatcaatgctgtgatctatgcaattcagataatattatggatggttctatggtggaaaccagttcgagttatgatcatcttgtcgaagatgttctttgcaggtgtatcactgtttgcggcttttgggtttcttctctacggtgggaggttattcctgatgttgcaacgtttcccagttgaatcgaaaggacggcgcaagaaattgcaggaggttggctatgtgactacaatctgctttacttgtttcttgatcagatgtgtcatgatgtgtctcaacacatttgataaagcagctgaccttgatgttctgaaccatccgattctgaatttcttttattacttgctggttgagatcgtaccttcagctttggtgctattcatcctaaggaaactgccaccgaaacgggggatcacacaatatcatccaattcattagagcagccctggcagggacagaagaggttttcttatgagtagtctatacagcgtggtaaatacagaaaaggcaatgtgaaagataccacacttgctttcgagcttgccccagcttttgtaagaggaagcctttagaatctcagggtaccatcgtgtgtaaaaatgcaatctggtgttgttacagatttagaaagtgttaacttatatatatatatatacctttgttcttcttc

SEQ ID NO: 3833 - DNA, 1051 bp, Oryza sativa
  ref <308>: DATABASE ACCESSION NUMBER: AK061396
  ref <309>: DATABASE ENTRY DATE: 2001-12-06
atatctaacgcccctctctctctctctctctcactcagcaacagctcgcagctcactctctcactctactactcgtagctaagctagctcgcgccgccgccgccgccgtcgccgccgccatgagcaaggagaagcaccacaagcgggagcaccacctccggcgatgctgcggcgggatggcggcgtgcatcctggcgctggtcctcgtcgtcggcttcatcgcgctcgtcgtctacctcgcgctccgcccctccaagccgtccttctacctgcaggacctccagctccgctccgtcgacctcggcgacccctccctctccgccaccgcgcaggtcaccctcgcctcccgcaaccccaatgaccacgtcggcgtccactaccgccgcctcgacgtcttcgtcacctaccgcgacgaacccgtcacggtgcccgtctccctcccgccgacctaccagggccaccgcgacgtcaccatctggtcgcccgtgctctccggcgagtccgtccccgtggcgggcttcgtcgccgacgcgctcaggcaggacgtcgccgccgggtacgtcgcgctgcaggtgaaggtcgacggccgcgtcaagtggaaggtcggcagctgggtctccggcagctaccacctctttgtcagctgccccgccatgctcgcctccgccggaccaggcggcgtcggccccatgcctctcggcggcgcctccgccgccgtcgtgaacagcaccggcgccggcgccgtcgcgtcgctcaggttcacgcagccgacagggtgcagcgtcgaggtgtgagtcacaaatttgagtagcggctagtggcaatatggtaattaattaagttcatcggtcgcgttaatccgcaagctgttaattttttttttgtgttcatgtagctcatgcatactctatgtgagagaataaagttacgtacgttcatatgtataccattgcaacacattaatttcctatatgaagtgtactagtataatttcgttgctgtaatttttgaattattgttaataatatatattcaggtaatatttctcgag

SEQ ID NO: 3834 - DNA, 1271 bp, Oryza sativa
  ref <308>: DATABASE ACCESSION NUMBER: AK104551
  ref <309>: DATABASE ENTRY DATE: 2002-08-28
attcgagaaatccctcacaacccacaacattttcaaacaacgcaaagcagtagcagcagcgagaagcaagcaagaagcgatggggatggggatgaggagggagagggacgcggaggcggagctgaacctgccgccggggttcaggttccaccccacggacgacgagctggtggagcactacctgtgcaggaaggcggcggggcagcgcctgccggtgccgatcatcgccgaggtggatctctacaagttcgacccgtgggatctgcccgagcgcgcgctgttcggcgccagggagtggtacttcttcaccccgcgggatcgcaagtatcctaatgggtcacgccccaaccgcgccgccggcaacgggtactggaaggccaccggcgccgacaagcccgtcgcgccgcgggggcgcacgcttgggatcaagaaggcgctcgtgttctacgccggcaaggcgccgcgaggggtcaagactgattggatcatgcatgagtaccggctcgccgatgctggccgcgccgccgcgggcgccaagaagggatctctcaggttggatgattgggtgctgtgtcggctgtacaacaagaagaacgagtgggagaagatgcagcaggggaaggaggtgaaggaggaggcgtccgacatggttacgtcgcagtcgcactcgcacacccactcgtggggcgagacgcgcacgccggagtcggagatcgtggacaacgaccccttcccggagctggactcgttcccggcgttccagcctgcgccgccgccggcgacggcgatgatggtgcccaagaaagaatcgatggacgacgccaccgcggccgccgccgccgccgccaccatccccaggaacaacagcagcctgttcgtggacctgagctacgacgatatccagggcatgtacagcggcctcgacatgctgccgccgggcgacgacttctactcgtcgctcttcgcgtcgccgcgggtgaaggggacgacgccacgcgccggcgccggcatgggcatggtcccgttctgaggtgacggcgacgcgatcgaacaggtggtgatcgatgctgcaacgtgtgtaaatatacagcgccggctgggtcaagagatggctcgggtgacgcgcgcgcggcgtgtcctggcgttggcgccggggcattctttagtttttcatcttttcatcatctcagatggtagatacaaaacagtgtatgtatgtagctctgtttctctctatagaaccccaacaaattttgttgttgatgttgttt

SEQ ID NO: 3835 - DNA, 1167 bp, Oryza sativa
  ref <308>: DATABASE ACCESSION NUMBER: AK104552
  ref <309>: DATABASE ENTRY DATE: 2002-08-28
attgttgtgttctcatcctcttcttccatctctctctctgtgcgtgctctccgacgtctctcctctccctctcgcgtgcttggtcgctgtaggagggggttcaattgatttgaggtagccatggctgaggcactgtgcagcggcagcgtcgcgtccccgtgcggggaggtgggtgtggggttcgccgccggccttgtgaggggcgccgcggcggcggcggcgctcgcggagtctgtgccgattggtgggtacagcagcaagagcacgttcccgagtgggagggtggcgctcacggagaggaaggcgaggcccctgccacggaatctcgaagcggcgcatgggcagatgaacctgacgattgggaaggccatgaggtggtgggagaagtgcctgcagcccaacatgagggagatcgagtcggcgcaagacctcgccgactccctcctcaacgccggcgacaagctcgtcgtcgtcgacttcttctccccgggctgcggtggctgccgcgccctacaccccaagattgctcaactagccgagaagaacccggaggtgctgttcttgcaagtgaactacgagaagcacaagtcaatgtgctacagcctccatgttcatgttctgccattcttcaggttctacaggggagctcagggccgtgtcagcagcttcagctgcacaaacgcaactatcaagaagttcaaggatgcacttgccaagcatggtccggacaggtgtggcctcggcccggcgaaggggctcgaggagtcggagctcatggcgttggccataaacagggacctgaacttcacctacacaccaaaccaagaccttgtcccaattgcagacgccctcctgaaggaagctgctgcacctggaggtccatggctgccattgcccgcaacggcgacgcagctgttcattcagggatctgagaattcgctgttgtcatctggaagatagccggtggttcgacggcaagattggcttcaatttgtacatatttttccgcttgttctagcctgatgttatgacatgctgatgcgcaggctcatgatttttgtttatgagcctgctgagtgctggaggcatgaaattccttgcctgacggacctgtatgcgtgatgcacgtctgcatcgaaaattgaacatgctagattcattcatgat

SEQ ID NO: 3836 - DNA, 1294 bp, Oryza sativa
  ref <308>: DATABASE ACCESSION NUMBER: AK061397
  ref <309>: DATABASE ENTRY DATE: 2001-12-06
gtcgtcggcttcgattcgatcgatcgaggcgaggaggaggaggagctagggtttcggatgggaggaggaggagggttgtagaagcgcgggggcaggctgcggtggatcgtcgatgggggagcagccggcgcggggggcggcgtcgtcggcgtcggagtcgtcgccgctgatcccaccgccgtcggagatcgacatcgaggccggggccggggaccagttccagtgccggatctgcctcgagaccgacgggagggatttcatcgcgccgtgcaagtgcaaggggacgtccaagtacgtccaccgcgactgcctcgaccactggagagccgtgaaggaaggatttgccttttcgcattgcaccacttgtaaagctccttactatttgagggttcatgttcacactgataggaaatggcgaacattgaaatttcgtttcttcgttactagagatatattattcatctttgctctagtgcagtttgtcatatctgcattagcgtatttggtgcattttattgatggattacagaattactggttgaggacagcctgggcatttgacaatgaagttagtttttattacatatgtggggcattgctattttttgctttgcttgggttatcaggatgcttcataacttgttatgaccgaagagtacggaatgacctggcacagccttgtcgagagttatgtctttgttgctgccaaccagggatgtgtgcagattgccatctacctggtacgctttgcatgtggacagattgcactacatgctttgagggctgtgcaacgacagctggagagtgtggtggttgcttgggtggtgctggagaagcagggttaccattgctctttatcatgggagtaatcgtgcttggactattcacagttatcggcattttctacagcgtcttggtagcaaccatggtgggtcagcggatctggcagagacactaccatattcttgcaaaacgaatgttaactaaggaatatgttgtggaagatgtcgatggcgagcgcgcggattggtgtccgccccctctcccttcggagcatgtccaacagctgaagtctctggggcttctataatctgtagcccatgattataccaatgatgaccttaatttaggacttgcggcactatccagctgtacaggagatgatacaaattaagcggtgaagcaggcgtttcggtttttaagcagccaaatgcacaacaatatcgtttgtctttttttgtacattgtaacaagggaatacctatctgaaaaatgacacagctttgatttttat

SEQ ID NO: 3837 - DNA, 1068 bp, Oryza sativa
  ref <308>: DATABASE ACCESSION NUMBER: AK104553
  ref <309>: DATABASE ENTRY DATE: 2002-08-28
aacaagcaagaagaaatttctctccttgtagaaacaagcctagagagtactatggagcagaggaaatttttgttgtgcctaattcttggcttacttgcgacttcaggacctgccaagaccgtcaatgctgactcgccctttgatttttattatctcatcctcatgtggcctggagcatactgcactgacagcgagtatggttgttgcgtgcccaagtatggttacccgtcagaagatttcttcgtcaagagcttcatgacctttgactcgtcagagaacacagctgttgtcaggtgcaactccgacaatcctttcgacattaacaagctagactcaatcgagaacaacctgaaccactactggagcaacatcaagtgtcctcgcaccgacggcgtgaactcatggaagagcgagtggaacagctatggcgtctgctccggcctcaaggagttggactacttcaaggccggtctccagctcagaaagaacgcagatgttctctctgctctcgctgaacaaggcatcaagccggactaccaactgtacaacacggcgttcatcaagtgggcagtgaaccagaagctgggtgtgacaccaggagtgcagtgcagggacgggccatttgggaagaagcagttgtacgagatctacctctgcgtcgacaaggacgccaagagcttcatcgactgccctgtcctgcccaacctcagctgccctgccgaggtgctcttccatccgttccacacctggatgctcaacaccacatcggctgccaacatcgtgatgcccactgaaactgtgctggcctaattaatagcctttaatttgctagctaagctgccatgatctacttgatcaacctgtcctaagagcatgtagcatatgcttagcttgttgctttgggtgaataatcgcgcaacttttatacattgttgtgccctctgaataatatgtgcagtactatatatgaagtattgtaccgcatatgttatgtattacatgtgcaggtcttgtgcacacctgtgaggtgaatggatatattatgaatatataacgtgttgtattatg

SEQ ID NO: 3838 - DNA, 1217 bp, Oryza sativa
  ref <308>: DATABASE ACCESSION NUMBER: AK061398
  ref <309>: DATABASE ENTRY DATE: 2001-12-06
cacatctcctcagattggtctcccagaattctctcatctgggttggggctattggttcactctcagggatttggaggacgcaacaaatgggttctctgatgacaatatcataggagagggcggctatggggttgtttaccacggtcgtcttataaatggaactgatgttgcaatcaaaaggctttttaacaacatagggcaggcagaaaaagagttcaaggttgaagttgagtctattggtcatgttaggcacaagaatctggtgcgacttctaggttactgcattgagggaagctacaggatgcttgtctatgaatacatcaacaatgggaacttagaccagtggttacatggcgcaaggagtcaacatggtgttcttacatgggaagcccgcatgaaaattatccttgacattgcaaaagcactggcatatttgcatgaggggatagagccaaaagttatccaccgtgatatcaaatcaagtaatatccttattgataaagatttcacaggaaaactttctgattttggattatctaagctcttacgtgctgggaaaagccacattactacccgagttatgggaacctttgggtacgtagcccctgaatatgctaatactgggcagctaaacgagaagagtgacgtctacagttttggagtgctactcttggaagcagtgaccggaagggatccagttaactatggtcgacctaccgatgaggtgcacctgctggagtggatcaagctgatggctagcagcagaagagccgaggaggtagtagaccctgcgatggaggccaagccaaccaaacggcagctgaggcgcgcgctcgtggctgccctcaagtgcgtcgaccccaaagcggacaagcggcccacgatgggcagcgtcgtccgcatgctggaggccgatgatgttgcgctatcatcacggcaggatcggaggagcccgatggggcgatgcggcgacggcgacggttcagggcggcgtgagccgtccgggacatcggcgagatacgatacagcttttgtataagcgttacgtacgatcactttttatcaccagaaggcctgaaatatttgtgttcatacttcatactttagggtaaggcaacgtgttgtttttttttcctccggaaagaaatgtactccctccgtttcataatataaaactttctagcattgtccaaaaaaaaaaaaaaaaaaaaaaaaag

SEQ ID NO: 3839 - DNA, 1021 bp, Oryza sativa
  ref <308>: DATABASE ACCESSION NUMBER: AK061399
  ref <309>: DATABASE ENTRY DATE: 2001-12-06
acaatctctcctctctctcgcctctcgctctctccaaatctgtgcgcggttgtgtgcggtgatccggggtgtcccgaccgcgattagggccgtcggcttcgggtcggacggacggatgccggtggacgtcggccgcgccgcggcccgcgaggcggcgatgccggcggcgtgcagctcgtcctcgattgggaaggacagcgacgagtgctcgccgccggggaaggaggaggaggagggggaggaggtgcagagcgcgttcgtcgggggaggagggggcctcgcggggttggaggcattggaggaggcgcttcccatccgacgtagcatctccaaattctacaatggaaaatcaaaatctttcgcgtgtctcaaggaagctgtttcatcttgtggctctgcaaaggacatcgcgaaggcagagagcgcatattcgagaaaacggaagaatctccttgcatacagcatcatgtatgaaacttcacaggagacagcagcagaagtttatgaaactggaccccctaagaggcttgccagtctgagcagaaactctttggtgaccttggctagtagcaattccaggagcagcagtagtatcagcatcgaagaaaccgagctcactgagcagcttcattctcctccgtcgcttgctaatgatgaaaattctgcggtttataatgctccagcactacaattaggatcctgtgatcctaaaacatcatctgtgcctgtgaggtcattttcaatgatggatttgcgccgtctgcataggccaagatcctcatgtcgtctcaaagatcagaaaacgacagagtagcgtagtattcttgatgttttactggggctgctagtgtctttctgtattgtgaataaataaggggggagtttgatggtgttgtctgtgcctgcaagatgattggggctactgtgttgtatgtaaattagcatactacatactgatatcgatggcctaagccctaaggtgtatgtctgtatcatgcaaattaacatttgtaaattaact

SEQ ID NO: 3840 - DNA, 1071 bp, Oryza sativa
  ref <308>: DATABASE ACCESSION NUMBER: AK104554
  ref <309>: DATABASE ENTRY DATE: 2002-08-28
cttccttccgccgccgccgaagcagaagaggaagaagagagaagaaagaagcattggcgatggctgcggcggagggccccgttctcctcttcccctctacctcgtcgacgtccgcccgggtggaggcggtcgtcgtgttcaacatctgcgacagctacgtgcgccgccccgaccaggcggagcgcgtcatcggcaccctcctcggctccgtcctccccgacggcaccgtccatgtccgcaactcctacgtcgtcccccacaacgagtcccccgaccaggttgctctcgacatcgagtaccaccacaacatgtatgcgtcgcaccacaaggtcaaccccaaggaagtcattgttggatggttctcgactggcttcggtgtttctgggggaagtacgcttatccatgatttttactcaagagaagtacagagccccattcatctcactgttgacactgggttcacaaggggcgatgcttcaatcaaagcctatatctcatccaacctgtctcttggagataggcaccttgctgcgcagttccaagagattccccttgatctgaggatgcttgaagcaggaaaagttggatttgacatcctgaaatctacaattgtggagaagctccccaatgatctggaaggaatggaatcctccatggaaaagctgtatgtccttattgacgagatctacaaatatgttgatgatgtcgtggaggggcgtgtagcaccggacaataaaattgggagattcatctctgatgctgttgcttcaatgccaaaattgtcaccagctgcttttgacaagcttttcaatgacaggattcaggataatcttgcactggtgtacctgtcaagcatcacaaggacacagattagcatagccgagaagttgaacaccgccgcccaaatcctgtaatttccatgtagttggagcatctgggagtctgacttaaaatgctgttttgtttgtttttcattcgcacgactgaaaaattgggatatgatggcagagtatgcatttttgtacttgttatctgaggcctaaagaaaagaaaccatcatgtcaggatgat

SEQ ID NO: 3841 - DNA, 1088 bp, Oryza sativa
  ref <308>: DATABASE ACCESSION NUMBER: AK104555
  ref <309>: DATABASE ENTRY DATE: 2002-08-28
atggagttccctcatcgccaccaccaccacggccaccgcggcgacgacgacgacgacgatcgccgccgccatcccgctcccgctcccgcctacggccacgactcagcccctccgccgggtccctacggccaagcgcctcctccggctgatccctacgctcgccacccgccttcccacgactacgctcatcctcctccggcgtatgggggagggggctacggcaacgtcgtccacgtttcccacgaggtctccgaccaccagaggcccacgccgcactacggtggatccgagtacatcagccccgtccaagagacccgcccttaccacggtggcggaggagccccaccggtgacccacaggatctactgcaaggccggggaggacaactacagcctcgccgtcagagatggcaaggtctgcctcgtccgctccgatcgcgacgaccacacgcagcactgggtgaaggacatgaagtacagcacgagagtgaaagacgaggaagggtaccctgccatggcgctcgtcaacaaggccaccggcgacgccctcaagcactccatcggccaatcccaccctgtccgtttggtgcgctacaatccagagtacatggacgagtctgtgctgtggacggagagcagggacgttgggagtgggtttcggtgcatcaggatggtgaacaacatctacctcaacttcgacgcgctccatggagacaaggaccacggcggcgtgcgcgacggaaccaccctggtgctctgggagtggtgcgagggtgacaaccagcgctggaagattgttccctggtgatcaaatcaaatctatctgtctatctctacatatgagtgagggaggtttatggaataataagaggcgcctctgatcgatggaggggccggcaggtgtggtcgctcgactggccctagctaagtgttttgttttgtttggtccagctctgtaataatccagccatctcattgtttggaatgtttgttgttgatccataaaatttggtcccggtacgaatatgaacatgtcacgtctgtgtgtgtgtgatactgttacttgtgatgcatctacgtacattgcat

SEQ ID NO: 3842 - DNA, 1121 bp, Oryza sativa
  ref <308>: DATABASE ACCESSION NUMBER: AK104556
  ref <309>: DATABASE ENTRY DATE: 2002-08-28
gtgctcagtttcacttatcagtgaattagatcatatacttgtgtccttgacagctcgttaattagcatggctaggtctctcgctgctctccttctccttctggtcgcagccgcgggagccagccatgccgcgtcgccggcggagatgtactggaagatcgcgctcccgacctcgccgatgcccggcgccattcgcgacctcatcagcccggcgagctcagcggcctcagcttcgaaggataaggaggatacggtgggctccgtgttcttcctcgtgaaggacctcttcccgggctccaagatgacgctccacttcacccgcgccaccgccggcgccgcgctgctccctcgcggccgcgccgactccgtcccgttcgcctccgaaaagctcccggagatcctctcccagctctccatccccgccggctcgccgaccgccgacgccatgcggtccacgctcgccgtgtgcgaggccgcgcggatcgccagcgagacggcgcccaagcacaagcactactgcgccacgtcgctcgagtccatggtcgagctcgtcgcctccagcctcggcacccgcgacgtccacgccgtgtccacggaggtggtcaacagggccgggccgacgccgaggcaggcgtacagggtggaggccgtgaggcccgtgccggtgcccgggggcgacatggtggcatgccacaggatgccctacgcgtacgccgtgttcggggtgcacgggatcaagggcgcggcgtacacggtgacgctggccggcgccgacgggaccatggcggaggcggtggcggcgtgccacggggacgtggacgggcacggcgtggcggtggcggaggcgtacaagaggctcggcgtggcgcccgggaaggtggcagtctgccacttcctgcctcaggacgacatgctctgggtgcgcaactgaatgaagcagctacctgcgcgccatccatggctaattaagctccttcctatattttcgatctacctgccggctggctatcatgttatcatcgcgtgtgtgtgcgcgccgatccgacatgcccacactacacgtcgacactacacgtgttttattttgttaattaataagtctggacaaccaggtcatcttgt

SEQ ID NO: 3843 - DNA, 998 bp, Oryza sativa
  ref <308>: DATABASE ACCESSION NUMBER: AK061400
  ref <309>: DATABASE ENTRY DATE: 2001-12-06
gttgctaccctggcatcagcaaagcacctcaagcttcgtgtcctgtcactgtctggttgctcgaaggttactccgaagagcgtgtcattcttgggcaacatggggcagtctttggagggtctcaatcttcagttctgcaacatgattggtaaccacaacattgcatcgctggagaagcagctctggtggtgcgacattctcgcataggcagacaagatggttcattgctggagggtgtcacctgtgcttgggtgaggcacctccagatgcagatatacatccttagaggtagcgcaaccagtcaattgctgtgctagtcatgtttttggctagtgcatgagtcatggtgggttctggatttgttcgaggaccggttgtttccgaggggtgctttccgccaagtgctcgttttttcacagactgcctcaagaggcaatctgttttttgagccttcggctgccattgctggcattctgccccctctacccagacattggtccttgccgctatagtcacaacaccatgattgttttttaggttgccgtagtgtcccttgtccttttttctttactgcttgcttcctagtcatgaagttgcaggcaccggcatcggcacaggggggctgtcatggagttccgcagctcaactgccggtgtcaccagtagtcggcagcgccggtgttccaggctgccgacgacgctggagtgcctgcagacttaccctgtgtgtatggttactgagtctgttggtgtcttgaggtcatgtgtgatgatgttttcggtagtgtgtaagggtcatagagggttgattttttgttacaggtactcttgggaatgcctggtgttgggggatctggccattgcaaggcgcatactagagccttgtcatgacagccttgtatggttgttttttcaccagatccctgtttttaccggcatattgttgaggactgtaatctttgcaaccttctcagaataaattaagtatgtgtttatgtg

SEQ ID NO: 3844 - DNA, 1112 bp, Oryza sativa
  ref <308>: DATABASE ACCESSION NUMBER: AK104557
  ref <309>: DATABASE ENTRY DATE: 2002-08-28
actgctagcttgggaagaggaggaggagcttgagcttggagagagacaacaatggcggctcaggctcttctctctgggaggcagctgctggggaggccattgcaatcttcagtctccaggtcttcttcctccaggaaggcacccttcatggtcagggcagaggccactccccctgccaagcaaggtgctgacaggcagctgtggttcgcatccaagcagtccctgagctacctggatggcacgcttccgggagacttcgggttcgacccgctggggctatcggacccggaggggaccggtgggttcatcgagccacggtggctggcctacggcgaggtgttcaacggccggacggcgatgatgggcgtcgtcggcatggtcgccccggagctcctcggcaagctgggcctcgtccccgccgagacggcgatcccgtggttccagaccggcgtgatcccccccgcgggcacctacacctactgggccgacccttacactctcttcgtcttcgagctcgccctcgtcggcttcgccgagcaccgccgcttccaggactggtacacgccgggctccatggggaagcagtacttcctcggcctcgagaagtacctcgccggctccggcgagccggcctaccccggcggcccgctcttcaacccgctcggcttcgggaccaagagcgaggcggagatgaaggagctcaagctcaaggagatcaagaatggcaggctcgccatgctcgccttcctcggcttctccgtccaggcgctcttcaccggggttggccccgtgcagaacctgcttgatcacctcgctgatcccgtccacaacaacatcctcaccagcctcaagttccattagagatgccatcaactacgtatttaattaattacgagtttttaattatgtatgtatgtacgtgcgtatgcgtatatgtgtgtacgtatgtatgtacgcaactttgtacgatcgatggtgcgtgtgatcgagaggggtatgtatgtacgtacgtatatacgatgtattattatgcatgggtgtagggtgtgggtgtaacatgtaaatttgtgctccaactgatttgcacgcatggtcgcatggatcgatttgct

SEQ ID NO: 3845 - DNA, 962 bp, Oryza sativa
  ref <308>: DATABASE ACCESSION NUMBER: AK061401
  ref <309>: DATABASE ENTRY DATE: 2001-12-06
cacaatggcgccgtgctgagcggcgacatccccgtgtcgatcctctggtacggccggttcacgccggcgcagaaggccgtcgtcaccgacttcgtcctctcgctcgccgcgccgctgcaggcggcgccggcgccgtcggtgtcgcagtggtggggtagtattcaccggctgtacctctccaaggcggtggccgtcggcaagaacgggggcgcgcacggcggcggcggcggcggccgggccaagaacgcgcgcgtggtgctgtccgggcaggtctccgacgaagggtgctcgctggggaagagcctgaagctgtcccagctgcccacgctggcggcgagggcgaggccggggaagggcggcgtcgcgctggtgctgacggcgcaggacgtggcggtggaggggttctgcatgagccggtgcggcacgcacgggccggtgtcgcgcgccggcgcggcgtacgcgtgggtgggcaactcggcgacgcagtgcccggggcagtgcgcgtggccgttccaccagccggtgtacggtccccaggcggcgccgctggtgccacccagcggcgacgtgggcatggacgggatggtgatcaacgtggccagcatggtggccggcgcggtgaccaacccgttcggcgacgggttctaccagggggagcgcggcgcggcgctggaggccgcgacggcgtgcacgggcgtgtacggcaagggcgcgtacccgggctacgccggcgcgctgctggtggacaaggccaccggcgccagctacaacgcgcacggcgcgcacggccggaaatacctcctcccggcgctcttcgaccccgacacgtccgcctgctccacgctcgtgtaacctgtccaccacgcgtcgggttgtgtattgtgtacatgctgatagtagtatgtctgtatgtatgtatgtgatgtgagtacgtgaccatgttgtgtacataagttcgtgtc

SEQ ID NO: 3846 - DNA, 1102 bp, Oryza sativa
  ref <308>: DATABASE ACCESSION NUMBER: AK104558
  ref <309>: DATABASE ENTRY DATE: 2002-08-28
aaactgacagcggagcggagaagcgtcggaggagatggaggttgcgacggcgacggaggcgtcggcgccggcggcgagcaggcggagccacccgttcccgtggctagacctggccatctccgagccctactacttcctccacctcgtcgccttcttctcctacttcgcggcccgcagcacggtgccctcggccgacgacggcctcctcctccgccgggagatccaggcggtgctcacgttcctcgtgctcttcgtcgtgaagatcgtgaaagaggaaaactgggaaacatgcattgctgattcactgctctatgctaagggattattgctggcagttactttggttatcgattattggctgactgtctcctacttactgggatttgttgttatatatgctgttgctcaacagccaccttatgatggtcttggtcattcaaatcatttgactccattgcaactggaaggcctactaacggaggagccaacaacacgattttggctggttgaattccggacttccttttcaggaacatgtatagaagcaagcagtgttctgcctgaactctctaacatatactctaacaagaacatttcgtttggaataattgatcttgggcattttccaaatgctgcagcaaagtttggaatatccatgtgggatcatcttcccacttatatactctttgacaaggccactgaagttgcacgattcccagaaatcatgaatgaatcaaaagtatttgtgccaaaaattacaaagaaacttctctgccagcacttcgaccttgacaggcgactgattgaatacctatctagatgacccatcatctatcccagctgtctcaaaaagaaagcgccaattcccttttgtcgacgaaccagatgaatgaaccggacagttgtgcggcagcaatcacttcagggggtatcttcaagcttgttttattctatgagtttacttgtacccatccaatcaaggacagtatactttagggtagggtgggggtgggcaggattatgatttgcatcttactaccatatgtcacctcttgaattacggaatgttaccacacctgtggagatcttgcaatgatatgcc

SEQ ID NO: 3847 - DNA, 1346 bp, Oryza sativa
  ref <308>: DATABASE ACCESSION NUMBER: AK061402
  ref <309>: DATABASE ENTRY DATE: 2001-12-06
aaatcaaaaaccctcccgtcccatcccctccttgtgtagttgtgttgtttgcggcgaaaccctaggattgtctccggcggcggcggcggaaggatcatggagcgggcggcaggcggcgtgtcgtaccagcggttcccgcgggtgcggatccgcgagctgaaggacgactacgccaagttcgagctccgcgacaccgacgccagcatggccaacgccctccgccgcgtcatgatcgccgaggtccccaccgtcgccatcgacctcgtcgagatcgaggtcaactcctccgtcctcaacgacgagttcatcgcccaccgcctcggcctcatccccctcacctccgccgccgccatggccatgcgcttctcccgcgactgcgacgcctgcgacggcgacggctcctgcgagtactgctccgtcgagttccacctcgccgcccgcgccaccgactccgaccagaccctcgaggtcacctccaacgacctccgctccaccgaccccaaggtctgccccgtcgaccaggctagggcctaccagcacgccctcggcggaactgaacccttcgacaccgccgctgctgctgaccagaggggcatactaattgtaaagctgcgtcggggccaagagctcaggctccgagcaattgctaggaagggaattggcaaggaccatgccaagtggtcccccgccgctactgtgactttcatgtatgagcctgaaatacgtatcaatgaagaactcatggaaacattgacactcgaggaaaaacgaaatttggtggagagtagccctacaaaagtgttcaacattgatcccaacactcaacaggtggtagttgaggatgcagaggcatatacatatgatgatgaggtcatcaagaaagcagatgccatgggaaagcccggattgatagagatcaatgccaaggaggacagctttatcttcactgttgaaacaactggcgctatcacagcttatgagctgatcatgaacgctatcacggtcttgaggcaaaagttagatgctgttcgtctacaagatgacgatgctgaccttggcgagcttggtgcccaccttgttggaggctaagcgcagagctgcttgtcttgtgttacccacaaagtaggtttctctaactatcgtgctagaggcaaaacatgatggtttcttcgtttggatcaatctagtacatgtaatctccctgatctgtgccattaaatctgtgctggaactttgtgtggacgcaccagactactgttcaatttgatggcaaatcgacacaccagccagctcatctctgggacaaatgtggagctgctagtaatactgaatgctgttcacctgtg

SEQ ID NO: 3848 - DNA, 1430 bp, Oryza sativa
  ref <308>: DATABASE ACCESSION NUMBER: AK061403
  ref <309>: DATABASE ENTRY DATE: 2001-12-06
agctagtagccgccatcctccacgcctacaaagctcgcggccccgcaggtgcatgctccgctgcccgcctcctcgccgcctctgcctccgcctcggctcgccggtgtctacgatggcctccacgctcgccttcctcaggccctccgcgccggccccgctcgcagcctcgcgcggcgccgcgaggggcgtccccgcggccgtgagggtgccgtgcagatctagggtctcggcggccggcgtgtccctcggatcggaggtggcggtgggctccgacgcgctcttcgccgactacaagcccaccaccgcattcctcttccccggccagggtgctcagactgttgggatgggtgcagaagcagtgaatgttcctgcagctgccaaactatttgataaggcaaatgatatacttgggtatgacttgttggatttttgcaccaatggaccaaaagaaaagcttgactcgacagtaatcagtcagccagctatatatgtcaccagccttgcagccgtagaggtactacgctcacgtgatggaggccaaaatgtaattgactctgtagatgtcacatgcggtctcagcttaggggaatacactgcacttgcatttgctggtgcctttagctttgaggatggtctgaagcttgtcaagcttagaggagaagccatgcaggatgcttcagatgctgccagcagtgctatggtcagtgtgattggtctagattcagagaaggtgcagcaattatgcgatgctgctaacgaggaagtagatgaaaaggaaagagttcaaatagcaaactttctgtgtcctgggaactatgcagtttctggtggtgtgaaggggattgaagcagtcgaagccaaagcaaagtcctttaaggccagaatgacggtgcgcctagctgttgctggtgctttccatacaagcttcatgcaacctgctgtttcaagattggaatctgcattagctgagacagagataaaaacaccaagaatcccagttatctccaatgtggatgcatcaccccactcagatcctgacacaatcaagaagattttggcgcgacaggtaacttcccctgtgcaatgggagagtaccgtgaagactctgatgggtaaaggacttgagaaaagctatgaacttggtcctggaaaggttatagcaggaattcttaaaaggattgacaaaggcgcaagcattgagaacattggtgcatgagtttggaggtatcaagagtcaaagactatagggataataaggttagggagagcctgcaaattcaagcagtactccgaatgtatcaaatgttagccaacatggctgttgtggcaaactggcaattgccgtctgaggaaacgatattgattactgttgaggcccataatttggagacttttgtggtttatttacagcctgctgttcagatttaacc

SEQ ID NO: 3849 - DNA, 1131 bp, Oryza sativa
  ref <308>: DATABASE ACCESSION NUMBER: AK061404
  ref <309>: DATABASE ENTRY DATE: 2001-12-06
agcttgtttagcttaattagcagtagcacaaagcagcaatataatggcgacggcggcgaggctgctcctcctcctcttcctcacggcggcagccagcgcgtgggagatgaacatccggttgccgacggagatgctgaacggcggcgaggccgtggtggcgccgatcatccacgcgctgcggccgctgctgggctccggcgggcagctggcggcgcgcgccggcgtggcgtgcgacagctggaggctaggcgtggaggcacacaacgtgatcgggtggaagacggtgccggccaggtgcgagggctacgtcggccactacatgctcgggtggccactaccgccgtgactccgccgtcgtcatcgacgaggccatcgcctacgccgagagcctccagctctccggcaacggcaaggagatctgggtgttcgacatcgacgagacctccctctccaacctcccctactacgccaagcacggattcggagctacactgtacaatgatacgagcttccgcgaatacgtggcggaagggagcgcgccggcgctgccggagacgaggcggttgtaccggcggctgctccagctcggcgtcaagccggtgttcctgacgggccgcaccgaggaccaaaggaacatcaccgtcacaaacctccgccggcagggatactccgggtggatggagttgttgctcaagccagcagtgcacgccgccggcgagctccaggggtccgccgttgcatacaagtccggcgagcggcaaaagctggaggatgccggtttcaccatcctcggtaacattggtgaccaatggagtgacatcctcggtacaccggagggcgcccgcaccttcaagctgccggaccccatgtactacatcggctaggttgctgagtaacaagtccaatgaggcccagactccgtgtcacgtgcgtttcatctttgttttgtcttgaaatgcttctaagttacaataattttcgacgcgcgtctatctgtacttttccttgtgagattgatgagatttgtaatagcatgtacgtgtaagagcggtaaatctatctagctatgtactattgagcaagcttgtcgcgtgcgtatctttgtctaataattaagaaaaattgcaagat

SEQ ID NO: 3850 - DNA, 1186 bp, Oryza sativa
  ref <308>: DATABASE ACCESSION NUMBER: AK061405
  ref <309>: DATABASE ENTRY DATE: 2001-12-06
aaaggaaaagagagagccctcctctcctctcctaccctcttcttcctcctcctcctcctcgcctcccaccaaaccctagcacgagcagcccaatccatctccagcctcacgagctccagttcggagcagcctcgcggtgggacgagtcgccagttggggagctcggaggaggtgaggccgtggttgggggttgggaaggggggaaggccaagaaatggcggagaaggaggagggcaaggtggcggcggagggtggggcggaggcggaggccgacgaggaggtggaggtcaagttccgcctcttcgacggctccgacatcgggcccctccgctgcaacgccgtcgccaccaccgtcgccgccctcaaggaccgcgtcgtcgccgactggcccaaagataaaacaattgtcccgaagactgctaatgatgtcaaactgataagtggaggaaaaattctagaaaacgacaagaacattgcgcagtgcagagcaccttttggtgatcttccgagcactgctatcacaatgcacgttgttgtgcagccatcatcagccaaatcaaaacctggtgagctatattacttcatagaaagtatgttggactgcttgacatagtctagatttatagcttgtgttaacaatcatgataaccagggagtaaattgtttctcttgcttactctggatttgttctctctgtttattatgatttcactaattcataattcatattttgccaaatctgttttggcaaaagttgagtgcaatagatttcattgatttcctgaagtgaactttttcttaaaatatcactgagatgacattaaatttggaactgttcgagatttctgtttaggaatcagcgaagtaagctgtcagctatcctgcaatatgtactacctctggttattaatagttgatgccacacagagttgacagcagctgtctggcatcagcttaatatgactggatggagtagttaaaataatgacctttccttcgctgtttcaaagctgttactagggcttctcctgccagggcatatgttttgttttccggttgattccctctagtaatcaccacttttggaattggccaaaggcaacaacaaactgcctatacttgaaatatgccactatatcagatttgtcaaatatagcaccatgaacagtgttactgttacgtaatt

SEQ ID NO: 3851 - DNA, 1488 bp, Oryza sativa
  ref <308>: DATABASE ACCESSION NUMBER: AK061406
  ref <309>: DATABASE ENTRY DATE: 2001-12-06
aagcaacagcttagctagtaacagtaggccactactagcatcactgcatttctagttaagtaacaacactagagagagtaaggagtagtgagaccatggggagggatcaggcagctgcagcagtgatgcatgagaaggtgaagctgttcataggagtgctggccctgcagttcctgcttgcaggattccacattgtgagcagggcagcactcaacatgggcatcagcaagattgtgttcatcgtctataggaacctcatctccctcgccttgctcgcgcccttcgcctacttcctcgagaagaaagatagaccaccactgaccttctctttgctggtggagttttttcttctagcactgtgtgggataactgcaaaccaaggtttctacctcctagggctgtatcacctttcaccaacttatgcttctgcaatacagaacacagttcctgccatcacctttgccatggctgccgtcctcaggcttgagcaagtagacctaggcaagaggcatggggtggccaaggtggtgggcacggtggtgagcataggtggtgccacagtgataactctctacaagggcctaccactgttcaatcacaatctgaacatcaagtccctgtcttcctcgagcctcatcctcaactggactctgggctgcgtcttcatccttggccactgcctctcatggtctggatggatggttcttcaggtgccagttctgaagaggtacccagctaggctgtcagttctatcactgacctgcatctttgggctcctccagttcctggtcattgcagccttcactgaagaagacctgagcagatggaaggtgaactccggaagcgagctgttcacaatcctctacgctggtcttgtggcatctggcgtggcgtttgctctgcagatatggtgcatcgacaggggagggccgctgttcaccgccgtgttccagccggtccagaccgtcgccgtcgccgtcatggccgccatcattctcggagatcagctatactcaggagggatcatcggagcagttctgattgtgatcgggctgtacttcgtgctgtggggcaaaagcgaggagaagaagagcaagaacaacaacctgcaggaccagccggtgcagggaggaggagacgacatcaggaggcatctgctcggacaagaagatgcatctcgcaaagacgaagaagctgcagtcactgatgaactggcatgacgatcgatcgaaggggcgttcttcaccagtaatatgcatgatgatgttggagttggaaaatatgttgatgtcagtgactgtactttcttaactatattaatcaaagaagaagatccaagcgtgccagtgtaattaaaaacagtactgctagctggtcctcactcaccagtgatatactatatataattgctacgaatcagtctgtgtatatctcaagctgtatattcagagttaatgatataatattgccatcacttgaacaattagc

SEQ ID NO: 3852 - DNA, 1437 bp, Oryza sativa
  ref <308>: DATABASE ACCESSION NUMBER: AK061407
  ref <309>: DATABASE ENTRY DATE: 2001-12-06
actagccttctctaccaccctcactcgcgagctcggctcagctcagctcacctcgcacccagatcccaatgcaccaaccagccataatgcagcgggctctcgccgtcgtcgccctcctcgccgccgcagccgccatcgccgccgcccaggggggagtcgccggagttgctgccgttcgcggtgggggcggcgccggaggggtgcgacgtcggggaaggggagtgggtgttcgacgaggcggcgcggccgtggtacgccgaggaggagtgcccctacatccagcccgacctcacctgccaggctcacggccgccccgacgccgcctaccagcgctggcgctggcagccgcgcgactgctccctcccaagcttcaacgcgacggggatgctggagatgctgcgggggaagcggatgctgttcgtcggggactcgctgctccgggggcagtacacgtcgctgctctgcctcctccaccgcggcgctcccggcggcggcggcgggtccagatccttcgagacggtggattcgctcagtatcttcagggccaaggactacgacgccaccatcgagttctactgggcgcccatgctcgccgagtccaactccgacggcgccgccgtccccgacgaccgcctcatccgcggcgcccccatgaacaagcactcctccttctggaagggcgccgacgtcctcgtcttcaactcctacctctggtggatgaccggcgacaagatccagatcctgagaggcgcggacgaggacatgagcaaggacatcgtggagatggaggcggcggaggcgtacaggctggtgctgcaccaggtgacgcggtggctggagggcaacgtggaccccaagagcgcgcgggtgttcttcgtcacggcgtcgccgtcgcacgccggcgccggcggcgagtgctacgaccagacgacgccggtgggcgcggccgacgcggcgtcgtactgcgggagcacgagccggcggatggtgcaggtcgccggcgaggtgctgggggcatcgcgggtgcccgtcggggtggtgaacgtcacccggatgtcggagctccgccgcgacgcgcacacgcaggtgtacagggagcagcggtgggcgaagccgacggcggagcagctcgccgccgacccgaggagctacgccgactgcacccactggtgcctccccggcgtccccgacgcgtggaacgagctgctctactggaagctcttcttccccgcgcgcgacgaggcgatctgacctcatgacgtcacgccgccgccatcgtcgtcgtcgtcgtcgtcactaatcggtgtaatctgctccgttcccgccatttcttttcttggcgatcgatgtaatcaaatctctctatacttgctcctcttctctcctcttctctttttgaacgaagtgaaaatacagaagctagcattatttgcttgc

SEQ ID NO: 3853 - DNA, 1053 bp, Oryza sativa
  ref <308>: DATABASE ACCESSION NUMBER: AK061408
  ref <309>: DATABASE ENTRY DATE: 2001-12-06
agcacgcaaccgagtcgagactagacaaggggagcagccgccgcgatccaagtcctcctccgccgccgccgacgccgccatggatccgaagctggtggaggtgacgcagctcttctcccgcttcaaggcagccttcgccaggaacgacttcgacacctgcgtagacctgctgtcgcagctcaaggtccgcctcaccaagttccccagccttcctccatcatttcagcagacaccgaatgcagtggaagagctgaaaattgcgagggacatctatgagcatgcagttgttctgagtgtgaaaattgaagaccaagatgcatttgaaagggacttttgtcaactcaaaccttattacatggatacatgcggcataattccaccatcaccacaggagtatccaatcttgggtcttaatcttctaaggctgttagttcagaacagaattgcagagttccacactgagctggaacttctgccggtcacagcacttgaaaatccttgcatcaagcatgcggtggagcttgagcagtcatttatggagggtgcttacaaccgagtgttgagcgctcgccaggctgtgccccacgaaacatatgtgtacttcatggatcttcttgccaaaacagtcagagatgaactggctggttgcagtgagaagggttatgattatatgtcaatagctgaagcaagacaagtgctgatgttcagctctgacaaagaattgcaccagtacatcgcagaggagcaccctgaatgggaggtaaaggatggttccgtcttcttccagaaggcgaaggagacccagccctgcaaggagataccatctttgcaggttatcaaccaaacgctcagctatgctagagagctggagcggattgtatgatttgttaatgaatatcatttgagatcatttgggacggcatgttcatgctatgtacacatcaggtgtcacggttgagatgcgcatgttgcagctttgaacgtttgagatgcccatgttaccttatgatactttttttaaaaatttcatttaatgggctggatctgtgtctg

SEQ ID NO: 3854 - DNA, 1225 bp, Oryza sativa
  ref <308>: DATABASE ACCESSION NUMBER: AK104559
  ref <309>: DATABASE ENTRY DATE: 2002-08-28
acaatccccttgacagcacagaggcaacagcaaaacacactctcatcagtgtcaggtctccacaccacacccaagtacaggtacacacaagacaatcctcccactgaactgaatcccatccactcctttatcatcatcaccatttccctccttcccttttcctcccctcatttccatttccagttgcagcaagagctgcctcctagctctcttcctgccatccatggcaaatgcttccctccaatcctttcttcttcaccaccaccattctttccttagcaatggtatccatgagggctcctccccttctataattctcaagctcacaacaaacagcaacagcagcatttcattcaagctcttctccaacaccacctcctcctcatcatcatcagtgaccaccacagcatcaacccccaactcaccggtgacccctgctccggtaacagcctcgtctccgccaccgccttcgctggagctcctgggcgcccagctcgccgagagggattaccggcaggccgacgagaccacccgcgcgctcctcatcgagctcgcgggcgagccagctcggcgccgagggtacgtcttcttctcggaggtgcagttcatctccgccgatgacctccgggccatcgacgcgctctggcaggagcacagcggtggccggttcgggtacagcgtgcagcggcggctgtgggagaagtcgcggcgcgacttcacccgcttcttcatcagggttgggtggatgaagaagcttgacaccgaggtggagcagttcaactacagggccttccctgatgagttcatctgggagctgaatgatgacacgccagaggggcatctccctctcaccaatgccctcagagggacacagctcctgggcaacatcttcacacatcctgcctttgaagaggagcaagaagatgaattagcagcagaggagaatgacacacctgataacactggtcagagtaaggatggcagcaaagggaaggagaggccaaagttcatgagagatttcttcaagcctgactactccttttgagattggggggtaattaaaaagcatgggagtttgtgatgcagagatgctggtcatggtgcaattgatttagaaaaaaaaaaaaaaggaaacatgtatccgtagttcatctggattgttatgtcctgtaaacatgcgtgggaaactgcacaatatattatgaatataattgtttgagatgtt

SEQ ID NO: 3855 - DNA, 1189 bp, Oryza sativa
  ref <308>: DATABASE ACCESSION NUMBER: AK061409
  ref <309>: DATABASE ENTRY DATE: 2001-12-06
ctgttgcaagggaccatcaaactaagtttgaagagtttgtggctgcacatcaggagttgaatcctgggatagacttggctgtcactgttttgacaacaggattctggccaagttacaagactttcgatattaaccttcctgctgagatggtgaaatgcgtggaggttttcaaggagttttaccaaacaagaacaaaacacagaaagcttacctggatatattccttgggaacctgcaatatcaatgcaaagtttgaggcaaaaactattgagctcattgtcacaacatatcaggctgcgttgctgctgctattcaacggatctgacaggcttacttattctgagattgtaacacagctaaacttatcagatgatgatgtagtgcgttgctccattctctctcctgtgcaaaatacaagattcttaacaaggaaccagctaatagatctatttctcccaacgatgtttttgagttcaattcaaaattcactgacaggatgagaagaattaagatacccctacctcctgttgatgaaaagaaaaaggttgtcgaagatgttgacaaggacaggcggtatgcaattgatgcatcgattgtgcgcattatgaagagtcgcaaagttatgggccatcagcagctagttgcggaatgtgtggagcagctcagccgcatgttcaagcctgacttcaaagccatcaagaagcgaatcgaggacctcatcacaagggattacctggaacgcgagaaggacaacgctaatgtgtacagatacctggcttgattggtggttgatgctaagtcaagaaacagctaagctttgctgactcgcgagcttcgctgcagcggtgtcatgatgcttcatcaacgatttcgtggtcatgcggtgtttttttgggcatttctatgttacgatgtaccgcggtcttccctggctgcagcactggctggtctggtctcattttgtacatgcgtcatcggataggagaatgatgataatctcaaagataaaacggtagcagggcatatcggctggataagtgaggcacttggtcactgttaagcgcaggtgctaaccatgccgttattatgcatatcatcagtatgcttttatgtatgtccttggcactcctgagttaacctggatgctaaatgggtatttatttgctctatgaaatagtagtattaagtg

SEQ ID NO: 3856 - DNA, 1087 bp, Oryza sativa
  ref <308>: DATABASE ACCESSION NUMBER: AK061410
  ref <309>: DATABASE ENTRY DATE: 2001-12-06
taataagctccgaggaattctcaatgttgcagcaatcaaagccccaagttttggtgagcgacgcaaggctgtccttcaggatattgccattgtgacaggcgctgaatttctagcaaaagacctgggtttgctggttgagaatgcaactgaagagcaacttgggacagcgagaaaagtcacaatacatcagactacaacaaccctcatagcggatgcagctagcaaagatgagattcaggcaagggttgcacagctaaagaaggaactctccgaaactgattcgatatatgatacagagaaattggctgagaggattgcaaagctttctggtggtgtggctgtcatcaaggttggggctgcaactgagactgagcttgaggaccgccaactacgtatcgaggatgcgaagaatgcaactttcgcagctattgaggagggcattgttcctggaggtggtacagcgtatgtgcatctttcaactaccgtccctgcgatcaaagaaacaatcgaagaccatgatgagcgccttggtgcagacattattcaaaaggcgttggtagctcccgcttcactgattgcccacaatgctggagtggaaggggaagtggtagttgagaagatcaaggacggcgagtgggaagtcgggtacaatgcgatgaacgacaagtatgagaacttgattgaggcgggtgttattgacccagctaaggtgacgagatgcgcgctccagaatgccgcctcggtggctggaatggtccttaccacacaggccattgttgtcgagaagccgaagcccaaggctcctgttgctgagccggcagagggaacccttaccgtctaaacagtggtgaatttcttcagggtggctttgtttagatggttcataccaactgaaatggtagaatttttgtctgggagtttttggttcagatcaaccgaaaggtctagtgtaggattggtttccatttttgagattgaaggtgcaacctgcctgatctgaactcatatgtccatcaaagaaataatttgcatcattatcgtcatcttcggtttaaactttataaagtaaatcatatggtgtttcttc

SEQ ID NO: 3857 - DNA, 1286 bp, Oryza sativa
  ref <308>: DATABASE ACCESSION NUMBER: AK104560
  ref <309>: DATABASE ENTRY DATE: 2002-08-28
atggccgccgctgccagactcgtctccaccactctcgcgcgctcctcctcctccctcgccgccgccgcgcgccgccccgaccttctcgcctcctcgccgcgtggtttttcaagcatggcagattcaattcaaaggagcggctctggcgatattacgcgggttttattctgtggaccttattggcctgcttctaccagcttcaccaaggagtatttgcagagctatccatttattcaggttgatgaagtaggtctagaggaggtacctgatgttattcaaaattaccacttatgtgtagtgaaaaatcgacgtctagactcagataccattgccaaggcaagtcagatgaagatcattatgcaatatggtgttggattagaaggtgtcgatgtaaatgctgctacagaacacaagattaaagttgcacggatacctgggagtacaacaggaaatgcagtctcttgtgcagaaatggcaatctatcttactctgggtgtcctaaggaagcaaaaggtgatggatactgctgtgaaacgtaaggacctgggcattccagttggagatacaatatttggaaaatcagtccttatcttgggatttggagccattggagtagaaattgccaagaggctaagaccctttggagtaaaaattcttgctaccaaacgaaattggtcatctgatacattgccatgtgatatagatgaattggtcgataagaaaggtggaccagaagatatgtatgaatttgctggagaggctgacatagttataacatgcttgctattgacaaatgaaacagttggaattgtggatcataagttcctctctgcaatgaaaaagggatcatatctggtcaatattgctagaggacgtctactggactacgacgctgtgtttaatcacctgaaatcaggccatttaggtggtttgggcattgatgttgcttggacggaaccatatgatccagaggatccaattctgaagttctcaaatgttattataaccccacatattgctggagtcacggaatactcttacaggacgatggcaaaggttgttggtggtgttgccctgaagcttcattcaggggagccaatcactgaagtggaatttgtgaactaagctcaggaaatgcgtggcacagatgtgccattattatggattgattcaaaaagatcaaaaataggtttgttgtagtgtcaaaattgctttgcccctaggtgaataattgatcattgaatcgcctatccttgcaaggatataataataagatgttgctctgt

SEQ ID NO: 3858 - DNA, 1102 bp, Oryza sativa
  ref <308>: DATABASE ACCESSION NUMBER: AK104561
  ref <309>: DATABASE ENTRY DATE: 2002-08-28
atcccctcccctctcctctcttctctccttcgcttcgccaccgcgttcgccatggccttcgtctccgccgccgccgccgccaccgccgccgccgccttcctccccggcgtctcgtccgcgtcccgcgcaggaacacccttgctctcgctgcaacggcagccgctcgcgggttccctgcgcgcggcggcgcaggggtcgagcgcctcttcggggcaggtggtgatggagagcaaggtcaaggcgaagaagaagaaggggtccggcgccgggaacctccccggagccatcgacgcggagatcagggaggcgcaggactacctcgccatcgacgagcaggaacctgttccggaaaacttcccttttgaaatccttgacgaagaagggatgagtgtggttattctgaaaagggactacaaagatgagaagattgaggtcattgtcagcatgccaaatttagaagggggccctgagtttgacgacgaagaagccgagggtgagggcaagaatgctagcaaggatgatgaagatgaagaggaagacgagagcgctggagatagcagcgtgtctctaaaggtgacagtctccaagggctctgggcccaaacttgagttcacctgcacagcctttcgtgaggagatcaccatcgacgacatgttaatagtggagaatgcagccacagaaggagatgagaaattcccttacgagggccctgaattcaccgagctaccggtgaatgtgcagaagggcctattcaagtacctggagcaaagagggatcactctgccgaccaccaactacatgcacgattacatggtgaccaagcaaaccaaggagtacgtcgggtggatgaccaagctgaaggacttcgtccggcaatgagaaattgccgagcaatttggcaggatttttggtagcttagccttttagcatacctgcatatgtaacaaggattactagaattatgcgaagcaatgcaacaaccggggaaactgccttccctgcaatgtgcgatttctgatgcccagtagtcaatctgaggctattggcacttatgatatcagtgcttattttactagccttttaccgtttcttggtgctgctt

SEQ ID NO: 3859 - DNA, 1055 bp, Oryza sativa
  ref <308>: DATABASE ACCESSION NUMBER: AK061411
  ref <309>: DATABASE ENTRY DATE: 2001-12-06
atacatacatatacacacaatttctgtatatatttcttgctaaccattgttgctgctagttgcttcttcttcttctcctctaccttgtcatcgtccgtagtagaagtaatcaagaattcaagattctcattggctgctgctgccatgaaggaacgccgcggcagcgccggcgtcttccccttctccatcggctgcatgtcgcagtccgccgtcgacgtcgccgacccgcacgacaagaagtcgacgacgacgacgcagaacgacccttcctcctcctccgcctccgccgccgccatggccgccgccgcacagagcgcggaggaagaaggcggcggcgagaaggtgaaaggcgccacggcggcggcggcggcggcggtggcgtcctctggcatcgtggccaccggcgtgcagcggctgatcaaggggatcaagagcctgtcccagattttcgccatgtacgacgacgaggaggaagacgaagaggagagggagatggtgatcgggtacccgaccgacgtgcagcacgtcggccacatcgggtgggacggcatgaacaaggtcggaggcatggtgaacgccttctccctcccatcctccctctccctccgacagctcgagatggccatggaagcagctcatgcctgaactgaacacacactgcaactctgaattctcagtctcctctccttgctggcttgctgcagtattagctagcaaaagaaaagcattattactgctgcatcatgaatccatgcatgcatgcaactgatgaatgattaacaacatgcaggcatggggtagtgctcttgatttgatttgcatattgattagtagtttccatgtggctgtgttgaacatcatttcaattctctgaatgaattggtactacatgcatgcatgcatggctgtgtttccttcttcttcttttttttttttttggtttggccttcaattcatttggttgggcatcaacgtgttcagtagtgtgtacatagttacatgggcatgtgaacctgtacaaattgtcatcaacgatattgacagtgcttgctatc

SEQ ID NO: 3860 - DNA, 1076 bp, Oryza sativa
  ref <308>: DATABASE ACCESSION NUMBER: AK061412
  ref <309>: DATABASE ENTRY DATE: 2001-12-06
aaaaaaaaaaaaaaatactcctccctcgtctcgccctctccctctctcgccgccgccgccgcctctgctttcccctcgcgcggtcgcgccaccacctccgcttcgcgccgccgccatcgtcgtccgcatcgcctcgcgcctccgccgccgccgccacctccgccttcgcctccgtcttcccctagcgccgccgcctccacctccgccgccatcgacgtcgccgtcgccgtctctgagcgcctccacctccttctcccccctcgcgtcgccgtcgtcgccgagtgcggacttcgaggcggacgcggagaaagcgacgaggcgaacgctcctctcctcttccactctcgtctctcctttgcctgcgaggagctgtgcctcgccgccatcgtcatcgtcgtcaacctgccgccgtcgtcgtcaactggccgacctagccgctcgccgccatcgcagtggccagatctgatggcacgaactcaaggccgcctgatctgatggcggtgagctcgtggctgtcgatggttaggcggttggtggagcaaccattgtcctcccaccagccggcatcaccctttccgccgccatccgcaccttgtcgctgtgttggacacttggacgaggggctccgcctcttcacgcgccgtcagccgctgtgtccgatagaatcctcctcacgcgccgcgaaccatcgatggaccagctgaaggagctcgggtgggccaagcggtggagctcgcagccatacgtgtcgtgctgcacgacatctctgcaagagctcaccacgcttgggataaagcacgtggagaacctggcgattccgagtgtccgaaatgatgcagcattttttttcactgttgtcggttcaaccagattcctacccattcgtgcaggccagcttagtatggtttttccttgctacctcctctttgtgctactctggattgctactctggattgataaaaataatctttttgccttacaagataagtgcattaggcttcggtcacaggttcctgcaaaataatttttctgttgatattaataaacaacctgtgatatataattttagcttttc

SEQ ID NO: 3861 - DNA, 1358 bp, Oryza sativa
  ref <308>: DATABASE ACCESSION NUMBER: AK061413
  ref <309>: DATABASE ENTRY DATE: 2001-12-06
gaaattgcagacgactaacattgccatcaacaatatctgggctcagaaaactagtgcgtctccttgtggattatactgcggcattgccagaggagatttctggtcttgtagctctacaagtgctatcttgtgcctcctataactccgtgaagttcatgcaagcgctgggccagctgacagagctgcgatcacttgcattcaagtgctggaatcctgactggtattttgacgcgggaatgtacaaggaggtatctgtcgcatctctccgtgagctggggaaacacaagcttcagtatctagatatctgtgacgatgatgctatcccagatgcactaatgtgttcgtcgtcagagtcagactgcccgtttccgcacctgcagaagcttgttctgtccaaccacaacatccaaaggattccaaggtggattggctcgcttgtcaacctctgtcacctggaaattgttgtcaagaccacacggcaaaacgatctcggcacactagggaacctgccatgtctgctctacctcaagatctgcaggttgtatgagcccgtcgaaagccagcagctcattgtaccgaaccgaggattccgttgcctcaaggagctgtgcttccagtgttggtgcccgttggggctggagtttgccccgggagctatgccgtgggtgcaaaccttccgcctgtggttcatgccatgctggaagagctgcgatcatggtgtcagcgtcggcttaggcatcgagcatctgctagaactcaagcttgtggatgttaagacgggctatggatgtggtaagagggaggtgaagtcatttgaggcagcaatcacagctgtggtcgccaaccatcccagacgccctgcgctcgtattgcgtagatcaggtgagagaagtgcagtcaggaaggagaattggacagcagtggagacaaacatgaacaagtccctgtttgattcatcaacagtcagacaaagattgcagaagcagtccagatttcaaacttgaaattaaagctgcgatgttcctcgctcctaagtcgtaatacaccaacggacagtttgtaggttgtttttccgggtagttccttgcagtgctcaacatttttaggtttgtgctctgctcttctataaatgtgaaatcaaagtgtgttttgattattatttcacgatgaacaattggtatttgagataattgttttaattttccgagggaacaaataattggttttaatatttggacataattggcgaagtgggttgctgactctgtgacccatcagaccggtgtatgttgtgcggtctgaccagccggctctttgtcggtttcggtttcgggttgttcatttgaatacttgtgatt

SEQ ID NO: 3862 - DNA, 999 bp, Oryza sativa
  ref <308>: DATABASE ACCESSION NUMBER: AK104562
  ref <309>: DATABASE ENTRY DATE: 2002-08-28
cccatttcgaagcccaccgaattccattcctcgcgattcctctcccctcgcctcctcgtcctccccctcctaggggatcgccggagaggaatcgcgcggaggaaaaaaaaagaaaagggcttcctcgtcgtctaagttaaaaggaagccatggagcacaaggagactggatgccagcagccagaaggcccgatcctttgcatcaataactgcggcttctttggcagtgcggctaccatgaacatgtgctcaaagtgccacaaggagatgataatgaagcaggagcaggccaagctggcagcctcctctatcgacagcattgtcaatggtggtgattccgggaaggaaccaattattgctggtcacgctgaagtagctgttgctcaagtcgaggtgaagacgcttgttgcgcagcctgctgagattgctggtcctagtgagggggtcacggtgaaccccaaggggagggaaggaccaaatcggtgctccacttgtcggaagagggttggtcttaccggattcaactgccgatgtggcaacttgtactgcgcaatgcaccgctattccgataagcatgactgccagtttgactatcggaccgctgctagggatgctattgccaaggctaatccggtggtgaaggcggagaaacttgacaaaatttaggggtttcatatggttggtgaacgaagcgtcacaatctgcggtcttcatcatccatctttgctgcattatccatgccttttcctttcatgttggctgctacaatctagttgttcggcatttgtgatgcatggcacaccacggcagcttcaagaaccctcatctctggtcagtccgaatggtttgcatgttggctatgttgtgtaagctttatttatgatcgtcttgcgctgacggtattgtggcttcgcatttagctagctctgtaatgtactattgtatccgaagtgttacattgcaaccagtaatagtaatcagcaatcgtccgttatatggt

SEQ ID NO: 3863 - DNA, 1050 bp, Oryza sativa
  ref <308>: DATABASE ACCESSION NUMBER: AK061414
  ref <309>: DATABASE ENTRY DATE: 2001-12-06
aagctcgtacatgtacgcaccgcgacactgcgagtcctgcaagaagccaagccaagcacacgagcgcagcagcagcagcagcagcagctaagctagctagcttggagagatcatcggagatgcctcccaacgcggcggaggtggcgcggccgaagagcccgctccggggcatcctgccgcagagcccactccggatcaagcaggacggcaagttctacgagcggctcctcgccaaggagaggtcggcggcgagccgctccttccgccactactgggccgccgagcccggctcggtgccgttcgtctgggagtcgcagcctggcacgcccaaggtcgacgtgtcccggatggtcgccggcgcagtcccggccatcaccccgccgccgtcgtacctgctccggcacggcggcaaggctggcgcggcggcgccggcggcgccacgccgtcgtccgcaggggaagggcaaggcgaagacaggcggcaagacgcggtacaggttcaagcggatcaagatcggcttcctcgccggcatcttccggaggatcgccctcggccacgtgtggcggcggtcggcggcgtcggtccaggtctcgtcgttgtcaagccggtggctcttctcctcggcggccacggcgccggagaaggccgaacacctcgaccacgacacgcccgcgccaccgccaccgccaaggccgaacaccgagctgtccacccgggcgcgcgcgcgtccgagcctttggatgctgcgatttcgcggattccgaagctggagccgcgacgacggttgggcgtaggtcgctctcgacttctcgagtgtatacgtgcgtcatcatgggggattagaacgtgacaaatgaaatgtttatggttgcgagagatgttaacggttgtttgtatgcatgctgttgttgcctagcgtttcatggaaatcatcattaattacgcgttgattatgtttacggatgaaacccgacgtgttcggaacagttgatcatcttttgtcactagtttaacagggtgattaaaaggatcatacacaataatctgatt

SEQ ID NO: 3864 - DNA, 1589 bp, Oryza sativa; identical to SEQ ID NO: 129
  ref <308>: DATABASE ACCESSION NUMBER: AK104563
  ref <309>: DATABASE ENTRY DATE: 2002-08-28

SEQ ID NO: 3865 - DNA, 1329 bp, Oryza sativa
  ref <308>: DATABASE ACCESSION NUMBER: AK061415
  ref <309>: DATABASE ENTRY DATE: 2001-12-06
gtcgtctcccccagttgttgtgatcgccaattcatccccgccctgctgcctccatccaactcatcaggaaccaacccatcgatcgaccatggatctgcaggaggcggcgatggaagccaggaacggccatcggatcccgccgacggaggagaaggtcatcatcgacacggatccagggatcgatgacagcgtggcgatcatgatggcgttcgaagctcccggcgtgaaggtcgtcggactcaccaccatcttcggcaactgcactacctcccacgccacccgcaatgccctcatcctgtgcgacagagcaggccgtcctgaggtgccggtagcagagggcagcgctgagcctctcaagggagggaaacctcacgttgctgattttgttcatggatcggatggacttggtaacacgtcctttcctgatcctaccaccaccaacaaagttgagcagtcagctgcagagtttctggttgataaggtatcagaatctccaggagagatctctgtactcgccttgggccctctcactaatatcgcattggccatgaagaaagactcctcctttgcaagcaaggttaagaggatagttgtgctgggtggagctttctttgcagctgggaatgccaccccttcagctgaagcaaatatccatagcgacccagaagcagctgacatagttttcacttctggggcagatatctacgtagttggccttaacataacaacccaagtctacttcacagacaaggatatgttggagctaaggaactcgaaagggaagcacgcacaattcctttgtgacatctgcaagttctacagagactggcatgtccactcctacggcgtcgatgctctttttctccatgatcctgtgagtttcaccgcgctagttcaccccgagtacttcacgttcaagaagggcgtggtgagggttgagacccagggcatctgcaaggggcatacttccatggacatgggactgaagaagtggaattcagacaacccgtggactggttactctccgatctcggttgcttggactgttgatgttcctaaggttctggcatatgccaaggagctactcttcaacgcacaatgaaaatgtaaccggatcagtgtcatctctctctctctctctctgaactctgatgtgattgtgtcagaattggcatgcaaatatatctttttttttgggcacaagcagagatatcttggcattgttgtgtactgcagaaattgtatcatatcatttattctgatgaattgcaaattattgataaatgttcagcagcatctgctagtagtacttgctggtgacatgatgat

SEQ ID NO: 3866 - DNA, 906 bp, Oryza sativa
  ref <308>: DATABASE ACCESSION NUMBER: AK104564
  ref <309>: DATABASE ENTRY DATE: 2002-08-28
actcagcaacagctcgcagctcactctctcactctactactcgtagctaagctagctcgcgccgccgccgccgccgtcgccgccgccatgagcaaggagaagcaccacaagcgggagcaccacctccggcgatgctgcggcgggatggcggcgtgcatcctggcgctggtcctcgtcgtcggcttcatcgcgctcgtcgtctacctcgcgctccgcccctccaagccgtccttctacctgcaggacctccagctccgctccgtcgacctcggcgacccctccctctccgccaccgcgcaggtcaccctcgcctcccgcaaccccaatgaccacgtcggcgtccactaccgccgcctcgacgtcttcgtcacctaccgcgacgaacccgtcacggtgcccgtctccctcccgccgacctaccagggccaccgcgacgtcaccatctggtcgcccgtgctctccggcgagtccgtccccgtggcgggcttcgtcgccgacgcgctcaggcaggacgtcgccgccgggtacgtcgcgctgcaggtgaaggtcgacggccgcgtcaagtggaaggtcggcagctgggtctccggcagctaccacctctttgtcagctgccccgccatgctcgcctccgccggaccaggcggcgtcggccccatgcctctcggcggcgcctccgccgccgtcgtgaacggcaccggcgccggcgccgtcgcgtcgctcaggttcacgcagccgacagggtgcagcgtcgaggtgtgagtcacaaatttgagtagcggctagtggcaatatggtaattaattaagttcatcggtcgcgttaatccgcaagctgttaatttttttttgtgttcatgtagctcatgcatactctatgtgagagaataaagttacgtacgttcat

SEQ ID NO: 3867 - DNA, 1431 bp, Oryza sativa
  ref <308>: DATABASE ACCESSION NUMBER: AK061416
  ref <309>: DATABASE ENTRY DATE: 2001-12-06
atatagcaaggcgaaagcaacattagcaagcacacatatacatttgcagataggtatagctaagctctagccagataaaaagaagattatggtcaagagatcctgaattaatgggtagctgtaatagttggaagccaacgttgacaatggttggggtggtggtggtgttcgcggtgatgaacaccctcaccaagatggccttcaacgaggggatgcgctccaccgtcctcatcacgctccgtcagctcatcgccactctcttcctcgccccaatcgcctacttccgggagaggaagacaagaccaaagcttacggctgaaatcttgagcgtcccttacccaatggctcttcttcttggggctgcagtacaccacagcaacattcgcttgcgccttcatcaacatgactcccatcttcactttcattgtagcactgccttatgggctggagaaagtggacctgaagacaggagctggcatagcaaaagtgggaggcacagtgttaggattcagcggagcgatgatcctcgctctctaccagggtccatcgctcaccaagctaggacctgctgctgctcgatcatcatcgtcatcatcttcttcttctgcaacggcggcagtcgtcggtcatggcagcggcggcggcgcgcacaggtgggcgatcgggtcggtggcgctgctgggcggttcagcttgctggtccctgtggttcatcctgcagtcgaggatcgccaagaagtacccggcgctctactcgggcactgccctgatgttcctgctcagcttccttcagatggctgcagtcgcgttggccgtcgacagaattagcttatccccatggatcttaacaacgaagcttcagatcatcaccgtgctctttgtggggatagttggatcaggaatagcgttcttggcgatgtcatggtgcgtggagcagagagggcctgtgttcacgacggcgttcacgcccctcatccagatcatcgcagctgctatcaacgtcatcgttctccatgagcaactccatcttggaattgtgataggatctgctctggtaatcattgggctgtatttcgtactgtggggaaagaataaggaggcctcgtcgtcgtcttctccagcaaaggaggctgtgcctgcgctgcggcaacaatacggcggccatgatcaagaaacgactaatgatgtacaaatgcaaactgtctagtactactacgtactgaaacaataattagtagtagtagctaattagcatgcacaccgcgcacttgatgatcgtggataaagaaaaatgcatcatgaaaaaaggagtaaaaaaaatccggccctgttttttttcccttcctcctatagtatatgcccgagtatgcatatcaggagggaagttggtcaagatgaattgcttttgataatgaaaatcatttcgtccttt

SEQ ID NO: 3868 - DNA, 1123 bp, Oryza sativa; identical to SEQ ID NO: 3692
  ref <308>: DATABASE ACCESSION NUMBER: AK104565
  ref <309>: DATABASE ENTRY DATE: 2002-08-28

SEQ ID NO: 3869 - DNA, 1048 bp, Oryza sativa
  ref <308>: DATABASE ACCESSION NUMBER: AK061417
  ref <309>: DATABASE ENTRY DATE: 2001-12-06
tatgcagccagcttctatgccggtgctcggcttgtcgaggacaggaaaacaacatttcctaacgttttcagggtgtttcttgctctcacaatggcagcaattggggtgtcacacactagcaacctcacatcagattcttccaaggcaaaatcagctgtatcttctatattcgccatcgtagaccgtaaatctaggattgatccaagtgatgatgctggagtgagcttagaaccactaagaggcgatatcgagttccagcatgtgagcttcagatatcctacacgaccagatgttcaatgacacgattcgcgcaaacatcgcgtatgggaaggaaggggatgcgacagaatcagacatcgtatcctccgcgcaataggcgaatgcgcacaagttcatcagctcattgcatcagggatatgaaaccatggtcggggagcgtggagctcagctatccggagggcagaagcaacgcatcgcgatcgcccgcgccattgtcaaggatcccaagatcctccttctcgatgaagccacgagtgcgctcgacgcagaatcggagcgcgtcgtccaagatgcgctggaccgggtgatgatgaacaggaccacggtgatcgtggcacaccggctgtccacaattcagggcgcagacatgatcgcggtggtgaagaacgggatgatcatcgagaaggggaagcatgatgcattgatcggcatcaaggatggagcttacgcctccctcgtcgccctccatgtttctgctgctgccatttcgtagcagatctagcagacgccatggatgaaaagatcatggtttgttgctgaatctgtgagaggagcaagagactggtgtaactgtagcttgtgcaggctccagctcttgtcatccagcagcagcagaagaagaaaaatttgatgaacacaaatatgtcatgtatacatagatagataagatcatacaaagatgtgcaaatgtaaatgcaacgagttgtatgaatgaatgttcatatgatatgaagcagatgatgatgatgatatggatattcattggcat

SEQ ID NO: 3870 - DNA, 1128 bp, Oryza sativa; identical to SEQ ID NO: 2215
  ref <308>: DATABASE ACCESSION NUMBER: AK104566
  ref <309>: DATABASE ENTRY DATE: 2002-08-28

SEQ ID NO: 3871 - DNA, 1160 bp, Oryza sativa
  ref <308>: DATABASE ACCESSION NUMBER: AK061418
  ref <309>: DATABASE ENTRY DATE: 2001-12-06
aaagtgcaaaagcagcagcagcagattcgtccgcgtcgctctgtctgacagtgtgggccctccccgagatgcaggcgtggttctccggcacggggccctccgcctcgtcggcgtcgtcgtcgtcgtcgccgccgcagccgtcgctgctcgcggaatggaactcctacgccgccgcgcgctccgcggaggaggaggaggacggcggcgggggaggcttcgggatcgacatcgaggccgccgtccgctccgccaacgaccgcgtctccggcaccttcggcgtggtatctaaaggtgttctagggttgccaggcagcttcaagtccacaacaagcagtgttccatcgagcaaatcacttgtgtattttggcctttttcttgctagtggaatattcctagttttcattgcgttcacgatatttctgccagtcatggtaatcatgcctcaaaagtttgccatctgtttcacggcgggatgcgccttcataattggatcattctttgcgctaaaagggccgaagaatcagctctatcatatgatttccaaagagaggttacctttcaccatgggatttgtgggcagcatggctgctaccatctacgtgtcaatggtgctccatagctacatactttcagttttcttctcttgtcttcaggtacttgcgctagcatattatgctatttcatacttccccgggggatctgctggaatgaagtttctatcatctgcacttgtgtcctctgtgctgagatgctttgggcgatgagctcacccgttagttgctctcacccatccatttggcgcgcattcatcgtaaccttgtgtagttccattacagttttgtctttttgcttttgctatagaggtagtgcctgtcaagatgaccctggtgctggtgtccattgaaatatgtgtgtataccactgtcctgtattgggagctctgttccttggattgaattatgaaaatcaggaaaatggaaatctatcgagattcgagagtcaatagtttgtgaaatttggaacacttgcactgtaacttaccttcaatcttgcattgggggatttcccttttttgactttaatctgcccatctgccttactactcttcagatatttgtttttatattgaagtcccaatttatgtgaatatccaacccagc

SEQ ID NO: 3872 - DNA, 1704 bp, Oryza sativa
  ref <308>: DATABASE ACCESSION NUMBER: AK061419
  ref <309>: DATABASE ENTRY DATE: 2001-12-06
acctagctcaacctcacgctcaagctgcatctctctctctctctctctctctctctctctctcctccagctccggcgaccatcctgcccgccgccattcgccggaagagcccaccagctgcaccggcgtggcatcgtccacttggcgagagtggcggagctagatcggctatcgatatatacataggtggtggatgcgtgcgtgcgaggtggtgagggtgagatgaggtctccggtgggccgcagggaggtggtggtctccggcgtcttcaccgcgctcctcgtcctctccatcctctccctcccgtcgctcctcctcaccggcccggcgtacaagagctggccgttcttggcggcggcgagggacgactccaccaccgggagcggcggcggcgcgggttactacccggtgtcgttcgcgtacctcatctcggcgtcgacgggcgacgcggcgcgggcggcgcggctgctggcggcgctgtaccacccggccaactgctacctgctccacctggaccgggaggcgccggcggaggagcaccggcggctggcggagctggtgtccgggcagcccgtgtacgcgcgcgccgggaacgtgtggatcgtggggcgccccaacctcgtcacctaccgcggcccgacgatgctgtccacgacgctgcacgcggtggcgatgctgctccggctcggccgccggtgggactggttcgtcaacctcagcgcctccgactacccgctcgtcacccaggacgatttgatggatgtgttctccaggttgcctagggatctcaacttcatacagcataccagccaccttggctggaagatctctgcagaaagaagagggcgcggccggtgatcctcgacacggcgctgtacgaggccgaccggtcggagctcatccgtccggcgaacctcaccaccaaccggcgaaatctccccaccgccttcaagctcttcacaggttcagcgtggacgatgatgtcgcggcagttcgccgagtacttcaccgtcggctacgacgacaacctgccgcggacgctgctgctctactacaccaacttcgtctcctcgccggagttctacttccagacgctggcctgcaactcccggcggttcaggaacaccacggtgaaccacgacctgcacttcatccggtgggacagcccgcccaagcagcacccgctctacctcggccccagggactaccgccggatgctgctcagcgccgcgcccttcgccaggaagttcagggaggacgaccccgtcctggacaggatcgaccgggacatcctccgccgcgacggcgccgccccgggccgggctttcgcctacggcgggtggtgctccgaggggggcgtcaggctgtgctccaacccgcaggaggccgggaggaagggcatgataaaggccggtgcagggtccaggaggctcagggccatgctcaacaagatgatgaatgcgagaaatttcaggaggcagcagtgtaggtgaaactagaggcatttttatatacagtctaattctgatgatcagtgtgtgtgttcatgtatataatagaggagaaatcgaattacaggaagaatttgaggcagttttggttgtctggagggaggttaaaagtagagtgacagtgtaatctcacagaaataagaacatgggggtcattagtaaggttgtaaaaaaattgacaggattaacgttc

SEQ ID NO: 3873 - DNA, 1014 bp, Oryza sativa
  ref <308>: DATABASE ACCESSION NUMBER: AK061420
  ref <309>: DATABASE ENTRY DATE: 2001-12-06
agtgagactgtgacatgaaaacttagaattgcagagcaggtgaagtcgtgaagatgcaggagcagagtacataacaatggcgttaggattacacgttcagagagtgagctagagcacatcgttgatttttgttcagcgatcatcgatggatagacggcggattcggcgagatgtggagatcgaatctgtcgccgacgactctgccaattctgtccagaacatcaggctggtgattgacatcggcgacaggacgatccaggtccctctcaatggccacaccgtcgcgcagaacatcggccgtcaggctgccgccgccgtcgccggcgattcgtcagccggcggtgtcagtgagaaagccggtggcggcggcgaggagtggctgcaagaacaggacggcttgttgagcatgcgcgggtggctgatggcggtggccacgctgttcgccgccatggcgttccaggcggcgctgcagccgccggggtggatgccgaggccgcgcgactggttcgcggcgctgctcgccgccgacccggcggcggccgccgtcacgagggaccaggccgggaaggcgatgctgtacctgatcgtcaacacctgcaccttcgccacgtcgctcgccgtgctcctgatgctgctcgccgtgggcgacgccggcggcggcggcggcggatgcgcgtcgaggagggtcaccgcgaggctgatcgccaacatgatgacggccgtggcgctgttcgccgcggcgacgttcgcgctctgcgccgccgacgactaccggctcatggcgttcgtcggcaccgtcgtcgccgtgtacgccgccgtcaccgtcgtgttcgtcaggtgcaaccttgctctgccgttccggagaggcggcggcggcggcggccatggttgttgtagctgggtgtcaagattgtaataagagcagataatactgggccggccatgcatttgattcagccatattactatacacgcgcggcgcaacgcacaataacggagtttagtaccacatgg

SEQ ID NO: 3874 - DNA, 1123 bp, Oryza sativa
  ref <308>: DATABASE ACCESSION NUMBER: AK104567
  ref <309>: DATABASE ENTRY DATE: 2002-08-28
gtgctcagtttcactcttatcagtgaattagatcatatacttgtgtccttgacagctcgttaattagcatggctaggtctctcgctgctctccttctccttctggtcgcagccgcgggagccagccatgccgcgtcgccggcggagatgtactggaagatcgcgctcccgacctcgccgatgcccggcgccattcacgacctcatcagcccggcgagctcagcggcctcagcttcgaaggataaggaggatacggtgggctccgtgttcttcctcgagaaggacctcttcccgggctccaagatgacgctccacttcacccgcgccaccgccggcgccgcgctgctccctcgcggccgcgccgactccgtcccgttcgcctccgaaaagctcccggagatcctctcccagctctccatccccgccggctcgccgaccgccgacgccatgcggtccacgctcgccgtgtgcgaggccgcgcggatcgccagcgagacggcgcccaagcacaagcactactgcgccacgtcgctcgagtccatggtcgagctcgtcgcctccagcctcggcacccgcgacgtccacgccgtgtccacggaggtggtcaacagggccgggccgacgccgaggcaggcgtacagggtggaggccgtgaggcccgtgccggtgcccgggggcgacatggtggcatgccacaggatgccctacgcgtacgccgtgttcggggtgcacgggatcaagggcgcggcgtacacggtgacgctggccggcgccgacgggaccatggcggaggcggtggcggcgtgccacggggacgtggacgggcacggcgtggcggtggcggaggcgtacaagaggctcggcgtggcgcccgggaaggtggcagtctgccacttcctgcctcaggacgacatgctctgggtgcgcaactgaatgaagcagctacctgcgcgccatccatggctaattaagctccttcctatattttcgatctacctgccggctggctatcatgttatcatcgcgtgtgtgtgcgcgccgatccgacatgcccacactacacgtcgacactacacgtgttttattttgttaattaataagtctggacaaccaggtcatcttgt

SEQ ID NO: 3875 - DNA, 988 bp, Oryza sativa
  ref <308>: DATABASE ACCESSION NUMBER: AK061421
  ref <309>: DATABASE ENTRY DATE: 2001-12-06
atccaatagcgcagtgacagtgccaatggcctctcacaccaccctcatcctcctcctccctctcctcgccgccgcggccgtcgccgccgcggacgtcgcccctgcgccggcgccacctgcggcgcagacgatcaacctcacgggcatcctcgagaagggcgggcagtacaacacgctgctccgcctcctcaacgccacccgcgtcggcgagcagctgggcagccagctgaagaccacctacgacggcctcaccttcttcgcgccgacggacgccgccttcgccgcgctgaggccgggcacgctcaacggcctgagcgaccaggagcaggtgcagctggtgctctaccacgtcctcccgcgctactacaccctcgccacgttccagacggccagcaacccgctgcgcacgcaggccacgggccccgccggcgtgtacaccgtcaacgtcaccaccaccacggggcagagcctcgtcaacgtgtccaccggcgtcgccgccgtccccctcggcaccacgctctccgccgacttcccgctcgccgtctactccgtcgacggcgtgctcctgccggagcagatgttcgggaaggccaaggctcccgcgccggccgccgcgcccgcgtccgccgccgggaagggcgccaataaggagcacaagaagggcggcgccatgcccaagaatgaggtcgcggccaccgcgccgacggccggagctggaggagaagattcagatgacagcgccaccaccaatgcggtggccgttgcaggcgcggccggtgtggtgtggactgctgctctcgtggggattgccaatcttgtcatcgcgtagaaagtgtgtgcttgtctttttctccttcgccgttttctttcgttttcgtcgttgcatatgtttcattgcacgtgtcctattttgtatgtatgcaagagtatttatatatgttgatgatgattcactcagtgaaatttactggcttcttttggtctttcc

SEQ ID NO: 3876 - DNA, 1148 bp, Oryza sativa
  ref <308>: DATABASE ACCESSION NUMBER: AK104568
  ref <309>: DATABASE ENTRY DATE: 2002-08-28
gcttgaagggaaagtaagaaagaaagaaaagaaaaaaaaaaggaaaatcgtgtctcgtctcgtctcgtcttcgtctcccccgattcccgagcagcttctcgaaaccctcgcggcctcgattccggcgatggcggagcccaacccgcaagtggagagggaggtggaggtggaggaggtgaggaggccgaagctgaggtacttggagttcgtgcaggtggcggcagcgcaggcgacgatctgcctcgcggggctctacgcgcttgccaaggaccacgccggcccgctccgccccggcgtcgacgccgtcgagtccgccgtcaagggcgtcgtcggccccgtctacggccgcttccatggcgtccccctcgacgtcctcgccttcgtcgaccgcaaggtggatgacacggtgcaagagctggaccgacacctcccgccgacgctgaaggccgcctccgccaaggcttgcgcggtggcccgcggcgtgccggacgtggcgagggagctcaccgcggaggtgcagcagtcgggcgtcaccggcgccgcgcgcgtcgcgtacgccaaggtcgagcccgtggccaagggcgtgtacggcaggatccagccggcggccaaggacctctacgtgcgctacgagccggcggcggagcacctcgccgtctccacctggcgctcgctcaacaacctgccgctgttcccgcaggtggcgcagatcgccgtgcccaccgccgcctactgggccgagaagtacaacaaggtgatcgccgccgcggccgacaagggttacaccggagcacagtacctccccgccatccccaccgagcgcatcgccaaggttttcggcgagttatcgccggaggcccagccgtcgaagagcgagtcggcgaagacccagtaggtgaggtcaccgcgcctgaaggtgagaggtagccttcgcctgaagtcctgaactgaataagtaagagtggggcgcttatggcagcagaaaaatggtgttttagatgtatgcatgtgacgacattttcgtggatgatgatgttctacttagctcttttactttgtgttgtggcgtacgtttaatcctcctggttttgtataaaagctgtggttgatgtcgcaatcttttagctaatccagtgcaattaggcttg

SEQ ID NO: 3877 - DNA, 1323 bp, Oryza sativa
  ref <308>: DATABASE ACCESSION NUMBER: AK061422
  ref <309>: DATABASE ENTRY DATE: 2001-12-06
gacacaagccctataatagccaattaacccccgtctctctcctctcacagtctcacccacatgcgcgccattgcctcctcctgccgacacacgcagacagcagcagcaatggcgcccggcagccggtgcagccggcggcagcagctgctggtcgccgtcgccgtggtgctgcttttggcggcggcgccgacggggtgctcggcggcgaggagcaagaagtcgtacgaggccatcttcagcttcggcgactcgctgtccgacgccgggaacctcatcgccgacggcatccccaagtcgctcaccaccgcccgcgccccctacgggatgaccttcttcggccgccccaccggccgctgctccaacggccgcctcgtcgtcgacttcctcgcggagcacttcgggctgccgctgccgccggcgtcgaaggcgcacggcgcggacttcagcaagggcgccaacttcgccatcaccggcgcgacggcgctggagtactccttcttcaagcagcacggcatcgaccagcgcatctggaacaccggctccatcaacacccagatcggatggctccaggacatgaagccttccctctgcaagtcggaccaagagtgcaaggactacttcggcaagtcactgttcgtggtgggggagtttgggggaaatgactacaatgcccctctcttctccggcgtcgccttctccgaggtcaagacctacgtccccctcgtcgccaaggccatcgccaacggtgtcgagaaattgattgaacttggtgcgaaagacttgctggtaccaggagttctcccaattggatgcttccccttgtacctgacactgtacaacaccagcagcaaagctgactacaatgcccgcaccgggtgcctccggagatacaaccgtctcgccttccatcacaacagggagctcaagcagcagcttgatgagcttcaaaagaagtacccagagacaaaaatcatgtatggtgactacttcaaggcggcaatgcagtttgtcgtcagccctggaaattttggtttcagctcgactatgcaggcttgctgtggtgctggaggccagggcaactacaacttcaacctgaagaagaagtgtggtgaggagggtgctagcgtgtgctccaacccgtcgtcgtacgtgagctgggacggcatccacatgaccgaagccgcctaccgctatgtcgccaatggctggctgaatgggccatatgctgagcccccaatcctcaagtgagaatttgaggggttttgactgtatgtaacacagctgttggtgcaaaaatatatatgaatgaagaaggtttcagtc

SEQ ID NO: 3878 - DNA, 1027 bp, Oryza sativa
  ref <308>: DATABASE ACCESSION NUMBER: AK061423
  ref <309>: DATABASE ENTRY DATE: 2001-12-06
cttcctcctccaattccagcacccccagtattcctcctcctgttgcccctactcctactgctcctactcctcctattcccagccccggaactggaagcagcaacggcagcagtggcggtggcggcggcgggtggctgaacgcccgtgcgacctggtacggcgctcccaacggcgctgggccggacgacaacggcggcgcgtgtgggttcaagaatgtgaacctgccgcccttctcggccatgacttcctgcggaaatgagcctctcttcaaggacggcaagggatgcggctcctgctaccagatccgatgcgtggggcacccagcctgctcggggctcccggagacggtgatcatcacggacatgaactactacccagtgtcgctgtaccacttcgacctcagcggcacggcgttcggcgccatggccaaggacaaccgcaacgacgagctccgccacgccggcatcatcgacatccagttcaggagggtgccttgtcagtatccagggctgacggtgacgttccacgtggagcaagggtcgaacccggtgtacatggcgatactggtggagtacgagaacggggacggggacgtggtgcaggtggacctgatggagtcgcgctacagcaccgggggcgtggatgggacgccgacgggggtgtggacgccgatgagggagtcgtggggatcgatatggaggctggacaccaaccacccgctgcaggggcccttctccctccgcatcaccaacgagtccggcaagaccctcatcgccgatcaggtcatccccgccgactggcagcccaacaccgtctacagctccatcgtccagttcgactagctaattactactactccactccttgccattaattagtatatactccattatttgccatttgcacatcatcgagacgtcgcttgtgacgtccgtttcagtgcgtatatgcatgttgtactcctccttacttgattacatgtatgcatgcaaattaatgaatcaatcaatggtcggattttctatat

SEQ ID NO: 3879 - DNA, 1055 bp, Oryza sativa
  ref <308>: DATABASE ACCESSION NUMBER: AK061424
  ref <309>: DATABASE ENTRY DATE: 2001-12-06
aaatcctcaaaacgaacgcgcctctccccgccaccgcgcatccatccatccatcggcaccggaggtttcgccggagctatcgcatctcccattcttcccctcccctttgtatatcctcctcactccaacacggcgccgggcaccggtcctcctcgcggtctccgccgtcgctgtccatcttccaccggtaatacccgccgctgcctcctccactccgcccgcatcgccgtccaatcaccgcgctgtcacgacacgattcgacctcaaccacggcgctgcctcctgcactcctgccactcagatgtcacccacgtgatccggccctcaagcccgatgtggccagctgatcttatcctctcccccatcagtgaagtctattttcaggattattagggacaaaaggatcattgattctcatgtccaaaaggtgttcgatgaaatgctgctaatagatggttcgttggacatgatttgttccttgacatgatcaatgtgttgcccaagctccagatgacacggtataatgcttctgctctggtcctgaggcctgactattgctgcctatgctgagttctaataaaaaaatataagtgttttggaagactgcaaggaccatggatgccattcgttgttggggcttatcccatagtaaaaatgtaaacaagagctttggcaagggcaggttgtattccaaagtaggtctttgtgctgcccagttgtatgtttcagcgtcatatcgctcttatctggtgatttctggcccatgacaaagaagatagaggggaggggcaaaagagaaaagcccgtggaaaatgggctggcgcctcattgagccaggttgacgcagtaccatgccttataattgataatgtacgcacttttgtgtttttttttcaatcattgtctcaaatgaactagcagcttcgatacgccagttcacactattgtaaatttgtaatgcgtatcgaaggtagtgtgattcacccgaaaggattttataggaatcatccaaattgacatgttactatggtgtatgaaactctatttttatctcg

SEQ ID NO: 3880 - DNA, 1589 bp, Oryza sativa; identical to SEQ ID NO: 129
  ref <308>: DATABASE ACCESSION NUMBER: AK104569
  ref <309>: DATABASE ENTRY DATE: 2002-08-28

SEQ ID NO: 3881 - DNA, 1133 bp, Oryza sativa
  ref <308>: DATABASE ACCESSION NUMBER: AK061425
  ref <309>: DATABASE ENTRY DATE: 2001-12-06
gaacccaagccccccacacacacttctaactagctaggtgtgatacacagcagtgacagtgagagtgagagtgagcttgagtgatcatagccatggcattcagtagcaaagcttgccgttgcttggtgctcatgtcatttgccttgctcccactgagcatggccatggactccattggcagctactgttcagggaacagcttggccggcaacagcaaggccgtggcaagcatcaactccgtcctcaccgacctcgtcgccaagggctccaccggcggcggcttcgccacgtcctccgccgggaaagccaacaacgtcatctacggtctcgcgcaatgccgcggcgacgtctccaccagcgactgccaggcctgcctcgcctccgccgccaaccagatcctcaccagctgcaactaccaatccgactcaagaatatggtatgactactgcttcatgcggttcgagaacgagaacttcatcgggcagacggacacagatgccggggtgattcttgtgaacgtgcaggcgatggataacggcaaggcgttccagaaggcggtagggaaggttatgggcaaggcaacgtcgcaggcatcacaggctgggagtggtgggctgggtaggacgaaggatcagtacacgccgttcatcaacatctacgggctggcacagtgcacacaggacttgtcaccgctggcttgcgcacagtgtctgtcaacggcggtgtcaaggttcggtcaatactgcggcgcacaacagggatgtcagattaactacagtagctgcagggtgcgctacgagatctatcccttctacttcccgctcgccaccagcgcacgcagcgccaccactgacatgaccaagtacaccaagatcgttgtgcaccgctaagcatccatggttagttgcacgtacatggtgatgtgcgcatgcaaaagttgcaaacacatcacgtacgtacgtattaatgttcaacgtattatgtgtctgtggatgtttcagcgtgcagtggatgaataatcaaggctataaaatgtagccttagcatgttataactgggaataaagatgtgagtactagctaagcaatgtacgcgcacattcgtgtggagtaataatattagagtttttaacc

SEQ ID NO: 3882 - DNA, 1096 bp, Oryza sativa
  ref <308>: DATABASE ACCESSION NUMBER: AK104570
  ref <309>: DATABASE ENTRY DATE: 2002-08-28
ctccctgctccagtctccaggaggagtggaagggctcggcaaacatcaggtagccgtccctcctttatccacttcgctctcttctctgcagcgctgcatcctactccctggttagcaatagcaagggtaggaagatgagcacgttagatgccacgcgagcagagctcggccttgttgttctgtacttgaacaaagccgaggccagggacaagatatgcagggcgatccaatacggctcgaagtttatcagtaacgggcagcctggcacggcacaggatgtcgacaggtccaccacccttgctcgcaaagttttccggcttctcaagtgggtcaatgatctgcatggtcttatcagccctcctgctaaggggactcctcttacactggtcttgcttgggaagtccaaaaatgcgctgctctcgactttcttgttcctggaccaatttgtatggttgggaagaacagggatatacaagaacaaggagcgcacagaccggattgtaaggatatccctctactgctggatggcctcttcagtctgtgcagggctagttgagcttggagagcttaagaggctatcaaaatcaatgaggaagctggcgagagagctgagggatactgacaaatatgagaatgaccagtacaagagcaagatgaaacagtcggatgaacggctgctagcactggtgaaggcggccatggatgttgtggtggccgtagggcttcttcagctgtcacccaagaagatcactccaagggtaacaggggcatttggattcgtcacctcactcatttcctgctatcagcaacttccatctcgtgctcccgctatcaaagtgaaggcatgatggatatttgccgttgtagcccaaagggagtccatcactggaatctgcagacgtaattcttaagcatggattgtgagataatctgtctatgataatcagtatagaatactttcagttgtacgtatggtttatggcttcacacaataccctcctgaactgtaatgaacatggtttatgtgttcatgcatgtcttctactttgtactccaacatggctgccaaatttatactcattggagcatgtatgcc

SEQ ID NO: 3883 - DNA, 985 bp, Oryza sativa
  ref <308>: DATABASE ACCESSION NUMBER: AK104571
  ref <309>: DATABASE ENTRY DATE: 2002-08-28
aaagcaccatcctctcgcatcaccaattctaaccctaacgacaaccctactctctctctccaacaatcaaagattcgatggccgtgctggtggcgaggcaggggcgggagctgcagcggtacacgagcgccgggggccgcatcgtggtgggttgcatcccgtaccgggtgcgcagcggcggcgagatggaggtgctggtgatcacgtcgcagaaggggcacggcatgatgttccccaagggcgggtgggagctcgacgagtccatggacgaggccgcccgccgcgaggcgctcgaggaggccggcgtccgcggcgacaccgagacgtccctcggctgctggtactacaagagccgccgctacgacaccacctacgagggcttcatgttccctctccgcgtcaccgacgagctcctccagtggcccgagatgtcctcccgcaagcgcacctgggccacggtgcagcaggcgatggatggatgccagcacggttggatgcgtgaggcgctcgagcggctcgtctcccggcacgccaccaacaagctgcagtctgcgctgtaaacccaaccaaaatcaaagcgagctgagtcgcgcgagaagggaaacgggcgggctacgagcacagcacgggcggcggcgcgaagtcgccggcgtcgtgttcgctctcccggtgaagcggcaggccggccgggctcgatcacatctcgatcgagcaccatatattttggccgccctcaccggagagcgagacgacggcggacgaatgccccgcgcggagatcggagcacgccgacgacgacgactcttcatttggggttgcaggggtcgtcgtcgtgtatacgtacgtcgcggcgaaataacggcgcgagaattttagaaagtttgaagattcggcatcttgtaaaaaaagatcgaagctggaacaagccaattaatttaaaacaccacattgcgaaagcaattcgagattcttcctttgaagcaac

SEQ ID NO: 3884 - DNA, 1123 bp, Oryza sativa; identical to SEQ ID NO: 3692
  ref <308>: DATABASE ACCESSION NUMBER: AK104572
  ref <309>: DATABASE ENTRY DATE: 2002-08-28

SEQ ID NO: 3885 - DNA, 1078 bp, Oryza sativa
  ref <308>: DATABASE ACCESSION NUMBER: AK061426
  ref <309>: DATABASE ENTRY DATE: 2001-12-06
acgcgactacgcgtacgccacgccacaacgcttctcgctctccctccactcgtagcagctcgagctgcctgtagcagatagcgcgacgctgcgaccttcgtgtgcccggccgctcgccgccccgcgcgcataagagggaggaggaaggaaggaggagagatcgtagcaagagcgaagcgagatggctgccgggctgggcgtgaaggcggcgccgttcacgtacgtggcgcacgcgctggccgtggcggcggcggtcatggtgctcgtctggtgcatcagcttccggggcggcctcgcgttcgaggcggacaacaagaacctcatcttcaacgttcaccctgttcttatgctgattgggtacattatcctcggcagtgaagccataatgatctacaagatattcccaaaactgaaccacgacacaaccaagctgatccacctgattctccacgcgatcgccattgttcttggcgccgtcgggatctactgcgccttcaagttccacaacgagagcgggatcgccaacctctacagcctgcattcctggctcggcatcggaacaatctcgctgtacggcattcagtggatatttggattcgtggcgttcttctaccccggcgcggcgccgcacgtgaggcgcggggcgctgccgtggcacgtgctgttcgggctgttcgtctacgtcctgacgctggcgacggcggagctcgggctcctggagaagctgaccttcctccagagctccggcctcgacaagtacggcgcggaggcgttcctggtgaacttcacggggctggtcgtcgcgctgttcggcgccgccgtcgtcgtggccgccgtcgcgccggctcacgtcgaggaacccgagggctatgctccaattccggtcaactagctatgtttcgcggttgctggaagtgatcattaataccacgaaatcaaaggtgtaacagcagaattcatataccgatttgtttgtattcggtggacgatactgtgcgataattcaacactatccaggtaatttacgtttactacagtgaatgcacatagttaccgaatccaataatggtttacctgc

SEQ ID NO: 3886 - DNA, 1149 bp, Oryza sativa
  ref <308>: DATABASE ACCESSION NUMBER: AK061427
  ref <309>: DATABASE ENTRY DATE: 2001-12-06
acacacaccaagattaattatctatccacagggacagagaagaagaagaagaagaagaagactatcatcttgagcttattcttccatttgctccatcttgaaatcatcagtaaccatggctaggaagtgctctagctgtgggaacaatggccacaactccaggacttgcagtggccaaagagttcttgatcacagcatcagcagcagcaacagtggtagtactactgctgctgctgctactgcctgtggtggcttgaggttgtttggggtgcagctgcaggtaggaggaggctcatctcctctgaagaagtgcctcagcatggagtgcttggcatcaccagcatactatggagcttctgcctcgccgtcggtttcgtcgtcgtcatcttcgcttgtttcgattgaggagaacactgagagggtctccaatgggtacctctctgatgggctcatgggaagggttcaggagaggaagaaaggagttccatggactgaggaagaacaccagatgttcctcgccggccttgacaagctcggaaaaggcgactggcggggcatttctcggcacttcgtcactacccggactccaacgcaggtcgccagccatgcccagaagtacttcctgaggcagaacagtatgacacagaagaagaggaggtccagcctctttgatgtggttgaaggtatcaagagggcagcagcaatgcccatttcaggatctgcatctgaactgcagatccccggcatgtcgatcggtgtcggcgtggtgaaggaggaggttgtcctgcctccatgtctgaacctgatgagtaacagttcatcagcatcacagcactcaccttccctgacattgctggcaaatcctcaggtgcagctccagatgcctgacctggagctaaagatgtccacatcccggttatctgaccaatccggtccgtcgccgagcacgcctttcttcgggaccatcagagttacctgatcttcatcttcagtgctcctcataaaagtggaggagttcagaaaagggtgttttggagatcatgtacctcaatcagaaagttaggtgttactgtaatgttagaatgacaatcagtgatcagcccatgcacaaaataagataagaaaagcaaagaagaaatggtttttatc

SEQ ID NO: 3887 - DNA, 1041 bp, Oryza sativa
  ref <308>: DATABASE ACCESSION NUMBER: AK061428
  ref <309>: DATABASE ENTRY DATE: 2001-12-06
tgacgctggtagctatggacaagttcctcctcaaggtcctccttcctatggtgggcctggtggtgactatgcagcacctccaagctcctatggaggcaataatgcatacaattcagattctgcagtgccacctcctagtagctatggtggtggtccaggttcatatccaccaagttatggtgcaccacctccgaacccgccatatagcggtggtgctccaggtggccaaggtagcctacctccttcatatgatggtgggtatggtggtcggcctatgcctgggggtggaggccctggtgcacctccaccctatcatggtggtggtggtggtggtggtggcggcggcggtggcggcggatacactggcagtgctgctccagagccagctgcaaaggttaagcagtgtgatgcaaactgtgatgagacttgtgataatgcaagaatttacatctccaacttacctcctgatgtgactgttgaggaactgcaagaactatttggaggaatcggccaggttggaaggatcaagcagaaacgtggctacaaagaccagtggccctggaacataaagatctatactgatgactctggaaagaataaaggagatgcctgccttgcctatgaagatccttctgctgctcattcagctggtggattctataacaattatgaaatgagaggctataaaattagtgttgcgatggctgagaaatcagctcctagagctcctgcatatggtcatggaggtggacgtggtggctatggtggaggtcgcagggataacttcagagatggaggaggccatgggcctaacaggcatcaaggtggtggttcgcgttcaaggccatactgaaagcaactaatatagttactaagattgtcatctgtgagaaaccatttctattcctgttcatcggacttgtactcaaaacaagagcgtaaggtaggttgcctgcttttctcggaattatattccattgtcatactccaatgttggtcggatgtttgtttgtctcatccaaaaagtgattgatccatgtt

SEQ ID NO: 3888 - DNA, 1200 bp, Oryza sativa
  ref <308>: DATABASE ACCESSION NUMBER: AK061429
  ref <309>: DATABASE ENTRY DATE: 2001-12-06
gtaaacctctccctctccccactctcgcgcctcctcccatggcttccttcccgaccaccgccgccgccgccgccgcgcaggcattcgccttcgccctcgcgccgaagccatcctcctccgccgccgcaccatccgcgctcttcccccgcaccgccgcggcggcggcgttcccgacgctggctgtgcgaggaagcgggaaggcgaggcagccggtggtggccgcggcggcgggggcggggacggggagcgagcagagggagacgatactgctccccgggtgcgactacaaccactggctgatcgtgatggagttccccaaggaccccgccccgacgcgggagcagatgatcgacacctacctcaacaccctcgccaccgtccttggcagcatggaggaagccaagaagaacatgtatgccttcagcacaaccacctacactggtttccagtgcactgtcgacgaggaaacatcagagaagttcaagggtttacccggcgttctgtgggtgcttcctgattcctacatcgatgtcaagaacaaagactacgggggtgataaatacataaacggagagataattccatgcacttacccaacctaccaaccaaaagagcggaggacatccaaatatgaaagcagacggtatgaaaggcgaagagatggacccccagcaagcaggagaccaaggccgcagactgctcagcctgagtcagcctcttcttcatgaggtcagttttgcaggcactcatccacgtaatggaaagaaagaacttgcttactagctaattctaccacttggcgtcgcatacgggaaagctctgacagacaaatctatcctcaacccaaaatatcatccagagctgtgcaagcgattcatgcaggctgcatttggaattttggatcatgtggatcatcatcattcttgatattttgggtggactatgacctctgaatgtgacaaaagacggaaattctgatctatctaagaatgttactgtctcaaatatctagtgatatttttcttgtgttaccctgctacctagtagttgtgttgctggtttgtgtgtggaatttcttgatccttatccatgtgagttttcttgaactgaagttgattttttggcctttgtattggcatttgttctgctcagagcctgagacttgcaatttgggatgaccattgaatcgaagtgagattg

SEQ ID NO: 3889 - DNA, 1046 bp, Oryza sativa
  ref <308>: DATABASE ACCESSION NUMBER: AK061430
  ref <309>: DATABASE ENTRY DATE: 2001-12-06
aattgaagcaacaagttgtagcagattgagagagagttgggaagaattacacaagaaatttagagaaatagtactagctagctagcaagaatatagatatataatgtcgatcaagcactgcgagcaacacaaggattgcgagcggcagcgcctgtaccggcgttgctgcgcggccatcttcggcatccttctcctcctcctcctcatcgtcctcatcgtctggctcatcctccgccccaccaagcctcgcttctacctcaacgacctcaccgtcgtctgcctcaacgtcaccaccggtggttcctacgccggcgccaccgcctcctccggctacttctccttcctcaccgtcaccatgcagaccaccctcgccgcccgcaacggcaacgagcgcgtgggcatctactacgaccgcgccgacgtgtacgccgagtacaagggcctccgcatcaccgtgccgacgtcgctgccgccggtgtaccagggccacccggacctcaccgtctggtcccctttcctctccggcaacaacgtccagctcccgccctacctcgccgtctccatcacccaggacgagaccgccggctacctgctcgtcaccatccgcgtcgacggctggatccgctacaaggccggcgccttcatcaccggacactaccacctccgcgtcaggtgccccgccctgctcatcgtcaacgacggccggggaagctacggctccaactccggcggcggcaacggctacttcaggttccagcgagccgccgcctgcgtcgtcgacgtctgatccatccatccatctcctcatcctcctctcatgcatccaacaaatcatatcatccttaattaattctcctccttccatatataattgcttgcttaattgatcgatctacattctacaagcacagccctgatgaagaagctatataattaaaagctcagctcaactgatcgagtgaggatcggagtaatcttgcatatatgcctgccaccagtggttttatgtatttacagtacgaattaatttgacctttttcttactt

SEQ ID NO: 3890 - DNA, 1265 bp, Oryza sativa
  ref <308>: DATABASE ACCESSION NUMBER: AK104573
  ref <309>: DATABASE ENTRY DATE: 2002-08-28
aatgcaggtaattaagcagtacagcaccaattaagcaaagccacagcaacgagagagagcttgtgaagttgtgatatttcattttgaccatatgggttactcctactcttccgccgccgtggcggtgagcgttttggtggtggcgttggcggcggcggcgtcgggccagctgtcgacgacgttctacgcctcgtcgtgcccgaccgcgctgtcgacgatcaggagcgccgtgaacgcggcggtggccagggagccccgcatgggcgcctccctgctcaggctccacttccacgactgctttgtccaaggatgcgacgcgtcgatactgctggccgacaatgccaccttccggggggagcagggtgcgttccctaatgtcaactcgctgaggggattcgaggtcatctctagcattaagatgcaactcgaggcatcttgcaggcagaccgtctcctgcgccgacatccttgctgtcgccgcccgcgactccgtcgtcgccctaggaggtccatcgtacccggtggagctcgggaggagggacgggatgacgacgaaccaaaccatggcgaacaccaacctccatccaccgaccaccgacctgggtaacttcgtcactagcttcgccgggaaagggctcagccccaccgacctggttgtactcactggagcgcacacggtgggcgtggcgcagtgcaccaacttccggtcgcggctctacggcgagtccaacatcaacgcgccgttcgcggcgtcgctccgggcgagctgcccgcaggccggcggcgacaccaacctggcgccgctggactccacccccaacgccttcgacaacgccttcttcaccgacctcatcgccggccgcggcctcctccactccgaccaggagctctaccgcggcgacggctccggcaccgacgccctcgtccgcgtctacgccgccaaccccgcccgcttcaacgccgacttcgccgccgccatggtgcgcatgggcgccatcaggccgctcaccggcacgcagggcgagatcaggctcaactgctccagggtcaactgatctgtatatctctacgaaatgcgtcgatctactgtacctacgtggatagaatcgaatcgaataagactagactattaataagctaataagtgattagcgatatcgcgatatgtataagtgcgcaacgtgatattgaatttatgtaagggcttgtccggtttattgccattttcaacactatcgacttttaatattattattaaattttggt

SEQ ID NO: 3891 - DNA, 1179 bp, Oryza sativa
  ref <308>: DATABASE ACCESSION NUMBER: AK061431
  ref <309>: DATABASE ENTRY DATE: 2001-12-06
atgacaacaattagtgacggtttttcttttgtgacacatatagtgtaggtttacttccagcttcgtcgattaccagacggcaccggcgtcgcgcgagcgagcttgatcttgcgccttgtgcctgctagctgcttcggcggcggcggttatcttcttccgatctgtaacagccccgatcaagaaaggatccaacccacctaggaggactaacctgaacgtgctaatgagttcaaagctagtaacatcacctctgaaatccatggagcagggccatctagagcaacctctgcgcgatccgcaggcgccggcggagcagcatgacatggggttatctcccctgacgctcctcggcttcgccttcctgaccttcaactcgggaatggcagtgtacagatcagatagagacttggcaaccatcttcttcgtggtcttctcctacgttgacctcgtatcgctcttctacttcctccgattatttgagaagacgccgccggagtcgcctcgccgccaccacatcaagacggcggtgtggctcctgacgacgatgctcaccgccgtgttttcatataaagtggcggccatcatgcctttcccggttcaggtgctggtttgggccatggccgcagcaactgtgcttggagggttctacgcattcttcctccactccgatgaaaaaaagcctattgagagtgcacccgggatactgctaatactgcctttcatcgaattgaagtagggatgcacactaccctgcattcgcctctggagcagcaacgtgagacagacagaggaagacgcaagacacagcggcattgctgaacttgtgcacacagattacgagaattgggaagcgtcgtttacaagaacaaagaagaagtaatttagcaagaatcaaaggaagcggccagattagttgcattgcaatgtcagctaatgagacaatcctctggccatgtgcaaagagcttgagacaaggtgctcgacgacttgagagaggtcgatgtttacatgttaaaacttgaaggcgaaaacaagggttccaatctccccgtcgttttttgtaggtacaatttttgtgctccaggcttagagaagaccaggacgcagtcaagtcaaatgtacaaaattaggatttttaaagatttcgtcagcaatgacatttcctggatttgttcgacc

SEQ ID NO: 3892 - DNA, 1192 bp, Oryza sativa
  ref <308>: DATABASE ACCESSION NUMBER: AK061432
  ref <309>: DATABASE ENTRY DATE: 2001-12-06
ggcagggaaggaggcgggcgcgtggtccaagctcttcctcttcgcccccggcgccatcaccttcggcctcggctcatggcagctcttccggaggcaggagaagattgagatgctggactacaggacgcggaggctggagatggagcccattgcgtggaaccagatggccccgtctgatctcagtgccggggtcgatccggccacaccggagttccggaggatcgtgtgcgagggtgatttcgacgaggagaggtcggtgttcgtcgggcctcgctccaggagcatctctggtgtgacggagaatgggtattatgtggtcactccattgataccccggcctagtgagcatggcagttcgtggccacctatacttgtgaatagagggtgggttcctcgtgattggcgtgataagaacgtacaggatcaccagtgcgtcagagaagttccagaatataaagaggctgataaaaagacagatggaaaaggttcatggtggaagttttggtctaactctaaggagcctgaacaatcttgtgagattgaaaaacctgtaaaacctcctgtaagagttttgggagttatccgaggaagtgagaagcccagcatatttgttccagctaatgaacccagtgttggccagtggttttatgtggatgttcccatgattgctcgtgcatgtggcctccctgaaaatactatttatatagaagatataaatgaggatgtctctccaacaaatccttatcctgttccaaaagatgtcagtactttgattcatcactcagtgatgccacatgaccatctaaaatacaccgttacatggtacactctttctgctgctgtgactttcatggctgcaaagcggataaaggcaaagaaggttaagttatagcggaacataaacctgtctcctgcatcttgtacttatttatgaagctcaagttcccgctgcttcagaaagagatgttcgataacctgagtactgcatcttcatctctcaggcaatgatcaaagtagtcttgccacatttgatatgatgtgcatccatatgggcatctcgtagttgaactcagaggatagaaaagttttgttagcagcttctgatatccttgattcttttgttacggaacttacattgaggaaacaacgtagacattgttatttgtttctattctttgtagtttttttgttc

SEQ ID NO: 3893 - DNA, 1338 bp, Oryza sativa
  ref <308>: DATABASE ACCESSION NUMBER: AK104574
  ref <309>: DATABASE ENTRY DATE: 2002-08-28
atgagggaaatgggagagaagaggaggcgtggacaccttaaccctgctggttttgcaggagggttgcatgatcatgaggagaagaagaacgaggagcataagctagacatgagtggcatgtccatggatgccctcccacacctcaccatgtctcttggtcaagtcaccatcttggatctctctaacaacaatcttgagagcatcccggagtcaataatcgctcggctgctgaacgtggtggtgctggacgtgcggtccaaccagctgaaatcgctgcccaactccatcggctgcctctccaagctcaaggtcctcaacgtctccggcaacctgctcgagtccctccccaacaccatcgaggagtgccgtgcgctggaggagctgcacgccaacttcaacgagctgacgaagctgccggacacgctggggttcgagctgcacagcctccggaagctgtcggtgaactccaacaagctggcgcagctcccctcctcgacgtcgcacatgacggcgctcagggcgctggacgcccggctcaactgcctccgcgcgctccccgacgggctcgagaacctcgccaacctcgaggcgctcaacgtcagccagaacttccagttcctccgggagctcccctacgccgtcggcctcctcgcctcgctccgggagctcgacgtcagctacaactccatcgccgcgctcccggactccatgggctgcctcaccaagctcgccaggttcagcgccgtcggcaacccgctggtgtccccgcccatggacgtcgtggagcagggcctggacgccatgcgcgcctacctcaccgcgaggatgaacggcggcgacggcaagaggaagaagaaggcgtggctgcccaagctggtcaagtacagcaccttcacggcgaggatgacgcccgggcgcaccagggtgcacgagaacacggagggcctcctcatgtcggactaccggtcgctcaacggcatcgcctcgccgaggttcctcaccatgctctcgccgcgccgcctcttctcgccgcggaggaattcgcccaagcattgttgatatggccgatccgatccgcctctgcctactctgtgtactggttgcctgtttgcttcaggggtgtacttcagatgatgtcatgctctcgtacttaattaggatagatatgatgatgctgctgctgctagctgctaccgctgctgcaaggtgtgtatatgttctcatgaagaggtttgtagcttcgcatacagtatatagctctacaatttttgtttgacgtaaaaaatgctgtagtacaatctagagcattgatgtacataacaagggtaattttcttcc

SEQ ID NO: 3894 - DNA, 1565 bp, Oryza sativa
  ref <308>: DATABASE ACCESSION NUMBER: AK061433
  ref <309>: DATABASE ENTRY DATE: 2001-12-06
aagcggaggtccggaggaggaagcggcgagagaagctcagctaggcagggcgacgggcagaaacgcgaccacggcaacaaaccccgccgcgcgcgcccaccgtgccggttacatgggagtagaggcgggcggcggctgcggtgggagggcggtagtcaccggattctacgtctggggctgggagttcctcaccgccctcctgctcttctcggccaccacctcctactagctatacacacccatctcaccataacacacatacatagatagatagatagatagatacatacacacaaacataagtagctaggtagagaaagagatcatagcgttaggtgatcgatcgatggctgctgctgaggcggcggcggcggtggggaagcagcagcagaagggcggcgggggaaggggaggaggcggcggtgggccggcgccgttcctgacgaagacgaaccagatggtggaggagagcgcgacggacgaggtgatctcgtggggaaaggaggggcggtcgttcgtggtgtggaagccggtggagttcgcccgcgacctcctcccgctccacttcaagcactgcaacttctcctccttcgtccgccagctcaacacctacggtttccggaaggtggtgcccgatcggtgggagttcgccaacggcaacttccggcgaggagagcaaggcctcctctccggcatccgccgccgcaaggcgacgacgcctcagtcctccaaatcctgcggcagcggcgtcaacgtcgcgttccctccgccgctgccccctctgcccccggagccgtcggcgaccacgtccagcggcaacgaccgcagctcctcctccgcgtcctcgccgccgcgggcggacatcaccagcgagaacgagcagctcaggaaggacaaccaaacgctgacgatggagctggcgcgggctcggcggcactgcgaggagcttctgggcttcctgtcgcgcttcctcgacgtccggcagctcgatctccggctgctcatgcaggaagacatgcgagcggcggccggcggcgtcggcggcgagcagcgcgtgcaagagcacgcccgggaggagaagtgcgtgaagctgttcggcgtgctcctcgacgacacccatggcgccgccacgaggaagagggcgcggtgcgaggaggcggctgccagcgagcggccgatcaagatgatcaggatcggcgagccgtgggtcagcgttccatcgtcggggccggcgcggtgtggcggcgacaactgaagtccaaacttgtgcatgccacggccatgacctgatcgaccaggcgaacggcaagcagaaggcatgcatggtgaggttggtggcaagaatggtccgatcaaccaagtcattaggtaaaacgagacgaattaagcacgccaaatacgtgcggccctgtgttaatcacgggttgctaccatgctagtagtaaggtaggaacagtacgaggagtcaaggctgaccgaagcgaagcagccggctcttgtgtctggacgttgtttcagttaacactgaaagcttcaccttactatggattatacattttttagat

SEQ ID NO: 3895 - DNA, 1126 bp, Oryza sativa; identical to SEQ ID NO: 2058
  ref <308>: DATABASE ACCESSION NUMBER: AK104575
  ref <309>: DATABASE ENTRY DATE: 2002-08-28

SEQ ID NO: 3896 - DNA, 1596 bp, Oryza sativa
  ref <308>: DATABASE ACCESSION NUMBER: AK104576
  ref <309>: DATABASE ENTRY DATE: 2002-08-28
gctctcccactgcgccctccgcgtgagcggcagcaagtgttcactgcgttcttcttctcgatttatctttcttggtttcttgatctgtagcttattagcggccatgtgcggcggagcaatcatctccgggttcatcccgccgtcggccgctgcggcggcggcggctgcggtggccaagaagcagcagggcaggagggtcacggccgacgtgctgtggccggggatgctgcggaaggggaaggcggcggcggcggaggaggactttgaggccgacttccgcgagttcgagcgtggcatgagcgacgacgaggcggaggggggcggcggcgaggaggaggaggacgacgacgacgtggtcgtggtggtccccccgccggcggcggcgaggttcgtcgtccgtgccgcggccaaggcggcgcccccaactgcagatgggatgttgactacaaagcttgtccaacatgatggacctactgctagatcagcaaagcacaagaggaagaatcagtacagggggatccgccagcgtccctggggcaaatgggcagctgaaatccgagaccccagcaagggtgtccgtgtttggcttggaacatataacactgctgaggaggcagctagggcatatgacgctgaagcccgcaagatccgtggcaagaaagccaaggtcaactttcctgatgaaccagctgttgctcagaagctctccctgaagcaaaacgctgccaagcaagagaaactagctccacctctgaagacctgtggcgatgatgctttctttcagctaaacagttcagacaatgatttgtttgcaatgcttgcaaaggtgcctgcaaagccggcagagcctgttgatctcatgcctccagtcaaacctcttgcttccactgagacattcgagatgaacatgctctctgatacgagcagcaactcatttggctcttcagactttggttgggaggatgacaccctgaccccagactacacttcagtcttcgttcctaatgctgccatgccagcatatggtgaacctgcttacctgacaggtggagcgccaaagagaatgaggaacaactatggtatcgccgtgccccagggaaatggcatgcctaatctcgcacaaaacatgcccaccttcgatcccgagatgaagtatttgccattaccttatgttgagagcagctcagatgaatcaatggacaaccttctgcaaaatgatgctacacaagacggggcaagcaacgagggcatctggagccttgatgagctgctcatggcagctggtgcctactgaggagacgaaatgttctggtcagtgtggtctgtcactagcaaaccatgttgaatgtgtatggccaagatgaagagctggtgatgtctgctatgttttgtagagggatgctaccaaagtaatgctagaatattacaagctgctatcagctgtactctctatgacaatgtttatactatgtttgctgtatggtgtggtctatgatttgaagtatgttggagactgattcaaataactgccttggccatgtgtgtgctgtaatgtgcttattaagttatatagttgtgctcatattgcgtatctac

SEQ ID NO: 3897 - DNA, 975 bp, Oryza sativa
  ref <308>: DATABASE ACCESSION NUMBER: AK061434
  ref <309>: DATABASE ENTRY DATE: 2001-12-06
ctccatggacaccaccgcgtcatggcgcctcctccccccggccgcctcctcgccgccgcccaggaggcaggcggctcttctccggcgccacccggcggccaccaccacctcctcctcctccggcaagcggacgacgaggctcctctgcctcctccatgacacgcctcctcctgcaccgccgcccgccgctgacgagatcagctcgccgccgctgcggaagctggccgcggcgctgcagtgcggtgccatctgggcagcggttgaggccccggcggcgctggcggtgacgggcgaggaggacctcgacatcctggggatcctgccgacggtggccgccatcgccttcgtttacctgttcgtcttcccggtgagatccgggccgccattcttggtttcttgcgaggctaattcagagatcgggtgtacaggtttgtgatggttttttttcctttgtttctgcagccgattatcatgaactggatgaggctgaggtggttcaagcgcaagttcgtcgagacgtacctgcagttcatgttcacctacctcttcttccccgggatgatgttgtgggcaccattcgtcaacttcaggaagttcccaagggatccaaccatgaagtacccttggtccaagccaaaggaaggcacaccgttgttcaaggacagatacccacctatagaaacctacaagtgatcagaagtactagaccgtattcttttcgaaaaaaatagcatttctttgcatggatttgtaaaacatgcatggtgccacaatcttcttggatgtatcgagagcaaagtgagatctcacataaaagaaagggaaatgataatgatgcaatattacactagcccaggcaccgaagcatatgttgtgcttgggaaaaggttgctagataagttgcaggtgttggcaaaatctagtactggagtagcagcctgtctttctgtttcacagttaaggcaccgttttctc

SEQ ID NO: 3898 - DNA, 1641 bp, Oryza sativa
  ref <308>: DATABASE ACCESSION NUMBER: AK061435
  ref <309>: DATABASE ENTRY DATE: 2001-12-06
acctcatgcataacacattacatgcatttgcaagccatacgctctctgtaatatggataccaaattgggagcgcttgctctcatgctcccgcttctactgctgatttccgctactcgcgtagcctacggcggcatccaacccacgccgcctcccgcgagcttccaagccgccttggtccgcatcgagcccgcaggcatcaactacacgcgcgccgtgcagcgctcccgctcccgcctgtccatgctcgccgccagagcggtgtccaacgcgggggcggcgccgggggagagcgcgcagacgccgctgaagaaggggagcggcgactacgccatgtcgttcggcatcggcacgccggcgacggggctgtcgggcgaggcggacaccgggagcgacctcatctggaccaagtgcggcgcctgcgcgcggtgctcgccgcggggctccccgtcctactaccccaccagctccagctccgccgcgttcgtcgcgtgcggcgaccgcacgtgcggggagctgccccgaccactgtgcagcaacgtcgccggcggcggcagcggcagcggcaactgctcctaccactacgcctacggcaacgctagggacacgcaccactacacggagggcatcctcatgacggagaccttcaccttcggcgacgacgccgcggcgttcccgggcatcgcgttcgggtgcacgctccgctccgagggcggtttcgggacgggctcgggcctcgtcgggctcggcagagggaagctgtccttggtcacgcagctcaacgtcgaggccttcggctaccgcctctcgtccgacctgtccgcgcccagccccatctcgttcggctccctcgccgacgtgaccggtggcaacggcgacagtttcatgttcactccgctactcacaaacccggtggttcaggaccttccgttctactacgtcggtctgaccggcatctcggtcggcgggaagctcgtgcagataccttcggggaccttctccttcgaccggagcaccggggcgggcggcgtcatcttcgactccggtaccacgcttacgatgctcccggaccccgcgtacacgctggtgagggacgagctgctgtcacagatgggctttcagaagccaccaccggcagcgaacgacgacgacctgatctgtttcaccgggggtcgtcgacgacgacgttcccgtccatggtgctgcacttcgacggcggcgccgacatggacctgtccaccgagaattacttgccgcaaatgcaaggccagaacggggagacagcccggtgctggtccgtggtgaaatcatcgcaagccttgacgatcatcggcaatatcatgcagatggacttccacgtcgtgtttgatctgtccggcaacgcgcggatgctgttccaaccgcccaccgcctgatacgggagattatgaccgttgattttgtgcgccgtatgtagtactagcactctagcagtgtagcacgtacaattgtgccgtagcgaataagttctgcacaaattattttctgccatccgcgcttagttgtaagtacgcgagcttatgtaatagtcttccaagagaaattgaacgggcataatactgcatgtacggttacaatatacttataaacataaacgtttaaac

SEQ ID NO: 3899 - DNA, 1326 bp, Oryza sativa
  ref <308>: DATABASE ACCESSION NUMBER: AK104577
  ref <309>: DATABASE ENTRY DATE: 2002-08-28
actcttgttgcttagctacctagctagctagctttcctctccactccatccacccacgcacctcaatcgatcgatcctccatggcggcggcggtgctggcggtgctgtgggcgtgcatgatgatgatgagcctagctccggcgagcttggcggcgtcggggttcgaggaggtgccgacgatcgcgttcgacgaggggttctcgccgctgttcggggaggacaacatggtgaagtcggccgacgggcgcacggtgagcatcaccctcaaccgctacaccggctccggcttcatctcctccgactactaccaccatggcttcttcagcgcctccatcaagctccccaaggaccacaccgccggcgtagtcgtcgccttctacctgtctaatggagatgtgttcgagaagacgcacgacgagctggacttcgagttcttgggcaacaggtacaggcacgagtggaagatgcagacgaacgtgtacggcaatggcagcacggaccgtgggcgggaggagaggtatctgatgccgttcgacccaaccgccgacgcccaccgcttctccatcctctggcactcccgcctcatcgtcttctacgtcgacggcgtccccatccgcgaggtcccgcgcaccgccgccatgggcgccgactacccctccaagcccatggcgctctacgtcaccatctgggacggctccacctgggccaccgacaacggcaagtacaaggtcaactacaagcgcgggcccttcaccgccgtcttctccgacctcgtcctccgcggctgcaccgcccgctccgacatccgcctcgccaccaccgccgacgaccaggacaggtgcgccgcggcggaggaggacctcatggagagcgacgagtactcctcgaccatggccatgacggcgaggaagcggatggcgatgcggcggttcaggcagcggcagatgctctacaccgtgtgctacgacaccaacaggtacccggagccgttcccggagtgcgacgtcaacatggcggagcggcagatgtactggcagtggggggagtccaaggtggttcgcccccgcgtccgaccacgacccggccgccgctccaagcgccgcccctcgccggaggccacggccatcccgccgcccgtgctcgtctccttgcagcaagctgactagtctttgattagaatattctattctatgatgaggctctagctccatcataattctttgattaattttgcttccttcacatgcgtacatcgatcatactgtaattagtaccccctgatgatagagattaatttattgttactgctgcttcttcacgacgaac

SEQ ID NO: 3900 - DNA, 977 bp, Oryza sativa
  ref <308>: DATABASE ACCESSION NUMBER: AK104578
  ref <309>: DATABASE ENTRY DATE: 2002-08-28
ctcgccgtcgtcgcgcctcgacggcttttgctcccctctcccccaccgcctcctccggccgccgccgccgccgctgccgccgcccgacgacgtagtcaggggggctcgtcaggagtaaggagggagatggggctgagggagaagaagcggaaccagaggcgcgtgctcgcccggcgctcggccgctccccgctccggggagggcaaggacttcctgccgctggaagaaaggcctgggaagaagagggcccgggaggagcagcccgaggagccggagaacacgtccaccgtcctctacatcgggcacatcccccatgggttctatgaggaacagatgcaaggtttctttcagcaatttggaactgttaaaaggttgaggattgcccgaaaccgcaagacaggaaagtccaagcattatgggttcattgagtttgagaaccctgaggtagcaaagattgtggcagatgagatgaacaactacctgctgtttgagcacactttgcaaattgcgattgttccacctgagaaaattcatccaaaattgtggaaaggtgtgcgacgggggtttataccaattgatcgggtagcaattgaacggaggaggctgaacaaggataaaacaatagaagagcacaaaaagttggttgacaaaatcgtaaaacgggatgagaagcgtcgcaaaagaatcaaagctgctgggattgattacgagtgtccaccccttatcggcagcgttcagccttcagctaagaagatcaagtttgaggattagtgccttttgaccagtagtgacaggacagtcgagtaaaatgactggtttgtttttagtgacgaagacgtgtcaacatcattttgttgcgtgtttaatcggtgttgtatcagtgtgaccaaaattgcacaacgaagcaggaaatttctgagattacgactggtatatctttgagaaaatagaaatcatactgtgttttcccgccgctc

SEQ ID NO: 3901 - DNA, 1034 bp, Oryza sativa
  ref <308>: DATABASE ACCESSION NUMBER: AK061436
  ref <309>: DATABASE ENTRY DATE: 2001-12-06
acgcacgaatccagtgacacacagagctagctagcgatggcggccggagccggaggagacggcggcggcgagctgaagcttctggggacgtgggcgagcccgttcgtgcagcgggtgcgcctcgcgctgaacctcaagggcctcgcgtacgagttcatcgaggaggagatcggcggcggcaagagcgagctcctcctcgcctccaaccccgtccacaagaaggtccccgtcctcctccaccgcagcaaccccatctgcgagtcccaggtcatcgtccagtacctcgacgacgccttccccggcggcgccgccggcggcgacctcctcccctccgacccccacgcccgcgccgtcgcccgattctgggcggcgtacatcgacgccgagttcttcgcgccgtggaacaggtcgttctacacggcgtcggaggaggagaagacggcggagatggggagggcggcggcggcgctggcgacgatcgagcgcgcgttcgcggagctgtcgagggggaaggggttcttctccggcgaggacaggccggggttcgtcgacgtggtgctcggcgggttcgtgggctcgatgcgcgcgtacggcacggcggtcggcgtggaggtgctcgacgccgggcgcaccccgctgctggtggcgtgggcggagcgcgtcgcggcgctcgacgccgccaggggcgtcatccccgacgtcgaacgcgtcgtcgagctctcgcgctacgcgaggaagaagtagacacggtaacgatttgtgttgtcctgtggtgtttgtatcgtcaaaataaatgtggcacaaaggttgtcatcattagtgagcattcttgccggtttcttctccagtttaagtgtctgtgttgcttttgtttggactgcggggatgttagaatatatggtagttagagttatattagaatggactgatttgtgtggacttctttcatatctgtaattctttcttatcttctccccatgtactcctatatatcggcccctgaggctcaatataatgggtccaatattcatagt

SEQ ID NO: 3902 - DNA, 1087 bp, Oryza sativa
  ref <308>: DATABASE ACCESSION NUMBER: AK061437
  ref <309>: DATABASE ENTRY DATE: 2001-12-06
gacgaccgatcgatcgatcagctagctgcagcttccagaaagagtagttagctcgatcgatcgatccgggaaggatcagagttaattagtgagtgaggaattgtagccatgggccggccgccgtgctgcgacaaggaggggatcaagaaggggccatggacgcccgaggaggacatcatcctcgtctcctacatccaagaacacggccccggcaactggagatcggttcccatcaacactgggctgatgaggtgcagcaagagctgcaggctgcggtggacgaactacctgcggccggggataaagcgcggcaacttcacggcgcacgaggaggggatcatcgtccacctccagtcgcttctcggcaaccgctgggccgccatcgcctcctacctcccccagcgcaccgacaacgacatcaagaactactggaacacccacctcaagaagaagctcgccgccgccgccaactccacttcatcctccaaccgccaccccatcttcgccgacgccaccttcccctccgccgccggcggtagctacacggtgagcagcaactccgatgtcacccagatggcagccattgctaggcgctcccccttcgccgactgcccatcctcctcatacgcctccagcatggacaacatctccaagctgctcgacggcttcatgaagaccaactccccgtcgccgccgccgccaccgctgcagcactatgacagcggctattacgacgacgtcaagcccgccgtcgatgtcggcggcaaccccttgctgtcgtccttcgactgcatgtccggcgccgacctggactgctgcttcgacgttcatcagcagcaccagcagcagcagccggcgtcgttcatggagtacggcggctatggcggcggctacggcgacgagagcaagcagcagctgatgaaccaggcagcgccgccgctgtcatcgatcgagaagtggctgttcgacgaggcggcggcggagcaggtcgccgacctcatggacctctccgacggttgctgctccgtcccaatgatgttttaattagctcaagtaatgaaagaaaacactgtcacattcgatacgt

SEQ ID NO: 3903 - DNA, 1072 bp, Oryza sativa
  ref <308>: DATABASE ACCESSION NUMBER: AK061438
  ref <309>: DATABASE ENTRY DATE: 2001-12-06
aaccaacaagcaagaagaaatttctctccttgtagaaacaagcctagagagtactatggagcagaggaaatttttgttgtgcctaattcttggcttacttgcgacttcaggacctgccaagaccgtcaatgctgactcgccctttgatttttattatctcatcctcatgtggcctggagcatactgcactgacagcgagtatggttgttgcgtgcccaagtatggttacccgtcagaagatttcttcgtcaagagcttcatgacctttgactcgtcagagaacacagctgttgtcaggtgcaactccgacaatcctttcgacattaacaagctagactcaatcgagaacaacctgaaccactactggagcaacatcaagtgtcctcgcaccgacggcgtgaactcatggaagagcgagtggaacagctatggcgtctgctccggcctcaaggagttggactacttcaaggccggtctccagctcagaaagaacgcagatgttctctctgctctcgctgaacaaggcatcaagccggactaccaactgtacaacacggcgttcatcaagtgggcagtgaaccagaagctgggtgtgacaccaggagtgcagtgcagggacgggccatttgggaagaagcagttgtacgagatctacctctgcgtcgacaaggacgccaagagcttcatcgactgccctgtcctgcccaacctcagctgccctgccgaggtgctcttccatccgttccacacctggatgctcaacaccacatcggctgccaacatcgtgatgcccactgaaactgtgctggcctaattaagagcctttaatttgctagctaagctgccatgatctacttgatcaacctgtcctaagagcatgtagcatatgcttagcttgttgctttgggtgaataatcgcgcaacttttatacattgttgtgccctctgaataatatgtgcagtactatatatgaagtattgtaccgcatatgttatgtattacatgtgcaggtcttgtgcacacctgtgaggtgaatggatatattatgaatatataacgtgttgtattatg

SEQ ID NO: 3904 - DNA, 1187 bp, Oryza sativa; identical to SEQ ID NO: 3690
  ref <308>: DATABASE ACCESSION NUMBER: AK104579
  ref <309>: DATABASE ENTRY DATE: 2002-08-28

SEQ ID NO: 3905 - DNA, 971 bp, Oryza sativa
  ref <308>: DATABASE ACCESSION NUMBER: AK104580
  ref <309>: DATABASE ENTRY DATE: 2002-08-28
agtatacacgcctttctttccctcctctgctcatcccctccccagatctccagccccaggagctccggagggttcccaatggcggtgaaggtctatgtcgtgtactactctatgtatggacatgttgctaaactagctgaagagatcaagaagggtgcttcatctattgaaggtgttgaggctaaaatatggcaggttcctgaaactctccatgaggaagtacttggaaagatgggcgcgcctcctaagccagatgtgccaacgatcacaccacaagaacttactgaggctgatggaatcctgtttgggttccctacaaggtttggcatgatggctgcgcagatgaaagcattctttgatgcaaccggtggcctgtggagtgagcagagccttgcaggcaagcccgccggcatcttcttcagcactggtacccagggcggtggtcaggagactacaccgttgacagcaataactcagttgactcaccacggcatggtgttcgtcccggtcgggtacaccttcggtgccaagatgtttaacatgggagaagttcaggggggcagcccgtacggcgccggcacctttgccgccgacggctcgaggtggccgacggaaatggagctggagcacgccttccaccaggggaagtacttcgcaggcatcgcgaagaagctcaaggggtccgcttgagatctccattgggcaaattcaattgggcgtgtgcgtgtccctacgcacaacatcgtgaggcatttcatacagctccaaaccataccgacatacagtcaatagcttggtctcttcttttgtggtgtttctcgatgctatgtggcttctccctggaacttctcattgccgtacgcatgatatgattctgttctacgctttggtcagctggttgtaatttggagtaagttctgttattgtattattggttcccccatgatatatattgattattgtacggggag

SEQ ID NO: 3906 - DNA, 1222 bp, Oryza sativa
  ref <308>: DATABASE ACCESSION NUMBER: AK061439
  ref <309>: DATABASE ENTRY DATE: 2001-12-06
aagaacaaaaagacattcgctttcgcctcttctccccctctcctctcctctcctctcctctctgcgtgtgcatctctcgattccgatgccgccgccgctcgaagcgcgagactacatcgggctcgcggcgtccccggcctcgtcctcctcctcctgctgcgcgtcgacccccgtcgccgaggtcgtcggggcgcacctcgcgctccgcctcggcctcccggggtcggagtcgcccgcccgcgctgaggcggaggctgtcgtcgtcgacgccgcgctcacgctcggccctgctcctcctcccaggggcggcgccaagcgcgggttcgtcgactccctcgaccgatccgagggccgtcgtgctgctgccaccgccggtgatgatgagaggggcgtgagggaggaggaggaggaggagaaggggttgggggaagctgctgctggagctccgcgagctgccaaggcacaagttgttggatggccacctgtgcgaagctaccggaagaatacattggccgccagtgccacaaagacaaagggggaagaccaaggcaaaagtgaggtaggatgttgctatgttaaggttagcatggatggagccccataccttaggaaggttgacctcaagacctattcaagctatgaagatctttcacttgctcttgagaagatgttcagctgctttatcactggtaggagcagttcacataaaacatcaaaaagagacaggctgactgatggttctagggctgatgcccttaaggaccaagagtatgttcttacctatgaagacaaggatgctgactggatgcttgttggtgatcttccttgggacttgtttactactagttgtcggaaactgcggatcatgagaggttcagatgctgctggaatggctccgagatcactggaacagacaggtcagaacaaatagttgcccgagctttcatcatctggacagcaaatgtgtggaccaagtttgctgtagcaagtttccgctgaggggtgcagtgttttacctgaagtatctccgctattagtttatttacgtgtgtagtgaaatctgtggcgtattgtaaaacagccattttgcctacgaggttgtcttgtgtcaatctgtagatggtcgattttgtctttgaaagatcaagtcaggctgcttaatgcttcctgtgtgatactttcatcaattctctcatatatatattatctggagttgcacttg

SEQ ID NO: 3907 - DNA, 977 bp, Oryza sativa
  ref <308>: DATABASE ACCESSION NUMBER: AK104581
  ref <309>: DATABASE ENTRY DATE: 2002-08-28
ctgccatcgagaggtcgtcgtcgtcgtcgtcgatcacctcgtcgtcgacgcaccaccaaagcaaaggcaaaccaaaactcctctcctcctcctcgtcttcgccgcctgcgcgcgtcgccgtcgcgtccagccggggcggagggagggggggttcttgaggatggtggaggtgggaggaggagcggcggaggcggcggcggggaggaggtggcggctggcggacgagaggtgcgacctgcgcgcggcggagacggagtacgtgaggcggttccaccgccacgagccccgcgaccaccagtgctcctccgccgtcgccaagcacatcaaggcccccgtccacctggtttggtctctggtgaggcgttttgatcagccacagcttttcaagccatttgtgagccggtgtgagatgaaagggaacattgagattggcagtgtaagggaggttaatgttaagtctggcctgcctgccacaagaagcactgagaggctggagctgttagatgacaatgagcacatactcagtgtcaggttcgtgggaggtgatcataggctcaagaattactcctccatcctgaccgtccacccggaggtgatcgacggccggcccgggacgctggtgatcgagtcgttcgtcgtcgacgtcccggaggggaacaccaaggatgagacatgctacttcgtggaggccctgctgaaatgcaacctgaaatctcttgcagaggtttctgaacgcctggttgtcaaggaccaaaccgagcccctcgaccggtgattgttgccaagattccaagagctattttgtgttgcaaatgcttaattagattgtgcagagttgctattctccaatggagcccttaggttctttttcttcttgttgttgttgaatggttcatgagagacttgtgagagagtgctgctgctactgctgtgctatgttcaaaccaaaagagaagaaaaaaaaatattgtgcctcc

SEQ ID NO: 3908 - DNA, 1691 bp, Oryza sativa
  ref <308>: DATABASE ACCESSION NUMBER: AK061440
  ref <309>: DATABASE ENTRY DATE: 2001-12-06
atctccttcgctttaaattttgtggtagatttttgtctccttcgctctccacgctaccgcctcgccgtgccggagcccgggcgttccccgccgccgagaacctccgcctccgcctccatctcctccgccgccgccgcagatggatcgggaagaagtgacggagttcctcggccaggtgcccctcctgcagtgcctccccagctcctccatccgcaggatcgccgacgccgtcctggtgaagcgctacgaacctggtggttacgttgctcgtgaaggtgaccctgtagatggcctttacatcatattggatgggcaggctgaggtttcagctcctgcaaacacagaagaagaaaaccgccctgactatgtgttaaataagtatgactactttggttatggaaccaatagttctgtgcatcaagtaaatgttattgcagtatcaaagctgacctgcttcgtattgccaaatcaatatggacacttgttgcaaccaaagaccatttggagtgcagaagagacacctgagaaccattctttgctagaacaaattttgcacttagagccattggaggtcgatatcttccgtgggtttactttgccaggagctccgacttttaggcaagtttttggaggacagttgataggacaggcactagcagcagcatccaagaccgttgactgcctaaaagcggtgcacagtttgcacgcaattttccttatcgcaggagacaagaatttgccaataatatatcaggttcatcgggcgcgcgatggaacaagctttgccaccagaaaagtggaggcaaagcaaaagggccttgtcattttcaccttgattgcttcattccagaaagacgaattagggtttgagcatcaagctgcaatcatgcctgatgttcctcctccagaagagctcctgaatctggaagagatacgggaaagaagacttactgatcctcgcttcccaatgcaatataggaactcagctgccaagaaaaagttcgtaccttggcccatagaaatgaggttttgtgaagattcagcatctcaacataaaccaagcttaaattattggtttagagccagaggaaaactttctgatgatccagcactgcataggtgtgttgtagcatatgcttcggatctactatattctggtgtcagcctaaatcctcatagggagaagggtctgaagacatactcactcagtcttgatcactcgatttggttccacaagcctgtgaaagctgatgattggcttttatatgtgatcgacagcccatctgcacacggtgggcggggttttgttacagggcgaatgttcaaccgacaaggagagctcgtcatgtcgttgacccaagaggcgctgattaggagggcgaagacgccaggacaaccgtcacaaaccccaaggccaaagctttgagaggtgcagaagagcagtattatcgtttcatttttggcactttcacagttattttccttttcaatggaagtctataacacgtagacgtgaagccgaagtatagcatactgcatatatgtagcaagaaaaaacgatggtaaaactggttctgtaattcacgaacagcttactgacataccacgtatgtattggatcgggaaaaataagcgaagaacttggtatcgctttttttttatctcaataaagccttcaattatttcaattt

SEQ ID NO: 3909 - DNA, 1297 bp, Oryza sativa
  ref <308>: DATABASE ACCESSION NUMBER: AK061441
  ref <309>: DATABASE ENTRY DATE: 2001-12-06
caaataagatgtgggaaagccttgttgagcatgcaaagacttgtgtcttaagtggaaagcactatgtatattatgctattgactcaagaaatgtcggtgcaatattcaataacatctatgagttcactggtttgattgctgacgaccagttcatttcagcagaaaatctcactgacaaccagaagatctatgcagatggattggttaagaaagcatatgaggattggatgcatgttgtagaatatgatggcaaggcactcctgagcttcaagcagaaaaagaaatctgtcacaacaagaagtgacacggctgcagcagcaacaaacagccctgtttcctatggttcatccaacacacacaaacaattgtctcaaccagcaaaagcagggcaaacttctacaggcactacaagtgaagatggatctacaagtgcatacaatggaaatcaggcaggacgatatgcagtcaattctcaaagcatacctgcaaacgtcactacacaatatgagcggagttcactgacacctgaaagccagttcaatggttccgcactgcagaatcaagtttctaggggctccaatatactggcattgggaccaccacagcaacaacatcagcaaaattttgaattctcagcactaggtggccagtccatgcagcccaccggcttgaatcctttcgatgactggtcgcaaccgcaggagaaccggagtggggttgacgactacctgatggaggagatcaggatgcggagccacgagatattggagaacgaagagatgcaacagatgttgcggattttgagcatgggtggcgcgtcaaccaacctgacggaagacggcttcgcatttcctaactacatgccatcaactccccccaacttcaactttggggatgaccgtgcccgcccacctgggaaagccgtcgtcgggtggctcaagatcaaggcagctatgcgctggggcatctttgtcaggaagaaagctgccgagagaagagctcagcttgttgagctcgaggactagcaaacatcctaactgctggtctaacaaagctccattggtgttgctgctgctgctgttttaaggatctgaaaaatgggcttagcagctcctgtttggaggacgcttccttgaggccctgggttcttaattatggacacggattctcgtctactctttttttgtatagttgtttcatcattgtttgtttagtgtgatgcttagttgaatcctgtacgaaccttaaccagaactgtgtacatttaattgtttcaaaattcacacaagcattcgac

SEQ ID NO: 3910 - DNA, 1151 bp, Oryza sativa
  ref <308>: DATABASE ACCESSION NUMBER: AK061442
  ref <309>: DATABASE ENTRY DATE: 2001-12-06
atcgcagcggcgatttctcatctgaattgcaggccaattccagttgagtttctccacagaccacagatatggcttccggcaggatagctctgctctgccttcttggcttgctgctggtagcagcctcaccggctgccattgctgccaaagatgacaaaatcttctaccagattactttcatgtggccgggagcgtactgcgcgcagacgaaggccggatgctgcatgccgaagaccgacgtcgcgccggcgtccgacttctacgtcgccggcttcacggtctacaacgccaccaccaactcttccctgtccagctgcagcaacactccattcgacatgaaccaaattggggatgtcacgaggctgatgcagtactggaacaacatcaggtgccccagcaagagcggccagaagggctggaagaacgcgtgggagacgtccggcgtctgctccgacctcaccgagagcgcctactttgacaccgccctcgccctccgcgacaagatcaaccccctttctcgcctcgtcagcaacggtattaagccggactttgggctgtacagcgtgaagaagatcaaggaggtgatcgaggaggggatcggcgcgccggcgctgatccagtgcagcaagggcccgttcaacaagttccagctataccagatatacgtctgcgtcgcggaggacgccaagacgttcgtggagtgccccagcccgaggaagccgtacacctgcggcgacgacatcctcttccaccctttcaagaagtggatgctcaagaccaactccaccaaatcctacgccgccgccgacgccatcgaccagctgctcgaagcggtcatggaaatctgagctcgatcgatcgatcgatcaagaagacaaattaacccttgttgtgatatgcgatttgtgcgtgtgtgttgtctgtttcgatcgtgatgttttctgcgtgtttatttcgtgatgttctctcatcgcgcccgcgcgcggttgggtacgatccgggacacctacgtagcactgaatccgtctctgtgatgcattcagagaataagtccgaatatgtgcggccttgttaatgttttcatgaataactcgtgtagtgggattactttgtcatcggacatttcatgatttccgatgcacaccttggct

SEQ ID NO: 3911 - DNA, 1366 bp, Oryza sativa
  ref <308>: DATABASE ACCESSION NUMBER: AK061443
  ref <309>: DATABASE ENTRY DATE: 2001-12-06
gtccaccgcctcactccatccaccgcaccaccaccactaccctgcacctcgatcaattgaacgcgagcaaggaaagagagagagcgagaaagagagcggcaatggcgacgtcgcacgcggacgtggagaagggggcgaggaggaaggaggtggggaaggtgccgtcgccgctgtacccgcagcacgagggggagagggagtgggtgccgtggatcgtcccgtcgttcctcgtcgccaacatcgtcgtcttcgtcctcaccatgtacgccaacaactgccccctccacaccccgcctcgcagcggcaagtgcatcgcccgcttcctcggccgcttctccttccagcctctccacgagaacccgctcctcggcccctcctccgccacgctacagaagatgggagcacttgtgtgggacaaggtcgtgcacgagcaccagggctatcgcctcatcacctccatctggctgcatgccggtgttctgcacctggtcgccaacatgctcagcctcatcttcatcggcctgcgccttgagcagcagttcggatacgtacgaattggagcgatctacctcctgtctggcctgggcggcagcgtcctgtcctctctgttcatcagaaaccacatctcggttggtgcttcaggtgctctctttggactcctcggagccatgctctcggagcttctcaccaactggaccatttacaccaacaaggtcgcggccgtgatcaccctcctgttcgtgatcgcggtgaacctggcgctcggcatcctcccacacgtgaataacttcgcgcacatcggcgggttcctgacgggtttcctgctcggattcgtgctgctgatgcggccgcatttcggctggatggagcgctacagcctcccctccggcagcccgtgcagctccaagaagtacctcgtctaccagtggatcctgcttgccatcgccactgccctcgtcattgtcggattcgcggttggtatgaccatgctcttccgcggggagaacgccaacgacagctgccactggtgtcactacctcagctgtgtaccaacctccagatggacctgctcgaactgagaaatacaaggaggccatgaacaaattttctctgtactttttttctttttgcgtaatcctgtatgatgctgcaaacacatattctgtttatctgtagatagattaaagaaggattcttgatcgatcgatctcatactgtaggcaggctcgtcggggtcttccactcttcctatctcttgtacaattgattcattctttgtattgcaattattgaggcttggaatctcttctgtccctgcatcacttcttccaaattaaaacatatctttgaacctgtatggacaagc

SEQ ID NO: 3912 - DNA, 1662 bp, Oryza sativa
  ref <308>: DATABASE ACCESSION NUMBER: AK061444
  ref <309>: DATABASE ENTRY DATE: 2001-12-06
aaacactcgagctcacacttcctcaaatcctccaacacctcgatccattcgcagtagctgcgaggtgtctgacatggcgtcggggcagaaggtggtgaagccgatggaggtgtcggtggaggccgggaacgccggggaggcggcgtggctggacgacgacgggcgggcgcggcggacgggcacgttctggacggcgagcgcgcacatcatcaccgccgtcatcggctccggcgtgctgtcgctggcgtgggcgatcgcgcagctgggctgggtggccggccccgccgtgatgctcctcttcgccttcgtcatctactacacctccaccctcctcgccgagtgctaccgcaccggcgaccctgccaccggcaagcgcaactacacctacattgacgccgtgcgcgccaacctcggcggcgccaaggtcaccttctgcggcgtcatccagtacgccaacctcgtcggcgtcgccatcggctacaccatcgcgtcgtccatcagcatgcgcgccatcaggagggccggctgcttccaccacaacggccatggtgacccgtgccgcagctccagcaacccttacatgatcctcttcggcgccgtgcagatcgtcttctcgcagatccctgacttcgaccagatttggtggctgtccatcgtcgccgccgtcatgtccttcacctactccggcatcggcctctccctcggcatcgtccagacaatctccaatggcgggatccagggcagcctcaccggaatcagcatcggcgtcggcgtcagctcaacgcagaaggtgtggcgcagcctgcaggcattcggcgacatcgccttcgcatactccttctccaacatcctcatcgagatccaagacacgatcaaggcgccgccgccgtcggaggcgaaggtgatgaagagcgcgacgaggctgagcgtggcgacgaccacggtgttctacatgctgtgcgggtgcatgggctacgcggcgttcggcgacgcggcgcccgacaacctcctcaccggcttcgggttctacgagcccttctggctgctcgacgtcgccaacgtcgccatcgtcgtgcacctcgtcggcgcctaccaggtgttcgtccagccaatcttcgccttcgtcgagcgctgggcctcccgccggtggccggacagcgcgttcatcgccaaggagctccgcgtggggcccttcgcgctcagcctcttccgcctgacgtggcgctcggcgttcgtctgcctcaccaccgtcgtcgccatgctcctccccttcttcggcaacgtggtgggtctcctcggcgccgtctccttctggccgctcaccgtctacttccccgtcgagatgtacatcgcgcagcgcggcgtgccacgtggcagcgcgaggtgggtctcactcaagacgctcagcgcgtgctgcctcgtcgtctccatcgccgccgccgcgggctccattgctgacgtcatcgacgcgctcaaggtgtacaggccgttcagcggatgattcttctgattctctcttgctgctttgagcagagcatccactggtaaaaagtggacagtaattttctttttttacagtctatggacgtagtacagtaaaaaagtgtgtacaactgtacaagggagcagtagaatccttgcaggggtaaaatactgagatgt

SEQ ID NO: 3913 - DNA, 1098 bp, Oryza sativa
  ref <308>: DATABASE ACCESSION NUMBER: AK061445
  ref <309>: DATABASE ENTRY DATE: 2001-12-06
gtcgacggcagcacacgtcgttcggttcctctccactccaactccaccgttgctcccaccaaacctcccactccttcctcaccaaccatgcgccccaccgccgcggccgccaccgccgccttcgcctcaccggtcgtcgcggttcccagtcgcgcggccccgctcgccgcccgccgccgcctccgccgcgcgaggcgcttcgctgtccgctccgtcgcctcccctccaacggtccccaagcccgcggctcccccctccaagactgggaaatggcagtggacatttgaggataagccaataaacatttactatgaggaacatgagcatgagactgctgagaacgtgaagaacattcttatgattcctacaatttctgatgttagcacagtggaggaatggagggtggtagccaaagatattgtggcacgaaaaggagaattaggttaccgtgctacaattgttgattggcctggtctgggttattcagacaggccatcactgaactacaatgctgatgtgatggagaattttctggttcagttaattaattcaccaaatagtcctgtggcaaatacagatggtgaagtggtagtagttggaggaggtcatgcagcaacaattgcagtccgtgcggctgggaagggccttataaggccatctggcattgctgcagttgcacctacttgggctggaccccttcccattgtatttggccgaggttctgatatggagacaaggtatgggcttctacgagggaccctcagggccccggctattggctggatgatgtacaatgttctggtgagcaacgagaagtccatccagtcccagtacaagtctcacgtttatgccaaccctgagaacgtgactccaaatatcgtggaaagtcgctacgagttaaccaaaaggaatcattctcgtcaggtagatgaatgtgcagttacgacaactacggcagggtcaaattcaacaacatcctatactcatactgtactagagcttgtagtaacagaagcagcagcatcaattcctgtctgggtgccacatttccaagcttggcaaaccaaccacaattccatatatacagagagtgtgtgc

SEQ ID NO: 3914 - DNA, 1160 bp, Oryza sativa
  ref <308>: DATABASE ACCESSION NUMBER: AK061446
  ref <309>: DATABASE ENTRY DATE: 2001-12-06
aacttcaagatggaactgtttttgatcgtagaggttacggcgacgatgaaccgttcgagttcgtggtagatgaaggtcaagttattgatggcctggatgaatctgtaatgacaatggaggagggagaagttgccgagttcactattccaccccagcacgcatttgatgccgttgggtcagatcagcatcagtttgcctttgtgccgcgcaatgcaaccgtcgtctacaagatcgagctcttgtccgtcgttaatgagaaacatccgttgtacattccgagccgtgatgaaattgttgaatatgcaagtaggaaggaagaggaaggggacatatactttaacttgggtaaacatttgagagctcacaggagatatttcaaggccagacaaatcattgaatattcacgcttcggggtaaggagagggaaaattaatttaataaaactgctgtccatcccaacatcagaaattgatgcacagctggaagaaatgtggatttcctgcacttttaaagcggctaagtgcgcaatccagctagggtgctacatgcaagcatcgtgctattacagcgaggtgctgaactacgatgtggctaatgtgcaagcccagcagcagcaaacgttgttgcaggaatttcctgatggttcctcaagagacccggacgcaatgcagcgaggctttgagcaattcccaccagagtacgagtcagaattgcagctcaatgcaactttcactcctgcagctttttcaccgagacggaaaggtgagcatccgtatcgtggcgaaattattggcttccctgatgttcaggcaaacagcagccagcctgcttctactcctagtactgctcccagtactcccaaccctgctacaccacagacgaacgccctcgctactggcactagtggcaccccgagcggcagcgctgctcaaagctcaggaacaatcaacacgaaccgcgggtttctattcagatgcttcgggccatcgcccacgagctgaaggatccatcaagcttatatcgtctcaatcgttgtcgccgccgcagctaattactacttagtaatatcatatcatacttggaattgcagtatgctggtaatgtctacattttcaaatggatccacattaaataaaagttgtgattgattttgtactgcc

SEQ ID NO: 3915 - DNA, 1147 bp, Oryza sativa
  ref <308>: DATABASE ACCESSION NUMBER: AK061447
  ref <309>: DATABASE ENTRY DATE: 2001-12-06
gtgtttgcttgtcgttgatgctttgcttcctggaggaggaaacgcccgcacacgccgccgaccacctctccgtttccttggatctttcagcttcctgttcctcacgagatcgagaaggggggaaaaagaaaacgtcggtttttagtctcgtttgcctcgatcctctcgttcttggttggtcggcgccatgagtaacaccctgcttcgaatctacccttccgagctgaagatacccttcgagctcaagaggcagaattcggggatcctggagctcacgaataagaccgatcatcatgtagccttcaaggtgaaaacgacgaaccctaggaagtactcggtgagaccaaccaccggaatcgttctgcccagagggtcttgcggaatcacaatatctatgcaaccgccgaaagagatccctacggattataactgcaaggacaagtttctcatccaaagcgtcgtggtagaggatggcacaacgcagaaggacattcacagtgacatgtaaagaggcaggcaaggtggtcgaggagttcaagctgagggtggtctacatccctgccaatcctccctcccctgtgccagaggaagaagaggatgagattgattcccttgattcagatgtggaccatgaagtgcaaatgccatctacgttcgatgctgcatcaaggaagggatatacatctggatcgcaagcttcacatgacgaggatcttcttaagaagaaaaggtcatcatccgatgggggtttcacagctctgtttgtgccttttgtctttgcgttcttcgtcttcattggatacttaatggcgggaagcaatgtttagccagaatagctgcaaaacatacgcatcgttttgcagaattttgtccctctggctgatcaattctttctgtttctcttggtagaaatatatttcttcattataggtggttgtcttccgttcttgtgaagtataatatacctcttaaagaatgggagagaaccattcattgtagatagacaaataggcgttctatctctgaattgttcatatataataaacctctggttcattatacacacacgtttgcttgtaaatgtggttgagtgtaaatttgacctgcagtatggtcctgggtgagttccagaatcctttcacagagt

SEQ ID NO: 3916 - DNA, 1725 bp, Oryza sativa
  ref <308>: DATABASE ACCESSION NUMBER: AK061448
  ref <309>: DATABASE ENTRY DATE: 2001-12-06
aaaacactcgagctcacacctgctcgatcaaaatcctccaacaactcgatccattcgcagtagctgcgagctctgagcggcggcgaggtgtccgacatggcgtcggggcagaaggtggtgaagccgatggaggtgtcggtggaggccgggaacgccggggaggcggcgtggctggacgacgacgggcgggcgcggcggacgggcacgttctggacggcgagcgcgcacatcatcaccgccgtcatcggctccggcgtgctgtcgctggcgtgggcgatcgcgcagctgggctgggtggccggtcccgccgtgatgctcctcttcgccttcgtcatctactacacctccaccctcctcgccgagtgctaccgcaccggcgacccggccaccggcaagcgaaactacacctacatggacgccgtgcgcgccaacctcggcggcgccaaggtcaccttctgcggcgtcatccagtacgccaacctcgtcggcgtcgccatcggctacaccatcgcgtcgtccatcagcatgcgcgccatcaggagggccggctgcttccaccacaacggccatggtgacccgtgccgcagctccagcaacccttacatgatcctcttcggcgtcgtgcagatcgtcttctcgcagatcccggacttcgaccagatttggtggctgtccatcgtcgccgccgtcatgtccttcacctactccggcatcggcctctccctcggcatcgtccagacaatctccaatggcgggatccagggcagcctcaccggaatcagcatcggcgtcggcgtcagctcaacgcagaaggtgtggcgcagcctgcaggcattcggcgacatcgccttcgcatattccttctccaacatcctcatcgagatccaagacacgatcaaggcgccgccgccgtcggaggcgaaggtgatgaagagcgcgacgaggctgagcgtggcgacgaccacggtgttctacatgctgtgcgggtgcatgggctacgcggcgttcggcgacgcggcgcccgacaacctcctcacgggcttcggcttctacgagcccttctggctgctcgacgtcgccaacgtcgccatcgtcgtgcacctcgtcggcgcctaccaggtgttcgtccagccaatcttcgccttcgtcgagcgctgggcctcccgccggtggccggacagcgcgttcatcgccaaggagctccgcgtggggcccttcgcgctcagcctcttccgcctgacgtggcgctcggcgttcgtctgcctcaccacagtcgtcgccatgctcctccccttcttcggcaacgtggtgggtctcctcggcgccgtctccttctggccgctcaccgtctacttccccgtcgagatgtacatcgcgcagcgcggcgtgccacgtggcagcgcgaggtgggtctcgctcaagacgctcagcgcgtgctgcctcgtcgtctccatcgccgccgctgcgggctccattgctgacgtcatcgacgctctcaaggtgtacagaccgttcagcggatgattggaacgtgaggggcacgtgtgctcgttaaattatttcttactatctctgtaccaaaatatagcaaactagtataaataggacgaaattcgggtagttctcaggtacgaattcatcgtactaggaaatatctcacattgtattaagttgctatattttgggtcagcattagtacaatattacacaaagaggaaaaaaaag

SEQ ID NO: 3917 - DNA, 1330 bp, Oryza sativa
  ref <308>: DATABASE ACCESSION NUMBER: AK061449
  ref <309>: DATABASE ENTRY DATE: 2001-12-06
atcagtagtagtggtaggggagataattcgtcgttcgttttgtgcatccatccagaattcgttccagatccagccagccagccatctcaagcttctctcttctcttgttattaagagcaagcaaacagtagtctagcgaagcgagactgcgagagcagagcattgttcttcttctctagctattagtggtggggaataatggctcccgccaccaccgcagcaatggccctcgcgccgcctccttcccatcaccatcaccatcaccatgtcaagcagctgcagctccctccgtctgtctccgtctccgtgcccctccgctccggtttccttggccgcgcactgcctgctgctgcccacccacagccgctgctcgccgccgagagccgccgcagcagcgccgtgtccgtgcggatgtcgtgggacgggcccctctcctcggtccgcctcattatgcagggccgcaacgtcaagctgaatgagaaggtgaaggagcacatcgaggagaaggcggggagagcagtggcgaagcacagccagcttgtgaaggaggtggacgtgcgcctctccgcccgcggtggcgagctcagccgaggtcccaagatttgcaggtgcgagatcactctcttcaccaagcgccacggcgtcatccgcgccgaggaggacgccgagtccacctacgccagcatcgacctcgcctcctccatcatcaagaggaagctcaggaagatcaaggagaaggagaccgacgtccgccacctcaaggggaccaagccccccgtctccgactggccgccatcattgctcgacaacaacgacgacgacgcccaggcccagctcaaggatctggaggaggccgtcggcgccgaggacgaggacacggtgctcaccaaggtggtgcgcaccaaggtgttcgagatgccgccgctgtcagtggaggaggcgatggagcagctagtgaatgtggaccacaacttctacgccttcagagacgagaagaccggggagatgaacgtcctgtacaagaggaaggaaggaggcttcggtctcatcgtccccaagggagacggtcatctccacaaggagaccatccccaactctgaccaccaccacccctcccttgctgcctagcctctacacctcctgcatcaccatcctcatttgctaattatttctatgcttgcccaagagtctctaaatattactagtattaattaatccaagtgatgagagaggtctttgattttgtctccgtgtacatcgatcgatcgactcttgactactctgtttaaccaactgttttcgatatatttatattattaatgatttttcc

SEQ ID NO: 3918 - DNA, 1509 bp, Oryza sativa
  ref <308>: DATABASE ACCESSION NUMBER: AK061450
  ref <309>: DATABASE ENTRY DATE: 2001-12-06
actgattccgcccttcctccaatggccgccgcctcctcctctgccgccgcctgcttcctctccccgtcccctcctccccgcccgcgccaccattccatcaaacacctcgcgtgcgccgcctccaggtcgccgtcgccggggccctcctcctcccgctccctcgccctcccttcgccttcggcttcggcttctccgtggccgtggccgcggcggctccgcgacctgctccccgacgagaccggccggatcctgtcgtccgccacgggctccctcatcgtcgccctcgcctcggccgcgctgatcctcggcgacgccggctccgcctccgcgttcgtcgtcgccacgccgcggaagctgcaggccgacgagctcgccaccgtgcgcctcttccaggagaacacgccctccgtcgtctacattaccaacctcgccgtgaggcaggatgccttcacgctggacgtgctcgaggtgccgcaggggtccgggtcggggttcgtctgggacaagagcggccacatagtcaccaatttccatgtcatccgtggcgcgtcagatctcagggtcacacttgctgatcagacagtgtatgaagcgcaagttgttggatttgaccaggataaggatgttgctgttttgcgtattaaagcaccaacagataaattaagacctgtaccagttggtgtgtcggcagacttactggtcggtcagaaagtatttgccatagggaacccgtttggtcttgaccacactcttactacaggagtcatcagtggattgcgtagagaaatcagttcagctgcaacaggacgccctatacaggatgtgatacaaactgatgctgctatcaatcctggtaacagtggtgggccacttcttgatagctcaggaaacttgataggtgtaaacactgctatatactcaccttcaggagcatcatccggtgttggcttttccattccagttgatacagttggtggtattgtggatcagcttataaagtttggtaaagtaacaagacctattctagggataaaatttgctccagatcaatctgtagagcagcttggattaagtggagtgcttgtcttggatgctcctccaaatggaccagcaggcaaagcgggtctgcaatcgaccaagcgggattcctatggtcggcttatcctaggggacataattacttctgtgaatggaacaaaggtaacaaatggaagcgacttgtataggattctggatcagtgtaaagttggagagaaggtgactgtggaagtattgcgtggagatcaaaaggagaagatacccgtgattcttgaaccaaagccagatgaatcataatagtaagccacctccataggatccactctactgtttgtatgtccacatagatgcagaaatggaatatatacaagaaattagcattttcccctaccacggaattcgctgtacataattcatgcttgtaaattttctggcaaaaagagaaaatccaatttggcttatttccttgtc

SEQ ID NO: 3919 - DNA, 1187 bp, Oryza sativa; identical to SEQ ID NO: 3690
  ref <308>: DATABASE ACCESSION NUMBER: AK104582
  ref <309>: DATABASE ENTRY DATE: 2002-08-28

SEQ ID NO: 3920 - DNA, 1091 bp, Oryza sativa
  ref <308>: DATABASE ACCESSION NUMBER: AK104583
  ref <309>: DATABASE ENTRY DATE: 2002-08-28
gaatcaaattactactagtctcccttccacgccacgcacacgcacccaatcccctatcgatcgagagacatggcctccaccaccgccaccgccgccggcaacggcagcggcagcatcctccccacccacaccaccacggcgccacccttcagagcccataaggacgccgacctggaatccacgacgcggcggcgccggcgacgctgcctgtgctgctgcctgctcgtcacccttgtggtgctcctcgtccttgccatcaccctcctggtcctcttcctcacggtgctccgcgtccgcgaccccaccacccacctcgtctccacccgcctcaccggcctctccccgcgcctctccttcccggccacgtcggtccagctcaacgtcacgctgctcatcaccgtggcggtgcacaaccccaacccggcctccttcacctacgccacggggggccacaccgacctcacctacaggggcgcacacgtcggcgacgccgagatcgacccgggccgaatcccgagccgtggggacgccaacgtcaccatggcgctcaccctgcaggccgaccgcttcgccggcgacctcacgcagctcgtctccgacgtgatgggcgggtcggtggcgctggacgcgagcactcggatccccgggagggtggccatcctgggcgtgttcaagcgccacgcggtggcgtactcggattgccatttcgtgttcggcgtcacggagatggccgtgcgtagccagcagtgcagcgaccgcaccaagctctgattgatcatgtgattccaacttaatttgcaagtttccaagcacgcaacgtaaggtgggcatgccgcatcgcgacgtgggacaagacgagaagccgtatgatatgctgctttgttacgcaggtgcactgcactagtagtacatagtagagtattatattctacacgggcggcacattagttcgttacagatagtatcagatcaggaattcaggattcagtgctacgattttcttcaatatttcttactgcgtgttgggattgatttgattcatgtatataacacggtgtcagtttggatatatatacagtaatttcactatt

SEQ ID NO: 3921 - DNA, 1182 bp, Oryza sativa; identical to SEQ ID NO: 2212
  ref <308>: DATABASE ACCESSION NUMBER: AK104584
  ref <309>: DATABASE ENTRY DATE: 2002-08-28

SEQ ID NO: 3922 - DNA, 1266 bp, Oryza sativa
  ref <308>: DATABASE ACCESSION NUMBER: AK061451
  ref <309>: DATABASE ENTRY DATE: 2001-12-06
ctcctcccccttccccccacctcgacgaaccgacggtttccccggccatggctgctccgccgccgcggcgaaccccgaaccccgagcgcggcagcaggaggaagggcgaggacccgtggctcgcggcgagccttcgcccggggaatttcctcccggggctcgcgattgggttcctcctcggcctactcgtcgacttgacctcctcatggaggccccaatcgagtccaccgctggctccggctgccccggcgccgcggggctccaagcggacgggtggttcgtcgtccgctggcgggggcatcggcggcgaagagcttaagatggttttggtcgtgcgtaaggacctcaagatgcgggctggaaaaatagcttctcaatgtgctcatgcagcaactggtctgtatgcagaactgatggcaagcaaccggggtcttttgagacagtgggagcaatttggacaagctaagattgttttaacatgcaagaatcagcaggtaatgaataggattaaggaaaccgcagaacatcgaggtatcccaacatttgttgtcgctgatgcaggacgaacacaggtacaagctgggtctaagacagttcttgcagtagggccagggaggaaagcagacatagattcagttactgggaagttgtctttactatgaactgcatctcagacatgacacactgattccttcaaagattcaaaccaattgtcgggttcagttgacggtggtatcttatgcttgtagtcccacaacaggaggtcagaatccttgggatgctttacccagttctcaggctaactctgaagcaattcttcaagatccagttctagagtggctgattcaaaattgccgttggttgtaatcttttcctccacatgtcattgtagtctacccacatgttagcgcattccagcgagtggattttactttgggacaatgaacaagtatctgtagtttcgaagtagtaggttatcaccttcctcaaagtaacggatcatatgtaccgtatgtccagaggaagcacaaaatgcgtagaggtgacttgtcttgtcaaacatccttggtgtgaagcctcttgctgtgaaagttctgtattcccaagttcccaactagtccatatctactgggaattgaatctctttcttgcagagctggaactttgtgcactagttccaacaaaattagattcttgcaaatatggaaatattgtattgtaggagtagttccacaaagttccgatgaaatttctcgccctttgaac

SEQ ID NO: 3923 - DNA, 1044 bp, Oryza sativa
  ref <308>: DATABASE ACCESSION NUMBER: AK061452
  ref <309>: DATABASE ENTRY DATE: 2001-12-06
acactgatctcgtcatggcagctccaaatccttctgctactatggcggcggcggcggcgtccacgccggcgagggcttggtggcgggcggctgctccggcgagtgcctcaactgcagctgtaagctgcttccgagttggggccaagagcctcacagggcttcagatgacaagcacccgcgcgaacaaagttcggacagttcatgtcaaaagcggggaggcagaaggaagtccaagcacagagagcatcacccgcgacgaggaaactctgcagcgtgacttgcaaacagcgattcaggaagaaaactatgcccaggccgcgaagctcagggacgagctccgagtcctccaggaggacagcaggtcagcagtgctggcagcgaatgcgcggttctacaatgccttcaagaacggggatcttgtcgcaatgcactcggcatgggcgaagggcgaccatgtgtacgttgttcatccttcggcaggccggatatcgggctacgacatggtgatgcagagctgggagatggtgtgcgacgcggactacgagttccctctccagattgatctgcaggatgttgaggtccatgtgagaggtgatcttgggtatgtgacctgcctggagctggttaagaccaaagggagcagcagctggggaaggcaggttgcgaccaatgtgtttgagaaggttgatggcaaatggttcatttgtatccaccatgcctctcacttcgatgagtgaggctgaatttcttggagagaggaagagctgcaagtgcagatatggcgtgaggttttgcagtacaggcgtgagacatatacttcgctgttttcttaaggtccttgatatgacctttttgtagaaccctttttgtaccaatactatcatcgaatgatgctgctattttgaggagtattagtagtaggtacagacaaccagaaccctgatggaattgtaactcggcgtggctgagatattcgtcagactgttaagtcccttttcctactgttgtacgctgcaatctatccgcgtgcagatgtattttgcc

SEQ ID NO: 3924 - DNA, 1143 bp, Oryza sativa
  ref <308>: DATABASE ACCESSION NUMBER: AK104585
  ref <309>: DATABASE ENTRY DATE: 2002-08-28
gtgctcagtttcactcttatcagtgaattagatcatatacttgtgtccttgacagctcgttaattagcatggctaggtctctcgctgctctccttctccttctggtcgcagccgcgggagccagccatgccgcgtcgccggcggagatgtactggaagatcgcgctcccgacctcgccgatgcccggcgccattcgcgacctcatcagcccggcgagctcagcggcctcagcttcgaaggataaggaggatacggtgggctccgtgttcttcctcgagaaggacctcttcccgggctccaagatgacgctccacttcacccgcgccaccgccggcgccgcgctgctccctcgcggccgcgccgactccgtcccgttcgcctccgaaaagctcccggagatcctctcccagctctccatccccgccggctcgccgaccgccgacgccatgcggtccacgctcgccgtgtgcgaggccgcgcggatcgccagcgagacggcgcccaagcacaagcactactgcgccacgtcgctcgagtccatggtcgagctcgtcgcctccagcctcggcacccgcgacgtccacgccgtgtccacggaggtggtcaacagggccgggccgacgccgaggcaggcgtacagggtggaggccgtgaggcccgtgccggtgcccgggggcgacatggtggcatgccacaggatgccctacgcgtacgccgtgttcggggtgcacgggatcaagggcgcggcgtacacggtgacgctggccggcgccgacgggaccatggcggaggcggtggcggcgtgccacggggacgtggacgggcacggcgtggcggtggcggaggcgtacaagaggctcggcgtggcgcccgggaaggtggcagtctgccacttcctgcctcaggacgacatgctctgggtgcgcaactgaatgaagcagctacctgcgcgccatccatggctaattaagctccttcctatattttcgatctacctgccggctggctatcatgttatcatcgcgtgtgtgtgcgcgccgatccgacatgcccacactacacgtcgacactacacgtgttttattttgttaattaataagtctggacaaccaggtcatcttgtaaaaaaaaaaaaaaaaaaac

SEQ ID NO: 3925 - DNA, 1358 bp, Oryza sativa
  ref <308>: DATABASE ACCESSION NUMBER: AK104586
  ref <309>: DATABASE ENTRY DATE: 2002-08-28
actcctcctccctctgcgccttggcaccatatccctccacgatcgccttcccttctcctctcccgccgccgccgccgattcgatctccatcccgcgccgccgccgctgcttccgccgcatcctccctccctgatttgtggatatggctgataacgacaaggaggcggcgggagagggagcaactccccgtggagcggactgggaggtggtgactcttactgcgtccgcctatgcggcggcgccggggccgggtggagcaggagacaggccggcggctgagaccaaaggccttgatgcaagtcaggaaggagaccagaccaaaggccttgatggaagtcaggaagggcggggctcggagagcgcgctgttcatgtctggccactttgtgttccctccaagcgagcatgagaatctgccgatcgatgccggctttgatgacatccagcataagaaggatgcgcaggaagcgagcacgagcgtggaagacgagggtttcaagaatgtcggtgggaactatggtgctgggttggagaggattcagttctatgatgaaggaaggaacctctcggccaatgatgtagagatgatgatgggtgatgctgctgagcatggctcgtttcatgctcaggacgaggagcaaggtttagatgatgataatgattttgatgactctcatgacaaatcagatctgccctcagaatctgcggacagcaaaagccgtgattctggcgccccttgcaaatgctggctgaagaaacatatgtcatgcctgtatcaccaagccaaggaaacaaatgctctctggtctgtggtggttgcagctgctcttgtcgggctcgtaatcttgggacgctggcacaaagacaaactgcaccttaagaatcttaaatggcgatctggctcaacagtgagagggtgaccaacagggctggtgggtgtttttatggtcttcttcgatgcaacctctgatgagtcatcacatgtcatctgaagttgtaactgagacggttggcaatatgattgtgacaatgacgaaaggagtatacctaatgtaataatatgaagtttgacagtggtgcttgtagccttcgtttggttgccttgccagctctgagatgccgaagtttccaccgctacacacaccaccgtaccattgtacacttgctatgctacattttcttttatgttctgaggaatggctgtcaacacgcaattgcatactgcgaaatccatgtaacctcgttgttcttccagaacaaattcagatgcatttgtgctgttcttttaagaaggaaaacctgggagtctcgtttactgttccttacaggaggtggtttcacttcagtttttatcccttc

SEQ ID NO: 3926 - DNA, 1232 bp, Oryza sativa
  ref <308>: DATABASE ACCESSION NUMBER: AK104587
  ref <309>: DATABASE ENTRY DATE: 2002-08-28
aaagcaaagcgagcagctgagccccgacgaggtagggggagagatgagggcggtggtgatcgcgcgcgccggcgggccggaggtgctggaggagcgggacgtcggggagggcctcccgccgccgggggaaggcgaggtgctcgtcggggtgtccgccgccggcgtcaaccgcgccgacaccgtccagcgccagggccggtaccccgcgccgcccggcgcgtccccttacccgggcctcgagtgctccggcaccatcctcgccctcggccctaacgtcccctcccgctgggccgtcggtgaccaggtgtgcgcgctgctcagcagcggcgggtatgcggagaaggtggtggtgccggcggggcagctgctcccggtgccggagggggtgtctctgacggacgccgccggcttgcccgaggtggcctgcaccgtctggtcgaccgtcttcgtgaccagccacctctcccccagcgaatcgttcctcatccatggtggatcgagtggaattggtacatttgctatacagattgcaaagcaccttggaattaaggtttttgttactgcaggtagtgaggaaaaactagctgcctgcaaaggtttgggtgccgatgtatgcataaactacaaaactgaagatttcgttgcacgtgtcaaagaagaaacaaatggaaagggtgttgatgtcattctggacaacatcggtggattgtatcttcagcgtaacctgaacagcttagctgttgatggtagacttttcatcattggtttccaaggaggcgctgtaactgaagtgaacctgcaacccatgcttgctcgacgattgaccatacaagctgctggactacgcaacagaagccttgataataaagctctgattgtcagtgaggtggagaaaaatgtatggcctgccgttgtgcaaggcaaggtgaaaccagtaatatacaagacgtttcctctgtcagaagctgctgaagctcacaagttgatggaagaaagttcccacattggcaagatactattgattccatgaatgtattggtatcttgtttgtgctctcactatcggagccactttaaacactgtatatttggtttgtcctttgatcttgcatgttgacaagagtggacgtactatgtcagaaaattatgtgtcacaatacatgaagaaagttatgtactcatgctctctcaaccaacggatcatttggatataaatgcgattgcttggtttgg

SEQ ID NO: 3927 - DNA, 1120 bp, Oryza sativa
  ref <308>: DATABASE ACCESSION NUMBER: AK061453
  ref <309>: DATABASE ENTRY DATE: 2001-12-06
acctcggtctctctcttctccgaagcgacccacactccccgtgcccgagccagagagtatggccgtctctgtccgttgctgcttcggctcctcctccctttcgcaccacgcgcgactactcctcgtcatcgttgcgttgctcgcgcctcggctcgcttccggctgcgaccgctgcgtgcgccgctccagagcggcttactacacctcctcgctcacgctgactgccggttcttgcgggtatggcacggcggccgcgaccttcaacggcggcggattcctcgccgccgcgggccccgcgctgtaccggggcggcgtcggctgcggcgcgtgctaccaggtgagatgcaaggacaagaagctgtgcagcaacgcgggcgcccgtgtcgtcgtcacggaccgcgccaggacgaaccgcaccggcctcgttctgagcagcccggcgttcgccgccatggcccgccccggcatggccgcgtcgctcaccgagctcgccgccgtggacgtcgagtacaagagggtaccgtgcgagtacaggcacaggagcctctctgtcagagtcgacgagagaagtcgcggacccaacgagctcaccatcagcttcctctaccaaggcggccaaaccgacatcgtcgccgtcgacgtcgcccaggttgggtcgtcgagctggaagttcatgacgagggagcacggaccgtcgtggagcatggcgaacgcgccgccggggccgctgcagatgaggctggtggtgaccggcggctacgacgggaagtgggtgtgggccgaccgggaggtcctgccgaggcggtggcgcgccggcgaggtctacgacacgggggtccagatcactgacatcgcccaggaaggctgcttcccctgcgacacgcacgagtggaagtagaagcccagccacacgtacttctcctgtcgtcacggccattttggttgggctttgatgagaaagaagacgtctctcggctcgcctccagtagagatttcactgacccgatttagagtcctcctaatccctcggcaacttcagaatttcctcctccgtttcttcttcttcttttccaactttgtacatgagctactaactaatgtgtaaagataaaattaaagc

SEQ ID NO: 3928 - DNA, 1239 bp, Oryza sativa
  ref <308>: DATABASE ACCESSION NUMBER: AK104588
  ref <309>: DATABASE ENTRY DATE: 2002-08-28
gttgatgctccagaagatgctagttggattgacaaatacattggcattgtggaatttgctggtattgctatgtggttgctctatcagtctgaggctgcagctaatggcacggctggttctgccgtagggtcaccagtagccaatctagtatctaggctaggctctttcacattcagaaggacatcatctggcagggtagaaaccaccactgacccagaatcagatgaaaccgcatcggtcggtgggagctttttcgaaacactcacttcctctgaattctacaagaacacaaaggttggcgatatctcaggaagcttccgatgggcgccattcctggcactgcagacatctgacacattcctcaccatgttgctgctgctgtccaagtacaggatgaagagcctcccagtagtagacattgggggagataagattgagaacatcattacgcaatcttccgttgtgcacatgcttgcagagtgtgttggacttccttggtttgagagctggggaactaagaaactctccgagctggggcttcctctcatgaagccatgcaaactcgttaaggtaaatgaagaccaacctgtgttaaaagccttccaactgatgagggaaaaaggcgttggtggcctcccggttatggacacaagtggcacaaaagcaattggcaatatcagcatcagagatgtccaatatcttctaactgcccccaacatatacaaagattacaggacaatcacggccaaggatttccttaccgcggtccggcaacaccttcaggagcaacacgaggcctcgccgttgctcggctccgtcatcacatgcagaagggatgatgaagtcaaggacatcatactgaagctggactcggagaagatccacaggatctacgtgatcgatgacaaggggaacaccgagggggtcatcacgctgagggacataatctccaagctggtgcacgagccacgccattactttggggatttcttcgatggtgttgttcccctgcctccaaacagcactgtatgacacggcccttgagatttcatcacgctggtgtgctcttgtaaattgtacattatgtccctttacgacaatggttccaaatggatgggaatagtgtacagtttgccttgtgtagttctttggcagtggaacaactaatggactaatggatagcacgggtgtacattcaataacttgaaataatatctgagctcccttctgtatgttttt

SEQ ID NO: 3929 - DNA, 1153 bp, Oryza sativa
  ref <308>: DATABASE ACCESSION NUMBER: AK061454
  ref <309>: DATABASE ENTRY DATE: 2001-12-06
gaccgctgccggcgcgcaggtggcgggtcgcgtcctccgccgccgcgtcgggcggatcccccgacctgccgtcgtcgtcgtcgtcgtcctcgccgcctccgacgcctgcagcagcgtcgttcggctctggtgatgagcaggccgccggctccccggggttttgtatcattgaagggcctgagacagtccaggattttgaaaagctggacttgcaggagattcaggataatattaggagccgccggaacaagatcttcttgcatatggaggagattcgcaggttgagaatacaacaaagaataaagaatgttgaacttgggatctcagttgatgtgcctgaaggggaacttcctgattttccatcattcattccattcttgcctcccctgagtgcagctaatctcaaaatctactatgctacgtgtttcactttgattgctgggataatggttttcggtggatttcttgcaccaattctggaacttaaactcggtgtgggaggaacatcttatgcagacttcatccgcagtgtccatttgccgatgcaactgagtcaggtagatcctattgtggcatcgttctcaggtggagcagttggagttatctccgctctaatggttgttgagatcaacaatgtcaaacagcaggagcataagcggtgcaaatattgtttaggaactggatacctggcctgtgctcgctgttcaagtaccggaactctggtgcttactgaaccggtttcaacattcagcgatggtgatcagcctttatctacgccaagaacagagaggtgcccaaattgttcaggcgcaggaaaggtgatgtgtccaacatgtctctgcacggggatggcaatggcaagtgagcacgaccctcgaattgatccgtttgattaaaatgcacgtcatagttcagaaattcttgtaccactatataaactgtttgtagataatagtattgacaggcgcgcctggggttccaggcttacgaatagggcaacacttcacatcttagtgatgtgcggagcgaatcgcttgaattgaacagtggacaattcagaggtgtatgttgtcaaagctgtatcactgtatctgtatagtatgtttatggcacccaacactaacagttcaattccacgaattatttatctgac

SEQ ID NO: 3930 - DNA, 1077 bp, Oryza sativa
  ref <308>: DATABASE ACCESSION NUMBER: AK061455
  ref <309>: DATABASE ENTRY DATE: 2001-12-06
acttagtgccaatagaaggtaggaaagaccacatatccaggtttccttgctaggctctgctcatatcccgcaaattgagggttcagacttcataagttcgagctctgtccacaagaaaggaacaagagattgttcttggcagttggaagaagctaagaacttggcgagttggtggccaaggtgctcttggagggttcttggagcagtacaatgttggccaaaagattgaaaagatgcagcattcttctgttcgcctttctcctcgcagacgcatccgggagtcttcttgagagcagcggcggccaggccgaggcgatcggtccacagatctccccggcgacagagggcgagggcaagaggcggtcgctggcgacggggatgttctgcgtggcgctgccgaacgcggacccgacggcgctgcaggaagggctgaactgggcctgcggccagggccacgccaactgcgcggcgatccagccggggggcccgtgctacaaggcgaacaacctgccggcgttggcctcctacgcctacaacgactactaccagcgcaactccggcgccggcgccacctgcagcttcaacggcaccgccaccaccaccgccaccgaccccagttcagggcaatgcgtcttctcaggaagctccatggccggaggcaccacgccggcggcgaacgcgccgtccgccgtcggcccgttcacgccggggttcggcaacgggtcgtcgccgacgttcccggggacggggagccccggcggcgcgctgacccccttcgacgccgccgacagcgtcatgtccggcgctcgccgggcgctctgcgcgctgctgctggcgtcgccgatcttcctctccctcgttctctgatcagcagttcagcactagttggagtttgtccatgtaaattatgcatatggcattatgtcattcgttataaattcactcaccagagagagtcagtgacgactcaggagtcagagtcaccttgacatgttttattcccgagtaaatgaccagtgtttatatgtcagatgtcagattggatcatgaaattattttatttagaccattttgtgg

SEQ ID NO: 3931 - DNA, 1048 bp, Oryza sativa
  ref <308>: DATABASE ACCESSION NUMBER: AK061456
  ref <309>: DATABASE ENTRY DATE: 2001-12-06
aacaggccgctgctatatatccgcctcctgctaatccgcgactagggagtgaagagcgaatcaaacaccaccaccatcgccagcgtcattcagatttcagagggagggagggagagagagagaaaggaaggggaagtgggggagaaggaggggagaggatggcgtgcctgcacgaccacagctgcgaggatcacaactgcgccgccgactggtcgctcttcaaccacatcgacgtccccaaggtggtggctctgaacgaatctgtggcggggagcgtcaagtcggtcttcaagccctgggagcagcgcctcgacacctctgggggttttctggagagtaatgagggtgaccctgagttacttgttttcatcccgtttacatcagacgtcaagatcaagagcatctctgttgttggtggtgcagatggaacaagcccttctagaatgagagcgtttatcaaccgagaaggcattgacttcaatgatgctcaaaatatgcaacctgtgcaggaatgggagctggcagagaatttgcagggagttcttgagtaccaaacaaggtattcaaggttccagggtgtggctaacctaactctacatttccctgagaactttggaggtgacacaactaagatatattacattgggttgcgtggtgaagctactcagaacaaaagggatgttgtggccacaattgtgtatgaaataatgcctaatccatctgatcacaaaactaagtctgagactggaggtggtttctcgcatgttgagtaggcatgtcagagcatggaaagcagatcggtgttggatgctgctatcagctgtgatgaccttcagctctactaataaaacaatccagctcttggagaccagtagtagcttgacttctgagtgcagaactcgtgtacctgtcgatactgactacatcgtcaaaagttgatggcttgtgcaattttaccgtagtcttaactgtctgtacttcatgtccatattgcgttcagttcaatggtaatgtgatacttgctaattttgttcaaaaaaaaaaaaat

SEQ ID NO: 3932 - DNA, 983 bp, Oryza sativa
  ref <308>: DATABASE ACCESSION NUMBER: AK061457
  ref <309>: DATABASE ENTRY DATE: 2001-12-06
gcacaccactacacaagcaacgccacaaaaatcgatggtcatgacgacgaccaacggcggcggcgtagatcctccacaatggccggaggaggaggaagacgaagatgcagccgcggggagcagctgccgcgtcacggcggcgaacgggcaccaccaccaccaccagcagctcgtcgtctccggcgagctgggaggaggaggcggcggcggtggcggcggccgcgagaaggaggacgacgagctgaagcggaagtgggcggcgatcgagaggctgcccaccgccgaccggctgcggttgtctctcctctccagtactcgcggcggcggtagcagcggcgatgtgagcgagggaggcggaggaggagcagcgtcgtcggagttggaggtggtggacgtgcggtggctgggtgcggcggagcggcgagcggtggtgcaacggctggtcgccgacgtcaaacacgaccatgtccggatgctcaggaagcagcgggagaggatggagaggtacgtaacacgatcgaacacctctttctcttaagaaaaaaaagatgtaaattatataaaaattttcattaataaatagtagtcaaattttgcatattttgtttaaaaaatagtagtcaaaatttcatttttcaacacgtaatttatattacacattaaatttcatatctatcattgtaaattatataagtttaatttaatttgcactatgaattctaaatcttatcctatataatcctaacttttactagtgggtattcaacatttgcacgtaggatgccctgcagctatactagtggcagacataggatggttgcgtcatcaataaaaatatagaaaattctaaattacaaaaagtgataaactgtagaaaaatatagcagcaaaatatttatctttttagtttggtatcatttttgaacatataatataatataatataatatatgtgttttttaaagaaatataatttgcttacg

SEQ ID NO: 3933 - DNA, 1045 bp, Oryza sativa
  ref <308>: DATABASE ACCESSION NUMBER: AK104589
  ref <309>: DATABASE ENTRY DATE: 2002-08-28
gcgagcgatgtcggctgcgagtgcgagtgccactgcctccctctccgcggcggcggcggtggcggtggcggcggccgctctccgccccacgcagcagcgacgcctgcgcgttgtcgcgccaccgcgccccctcaggctcaccagtctcaacccccctcgcgcggcttccgccccctctactcctctgtgggaggccggcgtccgagctgagtcgtccgactcgcccggagccggagccgggggtgacgtcatgggcctcctcctccgggagcgcatcgtcttcctcggcaacgagatagaggacttcctcgccgacgcagtcgtcagccagctcctcctcctcgacgccgtcgaccccaactctgacatccgcctcttcgtcaactcccctgggggatcactcagcgcaacaatggccatctatgatgtaatgcagctcgtgagggcagatgtttccactattggattgggcatagctggttccactgcttctataatccttggtggtggcacaaagggcaagcgattcgccatgcccaacaccaggataatgatccatcagcccgttggaggcgcaagtgggcaggccttggatgtcgaggtccaggccaaggagatattgactaacaagaggaatgtcatccggcttatatcaggtttcacaggacgcactccggagcaggttgagaaagacattgatagagacagatatatgggtcctcttgaggctgttgattacgggctcatcgacagtgtaatcgacggagacagtatcatcccacttgagcctgtcccggagagggtgaagccgaaatacaactacgaggaactgtacaaggatccacagaagttccttacacctgatgtcccagatgatgagatatactaggtaatgagcctgcctgcctgtcgtttgcatttcgcacggcaagggggctgcttgcaatcaaagacgatgctcctagtcctagcactagttgatttttcctgtcacatgttaaccaactagtgccatattacgattgttgagcacgcagttagactt

SEQ ID NO: 3934 - DNA, 1207 bp, Oryza sativa
  ref <308>: DATABASE ACCESSION NUMBER: AK061458
  ref <309>: DATABASE ENTRY DATE: 2001-12-06
gtgcttagaatatttggtactatcctttagaatcattacacaaatgcaacagactattttctgtctttgctgatgattgctaatgcagctcgaacttatgggagtaaaaaagccctgagaatactttgcgtatgcatcttgtttgatcgggcatttttctttgatgcaacttgagtttatgtttgttgatgactgtcgttgatggagctgctcctgccaaggtggcctttttggcgatggagtagaactgtctgaatttttttatcacaccacaagaacggattttgtttgtggtaccattttttgtatatataaaacatattttggttgtatatatatagaataggatgtatctaccgttcttgtggtgttgttcatgtgtttggatgtaatatggggagtaaaattgagctacgtgctaggggatctgttggggtgggcctgaatgtaccatgggcctgaacagatctacggacgtgagagggaatcggaaattgtggaccgatctgggagggagcgatctggaaggaattggacagaaataatcgcgtgtgcactcgggaggaaatcggactaaaaaatcgcaatacagggtgtgaattggattgaaaaatcatgcattactgggacgacgtacgaaaaatccctgacaaaaacatcttaaacttttataataggtaaagactagaaaaatacccatgcgttgctacgggaggaaaagaccgtggaagcgggcgtcgttctatggcagagtcggtaatgtcaacgaaggagtaatcgtggcggagctggtggaggtagtgtccagacaccttggtggttgatggcacatcgccgacgaagcttagtgcggccgactacagcaagacggcgtcaggagctcttgccggcatggcaaggaaaagcttgctggcggcagcaagatgacgacgcacggcttgggagggacagagcggcatggaatgaaacaattcacgtccttggtggcatgttttgaaagtgttgcgaattgagtggcacatcctgaaggtggtgcaaatcgaatggcatcttctaaaaattctcctaaaccatttgtaatatgtgataatacaaatgccggcatgtttgcaatggaaaaagatacaattgcgtatgtaaatcgggacatgtttatatgtgtttttaagtgagaccgtcataaattttaatatcgattcgtcagttc

SEQ ID NO: 3935 - DNA, 1025 bp, Oryza sativa
  ref <308>: DATABASE ACCESSION NUMBER: AK104590
  ref <309>: DATABASE ENTRY DATE: 2002-08-28
ctccccagatccgaagcgagaagcctcttttggatctatccattcgggtcaccgtggcagttcggtaattttggcggagaggaggaggaggacgacgacgacgacgacgtgatgggtctcctcgacaagctgtgggacgacaccgtcgcggggccccgccccgacaccggcctcggccgcctccgcaagcacgccgccgcccgccccgccgccgtcaagatcaacgacccgacaggggacgcggcgatggtggccgtcccgccgacgacgccggccggggcggaggaggcgccggtgaaggtgacgcgcagcatcatgatcaagcgccccgcggggtacccggcgtcgccgaggagcgcggccagcacgccgccggcctcccccgccggatccacccctcccatctcgccgttcgccggcgccggtggtcgcttcagaaggaaatcatcgtccgaagcatatgagagggcaacacctgggacaaccagtcaccctcctccctttgaagtgtgagcccccagcgtgctcacgctcgtttttgctcctaggccagcgtctactgcacacacaaggcagaggaggaggagagacatatcagagaccgaagcggatggaagtcgagtgttgtctacctatcttacctctactactgtgatataacgtagatgctactagtaattaagtacgcctgctgctgctcgccgtctactatgttgagtcgtgtatggtttgtgtagtaaggttgtcgtctgctgtgtcatatatgtacatatgtttgctctgggctgcgatggagcttgctgcagtctgcagccaagcccgcagttcatcgctgcgtcgtgttttcgcgtccttttaagccctctgcaactatgtcaaatggatgggcatgtggaggatggtggaatgagctttcaggctgtgatgctaaagatggaagcactgatggctggtgtgtgattttgcttgatgtattatctgaattctcaagtagtagatgctttgcttgaaccttgtatatttgc

SEQ ID NO: 3936 - DNA, 1355 bp, Oryza sativa
  ref <308>: DATABASE ACCESSION NUMBER: AK061459
  ref <309>: DATABASE ENTRY DATE: 2001-12-06
atgcgttagagagagagagagagagagagtgcatgagcatgatgagctctccttctccctctccttaatttagacataaacttaattagctatgccgctcctctctctaatctcccctccaaagattatggttggtaggagatggatgagttcctgatcatcttcttgctctaaaatggaaggtttccaatggattccagcttctgaatcttgcagctagctaggtaggtaggtagctggtagcttagctaggcagtcaggcagatggtgtgttgttgcttctgctgtgatcgctcgcatacgtagataaggttagaggttgatcgctcggtagatggtactgatggccgggatgcttcccggagtggagtgcgcgcggcggcgacgtctccggcagggcggcggggaggcgccgtgcgggacgcggcggccgtcattgtgcctgtacgccggcggccacgaccacgccctccttggctcctccgcttgtaagcagcagaggagcgcgtgcgaggagcagcagcccgggtggtggacgctggacagcaacgtgcgggaggcgaaggagaggctggaccagaagctgcggagccagagggaatccgccgtcgtcgtcgtcaagaggcataacaaagcgcaggtggcaggaacgagcagtgacggcggcgagcagtcaacggcaactacggcggcgccgcagtgggaggtgtacacgaggaaagaagggcggcggcggatgtggttcaggaggttggggcggaggccgacgccggaggaggaggaggagtgcgcggtgtgtctagaggagctgcgtgccggggaggcggtggcgcacctcccctgcacgcaccgcttccactggggctgcgccgtgccatgggtccagaccgcctcccgctgccccgtctgtcgcgccgccgtctacctcacctcaccggcgccggcggccagcaacaactacaactagctagacggaagcggatcctccaacgtaaactttctcctgacgcggttactgatatgtggacccgtgaacgatgggatctatatgtcagtcacatgttcctttgacttcctaatcccaactagacagcttattaaacggatcgccagttcgccgctgctaactgtcactggtcactactacccgcatcctttaattttgattgattccatcaacttaattatatatcgtcgtttcctctcgcatctcctggtctctctctaccatgcacatgtcgcctgcctatgctacagtattatgtctcgatcaaactctctgtaatagtgtacttcctccgtttaacaatgtaagttgttatagtatttctcacatttatatatttagattcatt

SEQ ID NO: 3937 - DNA, 955 bp, Oryza sativa
  ref <308>: DATABASE ACCESSION NUMBER: AK104591
  ref <309>: DATABASE ENTRY DATE: 2002-08-28
gatccaccgccgatcgcctccccaagcaagcaagcagccgctcggagcgaagactgaggcggcggcgaccatggcggggctcgcgcacctcgtcctcgccctcctcctccccctcgcgctgctcccgccggccgcgcgcggcacggaggagacgccgcagtacacgacggtgcacgccgagtccgacttcgaggtgcgccgctaccgcgacaccgtctggatgtccgccccctccgacgacatctccttccacgtcgccaccaagctcggcttccaccgattgttccagtacctgatgggcgcgaaccttaactcctccaggatcaggatgacaactcccatcctaactagcatcgtcccaggtgcagggccgctacactcgtctgcctactttgtgcggctctacttaccagcgaagttccaggcttcccctcctgtgcctctccccgaactgaacctccacccggataggtggccaagccactgcattgcagtgaggagcttctcgggttatgcacgggacaacaatgtcgtcgaggaagcggagaaacttgcgttgagtttgagccggtcaccatgggctaattccacaaactaccctagcaagagcgcctactcaattgcgcagtataacaacccctttcgcatcattggccgtctcaacgaggtatggttcgatgttgattgcaagtctactggtgttgaggcatactaaaacgaaggttttactgtgcaccatcaccccaaaaaaaaaaaaaggcttattgtgtgttagtaccacataagccatgtacatctttgtatatatgtgttcatggtgatgaattctgatgataaagctggggggtgtttgtggtgtgtcaatccatcagtgatgaaatgacacagcagatgtcaattgtaatgatccactatgtactcacatcttgcaagctcgagtgctcgattcagactg

SEQ ID NO: 3938 - DNA, 1058 bp, Oryza sativa
  ref <308>: DATABASE ACCESSION NUMBER: AK104592
  ref <309>: DATABASE ENTRY DATE: 2002-08-28
gtctcggcctcggaagtcgcgcgcacccccaaaccctagccgcgcctccacctcccgattcgccgccttttcgttccaggtgtgtgttgattagtagaagagaagcggcggctgcgacgaggcggaatcgaccatggcgacccgtattcagtttgagaacaattgtgaagttggtgttttctccaagttgacaaatgcctattgtcttgttgcaattggaggatcagagaacttctacagtgcctttgaatctgagctcgcagatgttattcctgttgtcaagacctccataggtggtactagaataattggtcgtctctgtgtcggaaacaagaatggacttctcttgcctcacactaccaccgatcaagagcttcagcatctgaggaactgcttgcctgatcaagtggttgttcagcgtattgatgaaaggctatctgcgcttggcaattgtgtagcttgcaatgaccatgtcgcgcttacacaccctgacctcgacaaggccactgaggaacttattgcagatgtgcttggggttgaggtgttccggcagacaattgcaggaaacatccttgtgggaagctactgtgcgattacaaacaggggtggcctagtccatcctcatacatccattgaagatcttgatgagctgtccacgctcctgcaagtccctcttgttgctggaaccgtgaaccgaggcagcgaggtcattgctgcgggcatgacagtgaatgactggactgctttctgtggctcagacactacggctactgagctatcggtcattgagagcgtcttcaagctgagagaagggcagcctgccgcgattgttgatgacatgaggaagtctttgatcgacagttatgtgtaaaagaccaaagttagtgaatgtgtggttgtgggagtattaactgtgctaaaatcgacacaaactgtactcgtgtaatcagtagcagaaacatgccgtcctggtggtgaatttctgtcttctgaattacagacttatcttttacctttgtctccttgaagcctacaatatattttgcagcttaagattt

SEQ ID NO: 3939 - DNA, 1173 bp, Oryza sativa
  ref <308>: DATABASE ACCESSION NUMBER: AK061460
  ref <309>: DATABASE ENTRY DATE: 2001-12-06
aaaaaagaaagcgaggggtagcaaagccagccaggcgagggaggaaggaaggaagaagagcaggaggagcccaacgcccgcgaaaccctagccctcgcgctcgcccaccgccttcctctccccccctaccctaccccgagctcgccacccgatccgatcgaagatgcataagctggggagaggaagccgcgacaaggtgcagcagttcatgaccataactggtgcgagtgagaaggtcgcccttcaggccctgaaagctagtgattggcacttggaaggagcttttgattttttctacagccaaccacaaatttctctgacgaactctcggcatcttgaagatctgtacaacagatacaaagaacctgatgttgatatgatcatggtggaaggtgtatctcagttttgcactgatcttcaggtggatccccaggatattgttatgcttgtcatatcatggcacatgaaagctgccacaatgtgtgaatttactcgccaggaattcattggtggactgcagtcaattggggtggattcaattgaaaagctccgtgagaaattgccatctttacgggctgagataaaagatgaccataaattccgtgagatatacaactttgcttttgcttgggctagggaaaagggtcaaaaatctctcgcactggagactgctcttggaatgtggcagttgctctttgctgaaaggcactggccccttatcgaccattggtgccagtttttacaggtgaggcataataaagccatttctagggacacatggtctcaactgttggaatttgtcaagacgatcgatccacagttatccaactacgacgaagaaggtgcttggccctacctaatagatgaatttgtggagtacctaaccgagaatggattcgttcagcttaggaagtgaacaatgggaggcccacattctcactacttcaaatacaatcatgattgggctgtacaaacgtgtgagattcatctcggtctatacagtgttcagggcttggccttggcgttcttgcgcaactgatcgcaaacagtggacatgtatccttacgtgatgacatttgctcgcgcaaggggacgatttgatttgggaagtggtgactgccattgtggaattatcacttacggtttatttaatatatattgtggtcggcgcag

SEQ ID NO: 3940 - DNA, 1378 bp, Oryza sativa
  ref <308>: DATABASE ACCESSION NUMBER: AK104593
  ref <309>: DATABASE ENTRY DATE: 2002-08-28
acacgcgcagtgatccggccgcttcccccgttgccgctctcttgtactaccagtacctgttgcctcgcctagctagctgctggcctggccggcgtcgcgtgccttcatggcctcgctcctacccagtccggtgttccccaccgccgccgccgccgcggcgtccacatcctcgtcctcgaggtgccggtgccggtgccgcatcacaacgtcatcttcggcgcacggttggtccaactgtcagggctggagactccatcaccgggtttgggccgcccaggctgctgatcagcaaggaggggtgcagcagcagcaacaacaagaagaaaatgaagacggtgtagtcgacagcaacgtgctcccctactgtagcatcaaccggaaggagaagaagactattggggagatggagcaggagtttctccaggcgctgcaggccttttattacgacaagaaggccgtaatgtcgaatgaggagttcgataacctcaaggaggagcttatgtgggaaggaagcagcgttgtgatgctaagccctgatgagcaaagacttttggaagcatccatggcttatgtggctggcaaccccattatgacagatgctgaatttgatgaactaaagctgagattaaggaaagagggaagtgaaatcgtacaagaaggtccaagatgcagtcttcgaagtcgaaaggtctacagtgacttgactgtcgattacttcaagatgttcctactaaatgttccagcagcagttttagctctgacactattcttcttcctggatgatttgacaggttttgagatcacatatcttcttgagttgccagagcctttcagtttcatcttcacatggtttgccgcactgcctctaatattttgggtagcacaggcaattacgagtgccatagtgaaggactttttaattttgaagggaccgtgcccgaactgtggcaatgaaaatctttccttctttgggactatactgtctgtgcctagcggtggtgcaagaaacagtgtgaaatgtgcaaattgtagcagttcattggtatacgattctgcatcccgattgattacactcccagaaacagctgaggcttgattgaagatcacttcggacaggagctgcaccaaagcaattccttgtatctaccatggagagcaagatgaacttttcatcttgtgacaatcgtgttgtgaagcatccttttttatactccttagtctgcctctttaaatattgtatatatttgcatttattaaaagtttaagaaatagctatgactatatatactgtataaacactttggaaagtttatattgtacatgaactaaactgtcgtcatatcatgatgaatgtctgactggcccatgcttattgagt

SEQ ID NO: 3941 - DNA, 1044 bp, Oryza sativa
  ref <308>: DATABASE ACCESSION NUMBER: AK061461
  ref <309>: DATABASE ENTRY DATE: 2001-12-06
atgcatccatctgccaaagattttccaatcaatacattgccaatttgccatgccccgcgcgcgcgcgcgcgcgtgcgatcctccactagctacgcaccgtggcaaggcgccattttcatagacttcgctagggtgtgcgtgactttgtcagtgaggtcgccgcagtgtaaacgccaaccaaactcccactagcagagtagcagtccatcagcacataaacccttccattccaaccccaattagcactagatcgtcatcgctatcggctgcagcaaagaatggcaggagctgggaggactaggagcacggccatggcggcgtggtcgtactcgtcgctgctgctgcagctgctgcttctctcgatggtcgccgtactagacggcgcggcgacgaccggcggcggcggtgccggggcgccggcgccggcggcggactgcacggacgcgctgctgagcctggcgggttgcctgagctacgtgcaggaggggagcacggtggcgaagcccgacgcgccgtgctgctcggggctcaagggcgtggtgaagaaggaggtggcctgcctctgccaggcgttccagggcagccagaacttcggcgtcacgctcaacatgaccaaggcgctccagctgcccgccgcgtgcaaggtcaagacgccgccgttcagcaagtgccacctttctattccgggcgtgactggtggtgctcctgctcccgctccattctccggggctccgttcttcggggggtcgtcgccttcggcatcgcctgctgggacaggaagcgactccgccgccgccaccgtaagagctccggccccatcgccgtcggctgctgtccggcccaaggagacaaaggcggccttgttctctgccgctgtaatcgccgccgctactctgctcgcgcaccgtgcctagttaggctttggcctgcacgggtccatccaacgagcgtgtcgttgcagttgttgacttgtgtgtttgcatatgtaccgagatgtatcttgtgagagtttttccctccatattactacacacttaaaccagc

SEQ ID NO: 3942 - DNA, 1447 bp, Oryza sativa
  ref <308>: DATABASE ACCESSION NUMBER: AK061462
  ref <309>: DATABASE ENTRY DATE: 2001-12-06
gtggaacacacacgacacgaccgtataggagtagtcgtgtagcagctagctagctagcaatggcggcttcttcttcttcttcttcctctctggcggtggtggtggtggcggcggcggtggcgctggtcgccggcggcggcgcggcggtggcgcagctgtgcgaggagtactacgactgcacgtgccccgacgcgtacgacatcgtgcggcgggtgctgatcgatgcgcaccggagcgacgcccggatcttcgcgagcctgatccggctccatttccacgactgcttcgtgcaggggtgcgacgcgtcgctgctgctggacagcgtccccgggatgccgtcggagaagacgtcgccgcccaacaacaactccgcgaggggattccccgtcgtagacgacgtcaaggccgcgctcgaggacgcctgccccggcgttgtctcctgcgccgacatcctcgccctcgccgccgagatctccgtcgagctgtcaggtgggcccgggtggggagtgctgctggggcggctcgacggcaagacctccgacttcaatggctccctcaacctgccggcccccaccgacaacctcaccgtcctccgccaaaagttcgccgccctcaacctcaacgacgtcgacctcgtcgccctctcaggtgggcacacgttcgggagggtgcagtgccagttcgtgacggacaggctgtacaacttcagcaacacggggaggccggaccccaccatggacgccgcctaccggagcttcctgtcgcagcggtgcccgcccaacgggccgccggcggcgctcaacgacctggacccgacgacgccggacaccttcgacaaccactactacaccaacatcgaggtcaaccgcggcttcctccagtcggaccaggagctcaagtcggcgccggaggcgaccgggacgacggcgcccatcgtcgaccgcttcgccaccagccaggccgccttcttccgcagcttcgcgcagtccatgatcaacatgggcaacctctcccctgtcactgacccttccctgggtgaggtccggaccaactgcagaagggtcaattaattatcacttcatgtatgacgttggttagtttaaaattgaagtaaccaacgtcatcatgtcaaacataattaattacgtatgtgtcgattattattgttgttattattagcaaaatgagagagatttatttgtgcatagttaattaagcgcgcttgcatttgtgagaaatattagtagtccagcttaattaatcaaggagaagaggatggaaaaaagaatgtacatgtgttcaatttggatgtgtgatcaaggatctattatgatcacgcgcatccagcttaataattggccaattggttgaccaatgtaattgtacgtaccatgattgtgtttgttccaaattaaaggtgcaataaacggtttacatgtttgattcc

SEQ ID NO: 3943 - DNA, 1130 bp, Oryza sativa
  ref <308>: DATABASE ACCESSION NUMBER: AK061463
  ref <309>: DATABASE ENTRY DATE: 2001-12-06
acccgcaccagatcacatacaccaccaccaccaccacctccacctcatccctctgcccgcgccgcaggaagagaggagacgacgaggcggcgcaccacctcgtgttccccatggatctcgactcggccgcggcggcggctgcggcggcggcgcaccaccagcagcagcagcagcagaccacgtcccaggacaagctgaaagcattggcttatgagtacggtcatgagttccgagtattttcaagtgtaacatttgagtcaatgactagcaacttgcccgcagcagatcaggaggaagatgatgacttttatgagcttcagcctgctgactatttcaacttggtttcgaacagaataggagaacaatcgaaagttttgaagactcgtaaaatgcgtgaagcagaacttgctgcccaacgagcaaagataaaaaaggcagtaatgagggtgcgattccctgatggatacatacttgaggccgattttcatccgtcagaaacagttcaaagtctgatggattttctgaagaaagtaatctctagaccagacctgccattctatctctatacagttccaccaaagaagcggataaaagacacttcactggatttctacacaattggttttgttcctggggctaatgtctacttctcttatgatctgccggaaggctcagagttaaatacagacagtgtaaaatcaggaccttatctccgtgaagaaattcggatgttggatggactaccaattgtccaagaacctgtgcaccaaccaattgattctactatgaactcttcttctgctcatcaatctgatgtgtctcaatcagattttgcaccgccagcaaacaagaaaccagctaaaccaaagtggttcaaaaggtgatgatgaggtgagacagtcagggcgccaagaatgcaccaccagaggacgactctaatgtagggggatagagagtgaaagcatgacaataatgggttgctgttggctttcttgatggatggatacacattgtaaaatgaaactttccaaagaaatttcacgagtgctgcagaatgattttttgcgtctgatagcactgcattacactgtacactccgttgctaacaaagcctcccttttcctgagtgc

SEQ ID NO: 3944 - DNA, 1620 bp, Oryza sativa
  ref <308>: DATABASE ACCESSION NUMBER: AK061464
  ref <309>: DATABASE ENTRY DATE: 2001-12-06
cctctctcccatctcatcccagccgccgccgccgcagcctcctcctctcgccatctcccgtcctctccttcaagtcagctacctgcttaatcaaccatgggtaaggagaagacgcacatcaacattgtggtcattggccacgtcgactctggcaagtcgaccaccacgggccatctgatctacaagcttggaggtatcgacaagcgtgtgattgagaggttcgagaaggaagccgctgagatgaacaagaggtccttcaagtacgcgtgggtgctcgacaagctcaaggccgagcgtgagagaggtatcaccatcgatattgccctgtggaagttcgagaccaccaagtactactgcacggtcatcgatgcccctggtcaccgtgacttcatcaagaacatgatcacgggtacctcccaggctgactgtgccgtgctcatcattgactccaccactggtggttttgaggctggtatctccaaggatggccagacccgtgagcacgctcttcttgctttcactcttggtgtgaagcagatgatctgctgctgcaacaagatggatgccaccactcccaagtactccaaggcccgttacgatgaaatcgtgaaggaagtctcatcctacctgaagaaggtcggctacaaccctgacaagattcccttcgttcccatctctgggtttgagggtgacaacatgattgagaggtccaccaaccttgactggtacaagggccccaccttgcttgaggctcttgaccagatcaacgagcccaagaggccatcagacaagcccctgcgtcttccccttcaggacgtgtacaagatcggtggtattggcaccgtgcctgtgggtcgtgttgagactggagtcctcaagcctggtatggtggtgacctttggtcccagcggcctgaccactgaggtcaagtcggttgagatgcaccacgaggctctccaggaggctcttcctggtgacaacgtcgggttcaacgtgaagaacgttgcggtgaaggatctgaagcgtgggtacgtggcctccaactccaaggatgaccctgccaaggaggctgccagcttcacctcccaggtgatcatcatgaaccaccctggccagatcggcaacggctacgccccagtgctggactgccacacctcccacattgccgtcaagtttgctgagctggtgaccaagatcgacagacgatctggtaaggagctggagaaggagcccaagttcctcaagaacggtgatgctggtatggttaagatgattcccaccaagcccatggttgtggagaccttctctgagtaccctcctcttggtcgttttgccgtgcgtgacatgaggcaaacggtggctgttggcgtcatcaagaacgtggagaagaaggacccaaccggtgccaaggtgaccaaggctgccgccaagaagaaatgatcctcgttcaagtggtagttttgtgcacggccatggcactcgttgcattgaccgttattatcatatgctcgctgtgtgcactgtgtcgtttaaaactctctattttctgttcggtttaaacttgttctgagcctgattattgcccttcggctgttgtggaatgcgggtatttacattgct

SEQ ID NO: 3945 - DNA, 1039 bp, Oryza sativa
  ref <308>: DATABASE ACCESSION NUMBER: AK061465
  ref <309>: DATABASE ENTRY DATE: 2001-12-06
caatgggttgctcaaggctgctgagtggttgtttgatgctgagtgtgatgtgctaagggaccttctggagaggaatcctggttacacgctcactttcgcaggccattctcttggttctggtgtcgtggcgatgcttgcgctggtagctgtgcacaatagagaccggctgggtggtgttgagaggaagagggtacggtgctttgccatggcacctgccaggtgcatgtcactcaatttggcagtccgttatgcagatgtcattaactcagttattctccaggatgattttctgcctcgcacagacactcctttggaggatgtattcaagtcacttgtctgggtacctgatgtagtcctttgtatacagcttgccatgccttttatgtggaaggtgccttatagacacgtgtatacctgaaagtgcgatgttgagagatccaagacgtctctatgcaccaggccgcctttatcacattgttgaaaggaaaccattcagatgtggaagatatccccctgttgtaagaacagctgttccggtggatggcagatttgagcacattgtgctatcttgcaacatgatttctgatcatgctattatctggatcgaaagagaagctcaaaggggactagatttgatgctggagaacgagagaaccatgaagccacctgagacgcaaagaatggacgatgaaatcgccatcgagagggatcatgatgaggagcagaaggcggcattgaggcgtgccgttgctctaggggtcgcagatgttaatgtgccatcagcatatggtacattcagtgaaaatctgactcctgaggctgatgaggcctctccggtattgcccgacagtggactgcgaaggacggtctgggatgagtggattgcaaggatatttgagaaggatgaatctggcaaaatgattccacgaacatgattatggtagaacagggcattatgctatgaaattaggaaaaaaataataaataagtatgcaggcaatataatctgagccgattattattggcatcagttcatctt

SEQ ID NO: 3946 - DNA, 1095 bp, Oryza sativa
  ref <308>: DATABASE ACCESSION NUMBER: AK061466
  ref <309>: DATABASE ENTRY DATE: 2001-12-06
aaaaacatcagtagacgacggcgatggcgcccaagcgacttgtctgcttcttggccgtggccgccgcgctagccaccacctgccacgggtggggcgccggcgccggcgatgtcgtgtcgtcgtcggcggcggcgctctcgttcgtggacaggctgaggcagatgatgatcccggcggccgtgggcgacggcgactactgcgacagctggcgcgtcggcgtggaggcgaacaacgtgcgggggtggacggcggcgccgcgcaagtgcgacaactacgtcgagaactacatgcgcggccaccactaccgccgcgacagcaaggtcgtcgtcgacgaggccgccgcctacgccgaggccgccgtcctctccggcgaccccgccgccgacgccaacgccacctgggtgttcgacgtcgacgagaccgccctctcccacgtcaagttctacaagaagcacggcttcgggtaccacagaaccgacgagccggcgttcatggagtggctgatcgccggcagagcgtcggcgttgccgaacacggtgacgctgtacaagaagctgctcctcctcggcgtcaagatcgtcttcctgtcggacaggccggacacgccggagctgaggaacgccaccgccaccaatctcatcaaggaaggcttcgactgctgggacgagctcatattaaggtcggagaactcgacggcgacgggatcggtggtggagtacaagtcgggggagaggaagaagctggaggaggagaaggggatggtgatcatcggcaacatcggcgaccagtggagcgacctgctgggctcgccggagggccgccggaccttcaagctgcccaaccctgcctactacatcgacaactacaagcgcgccggcgccgccgtccgcgccgccgtagccattacagcctcctcctcgtcgtcgtcgtcgtgaagcaaacgatgcctagctagctatagtactcaactttgaattgcatttttttttcagacacataagttcagttaataatcggtcgtgtacgtacctgccgtgctgtgcactgttgtatctttttggtgagacgattgaaatatctttgggtttatctttt

SEQ ID NO: 3947 - DNA, 1039 bp, Oryza sativa
  ref <308>: DATABASE ACCESSION NUMBER: AK104594
  ref <309>: DATABASE ENTRY DATE: 2002-08-28
aaacacggtgcaaagtgtgcagcgaactcgataaacattaaacaagctgtgtgaacttcttttttcgtgacaagtttaattctttctcgatcgatcgtcgtgatggctgacgagtacggccgcggcggctacggcaggtccggcgccggcgccggcgacgactacgagagcggcggctacaacaggtccagctccggcggcgccgacgagtacggccgccggccgggaggcggtgccggtggctacaacaagcccggtggcaccgacgactacgacagcggctacaacaagtccgccggcggcgacgacgacgactacggccgcaccggcggcggcgggtacaacaagtccggcaccgacgacgactacgacagcggctacaacaacaggtcaggggctaacgagaagtacggccgcaacaagtccggcgacgacgagtacagcggcggcggcggcgccgaagccgacgaggagtacgtcgacgggttgtcgtcccgggacgacccggagaagtacaggaaggaggagaaggagcacaagaacaaggagcgcctcggcgaggtgggcgccctcgccgccggcgccttcgccatgtacgagaggcaccaggcgaagaaggacccggagaacgcgcagcggcacaggatcgaggagggcgtggcggcggcggcggcgctggggagcggcgggttcgcgttccacgagcaccacgacaagaaggaggccaagcaggcggcgaaggacgccgaggaggaggcggaggaggagtccggctccggcgcccgcggcggcgaggggaagaagaagcaccacctcttcggctgatgatccatcgatcgatcgcgccatgcatgcggcggcggcggcgccatggccggcgtccgcgcgcacgcgtaaggtgtggccatgggcgtgtgcagctgaataagagccggggttttgtacgtatgggctcagtatgtgtacacctcgtatatggtatggatgtacgtataagcgtatagtgtgtactataccaataaagctatctgttgctctg

SEQ ID NO: 3948 - DNA, 1173 bp, Oryza sativa
  ref <308>: DATABASE ACCESSION NUMBER: AK061467
  ref <309>: DATABASE ENTRY DATE: 2001-12-06
aacgagaggagaagcgcaaggaggataggcggcggcggcgactgggcgaaagtgatcagagctcgcgaggatgaaggcgacggtgaagggcaggtacgagggcgacaaggccacggccgccgccaccctcgccttcaccccctccgccgccgacctccgcttcaaggcctccgccaccgatgccgccttcgcccgcgggccctccctcgagggcctcatcctcaccctcgagaagcccggctccttcctcctcgacctcaagccccactccaaggatgtgcgcttccaattcatgaactccgcgctgctgctcgaccgccgcgtcagcctcacctacacgcactccaccaccctctccccgggccccgccaagctgcccgcccgcaccgccctcgacggctccctcaccttcgatccggccaacaagttcagcctctcccacacgctcggctcctccggatgccgcgtcaagtactcctacgcgcacggccaagaccgcctcaccaccatcgagccctgcttcgacaccgctaacaacgcctgggacttcgccgtcacccgcaagtttcaaggaggggatgccatcaaggccacctaccaagcctccaccaagctcctcgccctcgactggaccagggactccaagatcggtgcctccttcaaggtcgcagcgtcatttgatctgtctgaccaaagcaaagcgccaaagctaatagcggagagcacgtggaattacgagatctgattgcctcttctaggaggcaggcaactcctgcttaagaagcacccttgtcatactggttgtcttgtacttgggaactattctttctgggtgcaacaatttcaatacctactgccctttgttcatttttggctgccctatgattggagttgtcatggcgatgctacggcattgacaatgaacaccgattatcttttactatattctctaatgcacatgatatgattgaacaaaatgcctttggtggcgagaattcgagcattggtgtttgctccttgttcagatatacggttgatgttctttccttccttctgggagcttgtaaaacgttgaattagcttgccacatttttgttacatttgtttggacaagacaaggtgggcagaaggcaaaagaaggaagaagctaaagagtggttgttgatgatgttc

SEQ ID NO: 3949 - DNA, 1249 bp, Oryza sativa
  ref <308>: DATABASE ACCESSION NUMBER: AK061468
  ref <309>: DATABASE ENTRY DATE: 2001-12-06
agcggcaaagcctccccgtcgtccagcccacgcagcgcaccgcagcgagcgaagccgccgcaatggccgcctcctccgtggcctcgactctcctcctctcgctctcctcttcctcctcgcccttcctctcccccacctcggtctccttcctcccatccgccgccgccgccgcctcctcctccccgcgcgtcgccgtcgccgccggcaagcagaaggcggctatctccgtcctccgcgcccttcgcgccgaggcggccaccctcccggttctctccttcaccggggagaaggtcggggaggtcgccctcgacctcaagtcggcgccgccctccaccgcgcgcgccgtcgtgcaccgcgccatcatcaccgaccgccagaacaagcgccgcggcacggcctccacgctcacccgcggcgaggtcaggggaggcggcaggaagccctaccagcagaagaagacggggaaggcgcggcgcgggtcgatgcgcacgccgctccgccccggcggcggcgtcatattcgggcccaagccccgcgactggtccatcaagatcaaccgcaaggagaagcgcctcgccatctccaccgcgctcgccagtgccgccgtggccgacgatgcattcgtcgtggaggagttcgacgaggagttcgccgcgggtcccaagaccagggacttcgtggccgcgcttcagcggtgggggctcgaccccaaggagaaggccatgttcttcgccacggattttgcagacaatgtgcggctcagcggaaggaacattggctccctcaagatgctaacccccaggactctcaacctatacgacatcctcgatgcccgcaagctcttcttcaccccggccgccattaactatctcaactccaggtatggtgccaccgtttttgatgaatatgaggatgataccaatggcgaggatgatggtgaggaggaagcagaggagttgcaagaaggagaagggagcgcagaggaggctgctcaagatgaggctgcagagactgaggctgatagcaattcctagggaaggaggtgtagatcgcgtgtttttcgtttgttggtctggtaattgcttccctgatgcagaagctttttggcttacttttgttgtaagtttataatgtttttttttcactgatgcagtatattagatcttcaaactgcacatatattttcaaatacaatgtcgtgtcaaccactgcatatttttcttccaattttatacagaaagtgcttccc

SEQ ID NO: 3950 - DNA, 999 bp, Oryza sativa
  ref <308>: DATABASE ACCESSION NUMBER: AK061469
  ref <309>: DATABASE ENTRY DATE: 2001-12-06
gatacactgcgagtgaccggaggcagcgtctcctcctcctcctcctgcggctgcgtctacgagcgcgtccatggcgtccctctccccttccctccacctcccttgcaattcaaggactggctttgctggaaagacacaagggattcgtcttcgtgttatccctgctggcagagttggttttgtcagaacaacagtggagtgcaaagaatctagaataggaaagaagccgatcgaagtgccatcaaatgtgaccctcacgttagaggagcagtttattaaggctaagggtccattaggagaattatcactaaactatccaggtgaagtaaaagtggtgaaagaagaatctggtaagctgagagtttccaagactgtggagaccaaaagggcaaaccagatgcatggccttttcaggaccctgactgacaacatcatcgtaggtgtgtcaaaggggtttgataagaagcttcagctagttggggttggataccgtgcagcggtggagggtaaagatcttgtgatgaacctgggattttcgcacccggttcggatggctgttccagaaggcctgaaagttaaggtggaagagaacaccaggatcattgtgagtggctacgacaagagcgagatcggtcaattcgctgcttccataaagaagtggaggccgcctgaaccatacaaggggaagggcatccggtatgccgatgagatcgtcagaagaaaggagggcaaggctgggaagaagaaatagaaaccgagtctttgttgtactttgggtttcatacttcattcaattttttttccgatgtaatccctctcttattttgtgaagaagaaaccaaaccagtaagaaagaacatgttctttggatcttccgtgacttgtagagatgcgatgaaacatgaaactgttttcatcaacacatggtctgcttagcgtgattgcgatgctaccaagaactcccagcaacatatatacatgatgatacaattgataagc

SEQ ID NO: 3951 - DNA, 1797 bp, Oryza sativa
  ref <308>: DATABASE ACCESSION NUMBER: AK061470
  ref <309>: DATABASE ENTRY DATE: 2001-12-06
acaaacactcgagctcacacttcctcaaatcctccaacacctcgatccattcgcagtagctgcgaggtgtctgacatggcgtcggggcagaaggtggtgaagccgatggaggtgtcggtggaggccgggaacgccggggaggcggcgtggctggacgacgacgggcgggcgcggcggacgggcacgttctggacggcgagcgcgcacatcatcaccgccgtcatcggctccggcgtgctgtcgctggcgtgggcgatcgcgcagctgggctgggtggccggccccgccgtgatgctcctcttcgccttcgtcatctactacacctccaccctcctcgccgagtgctaccgcaccggcgaccctgccaccggcaagcgcaactacacctacatggacgccgtgcgcgccaacctcggcggcgccaaggtcaccttctgcggcgtcatccagtacgccaacctcgtcggcgtcgccatcggctacaccatcgcgtcgtccatcagcatgcgcgccatcaggagggccggctgcttccaccacaacggccatggtgacccgtgccgcagctccagcaacccttacatgatcctcttcggcgccgtgcagatcgtcttctcgcagatccctgacttcgaccagatttggtggctgtccatcgtcgccgccgtcatgtccttcacctactccggcatcggcctctccctcggcatcgtccagacaatctccaatggcgggatccagggcagcctcaccggaatcagcatcggcgtcggcgtcagctcaacgcagaaggtgtggcgcagcctgcaggcattcggcgacatcgccttcgcatactccttctccaacatcctcatcgagatccaagacacgatcaaggcgccgccgccgtcggaggcgaaggtgatgaagagcgcgacgaggctgagcgtggcgacgaccacggtgttctacatgctgtgcgggtgcatgggctacgcggcgttcggcgacgcggcgcccgacaacctcctcaccggcttcgggttctacgagcccttctggctgctcgacgtcgccaacgtcgccatcgtcgtgcacctcgtcggcgcctaccaggtgttcgtccagccaatcttcgccttcgtcgagcgctgggcctcccgccggtggccggacagcgcgttcatcgccaaggagctccgcgtggggcccttcgcgctcagcctcttccgcctgacgtggcgctcggcgttcgtctgcctcaccaccgtcgtcgccatgctcctccccttcttcggcaacgtggtgggtctcctcggcgccgtctccttctggccgctcaccgtctacttccccgtcgagatgtacatcgcgcagcgcggcgtgccacgtggcagcgcgaggtgggtctcactcaagacgctcagcgcgtgctgcctcgtcgtctccatcgccgccgccgcgggctccattgctgacgtcatcgacgcgctcaaggtgtacaggccgttcagcggatgattcttctgattctctcttgctgctttgagcagagcatccactggtaaaaagtggacagtaattttctttttttacagtctatggacgtagtacagtaaaaaagtgtgtacaactgtacaagggagcagtagaatccttgcaggggtaaaatactgagatgtaactactgagcattttgtagcgctcaaacaggtacagagggaaaaaaattgaacccagattgtatggaggttggcgtaatataattgagccgcagccaaaaaatgaaattcagaatttactggttactgaagc

SEQ ID NO: 3952 - DNA, 983 bp, Oryza sativa
  ref <308>: DATABASE ACCESSION NUMBER: AK104595
  ref <309>: DATABASE ENTRY DATE: 2002-08-28
atccaccaccgcgctcggcgaggcgatccaccggcggcgaggagaggcgcgcgggagcggccggagatggcggagaacccgcagctgttcgggaacgggatgctggtgcccttctacggcgagatgttcgtcctcgcccgcgacggcgtcgagttccacgtcgacaagatcccctcagctcctggtggtcatgcgaaaacaaagggcacaatttacctgtcaaacataaggatggtctttgtcgccagcaagcctgttgggaacttctttgcttttgatatgcccctgttgtatgtgcatggtgagaaattcaatcagccaatatttcactgcaacaacatatcgggtttcgttgagccggttgtaccagagaaccagaacagggccctgtactcgacccacactttcaagatcttgttcaaggagggtggctgtggtacctttgttcctctcttcctaaacctggttgcatctgtgcgacgctacaatcagtttgaggcccagtctgccgcaagtatggcgccacgtgtggacccgctacaagctgttcagactcctgttgatgatatgatgcgtcatgcgtatgttgatccgaacgatcctacaaagattttccttcagcagcctgcgccagagtcacagctgaggaggagaaactaccacggacgggctgacaatgcgtactagtgttcttacctgattgcaaagaacccatatgttcgagcctatgaacatatggatttcggcctctagtcgcgtatcatgctattacgtgggtgtgaaatgaaagcttcatgttgcccagaaacctattgtatatcttttatgccatattcagttgcatatctcaataatggtgtacatattccgtagtcctctggacttggtgcaaaaaatggtttatttgatcccatggtgtatggaattatcattgctcgtgccagcttgtaaatcacagaaacaatacgattattgcttgtgtt

SEQ ID NO: 3953 - DNA, 1086 bp, Oryza sativa
  ref <308>: DATABASE ACCESSION NUMBER: AK061471
  ref <309>: DATABASE ENTRY DATE: 2001-12-06
aaatcacggcactagacaccaccatcctcttaccttcccggtttcccggcgtgcgtcacacatggaggtggcagccgcggattcctccggcggcgaccgttacaggtctcaccttaccggcgacggcgagaagaacacggtgtggcggcacggcgctccacccacgtacgacgccgtgaacagcctcttcgaggccgagaggacccaggagtggccggcggggtcgctggaggagacggtgcagaacgcgatcaagacgtgggagatggagctgtcttacaaggccaagctcgaggacttcaagtcggtgagccccggtcggttccgtctctccgtgaacggcgggcggccgctcaccggggaggagacgctcgccgtgggcagctacaacgcgctgctcacgagcccgatcctgccgggcgccggcgcgtacgacgccgcggccgagacgttcgagtcctcccacgatctgttccgcgcggccttcccgcgcgggttcgcgtgggaggtgatccgcgtctactccggcccgccggtgatcacgttcaagttccggcactggggccacatggacggcccctacaagggccacgcccccaccggcgacaaggtcgagttctacggcgtcgccgtcctcaaggtggatgagcagctgcgggcggaggacgtggaggtgtactacgacccaggcgagctactggggggccttctcaaggggcccctgctggtgccgtccgcggaggaggaggacgcgcgtcagctcggcgagaggctcggcgaggcggctatcgtgtcggcgtcaggcgcggccccgcagtcgcaggcctgcccctttctcgcctccgcgaagcgggaggagtgaaagggaccgatcgagcggcgacgacatggtcgagccgaatagcgaaacgtgccccgttcatctgtcgtcgctgtaaccgcccggcgtttcgccatcatgatggaggtgacaccggctgaaaacgtttatttgctcgtgtgtagcgtgtgtgcttatggtgttgttaaatgctttgtacgattcggttggattttaaagctggcgtcacaacgcctgacttcttt

SEQ ID NO: 3954 - DNA, 1353 bp, Oryza sativa
  ref <308>: DATABASE ACCESSION NUMBER: AK104596
  ref <309>: DATABASE ENTRY DATE: 2002-08-28
cacaagcaacagcttagctagtaacagtaggccactactagcatcactgcatttctagttaagtaacaacactagagagagtaaggagtagtgagaccatggggagggatcaggcagctgcagcagtgatgcatgagaaggtgaagctgttcataggagtgctggccctgcagttcctgcttgcaggattccacattgtgagcagggcagcactcaacatgggcatcagcaagattgtgttcatcgtctataggaacctcatctccctcgccttgctcgcgcccttcgcctacttcctcgagaagaaagatagaccaccactgaccttctctttgctggtggagttttttcttctagcactgtgtgggataactgcaaaccaaggtttctacctcctagggctgtatcacctttcaccaacttatgcttctgcaatacagaacacagttcctgccatcacctttgccatggctgccgtcctcaggcttgagcaagtagacctaggcaagaggcatggggtggccaaggtggtgggcacggtggtgagcataggtggtgccacagtgataactctctacaagggcctaccactgttcaatcacaatctgaacatcaagtccctgtcttcctcgagcctcatcctcaactggactctgggctgcgtcttcatccttggccactgcctctcatggtctggatggatggttcttcaggtgccagttctgaagaggtacccagctaggctgtcagttctatcactgacctgcatctttgggctcctccagttcctggtcattgcagccttcactgaagaagacctgagcagatggaaggtgaactccggaagcgagctgttcacaatcctctacgctggtcttgtggcatctggcgtggcgtttgctctgcagatatggtgcatcgacaggggagggccgctgttcaccgccgtgttccagccggtccagaccgtcgccgtcgccgtcatggccgccatcattctcggagatcagctatactcaggagggatcatcggagcagttctgattgtgatcgggctgtacttcgtgctgtggggcaaaagcgaggagaagaagagcaagaacaacaacctgcaggaccagccggtgcagggaggaggagacgacatcaggaggcatctgctcggacaagaagatgcatctcgcaaagacgaagaagctgcagtcactgatgaactggcatgacgatcgatcgaaggggcgttcttcaccagtaatatgcatgatgatgttggagttggaaaatatgttgatgtcagtgactgtactttcttaactatattaatcaaagaagaagatccaagcgtgccagtgt

SEQ ID NO: 3955 - DNA, 1088 bp, Oryza sativa
  ref <308>: DATABASE ACCESSION NUMBER: AK104597
  ref <309>: DATABASE ENTRY DATE: 2002-08-28
attgcaaaaccacccattctccttgaatcttgcctccaaaaactcttgccacttagcattcacaatgctcaccacatcatcacatagcaggcaccaccatgcatttgagaggagccccaaccacagcatgatgaagaacatagcagacaggaacaagcatgatcttcttcagagtgccatgaaccatgcagcaagcaagtacatgcagaggatctaccctctggggatccagaggagcagctccaacctcacactctcatcactctccctgtcacagaactccaatgattcttcactcagcagctcaaactctagctgggagcccaaggtgcccctgctgtatggtggcacatttagcccctggggtgatgtgcttgtgtccctggagaggaggagggaagaagatgatgacaaggttagtgatcatgatgttgaggggggagaagaggattttgattgcagtgagcctgggagcttgcataggtgcagctggatcaccaagaacagtgatgaggcgtacgttcagtttcacgacgagtgctggggtgtcccagtgtacaacgacaaccgtctgttcgagctgcttgcgttgtcaggcatgctcatcgaccacaactggactgagatactcaagagaagagacatgtacagggaagcgttcgcggacttcgatcccagcacggtggcgaagatggacgagaacgacgtcgcggagatcagcggcaacaaggagctcaagctggccgagtgcagggtccggtgcatcatcgagaacgccaaatgcattcagaaggtggcgaaggagtttgggtcgttcagcggatacatatgggggcacgtgaaccaccggccgacggtggggaggtacaagcaccacaagtacatcccgttccggacgcccaagtcagaggcggtgagcaaggacctcgtccgccgcggcttccgcctcgttggccccgtcatcgtctactccttcatgcaggcctccggcatcgtcatcgaccacctcgtcgactgcttccgcttccctgaatgcctccacctcgccgaccgctcctggggcattaccaacgtcgctgcctaatgac

SEQ ID NO: 3956 - DNA, 1102 bp, Oryza sativa
  ref <308>: DATABASE ACCESSION NUMBER: AK061472
  ref <309>: DATABASE ENTRY DATE: 2001-12-06
caccgatgaagacgaagatgacgaggaggaggagcagaaaatgcaacagcatctagctccacagtacaaacaccttattaccatcaaagcaggaaagccaaaaggtactctacttgatgccttacagagtgacccagaaaaggttagaaggctcagtttgagcgagcaacaacttgccaaattggcagatcatcatggtaccgaaattgtaaggttcacacagagaaacctactgaggatatacccaaagggcactcgggtcacatcatccaactataatccatttcttggttgggtgcatggtgctcagatggtagcgttcaatatgcagggatatggaagagctctttggttgatgcatggattttataaagctaatggtggctgtggttatgtgaagaaaccagatttcttaatgcaaactgatccagaggtttttgacccaaaaaaaatccctatctcccaagaaaaccttgaaggtgaaagtatacatgggggatggttggcggatggacttcacgcagacccactttgatcaatattctcctccagacttttatgcacgggtggggatagcgggagtaccagcggactcggtgatgaagagaacgagggcgatagaggataactgggtgccggtgtgggaggaggatttcaccttcaaactgaccgtgccggagatcgcgttgctgcgggtggaggtgcacgagtacgacatgtcggagaaggacgacttcggcggccagacggtgctgccggtgtcggatctcatcccggggatccgagcggtggcactccacgaccgcaaagggatcaagttgaacaacgtcaagcttctcatgcgcttcgagtttgaatgacccaacacaccgacactttctttctttctcgccgcatcgcattgcactgtgcctgtgcttgtgcagcatccatcatttggtttggtttttcatgttcctgtgcatacgcatttgtgtctgtacataggctcggtcctgtatattgtttgtgagtaacatgtaataataaggcttcacgccatgttcattcctcctgtttgaacccctccaaatatattaataccgaaggtacaaaatatctc

SEQ ID NO: 3957 - DNA, 1088 bp, Oryza sativa
  ref <308>: DATABASE ACCESSION NUMBER: AK061473
  ref <309>: DATABASE ENTRY DATE: 2001-12-06
gtgctcagttcactcttatcagtgaattagaacatatacttgtttccttgacagctcgttatttagcatggctaggtcactcgctgctctcctactccttctggtcgccgccgcgggagacagccatgccgcgtcgccagcggagatgtactggaagatcgcgctcccgacctcgccgatgcccggcgccatccgcgacctcatcaacccggcgagctcagcggggtcagcttcgaaggaggacacggtgggcaacgtgttcttcctcgagaaggacctcttcccgggctccaagctgacgctccacttcacccgcgccaccgccggcgccgcgctgctcccccgcggccgcgccgactccgtcccgttggccaccgaaaagctcccggagatcctctcccagctctccgtccccgccggctccccggccgccgacgccatgagtgcgaggccgcgccgctcgccggcgaggcgaagcaatgcgcgacgtcgctcgagtccatggtggagttcgccgcgtccagcctcggcacccgcgacgtgcacgccgtgtccacggaggtcgacagggcagggccggcgccgaggcaggcgtacagggtggaggccgtgaggcccgtgccggtgtccggcggcgacatggtggcgtgccacggcatggcctacgcgtacgccgtgttcgggtgccacacgaccacggtggcggcgtacacggtggcgctctccggcgccgacgggactagggcggaggcgctcgcggcgtgccacgccgacgcggcgccgggggtggcggaggcgtacaagaggctcggcgtggcgcccgggagcgtgccggtgtgccacttcttgccacaggacgacatgctctgggtgcgtaactgagcgcgcgcgcgtgaaaggggataaaaattgtgtgatctcaagatagctccttcctatattttggagctatatgcgtatcatgtcttatcatatgtgtatgcgacgacccgaaatgccactactatacttgtggcagcatgttaataagtctgcatgtacgattcatcgatccatacatcttgtatgacaatgttacacggttgtat

SEQ ID NO: 3958 - DNA, 1246 bp, Oryza sativa
  ref <308>: DATABASE ACCESSION NUMBER: AK061474
  ref <309>: DATABASE ENTRY DATE: 2001-12-06
ttatatatgctggtcccttgggctcgaaatcacgcaatctggtcgagttttttgaggcaattccaggagttcctaaaatcagggatggctataatcctgctgcatggatgttggaagtcacaagtactcaaatggagcaaattcttggagtggattttgctgaatactaccggcagtcaaaattatttcagcagacccaagaaatggttgatatcctgagcagaccaagaagagaatcaaaagaacttacttttgccaccaagtattcccaaccattctttgctcaatatgctgcttgcttatggaagcagaacctgtcgtactggagaaatcctcaatacactgcggtccgattcttctacaccgtcatcttttccttgatgttcgggacaatctgctggaaatttgggtctcgaagggagacccaacatgacatattcaatgccatgggtgccatgtacgcagcagtactcttcataggaatcactaacgccacctctgttcaacctgtgatttccatcgaaagatttgtctcgtacagagagagggcagctgggatgtactcggcactgccttttgcattctccctggttacagtggagttcccttacattcttgtgcagtcacttatctacggcacgattttctacagcttgggctcgttcgagtggacagcagtgaagttcttgtggtacctgttcttcatgtacttcaccttgctgtacttcactttctatggcatgatgacaacggcgatcactcccaaccacactgttgcgcctattattgctgctccattctacacgctgtggaatctcttctgtgggttcatgatcccaagaaagaggattcctgcgtggtggaggtggtattactgggccaacccggtgtcatggaccctgtacggcctgctaacctcccagttcggcgacctggatcagccgctgctgctcgccgacggcatcaccaccaccaccgccgtcgacttcctccgggaccacttcggcttccgccacgacttcctcggcgtcgtcgccggcatggtcgccggcttctgcgtgctcttcgccgtcgtcttcgccctggccatcaagtacctcaacttccagagaagatgagacgacgacgagcgagaagcgagctatagggagcacgacgtacaccaccattaattctctggccagctatagcgctcaaatgtgtactgcaactactatgcatgcatcaatccatttcgtttcttcag

SEQ ID NO: 3959 - DNA, 1444 bp, Oryza sativa
  ref <308>: DATABASE ACCESSION NUMBER: AK061475
  ref <309>: DATABASE ENTRY DATE: 2001-12-06
aaggcgccaacgcctcccaccagccacgattcccagtttcctaccaaaaacttgtttctcctccacgtcggtcgagtccgagtccaccgctccggccgccgtctccatggccgcctcctcctccaccgccgcagcgtcatccatgtccggcgccaacggaggaggaggaggagggagcgtgttcccaggccctcccccgccgacgccgtcgaaccaccaccacgcgctcccgtcctccggcgccgcgggtgggggcacggacgccgcgctctcgacgatcctccagcgcctgctcctatcctctccggcgccgattctacgctccccgctctcctctcgctccagggccccgccgtcgctgccgcctctcgtttcgcttggctctagcggcacccttcgtctcgacgccgccgccgacgtggggtacttccacctcgagggacacggcgtcccttcccagctgccgtcctccgcgctcgccgagctctccctcgtcgacgcgtccgcgcgccgcgcgtcgaacctcctcacgctcggattcacggaggaggatcagcaggaagcggacggcgccgaggaccccgccctggtgttcgacgtcgacgacgagggggagatgggcgcgctcccggctgcggcggcggagtacgcgcggcggatgcgggacgtgggcatgcaggtggtggcgatgatgtccgggtgtcccgaggtgggcttcggggaggcgccgttcgcggaagggaggaggaaggcgaggtgcttgatgtgggtctccaaggttgccgctggcgaggcggcgcctccggccgccgggaaggcgaaggcgtacccgtacgtcgtgggcatccattgccagtgggaagcgtccgggaaggaggcggcgccggcgagctgggtgatggacgacggcggcgagtggacggccgtaggcgcgcgcgacggcgcactccttgtcaccatcggcaacattgctcaggtgtggagcaatggaaagctgaagaaagtgagagggatggctcgccccgtttcttctgcacccggagcagggcacggcgccgaggctgaccgcttgtcagtcaccgtgctgatcactctccccttggacagtgtcatctcgccattggtcccggtcacggatgccggagaagagggcggcgacgacgaggtggatggagccggcgatgatggggatgggtggagatttcactcgtttttactcgaggaccttgcgtggagggtgtataatgggcggcttcagttcaaggacccgctggtccggtatcggatataagatttgtccatggtcgtcggcatgttgcatagctttgttttgtttgttggtgtgtgtgtggattggttgtaatcctagtattggagtggtttgagcacgagtgaatcattcatcgtgtgaaaaaaatatacgaactgaaccaggaaatggctc

SEQ ID NO: 3960 - DNA, 1175 bp, Oryza sativa
  ref <308>: DATABASE ACCESSION NUMBER: AK061476
  ref <309>: DATABASE ENTRY DATE: 2001-12-06
attctctcccttccctctcctctcctccctccctcctcccagatccgatggaggcggaggtagaaggcggaggcggcgcgaagggtggacgccgcggcggtgggtccgctgggaggggtgagggcggtggcgtcggcggccctcccctccggatctggcgaggcggctacgtccgcggctggattcggcacctccgccgtcgtcgctgtggtgcgacctcccccgttcccgaccccctatattggataaggaggggaggagggcgaaggggagggtgaaggcagttttggagggcggctacgccgggaggggggatggcggtggcggcggtggccagatgcggacctccgacgcgcgcggcggacggcgcgaagacggcgaacgcttgcagggtacctgtgcgtgcactgtgtatttgtctctgagaagttactgtgaaggaggtgacatgtaagatgctctaacatttttcactcttcactgatcctacagttttatcttccaatgttctaagtcactggaacaagaacgacatggcagagaggataagaagagaaggggtgtccttttctctgaaaagataagaatagctctcttcaagtatgttcaagtaggctagcgtgaaggttctcaaggaggtgaccaagacgaggaaggtgcctgtgctggaggtgcccttggcgttgaccaagatcaagaaggcaaatcttgagacatcctcattctttgagactcttagagggacagagttcccggtcaggacatggatgcgcatctttgtgaagaaagaggattgagaatggtgtgtatttgtgtccttaacctttaaggggagactcatgaaagaagaaaaagattctagactttatggcctttctgtcccctcaatttctgccattgtttggatgccatgggaccatcaccagttcaaagctactgacagtgctctttgtagtggttccagacgttaccattgtatatatgtatctatttacatgtctaacttgatgcttatagagattatatttgttgtttatgtattttttttgcgagttattcccatatcaaactaatttagttgcgactttggagttgctggtatagtagagaattgaatggctctgctttttgtaagtgcaagcaattgtgttctttgggttttatactaattctcg

SEQ ID NO: 3961 - DNA, 1063 bp, Oryza sativa
  ref <308>: DATABASE ACCESSION NUMBER: AK104598
  ref <309>: DATABASE ENTRY DATE: 2002-08-28
agcgaggcatccaccaccatcagccaaagtgccaaacgatcgatcgatctctgcagtctgcagattagcccaccacctccagcatcgggtccacgaatgcacaccctgtcaactccactccacccgcttttctttccctctccccgccaccttcacatctcaacctttcctctccctctctctctctctctctgatctcgtcgttcccatggcctccaaacccgcggacgttacggctacaggtggcggcggcgtcgccgtcgtccgtgacaacaacaacaacgccggcggcggcgaggcggaggtgtaccgctccgagctgacgccgctgcagaagcacgtcgccttcttcgaccgcaacaaggacggcatcatctacccctccgagacctaccaagggttccgcgcaatcggggcaggagtcgtgctgtccgccgtcggcgccgtgttcatcaatggcggacttgggcccaagacgataccggagaacaccaagactggtctcaagttacccatatacgtcaagaacatccacaaaggcaagcatggaagcgattcaggcgtgtatgatgcgaatggaaggtttgtcccagaaaagttcgaggaaatattcaagaagcatgctcacaccaggcctgatgccctaacagacaaagagctgaaggagttgctccaatcaaacagggagcctaaagatttcaaaggatggttgggtggcttcacagagtggaaagtattgtactacctctgcaaagacaaggatggatttcttcacaaggatactgtcagggcagtctatgatggaagcctatttgcaaagatggagcaagagaagcagtctgctaagaagaaatgataagaccatactgggtgctgtaattatctgttattgttgcaggtgattgtaaattacggtgtgggtgtgaatccaaaattattgctgtagtttgattgcgcgtgtttgttgacccgttcctgtaacaagaagctatttgtgaagttattggaagtgtttgtaaacatggtggtatcctctgatttattcacttcatttttttctttt

SEQ ID NO: 3962 - DNA, 954 bp, Oryza sativa
  ref <308>: DATABASE ACCESSION NUMBER: AK061477
  ref <309>: DATABASE ENTRY DATE: 2001-12-06
gtcacctactactacacacagcgacagagaggagcagagccgcaagaagagtcgagtcatggcggggtcgtcgtccctcagcacgctctccctctgcgcgcgtccagcgagacgcgcgcggaggtggtcgagctcatcacgcagctcgaggcccgcaaccccacgccggcgcccaccgaggcgctcaccctcctcaacggcaagtggatcctcgcgtacacctcattttcacagctattcccactattggggtctggtagtttgcctcagcttgtcaaggtggaagaaatatcacaaactattgattctgagaacttcacggttcagaattgcatcaagttttcaggacctttagcaacaacttcagtgtctaccaatgccaaatttgaagttcgaagtcccaaacgtgtacagatcaaatttgatgaaggcattatcggcactccacaattgactgattctattgtactacctgagaagtttgagttatttgggcagaatattgacctgaccccattgaagggcatattttcatcaattgaaaatgcagcatcctcagttgctagaaccatctctggtcaacctccactaaagataccaattaggactgacaatgctgagtcttggttgctcacaacctaccttgatgatgagcttagaatctccagaggtgatggcagcagcatctttgtactgtttaaggaaggaagcaccctcctatattaagcttggcatgcctaatctagggtagaacttgatgctgaagcaactccaagcagtacttgtggctaaattatttttcatatttaagttggtgtgttgttatttgtgtttgtatagttcgggcgtttggattatgtgaagttttgtgtatgtgtaatgtattctttgatgtccctgagcacctgagctgctatactagtatacatgttatatattgcaaaagttacactg

SEQ ID NO: 3963 - DNA, 1065 bp, Oryza sativa
  ref <308>: DATABASE ACCESSION NUMBER: AK104599
  ref <309>: DATABASE ENTRY DATE: 2002-08-28
aacaagcaagaagaaatttctctccttgtagaaacaagcctagagagtactatggagcagaggaaatttttgttgtgcctaattcttggcttacttgcgacttcaggacctgccaagaccgtcaatgctgactcgccctttgatttttattatctcatcctcatgtggcctggagcatactgcactgacagcgagtatggttgttgcgtgcccaagtatggttacccgtcagaagatttcttcgtcaagagcttcatgacctttgactcgtcagagaacacagctgttgtcaggtgcaactccgacaatcctttcgacattaacaagctagactcaatcgagaacaacctgaaccactactggagcaacatcaagtgtcctcgcaccgacggcgtgaactcatggaagagcgagtggaacagctatggcgtctgctccggcctcaaggagttggactacttcaaggccggtctccagctcagaaagaacgcagatgttctctctgctctcgctgaacaaggcatcaagccggactaccaactgtacaacacggcgttcatcaagtgggcagtgaaccagaagctgggtgtgacaccaggagtgcagtgcagggacgggccatttgggaagaagcagttgtacgagatctacctctgcgtcgacaaggacgccaagagcttcatcgactgccctgtcctgcccaacctcagctgccctgccgaggtgctcttccatccgttccacacctggatgctcaacaccacatcggctgccaacatcgtgatgcccactgaaactgtgctggcctaattaagagcctttaatttgctagctaagctgccatgatctacttgatcaacctgtcctaagagcatgtagcatatgcttagcttgttgctttgggtgaataatcgcgcaacttttatacattgttgtgccctctgaataatatgtgcagtactatatatgaagtattgtaccgcatatgttatgtattacatgtgcaggtcttgtgcacacctgtgaggtgaatggatatattatgaatatataacgtgttgtatt

SEQ ID NO: 3964 - DNA, 988 bp, Oryza sativa
  ref <308>: DATABASE ACCESSION NUMBER: AK104600
  ref <309>: DATABASE ENTRY DATE: 2002-08-28
atatatctaacgcccctctctctctctctctcactcagcaacagctcgcagctcactctctcactctactactcgtagctaagctagctcgcgccgccgccgccgccgtcgccgccgccatgagcaaggagaagcaccacaagcgggagcaccacctccggcgatgctgcggcgggatggcggcgtgcatcctggcgctggtcctcgtcgtcggcttcatcgcgctcgtcgtctacctcgcgctccgcccctccaagccgtccttctacctgcaggacctccagctccgctccgtcgacctcggcgacccctccctctccgccaccgcgcaggtcaccctcgcctcccgcaaccccaatgaccacgtcggcgtccactaccgccgcctcgacgtcttcgtcacctaccgcgacgaacccgtcacggtgcccgtctccctcccgccgacctaccagggccaccgcgacgtcaccatctggtcgcctgtgctctccggcgagtccgtccccgtggcgggcttcgtcgccgacgcgctcaggcaggacgtcgccgccgggtacgtcgcgctgcaggtgaaggtcgacggccgcgtcaggtggaaggtcggcagctgggtctccggcagctaccacctctttgtcagctgccccgccatgctcgcctccgccggaccaggcggcgtcggccccatgcctctcggcggcgcctccgccgccgtcgtgaacggcaccggcgccggcgccgtcgcgtcgctcaggttcacgcagccgacagggtgcagcgtcgaggtgtgagtcacaaatttgagtagcggctagtggcaatatggtaattaattaagttcatcggtcgcgttaatccgcaagctgttaattttttttttgtgttcatgtagctcatgcatactctatgtgagagaataaagttacgtacgttcatatgtataccattgcaacacattaatttcctatatgaagtgtactagtat

SEQ ID NO: 3965 - DNA, 1205 bp, Oryza sativa
  ref <308>: DATABASE ACCESSION NUMBER: AK104601
  ref <309>: DATABASE ENTRY DATE: 2002-08-28
caagcccaacccggccggcagcacacgcgacgcgcgcgccgacgcgaccacaccgacaccgacgcggccggcgagataagataagcagctagcagggagtggcctccgaaaccgagaggacgaggagtacacaacgtacgggactacggggcgcgggggccatggacaccttcttcctatcgcacggcacgcccacgctctccatcgacgacacgatgccggcgcagcacttcttcaggtcgtggctaccggcggcggtggcgggcgcgcagcctccgcgtgccatcctcatcgtgtcgggccactgggagacggccacgccgaccgtcaacgtcgtccgcggcaacaatgacaccatccacgacttcgagggctatggcttccccaagtccatgttccagctggaatacccggcgccgggcgcccctgatgtggcgaagaaggccaaagagctcttggagcaagccggatttgggccggtgaaggaggaccacggccgcgggcttgaccacggcgcgtgggtgccactgatgttcatgtacccggaggcgaacgtgccggtgtgccagctctccctgcagaccggccgcgacggcgcgtaccactacgatctcggcagagcgctggcgcctctccgggacgacggcgtcctcatcctcggctccggcaacgccacgcacaaccttagctgcatggcgcccgtcgccgagggcacgccggtgccccagtgggcggcggagttcgacgggtggctgcaggaggcgctcctcgcgggcgggaggcacgacgacgtgaagcagtacgaggagaaggcgccgaacggtaagatggcgcacccgtcgccggaccacttcctcccgctgcacgtcgcgctcggcgccgccggggaggatgccaaggcggagctgatccaccatagctggtacaacgcgacgctctcccacgcgtcgtaccgcttcaccaccaccaccaagaacaaaccgattgccgcatgcaaagagtgaaacatgtcttgcttatatcatcgccattttactcttaacaattaataatctccgtgggatctacgttaatatactcctattaacgtagacgtacgttcgtgcctgtatttcctaacggccgtgtcttgtggttttcagttgcaataaacttgcatgcatggtggtttgggttgtggcccagcctctcatggcgttgatatc

SEQ ID NO: 3966 - DNA, 1092 bp, Oryza sativa
  ref <308>: DATABASE ACCESSION NUMBER: AK061478
  ref <309>: DATABASE ENTRY DATE: 2001-12-06
atgcgtacgtagcaccaggagctagcaaacactactctttttttctttttttgcggggaagctagcaaacagtactactaaccttctgcttatatatcaccaacaaatactatgtcggtcacgcctaccaacgacgtcgtgatgactggccctgtagctggcgccggcgacgtgcaggccgctgagacgttccgcgtgttcgtcgggtacgactcgcgcgaggacatcgcgtaccgcgtgtgccggcgctccctgctgcagcgctcctccgtgccggtggccgtgatcccgatcgtgcagcaggagctccggtctgcggggctgtactggcgggagcgcgggcccacggagagcaccgagttctccttcacccgcttcctgacgccccacctggccggctaccgcggctgggcgctcttcgtcgactgcgacttcctcttcgtcgccgacgtcgcggagctggcgcgcatggccgacccgcgctacgcggtgctgtgcgtgcaccacgactacgcgcccaaggaggccaccaagatggacggcgccgtgcagacggtgtacccgcgcaagaactggtcgtccatggtgctcttcaactgcgcccacccaaagaaccgcgccgcgctgacgcccgaggccgtgagcacgcagagcggcgcgtacctgcaccgcttcatgtggctggacgacgccgacatcggcgaggtgcccttcgtgtggaacttcctcgtggggcacaaccgcgtcgaccccgccgacacggccgggacggcgccgcgcgccatccactacacttccggcgggccgtggttcgagcagtacaagaactgcgagttcgcggagctctgggtccaggaacgtgacgcgtatgaggccgaggcggaggaggacgaggagaaggaagagcacgagcccaaggccatcctgcatgcccctgctgcgccgtcggcagttcccgtggacgcctgagcctcacgtgcggtgcctactgttttctaataatatgattggaataaactcatgacggccacacctcaagaatgataagttctatatattgttgatcatatggttaaatattactttgaggct

SEQ ID NO: 3967 - DNA, 1172 bp, Oryza sativa
  ref <308>: DATABASE ACCESSION NUMBER: AK061479
  ref <309>: DATABASE ENTRY DATE: 2001-12-06
gtactcctcacttcgctctctcctctcctccgcatcgcgatcacctcctcctctcctctcctcgcctcgcctcgccggagatcgcctcacccacgcgccgcctccctcccatggacgcatcctaccgccgcgacggccgcggaggcggcggcggcgggggcggcggcggttccgcccctcgctccgtcgaggacatcttcaaggacttccgcgcccgccgcaccgccatcctccgcgccctcacccacgacgtcgaggatttctacgcgcagtgcgatccagagaaggagaatctgtgcctgtacgggtacgcgaacgaggcgtggcaggtggcgctgccggcggaggaggtgcccaccgagctgccggagccggcgctcgggatcaacttcgcccgcgcgcctcaaccgcaacgaccggaagcgtttgtttggcatgatgaatgatttgccaactgtttacgaagtcgtatctggttcaagacaatctaaggagagggacagatccggcatggacaacagcagcagaaataaaatttcatcgaagcataccagcgacgtggcgcgtgtcgaaaataatatcaaggaggaagatgaaggctacgacgaggacgatggcgaccacagtgagaccctatgcgggacttgcggtgggatatacagcgccgacgagttctggatcggctgcgacgtgtgcgagaggtggtaccacggcaagtgcgtcaagatcactccggcgaaggcggagagcataaagcagtacaagtgcccgagctgcagctccaagagacctagacagtagtagcatatgccaccctcctccggcgagaggaggtgtcgccggcgacgccgccattgacagaggcgtcaggctgtgggttactgtacctttcgtttttcgacttacatatgatgaagatgatgccaaatgtgaggtaagaagatcacaagacattcatgtgaggtggagatatgaggctatgtatgttgccagaggaataggggtaacgtaatatatgtaactttgcgaaacaagatggaagtttatctgacaataatccgagaggtttgtgttgatatgttgtgtcaatgactcgaatccgctgtaatgtgggtcttgtacctgaataacatgggtttattcccattaggataaagccataattttatgac

SEQ ID NO: 3968 - DNA, 1168 bp, Oryza sativa
  ref <308>: DATABASE ACCESSION NUMBER: AK104602
  ref <309>: DATABASE ENTRY DATE: 2002-08-28
atctacttcctctacctcccctaatccactccactccaccgcagcttctcccgcggcgaggcggctcatcccatctccacagccgcagttgttgcagcaaggaggcatggcggtggggggtgaagaagagaagcccttcaacttcctccagattctgtgtgagggcgtcatagctggtggcaccgcgggtgtggtggtggaaacagctctgtacccgattgatacgataaaaaccaggcttcaggctgctcggggaggaagtcaaattcaatggaaaggattgtattctggattagctggaaatattgctggtgttctcccggcttctgctgtatttgtgggaatatacgaaccgacaaaaagaaaactactggagacttttcctgaaaatttgagtgctgttgcccattttactgccggggctattggaggaattgcggcttctctcattcgcgtccccacagaggttgtcaaacaaagaatgcaaacaggtcaattcaggtctgcacctgatgctgttcgtctcattgttggtaaagaaggattcagaggtctttacgctggatatggatcatttttacttcgagatctgccttttgatgccattcaattctgtatatatgagcaacttcgaattggttacaaagttgtggccaagagggagctgaatgatccagagaatgcacttattggtgcttttgctggtgccattactggggctataacaacaccactcgatgtgatgaagacgcggttgatggttcagggatcagcgaaccagtactccggaattgtaagctgcgcccagacaatcctgagggaggaaggacctggggcattcttgaaggggatcgagccgcgggtgctgtggattggcatcggcgggtccatcttcttcggcgtgctggagaagaccaagtcgatgctcgccgagaggaggagccgcgagccaccagccgggaaggatgagtgacagattttaccctcggccatggatggatgcttcaagttttgtgtttgttttgatcgatttcacatgagaagtagtgcatctctcgaggaggaagacaatgccactttgcgtcccaatgattaaattcccattcgtttaatgaattaatattatgttcaagtttttttaaaatctgattatactacattatagctt

SEQ ID NO: 3969 - DNA, 906 bp, Oryza sativa
  ref <308>: DATABASE ACCESSION NUMBER: AK061480
  ref <309>: DATABASE ENTRY DATE: 2001-12-06
atccttatccttatctcctccactcatttccttctcctcctctctctctctctaccagcagagctgctccgcgctctagcctccacctttctccaccaccgcctcccctcttcgccgcgagtgccgccgccccacctcgccgccacggccacagcctccccttctcgccgcgtcgcgggccctccctcctcgccgcctcctccttctccaccaccgcctccgctgtctctgccaccgcctctgcagccgggctcccctcctcgacgcttccaccgcgccacctcgctcctccgccaccggccgtgatgcgcgatgacgacgacgatgatggcgacgcctatggatctgccattggcttggcccgggcgcgtggatccgccgctggctggtctcggggaggggaggggagctggtggcgacgaggaggagaggcggcggctcacctcctcgctctcccttcgtcgcaccgatgacgatggcgacgacggcgccgcgtgtggtaagcccggacagaggaagagaggcagcgacgcacgacgacggcctcaacgatgtcgccgccagctgttggggaggccagcggacggaggaggagagccatcggccagaggggaggccggcggcggtgccttttttttttatttgctgtgatgtttttcgcaggcgggtgaatctaccgtcaggcaggccattgggccgcctgcaaaaatcatttattttcgcaggcctttgcttctagacggttcgttcccccatgcatctttcccactgagttacttgtctcttttgtttacatgagttttacgcgcaaattgcagtctaatttttttttaagaattatacagtacaatgtagacattcacaacacatgcacactcacccctataaacatactagttatattgt

SEQ ID NO: 3970 - DNA, 1027 bp, Oryza sativa
  ref <308>: DATABASE ACCESSION NUMBER: AK061481
  ref <309>: DATABASE ENTRY DATE: 2001-12-06
cttgtgttcttcctccacctcccatgatttgaagccaagccaaaccccaccccactcataaaatcggctccaccttccctgtcaccatgctaatctttcctcctcctcatcaccgcaacatcaccgaaagggtcgaggatatcttctgcttcgccatcaggggaggatccacctcttcgtcctcttcttcttcttcttcctcctcctgcgacgacatctttgcgaccctgccgcttggagttcttgggctgtgcagttcttgatttgcttcttggttgggggtgttgtgggttttgagggaggagaggagttcttggcttgttgggtggagcgagaaagggcgtccttgggagagacgcgaagtccggacatgggagcaatgccaagttcaggatcgaagatgttgtcactttgcctgcagttcagatgatgggcaagtctgcaacagagacttcagatctgatcagaaatcacaagaactctcatacacatctcagttcttggattgccaactgatctagacaaaatcacagatcaaaacatctagccgaatttggggtttgttgcaatggaaggtgtaggtgctaggcagaggagaaaccctctgatacccagaccaaacggttcaaagaggcatctgcagcatcagcatcagccaaatgctgccgagaagaagaccgccgcgacatcgaattacttcagtatcgaggcgttcctcgtgctcgtcttcctcaccatgtcattgctcatacttccattggtgcttcccccattgcctccgccgccatcgctgctgctgctgctgccagtctgcctgctcatcctgctggttgtgctggccttcatgccaacggatgtgcggagcatggcttcctcttacttgtaaatacatctcctaggggaatttatttttgtttttgttattttggttttggttttgtattcgacataagatgagcgcgacgaagcaagctgtaaaacatcactttccagacagattttgaatgctgaagtttagaggttacat

SEQ ID NO: 3971 - DNA, 1072 bp, Oryza sativa
  ref <308>: DATABASE ACCESSION NUMBER: AK061482
  ref <309>: DATABASE ENTRY DATE: 2001-12-06
ggcaacatatcattattcttcagaacaagattgatcttatccaggaaagtgcagcaatgaatcaacatgaagcgatccagaaattcatccagggtaccatagctgaaggtgctccggtggtgccaatatctgctcagcttaagtataacattgatgtgatatgtgaatacattgtgaagaaaatccccattcctgaaaggaacttcacttcccctccaaacatgattgtcattcgctcctttgatgtcaacaagcctggttcagaggttgatgaaattaggggtggtgtagctggtggcagcatcctcagaggagttttgagggtgaaccagaacattgaagtccgccctggcattgtaatgaaggatgaaagcggcaacatcaaatgcaccccaatctattcaaggattgtttcgctctatgctgagcagaatgagctccaatttgctgtgcctggaggtcttattggtgtgggaacaaccatggatccaaccttgacacgtgctgatagactggttggtcaggttctaggtgaagttggatcacttcctgatgtctatgtggagcttgagatcaacttcttccttcttcggaggctgttgggtgtgaggacaaaaggtactgagaaggctgggaaggtctccaagctcaccaagggtgaaatcctcatgcttaacatcggatccatgtcgactggtgctcgtgtggttgctgtcaagaacgatcttgccaaacttcagctcactgcccctgtctgcacaagcaaaggtgagaaggttgcccttagccgtcgtgttgagaagcattggcgactcatcggatggggccagatccaggctggcacgacgctcgaagttccaccgtgtccgctctgaagtgcagttgtttaggcagaagtctaccaacagtttgaggtaagagagaaggaaatgtggaagggcagagagctcctaggcactattttcgtgagatggaggagaaaacaaatgagtttggaagagatgtcattgcgtgaattcacctacggtcgatactgaagtttgcctacattactaagtttgtttacattctg

SEQ ID NO: 3972 - DNA, 1720 bp, Oryza sativa
  ref <308>: DATABASE ACCESSION NUMBER: AK104603
  ref <309>: DATABASE ENTRY DATE: 2002-08-28
ggctgcttcctcctgactcctctcctgcattctctcgcttctgacggcggcaactaagctttttgggattcgattcgaggaggaggtgatggcggaggaggaggtggcggcggtggtgggggagctgagggggagcttcaggtccgggaggacgagggcggcggagtggcgggcggcgcagctgcgggggatcgtgaggatggtggaggagagggagggggacatctccgacgcgctccactccgacctcgccaagcctcgcatggagtcctacctccacgagatatcattggcaaaggcagcctgcacatttgccttgaaggggttgaagaattggatgaaacctgagaaggtacctgccgccctcactacattcccatcaactgcacaaattgtgtcagagcctcttggtgtcgtcctagtcatctcagcatggaactaccctttcttgctctccatcgacccagtcataggagcaattgctgctgggaatgccgttgtgctgaagccatcagaaattgcaccagccacctcagcattgttcgccaagctgctacctgaatacgttgatagctcttgcataaaagtggtggagggaggcgttccagaaacaaccgcactcttagaacaaaagtgggataagatcttctacacaggtagcggaaatgtgggccgcatagtgatggcagcagctgcaaagcatcttacccctgtggctctagagcttggtggaaaatgccctgcaattgttgattctaatactgatcttcatgttaccatgaagaggctagctgttggcaagtggggatgtaacaacgggcaggcatgcattgctccagactacgttataacaacaaaatcatttgctccagagctggttgactctttaaaaagagttttgaaaaggttctatggggaggatcctttgcaatcagaagacttgtcccgtattgtgaattctaaccatttccgtagattgacaaatttgatagaggataagaaagtcgcccaaaagattgtatatggtggccaaacagatgagaagcaactaaaaatagctcctactgtgttgttagatgttcctcttgatacaacactcatggcagaggaaatttttggtcccttacttcccattgtaacagttgacaagattgaagatagcatccagttcatcaactcaaggaccaagccacttgcagcctatcttttcaccaaggacaagaaactgcaagaggaatttgtgtccaatgtcccagcaggaggaatgcttgtaaatgatgttgccctgcatctcgccaatccgcacctgccatttggcggagtcggcgacagcgggatcggctcctaccatggcaaattcagcttcgattgtttcacccacaagaaggccgtcctgatccgcggcttcggaggggaggcaactgctaggtacccaccttacacgattgagaagcagaagatcctgagaggactgataaacggcagcttctttgcactgattcttgccctcctgggcttccccaaagagaggcgttagaaaactttcagtagtttcagtacagtacttgtgcatttgagtgagtgcaggccatgctgtcaatggaagccatttcctgcatgttgttttacacaggtgtacattatatttgtcggattttcttgtgtaacttattgaaaattctactacacagggttacataaataaacatgatttgtcagt

SEQ ID NO: 3973 - DNA, 1147 bp, Oryza sativa
  ref <308>: DATABASE ACCESSION NUMBER: AK061483
  ref <309>: DATABASE ENTRY DATE: 2001-12-06
ctccgcagttcgccgctgcttccactccgcctccacctccgccgccgccgctgctcctcctcctcgcgcttacagtttcctctacttccccctccttggtcttggtctgcctcctcctcgccatggacgtcaagccggtgaggactgtgaaggtcaccaatgtctccctgagtgcaactgtgcaagacattaaggagttcttttcattttcaggagacattgaacatgtggagatgcaaagtggcgatgagtggtctcaagttgcatatgtgactttcaaagatccccaaggagcagaaactgcacttcttctttcaggcgcaacgatagttgatctttctgtcatcatcgcacctgctccagaatatcaaccaccccctacttcatctgctcctccaatgtatagtgcaaccagtgtccctgtcagtgaagacaacaatgttgtccataaggctgaggatgttgtcagcaccatgcttgctaaggggttcaccctggggaaagatgccgttggcaaggcaaaagcttttgatgagaagcatgggttcacatccactgctggcgccaaggtggcctccattgacaggaagattggtcttagcgagaagttcactattggtacttccatagtgaacgagaaggtcaaggagatggatcagaagttccaggtgtcggacaagaccaagtctgcattcgctgctgctgaacagaaggtgagcactgctggatctgctatcatgaagaataggtatgtcttcaccggggcttcgtgggtcaccaacgcattcaacaaagttgccaaggctgccactgatgttggtacaatgacaaaggagaagatggcagctgaagaccagcataagggctcgggtccttctggagggcactcgtacacacccatccagtgatgactccacgctctctcatgtgccgcattgtgttgtattgatggatgtaaaacatagatatagaacagaaaaagtcccctcctggcataccacatacttctatcagtgaacttttcgcattgcaggaattttgtttccagtagaataggaaatatgatggtgatcacaatgtattccgctggtttataaggcgtatgttcaaactgtttctggttgtagtaacttgcatgaaccttggc

SEQ ID NO: 3974 - DNA, 1116 bp, Oryza sativa
  ref <308>: DATABASE ACCESSION NUMBER: AK061484
  ref <309>: DATABASE ENTRY DATE: 2001-12-06
aatgactttttcttcctcctcctctccacagtccacactgttcatctcctcctcccctccctcccaattcgattcccaaatcccaaaattgaccacccaaatccgcgccaatccatggattggatgcctcctccgaagcccacctcgccgcgctcccctcccctcctctgggactgggccgacgccgccgtgccgggctcctcctccggcgaggtatccgccgccgccgccgccgccgcggctcatccgggaaggcggcggaaggagaagcgaggcagggcggaggaaggaggaggtggtggtggggaggtgaggtgccaggtggaagggtgcggggtggagctcgtcggcgtcaaggactaccaccggaagcaccgcgtgtgcgaggcccactccaagttcccccgcgtcgtcgtcgccggccaggagcgccgcttctgccagcagtgcagccggttccatgcgctctcggagtttgatcagaagaagaggagctgcaggagacgcctgtatgaccacaacgctcgtcggcggaagccccagaccgacgtgttctcctatgcatcggcaaggccgccgtcgtcattattatttgatgataaccgacaaataagttttgtctggaacaaagctccactcagccatgtaaggcctttcgcaatttctccatgggaaagctcatctgaagttgggacaactgatggacatatttatttggataaatctcacatatccaaatctctcccagcatttaacaccgacatagatgagctcttaccaatgaaaggtatgattttccaaagatgtaagttttcgtgaaaaatgtcatcaattaagactactttcatggttcagcacattgcatagatctttgaaaaaattcaacctatacactgtaccaaatgccaaattcagatgctgttttgtcattgttgttgtttgttaaaaaaagtatcctggagttgtgcacacccatgaaaaaaaattagacccttgagcacatttgggtttagaaaataagatggtgtgcagtgtgctgctaagcttatgtcactatagttgacgaagtgtttcaaacataaaagacaacagagtttttagtaagattctaattgg

SEQ ID NO: 3975 - DNA, 1356 bp, Oryza sativa
  ref <308>: DATABASE ACCESSION NUMBER: AK061485
  ref <309>: DATABASE ENTRY DATE: 2001-12-06
aatcctccaaaccgcgtccgcgtccccatcacccccgcgtcaccgcctcctcctcctccgccgccgtcgccctcgcgctcgcgctctcctctcctcgccgcctcgccgcctcgcatggccgcgtcctactacaacaacccgccgccgccgcactcctcgtacgcggccccgcctccgccgccgccgccgccgccgggcacctccctgtacgcctcctaccgccaccacgcctaccctcctcacccgccgccgccgcccgcgtacgtcggcgcgtactacgaccacgcggcggagccactgccgccgcgcgacgagctccgcacgctcttcatcgcgggcctccccggcgacgccaaggcccgcgaggtctacaacctcttccgcgacttccccggctatgtctcctcccacctccgcacctccggcaaatcctcgcaggcatatgcgttcgctgtctttgcagatcaaccttctgccttagctgcaatgagtgccacaaacggaaggatatttgaccttgagaataattgcacactgcatgtagatcttgcgaaatctaattcaagatcaaagcgctccagaacagatgatgttccgtcttattcctctgagaaaaaagctagaaatccgaggggatttcctgattcagttacacgaactttgagcctgctgctttcagcaaggacccatcagcatttgcccctcaaaacaatcctccttgccctacactctttgttgctaaccttggtccaacttgctctgagcaagagctaatagatgttttctcaagttgcgcgggattcataaaggtgaagatgcaaaacaagtttggagctccagttgcatttgtggatttcaaggatatggacagttcaactgaagccataaaccgtctccaaggagttattttgtattcatcaactggcgaggggatgcgtttagaatatgccaaatctcggatgggcctgcgtaagcaggataagcgccaatagatatgatagacgaggctgcagttgtttctcatacagcgcaactggcagtggagcatgatgtttcctgactggtcttccaagtgctgtttagtctgatgacacaatgttttgttcagtgaaatgttttgctcatgatgttaggttatggtgcatcggtggtctttcagttccataacattttgtaattgggtttggtaacttaagctgtacctgtgtagttgtcttaccttctggttcttttcaaccctatactttctaggctgttcattagctactgttgaagtcagcatacccatgtaatcatgttcaaacttcaaacaatcaaactagttgtaacttttgaaagatcaaatggttcggtgcc

SEQ ID NO: 3976 - DNA, 1388 bp, Oryza sativa
  ref <308>: DATABASE ACCESSION NUMBER: AK061486
  ref <309>: DATABASE ENTRY DATE: 2001-12-06
gggttccatggctccggcacgctcccctaccgcaccgcgctcgccgccgtcttcctcgagggactcatcttcctcttcatctccctcgtcggcctgcgctccaagctcgccaagttcatccccaagcccgtccggatatcgtcgtcggcggggatcgggctcttcttggcgttcatcgggctgcagagcagcgaaggcgtgggcctcgtcgggttcagctcgtcgacgctcgtcacgctcggcgcgtgcccggcgtcgcagcgcgcgtccgtggcgccggtcgtgacgttccccaatggcacggtggcgctcatgccgggcggcaccgtctccggcgggatactctgcctgtccggccggatgacctccccgaccttctggctcgccgtcgtcggcttcctcatcatcgccttctgcctcatcaagaacgtcaagggcgccatgatctacggcatcctcttcgtcaccttcatctcctggccgcgcaacaccgccgtcacggtgttcccggacacgcccgccggcgacgagagcttcggctacttcaagaaggtgttcgacgtgcaccgcatccagtccaccgccggcgcgctcgacttccggggagcccgccacggctacttctgggaggcgctcttcacgttcctgtacgtggacatcctcgacaccacgggggggctctactccatggcgaggttcgccggcttcgtggacgacgcgacgggggacttcgaggggcagtacttcgccttcatgtccgacgcgacggccatcgtgttcgggtcgctgctggggacgtcgccggtgacggcgttcatcgagtcgtcgacggggatcagggagggcgggaggacggggctgacggcgctcaccgcggcggcctacttcgcggcggcgctgttcgtcacgccgctgctggcgtcgatcccgtcgtgggcagttggcccgccgctggtgctcgtcggcgtgatgatgatgcgcgcggtggcggaggtggactgggccgacatgaggcaggccgtgccggcgttcctcaccctggcgctcatgccgctcacctactccatcgcctacggcctcatcggcggcatcgcctcctacatgctgctcaactcatgggactgggcctgccacgccgtcgcggtgctccgctcccggcgccggagaggggcgcgcgccgagacgaggagcgccgccgccggagacaatggggaacagaggaagaacttggaaatggcttaattagcttttttttttgcataatttcctttttaaaagatttagaaggtgattaggatttgctatatatactggaagatggttcaaaaggcttagtaggatgttcaagtaaagttattaatcaagtttcagtccctgagtgcctgtcc

SEQ ID NO: 3977 - DNA, 1182 bp, Oryza sativa; identical to SEQ ID NO: 2212
  ref <308>: DATABASE ACCESSION NUMBER: AK104604
  ref <309>: DATABASE ENTRY DATE: 2002-08-28

SEQ ID NO: 3978 - DNA, 889 bp, Oryza sativa
  ref <308>: DATABASE ACCESSION NUMBER: AK061487
  ref <309>: DATABASE ENTRY DATE: 2001-12-06
gcagccatgatcaccgcctccctcctccccctccccgcgacttcctcctcctccggccgccgctccctcccgccgccgaccaccaccttcccgagacctcctcctcccctccgccgccaccgccacctctcctcctcctcctcctccgcgtcgtccacggagagcgacggcggcggcgggagcacgaacgggtcgctgccggggctcccccccgtggtcgtcgaggaggaggaggaggagttctgcccggtggagtgcgtgacggagttcaagacggaggaggagctggcccgcgtcctggagcgcgccaaggcgacgggggcgctggtggtggtggacttcttccgcccgtcctgcggcagctgcaagtacatcgagcaaggcttcatgaagctctgcaagggctccggcgaccacggctcctccgtcgtcttcctcaagcacaacgtcatcgacgagtacgacgagcagtcagaggtggcagaccggcttcgcatcaaggtggtgccgctgttccatttctacaagaacggggtgctgctggaggcgttcgcgacgcgggacaaggagaggatcatcgccgccatccagaagtacaccgctccatcgtcgccgcctgctgaatcagaggagccatcacaggagggatgattccacacagggttgagttgcgtgtcatgatctgaactcaaagtattagcgatctcactacaacgaagaaattggcattctatataggccagtgtatcattaaattgttcagcacaaagaggatgccgctatagttatagacttatagttaacactgctgcatcttttgtgctacagcacaattgtaccattcctacggggtgtacatttcccccttaataataataataaagaaaag

SEQ ID NO: 3979 - DNA, 1329 bp, Oryza sativa
  ref <308>: DATABASE ACCESSION NUMBER: AK061488
  ref <309>: DATABASE ENTRY DATE: 2001-12-06
tcagctcccagctcggcacgagcacgagcacgagacgacctgacctttctcttctccatctccaccccgtcccctgctcgattcccacctcttctctccagcccacgcgcccccgcctcgccacgacccgaatcgccgtgagatcgagccgatcgagcgtcgagcaccttgcgcgcgcgcgcggggatgaaatcccatggcagccgagacaagctacaggcggccgcgtcgtcgagccaccgccgcgtcctcctcctcctcttcgccacctgcttcgcgctagccacgttcgtcaccttcgtctacaacacctcccacttcgcctccgcctcgggctcgggcgcggcggcggactcctccggtggcggcgcaagcgccggctccggcaccggcgccgtctccgcgctgccgctcccggtgttcgacgcgctggtccacttcgcctccatctccaacgccacgcaccgcatgtccgacaccgacatccgcgccatctccgccgtgctccgcgccaggggcccctgcaacctcctcgtgttcggcctcggcgccgagtccccgctctggctggcgctcaaccacggcggccgcaccgtcttcctcgaggagaacgagttctacgtcaagtacctggagccgcgccacccggggctcgaggcctacgacgtctcctacaccaccaaggtgcgcgacttccgcgacctcctcgacgcggcgcgggcgtcgcgcgccgccgagtgccgccccatccagaacctcctcttctccgagtgccgcctcgccatcaacgacctccccaacgacctctacgacgtcgcgtgggacatcgtgctcatcgacgggccgtccgggtggaacccgacctcgccggggcggatgccgtccatcttcaccaccgccgtcctcgcgcgcaccggcgccaccgccgccaagggccccaccgacgttctggtccacgacttccagttcgagctggagcaggtcctcagcaaggagttcctctgcgacgagaaccgcgtcgccggcagcggcacgccgtcgctcggccacttcgtcgtccgcccagacggccggcgcgacgccttctgctccggccaagacagcacggcggcgggcacatcgtcggagaagtccggcaagtaaaaacctggccaagaattactcttccctcctctgctaattttttctctctctcctctcctctcacttgttaattatttcctgttacatatattttttttactgttttttgggggacaataatttgtaacacagtgatgatatcattgcatcaatagagaaaggaaaatgcaaatagaggttttacac

SEQ ID NO: 3980 - DNA, 1009 bp, Oryza sativa
  ref <308>: DATABASE ACCESSION NUMBER: AK104605
  ref <309>: DATABASE ENTRY DATE: 2002-08-28
cccatttcgaagcccaccgaattccattcctcgcgattcctctcccctcgcctcctcgtcctccccctcctaggggatcgccggagaggaatcgcgcggaggaaaaaaaaagaaaagggcttcctcgtcgtctaagttaaaaggaagccatggagcacaaggagactggatgccagcagccagaaggcccgatcctttgcatcaataactgcggcttctttggcagtgcggctaccatgaacatgtgctcaaagtgccacaaggagatgataatgaagcaggagcaggccaagctggcagcctcctctatcgacagcattgtcaatggtggtgattccgggaaggaaccaattattgctggtcacgctgaagtagctgttgctcaagtcgaggtgaagacgcttgttgcgcagcctgctgagattgctggtcctagtgagggggtcacggtgaaccccaaggggagggaaggaccaaatcggtgctccacttgtcggaagagggttggtcttaccggattcaactgccgatgtggcaacttgtactgcgcaatgcaccgctattccgataagcatgactgccagtttgactatcggaccgctgctagggatgctattgccaaggctaatccggtggtgaaggcggagaaacttgacaaaatttaggggtttcatatggttggtgaacgaagcgtcacaatctgcggtcttcatcatccatctttgctgcattatccatgccttttcctttcatgttggctgctacaatctagttgttcggcatttgtgatgcatggcacaccacggcagcttcaagaaccctcatctctggtcagtccgaatggtttgcatgttggctatgttgtgtaagctttatttatgatcgtcttgcgctgacggtattgtggcttcgcatttagctagctctgtaatgtactattgtatccgaagtgttacattgcaaccagtaatagtaatcagcaatcgtccgttatatggtactgatgacc

SEQ ID NO: 3981 - DNA, 1118 bp, Oryza sativa; identical to SEQ ID NO: 3305
  ref <308>: DATABASE ACCESSION NUMBER: AK104606
  ref <309>: DATABASE ENTRY DATE: 2002-08-28

SEQ ID NO: 3982 - DNA, 1100 bp, Oryza sativa
  ref <308>: DATABASE ACCESSION NUMBER: AK061489
  ref <309>: DATABASE ENTRY DATE: 2001-12-06
acagcctcctcgatcacacacatctcctctaaagcagctcacagctcaagagaaggagagggcaacaatggcgacggcgaggttgctcctcctcctcacggtggtggcagcggcggcgggctcctgcttctgcagcggccaggaggcgaagccaccgacgccgccgccgccgccgccgtactgcggcagcgtgaggacggcggtggaggcgcacaacatcatcgggtggaagacgcttccggcggattgcgccaaatacgtcgccgactacatcaccggcgaccgctacggccgcgactccgacgtggtgatcaacgaggccgtcgcctacgccgagagcctcaagctctccggcagtggcaaggaggtctgggtgttcgacgtcgacgagaccgcactctccaccgtgccctaccaggctaagcatggctacggagttcagccatacgaccacgcgaacttcctccagtacgtggctggagggagcgcaccggcattgcaggggacgctgcgactctaccaacggctgctccagctcggcatcaagccggtgttcctaaccgaccgcaccgaggaccagatagccatcaccacccacaacctcctctcacagggctactctagctgggagaagctactgctccaaccgattgggctccagacctcaactcaagcattcaagacaagtgagcggaagaagctagtggatgccggctatgtcattatcggcaacatcggtgaccagtggagcgacatcctcagatcaccggagggttgccgcacctttaagtaccccagtcccatgtactacgttgcctaggtgggccaccaacattattgctagccagctagctatatcgatggatgcaagttcgcgtgtgtttcatttacttaatttcttgtcatcaaatattcttagctcgcggttacttactctttgacgtgtatgctggatttccttcttagtttgctttgtgagagatgagatttaaatttgtaataacgctggagttggctatttcattgatcattgtattatgttgcctggttgtaattattgatcaatggatcaagcagtaccttacattaaaatattcact

SEQ ID NO: 3983 - DNA, 1214 bp, Oryza sativa
  ref <308>: DATABASE ACCESSION NUMBER: AK061490
  ref <309>: DATABASE ENTRY DATE: 2001-12-06
aaaaaggccaaggccacatttggatgataaggttattgtctcatggaatggactagctatatctgcttttgcaagagcttcccaaattctgaaatcagaaccaactggaaccagattttgtttcccaattactgggtgcaacccagaggaatatcttggagttgcagaaaaggcagcacgttttataaaggaaaaactatatgatagcagctcaaacaggctgaatcatagttaccgaaatgggccagcaaaagcaccaggttttttggatgattatgctttcctaataaacgggttgctggatctctatgagtatggtggtaagatagagtggcttatgtgggctgctcaccttcaagtcattcaggatgaattgttcttggacaaacaaggtggtggctatttcaatactcctggagaagacccttctgttcttctgcgtgttaaagaagattatgatggtgcggagccttctggtaactcagtagctgctatcaacttgatcagattgtccagtatatttgatgcagcaaaatccgatggttacaaatgcaatgttgagcatctcctggctgtcttccagacgaggctgagggaacttggtatagcactgccgttgatgtgttgtgcggcagacatgctatctgtcccgtccaggaagcaggtggttctggtggggaacaaagaatcgactgaattccgtgacatggttgctgccgcattttcgacatatgatccaaatagaactgtgatccaaatagaccccaggaacaccgaggaaatgggattctgggagagcaacaacgccatcatcgcgcagatggcacgtagcagcccaccggagaagccagcggtggcgcacgtctgccaggacttcaagtgcagccctccggtgacctctgcagacgctctccgcgtgctgctcaacaagacagtggcagctgctacttcgtctgctgctgcctgaagcgtctttccctcctacggctatggagctcctctggaaagtacataagtaacaaatcggcagagtttttagcctgcagaaggtttagctttcgggttcccaaagctctttgagccgcctcggttgtgtgtagatatttttctcttaataaaagcactgttttcatcttgcttccccttgagttgcaggctgtttggaatgtatgaatctcacatttcacacgagataaaaaaaaccagtttgcgtt

SEQ ID NO: 3984 - DNA, 1309 bp, Oryza sativa
  ref <308>: DATABASE ACCESSION NUMBER: AK061491
  ref <309>: DATABASE ENTRY DATE: 2001-12-06
gcatccatcagagaagagagaggtagagaagagagagcagagctaagctagctcagagtgagtagcgtgttgagcttgctgaagggagcggcaatgtcgaaggaggtgagcgaggagccggagcacgtgcggcccaaggactacaccgacccgccgccggcgccgctgttcgacgtcggcgagctccggctgtggtccttctaccgggcgctcattgcggagttcatcgccacgctcctgttcctatacatcaccgtcgccaccgtcattgggtacaaggtgcagtcgtccgccgaccagtgcggcggcgtcggcaccctcggcatcgcctgggccttcggtggcatgatcttcatcctcgtctactgcaccgccggcatctccggagggcacattaaccccgcggtgacgttcgggctgctgctggcgaggaaggtgtcggtgattcgcgcggtgatgtacatcgtggcgcagtgcctgggcggcatcgtgggcgtgggcatcgtgaagggcatcatgaagcaccagtacaacgccaacggcggcggcgccaacatggtggccagcggctactccaccggcaccgccctcggcgccgaaatcatcggcaccttcgtcctcgtctacaccgtcttctccgccaccgacccaaagcgcaatgcccgcgactcccacgtcccggtgctcgcgccgctgcccatcgggttcgccgtgttcatggtgcacctggccaccatccccatcaccggcacgggcatcaaccctgcccggagcatcggcgccgccgtcatctacaaccagaagaaggcatgggacgaccactggatcttctgggcggggccgttcatcggagcgctggcggcggcggcgtatcaccagtacatcctccgggcggcagccatcaaggcgctgggctccttccggagcaaccccagcaactgagcttagatggccatggctgctctgctgctgctggcctggttggacttggtcatatcgtttgcatgtgagggagtgtgtgtgagagagggtggggggtgccagtcagccaggtgcatgatttgttgtttccagcttaaattatcatcaccgttactgttgttaatcaaaccggtgggatttgttgtatgtatgtatgtactaccttgattaatttagtttcgcttgtttgtgtaaccggtgttagtaattattagagatacaaactgcttcggctttttaagttcagtcgaccacccttgtaaaaccgctgtaagaacttccaccaccaattgccatctgcttttgttgctgttggattgcgttttcc

SEQ ID NO: 3985 - DNA, 1044 bp, Oryza sativa
  ref <308>: DATABASE ACCESSION NUMBER: AK061492
  ref <309>: DATABASE ENTRY DATE: 2001-12-06
gcaacaccatcaagaagatggcggcggactcgctgctggacatgtccctcgacgacctcatcaccaacaagtacaagcgccgctcccgtccaggtccagcgccctctgcccgccgctcccactcccgcgccgccacccgctccgctgccgctccctatcacgccatcacctttcaggcgccgcccacggcctacgtccacccgacgcccgcggccaacgtcgagaccggcaccaagctctacatctccaacctcgactacgccgtctccaacgaggacatcaaggaactcttctctgaggttggcgatgtcaagcgttactctattaactatgacaggagtggaagatccaagggaactgcagaggttgtattttccagaaaatctgacgccctggctgctgttaagaggtacaacaatgtgcagctggatggcaaacctatgaaacttgagctcattggtataaatattgagccaccaccacctgctatttttggtttcgctgcaccagctggatacttcgattttcctcccaaaaggggtggaagaggatggcctcggggcaggggtggatttggtgggcgtggtcggggtcatgtgggtcgtgggcgagggaggggagaccgtggaagtcggaagatttctgctgaagacctggatgctgacttggacaagtaccatgcggaaggaatgcaaatgagctagatgaccctcacgctttgttgccttgccttgattgcattaggtagagacagggggacaaactagtaggccttccttggtctccttgttagtattttgtagggatagatgcagaccaacatatgtatactttgtttagatggtgtcataattttgagcagggaatggctaagcttaacctggtaggtagaagctagctcataatatgtaacacggagggagcacaactttgaacttttatagctagtgttgaacttttagctagtgtgggactgtgggttgatggacacacaagcaaagcaagcatgcagcttggcagcctggcaagaggattgaattgatt

SEQ ID NO: 3986 - DNA, 1016 bp, Oryza sativa
  ref <308>: DATABASE ACCESSION NUMBER: AK104607
  ref <309>: DATABASE ENTRY DATE: 2002-08-28
tattgcgttaatttagatctagatatcacatttcacctccggcccggaaaagacgacaagaaaggacgaagcatccccggtgccacagattctaaggcgctcctcctcaactacaatcacctgtccgggccattaccggtgaacatcggtttctccaagttaagctacctggccctcgccaacaacaggctcaccggcgcaatcccgccatcaatcttgcatttgcaagactccctcctcgaggtgctcctcctgaacaaccagctctccggctgcctcccccacgagctcggcatgctcaccaaggccgcagtgttcgacgccggcatgaaccagctcaccgggccgatcccctcctctttctcatgcctcaccagcgtcgagcagctcaacctgggcggcaaccgcctctacggagagatccccgacgcgctctgcaagctcgccgccgtcccagccggccgcctcgccaacctcacgctgtcgagcaactacttcacgtcggtcggaccggcgtgcttgtcgctgatcaaggacggcgtcctcaacgtcaggaacaactgcattccgggcttcgccaaccagcggcggccggcggagtgcgcgtcgttccacagccagccgaaggcgtgcccggcggcgagcgccacccacgtggcgtgccccgccggagctgccaacgctgcggcggcgccggcggacagggtggtcaaggactactccagctacgtgacgtacgccaccctgcacgagtgagcccggcgccacggcacgggcgcacgacgtgcgtgcatgcatgcagtaggggacagctagaagctagcgtctcggggtggtatttgctcttgtattcttgtgttcgtttgttgtgctcgtgagtcgtcattgtggtttgttttctctgcacgtgtggctagctatggctgtcacgtctagatctcacctcctgtactcttgtgtactgtactatgtgaaaatcattggtgattactaaagtttggtgtgtgccctgccct

SEQ ID NO: 3987 - DNA, 1535 bp, Oryza sativa
  ref <308>: DATABASE ACCESSION NUMBER: AK061493
  ref <309>: DATABASE ENTRY DATE: 2001-12-06
accactactaccactgatcacacttgctactactaccacacatggcgaggagagcgcgggaagaggaagcggatcaggtggagaggaagctggtgctggggcggtacgagctcgggaggctgctggggcagggcacgttcgccaaggtgtactacggccgtgacctccggtccggtgagagcgtggcgatcaaggtgatcgacaaggcgcggctccgtcgcacggaagggatggtggagcagctgcggcgtgagatctccatcatgcggatggtgcgccaccccaacgtggtggggatccgcgaggtgctcgccagccgcgcccgcgtgttcgtcgtcatggagtacgcccgcggcggggagctgttcgccaaggtggcgcgcgggcggctcaccgaggagcacgcgaggaggtacttccagcagctcgtcgccgccgtcgggttctgccacggccgcggcgtcgcgcaccgggacctcaagcccgagaacctgctgctcgacgaggaggggcggctcaaggtcaccgacttcggcctcgccgcgctgcccgagcagctgcgacaggacggcctcctccacacgcagtgcggcaccccggcgtacgtcgcgcccgaggtgctccggaagcgcggctatgacggcgcccgcgccgacctctggtcctgcggcgtcgtgctctacgtgctcctctgcggcttcctcccgttccagcacgagaactacgccaagatgtaccagaagatcttcaaggcggagtaccaggtgccgccgtgggtgtccggcgacgcgcgccgcctcatcgtccgcctgctcgtcgtcgacccggccaagcgcatctccatcccggagatcatgcgcacgccatggttcaagaagggcttcgtgccgcccgtccccacctcccctgtctcccccaagaaatgggaagaagacgatgtcctcctcgacggcggcgactccggcgccatgtcgccccggacgtgcaacgcgttccagctcatatcctccatgtcctccgggttcgacctgtcggggatgttcgagagcgagcagaaggccgccacggtgttcacgtcgcgcgcgccggcggccaccgtcatccagaagctggaggccgtggggcgatcgctgggttacagcgccacgagagggaaagggtggaagctgaggttggaggcgacggcggacggagcaaacgggcggctcgcggtcaccgtcgaggcgctcgaggtggccgccgacgtcgcggtggtcgagttcgcgcacgacgccggcgacgagctcgagttcaacaagttctgcgccgtcgacgtgcggccggggctcgccgacattgtctgggcgtggcagggcgaccggccggcggcgcccgacgttgccgccgccaccgtcgagtgctcgccggcgtgatcagagccgtccgttcagcgcgacgtgaaatctgtaggatgtattagctttagcttctttgctcgcggttatgtacaggccaaatcgagagatgtgtaaatacaaaagttttgttacttgatc

SEQ ID NO: 3988 - DNA, 1065 bp, Oryza sativa
  ref <308>: DATABASE ACCESSION NUMBER: AK104608
  ref <309>: DATABASE ENTRY DATE: 2002-08-28
gatcaccacacgcgcacacgacacgacgcaccaatggcgctcgtctccgcctcctcctccaccaccgccgtcgcggcgctccccggcgccgccagggcctcctccttcctcggcggcgccggcaggagcggcaggctgctgctgaggcaggccgagtcgtcgtccgcgcgggcgtcgttcgccgtgcgcgccgcggcgcccgacaggccaatctggttccccggcagcaccccgccgccgtggctcgacggcagcctccccggcgacttcggcttcgaccccctgggtctcggatcggacccggagagcttgcggtggaacgtgcaggcggagctggtgcactgccggtgggcgatgctgggcgcggcgggcatcttcatcccggagttcctgaccaagatcggcatcctcaacacgccgtcgtggtacaccgccggcgagcagcaatacttcaccgacaccaccaccctcttcatcatcgagctcatcctcatcggctgggccgagggccgccggtgggctgacatcatcaagcccggctgcgtcaacaccgaccccatcttccccaacaacaagctcaccggcaccgacgtcgggtaccctggtggtctgtggtttgacccgctcggctggggcaccggctcgccggagaagatcaaggagctgcgcaccaaggagatcaagaacgggcggctcgccatgctcgccgtcatgggagcttggttccaggcagagtacaccggcaccggccccatcgacaacctcttcgcccatctcgccgaccccggccacgccaccatcttccaggccttcacccccaaatgaggagttcttcaggtgttggagtgttagcaatggctgccaatggaggaagatgaaaagactgttcgtcgacgcgacttacctctcttttttgggatcggagtaggctgtgaatggtggtggtgtattgggatgtaattgtggatggagcactgcatgccttgttgattgtgtacctgtactatgatgtaaccgatgtaaaaaacaagttgatactcttttagaagtgaagttctcttcatc

SEQ ID NO: 3989 - DNA, 1456 bp, Oryza sativa
  ref <308>: DATABASE ACCESSION NUMBER: AK104609
  ref <309>: DATABASE ENTRY DATE: 2002-08-28
atgtactcctggccacacacggcctgcgcgtgacatggcagcgaccagcggcaagctccggccgcccttccggcttctcctcctgctcctggccgccgccgtcgcccgctcggtggacggcgtcgagctgaccctcctcaccggcgctcgagagaagggcgccgtgtgcttggatgggagcccgccgggctaccacctgcagagaggcttcggctctggagagcacagctggtttatccatcttcagggaggagcctggtgcaacaccatcgaagattgttccaaacgcaaaatgagcgcgtatggttcatcgaaattcatgcgagcagtagagttcaacgggatactcagcaatgaccaacaactgaattctgatttttacaactggaacagagttttcataagatactgcgatggagcatcgttttctggggatggggaggctcaagatcaggatgggagcacactccacttcagaggattgcgcatctgggaagcagttattaatgagctaatgggaaaaggacttgcaactgctaaacaggccatactctcaggttgctctgctggtggtctggctgcactactacactgcaatgatttttatgcaagattttctaaggaggtttcagctaaatgccttcctgatgctggatttttccttgatattgaggatttatccggggagaggcacatgtggtctgtattcaatggaactgttcatcttcagaatgttacacaggttttgtcaaaggactgtcttgcaaagaaggatccaacagagtgcttctttcctgctgagcttgttaagagcatcaccgctcccacgcttattctgaactctgcttatgattcttggcagatacaaaatgcccttgcgccagatggatcctttcctggacagtcatggtccagttgcaaaactgacattcgaaattgtagttccacacaaatccaagtattcaatggattcaggaataaatttgtcgatgacatagaggttgtgaaagacaaaaaggactggggtcttttcattgattcatgtttcactcactgtcaaacgccattcgacatctcatggaactcacaggcctccccagttctcggtaacaagattgtcgcggaggctattggggattggtatttcgagagaagctatgaagtgaaagaaatcgactgcgagtatccgtgtaaccccacatgtagcagccagctgcctaaatgattttacattgggctggacccagactaccacccttccctgaatatttatgcaggcttatttgatgaagcagcagctgcagatcatctttcaccatttgttctgtgaacaactaatagccatgctttgctgataatcagacgcctgtaataagtcaaacagtggccatctcgggtgaaaaggaattactacgaatacttcatatttcagtacatcggctgcatattcttctgc

SEQ ID NO: 3990 - DNA, 1051 bp, Oryza sativa
  ref <308>: DATABASE ACCESSION NUMBER: AK061494
  ref <309>: DATABASE ENTRY DATE: 2001-12-06
acggtgcaaagtgtgcagcgaactcgataaacattaaacaagctgtgtgaacttcttttttcgtgacaagtttaattctttctcgatcgatcgtcgtgatggctgacgagtacggccgcggcggctacggcaggtccggcgccggcgccggcgacgactacgagagcggcggctacaacaggtccagctccggcggcgccgacgagtacggccgccggccgggaggcggtgccggtggctacaacaagcccggtggcaccgacgactacgacagcggctacaacaagtccgccggcggcgacgacgacgactacggccgcaccggcggcggcgggtacaacaagtccggcaccgacgacgactacgacagcggctacaacaacaggtcaggggctaacgagaagtacggccgcaacaagtccggcgacgacgagtacagcggcggcggcggcgccgaagccgacgaggagtacgtcgacgggttgtcgtcccgggacgacccggagaagtacaggaaggaggagaaggagcacaagaacaaggagcgcctcggcgaggtgggcgccctcgccgccggcgccttcgccatgtacgagaggcaccaggcgaagaaggacccggagaacgcgcagcggcacaggatcgaggagggcgtggcggcggcggcggcgctggggagcggcgggttcgcgttccacgagcaccacgacaagaaggaggccaagcaggcggcgaaggacgccgaggaggaggcggaggaggagtccggctccggcgcccgcggcggcgaggggaagaagaagcaccacctcttcggctgatgatccatcgatcgatcgcgccatgcatgcggcggcggcggcgccatggccggcgtccgcgcgcacgcgtaaggtgtggccatgggcgtgtgcagctgaataagagccggggtttttgtacgtatgggctcagtatgtgtacacctcgtatatggtatggatgtacgtataagcgtatagtgtgtactataccaataaagctatctgttgctctgtgcctctgtgtaatt

SEQ ID NO: 3991 - DNA, 1140 bp, Oryza sativa
  ref <308>: DATABASE ACCESSION NUMBER: AK061495
  ref <309>: DATABASE ENTRY DATE: 2001-12-06
acaactcttcccaatgtcgcctcccctcgagccgcacgactacatcggcctctccgctgcggcggcgtccccgacgccgagctcgtcgtcctgctcgtcctcgccgaacccaggcggcgaggcccgcggcccacgcctcacgctccgcctcggcctcccggggtcggagtcccccgagcgggaggtcgtcgccgcggggctcaccctcgggcctctgcccccgaccaccaccaaggcggcctccaagcgcgccttccccgactcctccccgcggcacggcgccagctccggctccgtcgccgccgccgcagcttgccaggacaaggcggcccccgccgccgctccgccggctgcaaaggcgcaggtggtgggatggccgcccgtgcggaactaccgaaagaacacgctggcggcgagcgcctccaagggcaaaggggaggacaagggcacggctgaagggggccctctctatgtcaaggtgagcatggatggagccccctacctcaggaaggtcgacctcaagatgtattctagctatgaggacctctccatggctctcgagaagatgttcagctgcttcatcactggtcaaagcggtttgcgtaaatcatcaaacagagataggcttactaatggttcaaaggctgatgccctccaagaccaagagtatgtccttacatatgaagataaggatgctgactggatgcttgttggtgatcttccttgggatttgtttaccactatctgccggaaattgaaaatcatgagaggatttgatgctgctggaatagctccaagatcaatagagcagtcagggcagagcagataagattaaccttcgtccggacgagaaaggcaactgatctagcagctttggaattgttcatcgcaagtatcccaaatatctcaatgtctgtgtagtttaatgtgttcatcagacctgtgcattgtatgtctgtaatttgttcctttcagatcgtgcaattgtgcgttgccccctcttttctttgcattgaaggtcaagtcgggctcttgtccgcttatttctctaaatcctagtcagttcaaaaattatccatcatgacacatgaactgatggtggataatatggcaagaagcttttctaatcattcaagcttg

SEQ ID NO: 3992 - DNA, 888 bp, Oryza sativa
  ref <308>: DATABASE ACCESSION NUMBER: AK104610
  ref <309>: DATABASE ENTRY DATE: 2002-08-28
ccgcaatccatccccaacgccatggcctccacgctcgcctggagctccgccgcctcctcctccgccccctcctcccgcctcccgccgcgccgctccccgtcgctggtcgtcgtcgcccagggcaaggtcaagaagtatcgccaggtcatactgacagatgacatagcagaggtggggaagaaaggggacacgcttaaagtgagggccgggttctaccgcaacttccttctgccaaagggcaaggcaacgctgctcaccccagaagtactcaaggaaatgcaagtagaacaggagaggatagatgctgaaaagaagcgggtaaaagaagaggcacagcaacttgcccgtgtttttgaaactattggggcattcaaagtgccacgtaaaggtgggaaaggaaaacagatatttgggagcgtcacagcacaagatcttgttgacatcataaagtcacaacttaatagggatgtcgacaagcgtctcgtgacagtgccagaaattcgtgaaattggggaatacattgcagagattaagcttcaccctgaagtcacagctcaagtaaggctgaccgtatatgcgaaataagccctgaagctgcttgattgaatctttagtggatggtgggctttggatgaattctgatttcaccagagatttttgctgaaactccaaggtgcagtgtcacatcacggggcttggtctttacacattgccactgtccatcctacctgtaaagtcagtttcttgcacctttttttttttgacaaatttatttgtgttaatgttatggggttaaatgggcatgatgtaaacaacaaagggttcagagtctagagcaactgatacttgtcttgtaatcttgtttaaaggtgcacgttctttatagtc

SEQ ID NO: 3993 - DNA, 1369 bp, Oryza sativa
  ref <308>: DATABASE ACCESSION NUMBER: AK104611
  ref <309>: DATABASE ENTRY DATE: 2002-08-28
aaacacaagcaacagcttagctagtaacagtaggccactactagcatcactgcatttctagttaagtaacaacactagagagagtaaggagtagtgagaccatggggagggatcaggcagctgcagcagtgatgcatgagaaggtgaagctgttcataggagtgctggccctgcagttcctgcttgcaggattccacattgtgagcagggcagcactcaacatgggcatcagcaagattgtgttcatcgtctataggaacctcatctccctcgccttgctcgcgcccttcgcctacttcctcgagaagaaagatagaccaccactgaccttctctttgctggtggagttttttcttctagcactgtgtgggataactgcaaaccaaggtttctacctcctagggctgtatcacctttcaccaacttatgcttctgcaatacagaacacagttcctgccatcacctttgccatggctgccgtcctcaggcttgagcaagtagacctaggcaagaggcatggggtggccaaggtggtgggcacggtggtgagcataggtggtgccacagtgataactctctacaagggcctaccactgttcaatcacaatctgaacatcaagtccctgtcttcctcgagcctcatcctcaactggactctgggctgcgtcttcatccttggccactgcctctcatggtctggatggatggttcttcaggtgccagttctgaagaggtacccagctaggctgtcagttctatcactgacctgcatctttgggctcctccagttcctggtcattgcagccttcactgaagaagacctgagcagatggaaggtgaactccggaagcgagctgttcacaatcctctacgctggtcttgtggcatctggcgtggcgtttgctctgcagatatggtgcatcgacaggggagggccgctgttcaccgccgtgttccagccggtccagaccgtcgccgtcgccgtcatggccgccatcattctcggagatcagctatactcaggagggatcatcggagcagttctgattgtgatcgggctgtacttcgtgctgtggggcaaaagcgaggagaagaagagcaagaacaacaacctgcaggaccagccggtgcagggaggaggagacgacatcaggaggcatctgctcggacaagaagatgcatctcgcaaagacgaagaagctgcagtcactgatgaactggcatgacgatcgatcgaaggggcgttcttcaccagtaatatgcatgatgatgttggagttggaaaatatgttgatgtcagtgactgtactttcttaactatattaatcaaagaagaagatccaagcgtgccagtgtaattaaaaacagt

SEQ ID NO: 3994 - DNA, 938 bp, Oryza sativa
  ref <308>: DATABASE ACCESSION NUMBER: AK061496
  ref <309>: DATABASE ENTRY DATE: 2001-12-06
atgtctaccgctaccgcaccgaggagtactcccacactgcggtcaacaagttcaacgtcatcccggagtccatcccggactgggtgttcgacttcatgcccagccgcggcggctacttcgtcggcaacgtcagccccgcccggatggacttccgatggttcgcactgggcaacttcgtcgccatccttgcgtccatggcgacgcccgagcaggcggcggcgatcatggacctcatcgaggagcggtgggaggacctcatcggggagatgccgctcaagatcagcttcccggcgatcgaatcacacgagtgggagttcgtcaccgggtgcgaccccaagaacacccggtggagctaccacaatggcggatcctggccagtgctcctgtggctgctgacggcggcgtgcatcaagacggggaggctgaagatcgcgaggcgggcgatcgagctcgccgaggcgaggctggcgagggacgggtggccggagtactacgacgggaagctgggccgctacgtgggcaagcaggcgaggaagctgcagacgtggtccgtcgccggctacctcgtcgccaagatgatggtggaggacccctcccacctcggcatgatctccctcgaggaggacagggccatgatgaagcccgtcctcaagcgctccgcctcctggaccgtgtaaattactaattaattatggtgaaaaaactttgattgatccatgcaaaaaatagtacagaaagaagaaaatgtgtttgttttgggggattttccgctttttcacaaaccattcgttccgaatttggaaggcgtggtttgggctagctatatggttgtgatcagttgtacactatgtaattaatgatcaaacataggggggaaaagaatatgtggatgtcacatggactgaacttttaccgtggaatttaaacatttcacactc

SEQ ID NO: 3995 - DNA, 1450 bp, Oryza sativa
  ref <308>: DATABASE ACCESSION NUMBER: AK061497
  ref <309>: DATABASE ENTRY DATE: 2001-12-06
attgcctcatccatccatcaagttggtcatcgagctcgagctgaatctaaacctttgcaacaatggcggcgcgtgttgttgtggcgttcgcggttgcgtccgccatgttcgtggccgtctccggccagaagttcaacgccatcttcagcttcggcgactccatgtccgacaccggcaacctctgcgtgaacggcccccccgccggcctgacgctcacccagcctccctacggcgagaccttcttcggccgcgccacctgccgctgctccgacggccgcctcgtcgtcgacttcctcgcggagaagttcgggctgccgttgctgccgccgtcgaagaggggcggctccgacttccggcgaggcgcgaacatggcgatcatcggcgccaccaccatggactccggcttcttccagtcgctcggcatcggcgacaagatctggaacaatggccccctcaacacccagatccagtggttccagcagctcatgccctccatctgcggctcatcttgcaagacgtacctgtccaagtcgctgttcgtgctcggcgagttcgggggcaacgactacaacgcgcagctgttcggcgggtacacgccggagcaggcggcggggcagagcggcaccatcgtggacgggatcgggaagggggtggagcagctgatcgggctgggcgccatgtacgtcgtcgtccccggcgtgctccccgtcggctgcttccccatctacctcacgctgtacggcacctccaacgccggcgactacgaccagtacggctgcctcacccgcttcaacaccctctcctcccgccataactccctcctccaggccaaggtctcctccctccagagcaagtacccctgggctcgcatcatgtacgccgacttctactcccacgtctacgacatggtcaaatccccctccaactacgggtttagcacgaatttgagggcgtgctgcggggcgggaggagggaagtactactaccagaacggcgcgaggtgcggcatgtcgggagcctacgcgtgctccaacccgtcgtcgtcgttgagctgggacggcatccatctcacggaggcggcgtacaagcagatcgccgacgggtgggtcaacgggccctactgccacccgccgatcatgccctagatcatcgccggcggcggcgacggcggccggaggatggccggctagctgctgctgatttgatttgtttagcagaagaagagaagaaaaatggatagcaagaggaagaagaagacatcttgcgatcgactgggaaatgaataagatggtgattagttgattttcgttgtgggtggttaatttgtttttgttttaggtaatgcacatttgtgtagtatgtatgagattgggaggcaatttaattatgtgttgcaattaattaattaaatcttagtaatttgttgcatggtttggttggagatggtcac

SEQ ID NO: 3996 - DNA, 1289 bp, Oryza sativa
  ref <308>: DATABASE ACCESSION NUMBER: AK104612
  ref <309>: DATABASE ENTRY DATE: 2002-08-28
agacatccatcaatggccatggagctctctaacctgacgaggtgccatctgccactgctcctgctcttcctgctggcaggatcctcctccatggctttgccagtgcatcctgcaatggacagggtgagatggcaggtcgacaaggtcaaccggcggggccattccatcgggctcgtcatgtcgtacatcgatgaggccactgctcttgaatcctccggctacttcagaccttggcatgtcctccccttcgttgacctctacggacgaaggtatcacatcgggagtattagaggtgtcaatgttatatatgcactgacaggacaacgcaggttaaatgcggctgtgactgtacagactctcatcgacgtctttactgtgtctggcattgttcattatggcacagcaggaagttctaatgattcaatgtcatttggcgatgtcagtgtccccaaatttgttgcttatacaagtgcttggacatggaagaagttcaaatcaccaaaagagtcggatacagaacttagctttggagattttactgtcccaaatggaggagagaatcttctaggagctctgaaattcagaaatgaggagctatactcagtgggtaagcctatgaaagaagttttctggttacctgtagattcagcatggttcaaaatcgcagaaggacttaaggtttcacttgaaagatgtaacgacactttctgcttgccaacaactccaaaagtagtctgtgggctaaaaggatcgtcagctgatatgtttctagacaatgcagaatataggaagttccttttcagagaatttggtgtatcaacagtagatgaggagagtgcagcagtggtgatgacaacaacatctcctggcatacctgtgattgtattccggggagtttctgatttggctggaggggagccaacatggtcgtcaacaagcctgatgaacctggcatctattaatgcactcaaagtggcagtggagtttattgctacagtcgggaaacagaagtcaacaatgtcagcaggaagtgctaataactgaaggaaaaagatcacatccatgctgatccaataatgccctggaataacattttacagcagtagctgcattcagaataagatgctttcctgagcttcaagtgcatgtcctctcccataaaggatattagtgttgaattattttgttgaaacttgtaagcatgcatgtgcgatcattttattgcaaatggaatagcagatgatgttgctttttacgaaaaaaaacaaattacatcagtacggtttttt

SEQ ID NO: 3997 - DNA, 1259 bp, Oryza sativa
  ref <308>: DATABASE ACCESSION NUMBER: AK061498
  ref <309>: DATABASE ENTRY DATE: 2001-12-06
atcaaaccacacaccagacaatacttactaccactactactgctgctgctgccagttctagctagcctactgctcttctccgagctgaagatttttcgagctagctaggatggcagccagaatgggcagcaaggtcgctgcaatcctcgcgattctgtccgtgctcgtggtgcatggctcttgcaaggggcatcctgtgaactacaacgtctccgacgcctccgcctacggctccggctggctccctgcccgggcaacctggtatggcgctcccaccggcgccggccctgacgacaacggcggcgcttgcgggttcaagaacgtgaaccagtacccattctcgtccatgacctcctgcggcaacgagcccatcttcaaggacggcaagggctgcggctcatgctaccagatcaggtgcaacaaggacccgtcgtgctcgggcaacatcgagacggtgatcatcaccgacatgaactactaccccgtggccaggtaccacttcgacctgagcggcacggcgttcggcgccatggccaagccggggctcaacgacaagctccgccactcgggcatcatcgacatccagttcaggcgcgtcccctgcaactacccgggcctcaagatcaacttccacgtcgaggagggctccaacccggtgtacttcgccgtgctcgtcgagtacgaggacctcgacggcgacgtcgtgcaggtcgacctcatggagtccaagtcggcgtacggcggcgccaccggcgtctggacgccgatgagggagtcgtggggctccatctggcgcctcgactccaaccaccgcctccaggcgcccttctccctccgcatccgcagcgactccggcaagacgctcgtcgccaacaacgtcatcccggcgaactggtcccccaactccaactaccgctccatcgtccagttcagctagatcaatcatccactgctgatcgaatatggaatcatattggctcgcgatcgatcgatcgatcgattagtttattctctactactgctgctgcaaaatttgcgtgggattgaggtgtttttttttttattaggcgaggcctcatgtgctgtctggtctagtgtgtgaagtggtgaagtgatgcatgtgtgggaaaatggaggaggggcacagtaatacagtatgtgcatgtgctctcccgcccactgtcactgtactacccagtgctttgtaaccaaatcttaaggctacagaattataaatacaatgcttaagttaattacct

SEQ ID NO: 3998 - DNA, 913 bp, Oryza sativa
  ref <308>: DATABASE ACCESSION NUMBER: AK104613
  ref <309>: DATABASE ENTRY DATE: 2002-08-28
aagcaaagcaaagaacttcccttgcaccaccacctgatcggagaagtagctagctgcaggagagaaaccgaccaacaatgacggagtactactccagcaccgtggacgagtgctacgagaccaccggcaggcagcacggccacgggcacggccacggtcacgggcacgggcacgggcatggtggcatgagggtggagtcccacaccgacgactactacagcgagggcggcgagatcgaccgtgggaggaggaacaactccatgcactcgcaggagtacctgatgaggcagcagagcggccatggcggctacggctacggcggcggccagcagcaggagtactacaagcgggaggagcgcgagcacaagcagcgcgagcgcgtcggcgagatcggcgccctcgccagcggcgccttcgctctctatgaggggcaccaggcgaagaaggacccggcgaacgcgcagaggcacaggatcgagcagggcgtggcggcggtggcggcggtgggcgccggcggctacgcctaccacgagcaccgcgagcagaagcaggccagctacggcgccaaggagcagcagtacggctacgccaggatgccgcagcagcagggctactactgcaactgattaattattaatcacccccaaattattaataatccatgcgtacgtacgtaccactaaataaatactggctactacgtacgtatatatacggtacaataagatgagcaaggatgtacgtacgtacacgtatatacgttgctcacccacaatttcgccgccgcggccgcgcgccttattccaaaccagtgtatgtgtgtacgtacatctatatatgtactgtgatttctgtaaacgtgtggccatcggatcgatgaattctaccgtgatgatagaaactgcttcctcgt

SEQ ID NO: 3999 - DNA, 1718 bp, Oryza sativa
  ref <308>: DATABASE ACCESSION NUMBER: AK061499
  ref <309>: DATABASE ENTRY DATE: 2001-12-06
gacctcaccatcgtcggccggacctccacggaccgcatacgcgcgacacgagcacacgaccacgcaatacgcagcagcagcagcagctacccagcagatcgatccgaccgacggaggaagaagataaaagggcagaagagaaggggtgtgtgtggaaaaggcgagtaaagactccagctttctccccgtttgacctcgccctgctcaccgcgaaggctcgcccccctccctcttccctccccgccgccgtcaccggcggcaggcagcaatggcggccgcttcggaggaggccatcaagcagttctccgcgctgatggagctgctggatgagccgctcaagaccacattccagcatgtccatcaaggatacgcaagaggaactctggtgcgttttctaaaggccagagaatggaatgttccgaaagcacataaaatgttaatggattgcttaaattggaggatacaaaatgggattgacagcgttctggctaaacctatagtcccttctgatttatacagaactattcgggatacgctgctggttggattgacaggatactccaagcagggacaacctgtctatgcattcggtgttgggctcagtacccttgacaaggcatcggtgcactattatgtgcaatcacacatacagatgaatgaatatcgagatcgtgttgtactgccgaaagcctctaagatgttcgggaaacagattaacacttgcctaaaggttatggatatgacggggctgaagctttctgccttgaaccaaataaagatgttatctacgataacagccatcgatgaccttaactatcctgagaaaacagagacctatttcattgtcaatgctccatatgttttttcagcatgttggaaggttgtgaagcctcttctacaagaaagaacaaaaaggaaaattaaagtcctgtacggctcaggaagagatgaattactaaaggttatggactatgaggcactcccaaacttttgcaagcgagaaggatcaggctcgtcgaatgattcgtcggatggagttgattgctactcctatgatcacccttttcaccaggagctgtataattacatcaaacagcaagccctgaatgaagacttcatcggtcccataaagcaaggctcaatgcatgtggatgtgcccacacctgatctggaagaggccaagatcatggagacgatcgaatcggagctccacaaattcagtggagctaatggcctctcgcattcattcaacaagatcaagattgaaggtccgtgatgttgcccgtgatcatatctcgtgacggagacgacgatctgcggagatattatgcttatccatctccagccccagggaacctacggtggggttatagcactccttgcttgcaatctctagctgcaggcttgactaggatccacgagtagaaagaggttagtaattgtgatgcgattctaataaccgaatccgtattatctgaaagtgtagccagttctttttctaattaacctagcgactgtatcatctgcgacacgttactatttcagtgcttatggcaactgggaaggaaatgtgatgtttccagtccttccgagtaagttgctgccctaaatatatatgtaacagtgtatgtatagcctctagctgccttttgattgcagtggtatatatcaagtgctgtactcactgctaagaatgaatcatctgcatgtttcatttc

SEQ ID NO: 4000 - DNA, 1162 bp, Oryza sativa
  ref <308>: DATABASE ACCESSION NUMBER: AK061500
  ref <309>: DATABASE ENTRY DATE: 2001-12-06
aagtgctcctactgtggcaactacggccacaactcaagaacctgcagcagcagcgccagcgctggacacagggataccaccatgctctgcgacggcggcgacggaggtggcggcagtgggctgaggctgttcggagtgcaggtccatgtcgctgccggcggcggcggtggaggtggaggtggaggtttgccgatgaagaagagctacagcatggactgcctgcagctggcggcggcgggggcggctccgggctcgctcgtgtcgccgtcgtcgtcgtcctcgtcgtcgatgctcctgtcgatcgacgaggggggcttggagagggcgtccaatgggtacctgtctgatggcccccatggcagaattgtccaggagaggaagaaaggagttccgtggagcgaggaggagcaccggctgttcctcgtcgggctcgagaagctgggcaagggcgactggcgaggcatctcccggagctacgtcacgacgaggaccccgacccaggtcgccagccacgcccagaagttcttcctcaggcagagcagcatcggcaagaagaagcgccgctccagcctcttcgacatggtgccgatttgcgagaacggtgcgcgcgtctcggagcagctgagcggcgaaggcgcggcggcggcggcggcggcgtcgacctcactgtcgctgatgaacacgcacgagacctcctcggacagagtggcggcaattgatctgaattccaccgaggaagatgacacggtgggcgcgtcagggaggccgtttttcccggtggttctgatggagcagcagcagcaggcttcccatggacatggtcaccaccaccactgcacgccgctcgacctggagctcggcatgtccgtctcgtcgacgccgtccatcggcacatgacccggccatgccatgcacaccgtcgtcgttaggagatgctccagtttcgtcggtgcaaggtctgcaggatatagtacacgctgtaaaactgtggctgatatatctgcagtctgatctgtctgccaagtggagtaaagggctggagtattttggcaaatgtttgtagtaattgtaaagctggtgcaagtggagagatcaacgagtagtaccaactgtggatacagtaatgtccgtactactttttaattaattaggttgtgtaatc

SEQ ID NO: 4001 - DNA, 1159 bp, Oryza sativa
  ref <308>: DATABASE ACCESSION NUMBER: AK104614
  ref <309>: DATABASE ENTRY DATE: 2002-08-28
atgatcacatcataccttcttcctaaccttgcaaaattagggaacaattaattcagctactagtagctgaatttggagctagctaattaacaggatgttcagagctgcgcagctcctcctcagggagacgaacagagctcttggggcagcaacttcgcctgcaggcttcgtcagtggcttctccacggcttccaactctgcgcagaggttggctggcaaggtggctgtcataaccggtggagctagcggcatcggcaaagcgacagccaaggagttcatcgagaatggcgccaaggtcatcatggccgatgtccaggatgacctcggccactccaccgcagcggagctcggcccggacgcctcgtacacgcgctgcgacgtcaccgacgaggcacaggtcgcggcggccgtcgacctcgccgtgaagcggcacggccacctcgacatcctctacaacaacgccggtgtcatgggcgccatgccgcaggacgacatggcgtccgtcgacctcgccaacttcgaccgcatgatggcgatcaacgcccgggcggcgcttgtcggcatcaagcacgccgcgcgcgtcatgtcgccccgccgcagcggcgtcatcctctgcacggccagcgacacgggcgtcatgcccatgcccaacatcgccttgtacgccgtctccaaggcaaccaccatcgccatcgtgcgcgccgcggcggagccgctgtcgcgccacggcctgcgggtgaacgccatctcgccgcacggcaccaggacgccgatggcgatgcacgtgttatctcagatgtaccccggcgtaagcaaagatgatttggagaagatggcggacgccgccatggacgccggagaggtgatggaacctaagtacgtcgctagggcggcgctgtatttggcttcggacgaggctaagtatgtcaacgggcacaacctcgtcgttgacggcggcttcacgtcgcacaaaggatccgacacacgtttgaattagcgatgtgtccaactatagatggacaaatggaccgctcggcccgggcacgaccagacacggaccaatatgaattagtcacatgtgctcctcattggaataagtctgttgtacctccctcatctgtttgggttgtcttatatggctggattaagtcaattttgc

SEQ ID NO: 4002 - DNA, 986 bp, Oryza sativa
  ref <308>: DATABASE ACCESSION NUMBER: AK061501
  ref <309>: DATABASE ENTRY DATE: 2001-12-06
ctcttctcgtcgtgcgcctcctccccgcggcgacggcttccgcgagccgcgtaaaccctaaccctaaatcggtaagcgaagcagcggcagcggcagaggcggcggcggaggaggaaggtggcgatggcggcgaagcgggagctctcgagcaccctcaggaacctcaagtttatgcagcgggcggctgttgcgcagaaggttgaggagaagcccaaggttgaggcggcggcggcggcggcggaggaggaggtggtgacggtgcctagcggaggtgttggctcgtcggttaaagtcgctcggaagtgcgtagttatcatggagggtaatccacaccctggagctgcaaagggtcgaatgtcattcctgaatttcaacccatccattgataaattaactcaagaggcaacgggtggccgccaatcacagttagcatcacctagtaataatcatcaggatggttcgaattccagcagaacggatgaagtatcaagaacaagatttagtgacttcaacattgatagttcagaaagcatatctctgaatgaactaaagaggaaacagcctgagcttgaaatggaaacaccaccatcacataggcagcccaagaccacaggtaagagtatcgatggtgattcatcttcccaaagcaatggccgtgggtctcacaagtcaaacaagcgtgaaaagcttgactggaatcttcttagaccacggaaatcaaaatgaagtccggagttagcgtagccaaaactttgctcttgtaccccatttgtactctgtatctgattagcattttctcctgtttcgcgagttatatctagaaagctggtaaccagtagtttatttacagtaaaatgtttgtccttgcctaatcttggtttcaactgttcccctgttcttgatatgttgtttactgcattactttgctgtaacaaggttctgcagcagcaatgagaaattacagttttgacagtggttaatgctgc

SEQ ID NO: 4003 - DNA, 1438 bp, Oryza sativa
  ref <308>: DATABASE ACCESSION NUMBER: AK061502
  ref <309>: DATABASE ENTRY DATE: 2001-12-06
acgcacaattcacagcaacacaagcagaagcacagtagaacgcctaggaaatactacgtcgatggcgaggtgggccattgcgatccacggcggcgccggggtggacccgaacctgccggagcacaggcaggaggaggcgaagcgcgtgctggcgcggtgcctgcaggtgggcgtggacgcgctgcgctccggcgcggcggcgctggacgtcgtggaggccgtggtgcgggagctggagagcgaccccttcttcaactccgggaggggctccgcgctcacccgcctcggcaccgtcgagatggaggccagcatcatggacggccgcggccgccgctgcggcgccgtctccggcgtctccaccgtcaagaaccccgtctccctcgcccgcctcgtcatggacaagtccccccactcctacctcgccttcgacggcgccgagcagttcgcgcgcgaccaggtaaattatctttcgctaattaacccacacccaactaataaatcccttccaattaattatgctaatttcctggttaatctaacctgcctctgcacgctaattaacaaaacatttttaatgtggaattattctgtggacatggcacgagggaacgacggatattaataccggacagccaaaatctaatggtggtaggaaataattaaaaactgggacatgttcgacacgtgtaaatgacgtccgggaagccatgtacaagtgtgcaacatgaacctccaaacagtaaacagagcagcaacagctctgcattaccaaaaatggctccttgtttccttgcacagttcaatccagcaagattccattccaacacgacaacacatgcatgtgaatcctactacggctttacaaaaaaaaaaaagtaaccttttttctgttagcttatttgtaggatataagtgcaagaaatctttagtttcgtttttttctatatcccttaatcctattgagtcatttgggtgaacatgtcatctaactatgtgagttgcatgcttatctagctttacgtgatttagtgggaaatacaattgatgtgatagaggtttaattcaataggccaacaagttaagcaatcttgcttaacaatttctatgtttttgctgcatgtgcatacaaatacatccacgcatctgaaaatttttctgtgtttttgctcacgagttttaccattttcctttttgtttatgcttgtgcacaccttcacgtgctgtcgccttttcgtccccgggtctttggagaaagctgtggaccaaaaacgagctggtttctagtagtatcaatgaaagcaacagcggcgcaactgcctcctgctgtgcttgaatttccctatcaatcgctagagcggccattagcttgtaggtgtagtaatttcttcgttagtgttggcgaaggtattcatttctttcccttacatcaagtgctgag

SEQ ID NO: 4004 - DNA, 1068 bp, Oryza sativa
  ref <308>: DATABASE ACCESSION NUMBER: AK061503
  ref <309>: DATABASE ENTRY DATE: 2001-12-06
caagtagcaggtgtcattgcgaagaagtacgctgacacaggctttgcaggccagctcaacattacgatgttaaccattttctatttttagttttctttagtttctcttatgaaaagttaggagcataattgttttttgccttttaggtttactggaagtgcagggccagtcttttggatgttttctaactcctggaatactctgcaagttgagagaggccaatgattatgttggaaagaatttgcagggcatgggtggtggagagatggttgtagctcctgtagagtgtactagatagcacaggattcgttcctgacttcctgacgaagctactatagctggaaacgcttgtctgtgttggctactagtgagcaggtatttgtgacaggcaaaacaggtgaaactctcttggtcaatcagtggttgaggtcagggcactggagatcattgctgcgagtacatgatcggtggctgtgtagttggcaaatcctccctgtttcacaatccggcagagcccgggcagctgctcagggtcgccgggccttggctccgacgctggtcctgacatatgcatattcctcaattggtagagtaaggaggaacgttgcagctggaatgacgggtggccttgcctatgttcaactgcaatcagcaagtgatcatcagattaggtgacaggaaggtgttcgttctttgacactttcctgggacagcatcatggaaaaagaaataacccaggatacttgtgacgcaacgaagtgccccgaatactgcgaattttgtggaacctcataaaggcagcgaaagctgaaaacacttctaaacttctcgaatcctctacaggattcgtgccatttgtaatcatattttggttctgggcaatttaagttttgagctgttttaccggtactaatgggtattagtaataggtaccaaggtaggagtaccaatcatgtctatacgtcagtccattcatgatgaagggtagtatgatcagaatgtgtaaatgtcggtccgtactcgctacacgcctacaccatcttccgagacattcatctctgggcagct

SEQ ID NO: 4005 - DNA, 1224 bp, Oryza sativa
  ref <308>: DATABASE ACCESSION NUMBER: AK061504
  ref <309>: DATABASE ENTRY DATE: 2001-12-06
attttctcccacggtttccacgtcgcgtgtgcatctgcaactcatctcggcaccaccacgccgctcttctcactcaggtcccgcatggccaccgccgccgccgcggcgctcatcaccgccgcctccactcctttcccgctggtctccttccgcagccggcgggatggccacctgagcctttcgcctcctcgccgccccggcgccgggcgctgcagggcctcggcgccgacgttccaggggggacccgccgccagctacgcccgcgagatggagcgcctctccgccaaggagtccctcctcctcgccttcagagatgctggagggtttgaatccttggttagtggaaagactacagggatgcagaagattgatgtcaatgagcggattgttgggctcgagcgtctaaaccccactccacggcccacaacatctccctttctggaaggtcgatggaactttgaatggtttggtgacagcagtcctggagcacttgcagcccgtcttctgtttgagaggtcacctacaactgttgcacactttacaggacttgatgtcctgatcaaggatggatactccaaaatttcttccaacgtgaagttcttaaatacggtgcaaagcaagttcctgctgactactcagttgtctgtggagggtcctattaggatgaaagaggaatatgtcgagggcctaatagagatccctaggatcagagaagaaacactgcctgatcaactaaagggtttctttggacaaactgcaggtgctctgcaacaactccctgcccccataagggacgctgtttcagaggggattaaattgccacttaatgggatgttccagcgcctattcatgatttcttacttggatgaggaaatactgattatcagagatgcatctggagcacctgatgtcctaacaagattggaagggccacagccaaattcaattgatggcacatcagacgcagtgctgtcagaatatgaaagctagtgttaattgggtgcactaattagaacgtcgtgattagttttttgttcttctgttcagccacttttcacgcttgcacatacataataactgtagtgcgtaacagcatccacttgaatggattaacttacctcctttcttgtgagcagagtacatactgatactgctcttcaggatttgttatggctgtcagctcatggaataagatgaatatctcgacataaacattggactggc

SEQ ID NO: 4006 - DNA, 1242 bp, Oryza sativa
  ref <308>: DATABASE ACCESSION NUMBER: AK061505
  ref <309>: DATABASE ENTRY DATE: 2001-12-06
gaccgtacaaccaagccgcagagaagaggaaggcggaatcagtcgagggcgaggcggcggcggcggcggcgatggcgacggcgaggaaggcgccgcgcatggtggcgatctgggcggtggtggtggtggtggtcgccgccgatctgttcggagcggcggtcgcgcggtcggcgtcggcgcgtcacgcggtggggaagaagcagcgggagttcgactacttcgcgctggcgctgcagtggcctggcaccatctgcgcctcaacccgccactgctgcgccatcaacggatgctgccgctcggagccgctccagacgttcacgatccatgggctgtggccggactacgacgacgggacctggccggcgtgctgccgccacaccagcttcgacatggacaagatattgcccctgaagccgacgcttgagaagtactggccgtccctctactgctcatcctcttccacttgcttcagtggcaaggggcccttctgggctcatgagtgggagaaacatggaacatgctcatccccggtagttaaggatgaattagagtatttcaccactgctcttgacctctacttcaaatacaacgtcacggaaatgttggcaagtggtggtatccatgtttcaaatggtaaacaatatgcgctaactgatgtcattgatgccatcaaatgtgcttttggggcctcaccgcaaattgtttgcaagaagggctcagttgaagaactgaggttatgctttgacaaagatttgaagccccttgattgccttactactactgctaccaatgaaaacgtatcgaagaagaagtattgccctcgatacatcaccctgccaacatatgaccccatagtacatgctaattctactcgggagatcataacagtcgaaagtgaggtctatggatatctttacacatcctaagatacgattaccgcgagcaagaattacatggccatgatgaagccggtagttcagggctcttagctgcttaagacatactggggccggcattgaggttcaaggaaatgtatatctagataactcgattattacatttgtaagcacggcacgccagaacaacggagaatgtgattgtgtctgaaaaatcaattgctttatgtactatgcaaggttggaaaatagttcgtccatgtatatagtcattggtcagggtcatctgcgactgcaatctgctgaattataatggacagtggcaatcggtctgaacttttctggc

SEQ ID NO: 4007 - DNA, 1116 bp, Oryza sativa
  ref <308>: DATABASE ACCESSION NUMBER: AK104615
  ref <309>: DATABASE ENTRY DATE: 2002-08-28
gtgctcagtttcactcttatcagtgaattagatcatatacttgtgtccttgacagctcgttaattagcatggctaggtctctcgctgctctccttctccttctggtcgcagccgcgggagccagccatgccgcgtcgccggcggagatgtactggaagatcgcgctcccgacctcgccgatgcccggcgccattcgcgacctcatcagcccggcgagctcagcggcctcagcttcgaaggataaggaggatacggtgggctccgtgttcttcctcgagaaggacctcttcccgggctccaagatgacgctccacttcacccgcgccaccgccggcgccgcgctgctccctcgcggccgcgccgactccgtcccgttcgcctccgaaaagctcccggagatcctctcccagctctccatccccgccggctcgccgaccgccgacgccatgcggtccacgctcgccgtgtgcgaggccgcgcggatcgccagcgagacggcgcccaagcacaagcactactgcgccacgtcgctcgagtccatggtcgagctcgtcgcctccagcctcggcacccgcgacgtccacgccgtgtccacggaggtggtcaacagggccgggccgacgccgaggcaggcgtacagggtggaggccgtgaggcccgtgccggtgcccgggggcgacatggtggcatgccacaggatgccctacgcgtacgccgtgttcggggtgcacgggatcaagggcgcggcgtacacggtgacgctggccggcgccgacgggaccatggcggaggcggtggcggcgtgccacggggacgtggacgggcacggcgtggcggtggcggaggcgtacaagaggctcggcgtggcgcccgggaaggtggcagtctgccacttcctgcctcaggacgacatgctctgggtgcgcaactgaatgaagcagctacctgcgcgccatccatggctaattaagctccttcctatattttcgatctacctgccggctggctatcatgttatcatcgcgtgtgtgtgcgcgccgatccgacatgcccacactacacgtcgacactacacgtgttttattttgttaattaataagtctggacaaccaggtc

SEQ ID NO: 4008 - DNA, 1177 bp, Oryza sativa
  ref <308>: DATABASE ACCESSION NUMBER: AK061506
  ref <309>: DATABASE ENTRY DATE: 2001-12-06
gtaccacaacccgatcggccggctggtgcacatcttcgtgcagctcaccctcgggtggccgctgtacctggcgttcaacgtgtccggccgcccgtacccgcgcttcgcgtgccacttcgacccctacggcccgatctacaacgaccgggagcgcgtccagatcttcatctccgacgtcggcgtcgtgtccgcggggctcgccctgttcaagctgtcgtcggcgttcgggttctggtgggtggtgcgcgtctacggcgtgccgctgctgatcgtgaacgcgtggctggtgctcatcacctacctgcagcacacccacccggcgctgccgcactacgactcgagcgagtgggactggctccgcggcgcgctggccaccgtggaccgcgactacggcatcctcaacaaggtgttccacaacatcacggacacgcacgtcgcgcaccacctcttctccaccatgccgcactaccacgccatggaggccactaaggcgatccgccccatcctcggcgagtactaccagttcgacccgacgcccgtcgccaaggcgacatggcgcgaggccaaggagtgcatctacgtcgagcctgaggacaacaagggcgtcttctggtacaacaacaagttctaactgctgctgctgtgaaatcagcatcacacatccatagccaagcagcaaacaaatttgaagaagaagattacgagggaagagaagatagtgtcttcggaaatcgtcgtagcaagtatccatccatccatccaacccatgaacaatcgtctatctatccatgcatctatctatggttagtctctttagataggagagggcacttgggcacagaggaaggctattgcagtgccattgctagagttgccatcaagtgcaaagtaggcggatcaggcgtgtgtcatgcctgtggatttgtagtctatgtatgtgtcagctgctgagctccggtgtcgcagccttggtccctgtcgtgttatttccatcgtttttttccctccgccattgttcggtttaggtgttgtcatggtcggcgtccgtgtggacgacgtgtcttgtgcggtttgtctgtcattgagttggctccgtccgttgcttgctgttgtaaaacgcttgtggtgttcatggcggaataactaaacgtcgaatggaatgacaacttttttgcgt

SEQ ID NO: 4009 - DNA, 1105 bp, Oryza sativa
  ref <308>: DATABASE ACCESSION NUMBER: AK061507
  ref <309>: DATABASE ENTRY DATE: 2001-12-06
acagcctcctcgatctctcctctacagcagctcatcactgctcaagagaaaggagacggcaacaatggcgacggcgaggttgctcctagtgctcacggtggtggcggcggcgggcagctgcttctgcagcgcccaggaggcgaagccgccgccgtactgcggcagcgtgaggacggccattgaggcgcacaacatcatcggctggaagacgttcacggcggattgcgccaaatacctcgccgactacctcaccggcgatcgatacccccgcgacgccgacgtggtgatcaacgaggccatcgcctacgccgagagcctcaagctctccggcagcggcaaggagatctgggtgttcgacgtcgacgaaaccgcgctctccacactgccctaccaagccaaccatggctacggagttcagccatatgatcaggcaagcttcatccagtacgtgtccgagggaagcgcaccggcgctgcaggggacgctgcggctctaccaacggctgctccagctcggtgttaagccagtattcctgactgaccgcaccgaggaccaaaggacagtcaccaccaacaacctcctctctcagggttactgcagctgggagaaactgttgttccagccggttgggcttcagaccacaacacaggcgttcaagactgatgagcggcagaagcttgtggacgccggctatgtcatcgtcggcaacatcggcgaccagtggaccgacatcctcggctcgccggagggctgccgtacgtttaagtaccccaaccccatgtactatgtcgcctagctcggctgccggcctgcgccataatgctagcttcgctagctagccatatctcgatgatccataattcgcgtgtgtttcatatatttacttgatttcttctcatgaactgtttgtagtagttaacctttgaagcatatgcttgatttcctttcttagctattgatgagaggtgagatttgaatttgtaataacccttgtttggcatgggttggccatatattgatcgatgtatcgtgtgttgagcaagctgcttggatttgtgacaatatataatcaataatgagagtaatggatcaaaaagttcctttc

SEQ ID NO: 4010 - DNA, 1796 bp, Oryza sativa
  ref <308>: DATABASE ACCESSION NUMBER: AK061508
  ref <309>: DATABASE ENTRY DATE: 2001-12-06
cgtgcagcgcggggctgccggctcctcgtccagctccagccgctcggggtcacagacactgcagcagcagcagcaactgcaggcgacatcagcggttgcccgggaggaggagctgccgccgcagcctcatcagcatccatcggagctcacggcttcagacaatataactgaccatctagtggaggatgctgataacagcagtaatagtaataagccattggggctagatgatcccacatcagagagttcaagctctgcagaggagagggctgttatggagaaacctcccaaagacgactccagtgtgatcgatcctgctttcttggtggaggaattaacaggcctccagttttctgatcagtttgagcaggaaaatctagtgcagtcaggtattggtccatcacagattgctggtgcagcatcacacccaccacctccaccagctccaccagccccaccaccgaaaccatcgtctggtaataatgggttaaggagaatggggtctggaagctcaaacaatgcacggattggatcttcaagaaggccagttgcttggccaccagtggcagttcggtcatctgcttcgggttcccgaccttcttcacctagatcacttgctgatagtgaagggtataatagtgcagatgagcagggcccctgttacgcctctaattattatgattcggaaagggagcgcatgtttgaacatgacctaagacgagtgagaggatttgaaatcaataagatggctgaagatgggaattgtctgtttagagcagttgcagatcaagtttatggtgatccagaagcttatgacatggctaggcagatgtgtgttgattacatggaaagggaacgtgatcatttctcgcagttcatgacggaaggttttacatcatattgtaggagaaaaagaagagataaggtatatgggaacaatatggagatccaggcatttgctgagatgtacaatcgtccgattcacatatattcctatagtacagagcccattaacatttttcaaggaagctacaatacagatgtccctccaattaggctaagttaccatcatggtaatcattacaattcggtggttgatcctcgtgggctgacagtaggggcaggcctgggatttagttcccttagagggacaaataacgttgacagggatcaggtgaaggctgcaataaaagcacagcaagatcagcagattgagaatgcacttctggctgaaggacgactatactctgatttggagttgacagagaaggaaatagagcggatggtgatggaggcctcacgagcagagtatctaaagcagcagcaacaacaacttaacttcagagagtcatcaacatcaggggcagagccatcttcttctgctgcgattagtgggtcttctcggtcagctgggactgccgatagagttggcgaggagtgcttcgttctcccggacaccgtgctaacccgcagcatgcagctcctcctggcaatgggcttcaactacatccaggtcatggaagcctatagcatatttggcgaggacgtcgactcaatgatctactaccttgtggagatgggaggcaccggagcctctgcaggtggtagcaatcgcaggaaaggaaaagctgctgagtgatctgtgtacctttcaccggctatgacgaatcgaaataaaaatagttatgcataagccacaggagagggatggcaagactcgtggattaaatgagctgaaatgtcaatatactttccactgtatggagtgataacaaaataaaattcacttcttccat

SEQ ID NO: 4011 - DNA, 1128 bp, Oryza sativa; identical to SEQ ID NO: 2215
  ref <308>: DATABASE ACCESSION NUMBER: AK104616
  ref <309>: DATABASE ENTRY DATE: 2002-08-28

SEQ ID NO: 4012 - DNA, 1555 bp, Oryza sativa
  ref <308>: DATABASE ACCESSION NUMBER: AK061509
  ref <309>: DATABASE ENTRY DATE: 2001-12-06
ttgcgccgtcccggttgccgaccgccgccgctgccgcctccgcctccccctcgcgccgccaccgccgccgccgctgagcgccatcgccgtcccccatcgcgctgccacctccgcctcccgccgtccccattgccgaccgcctccgcctccgcctccgccaaccctagccgccgctgccagtcccctcctcccttcggtgaggcgagcagccatctccgccttggccaccgccgtcgctgagcgctgccgcttccgcctccgcctcacgccgccgctaccaacagccgcctccggccgccggcgtccggatctgggctccatgtggccgcaggcgtacagatccgccctccgttgccgctgccatcaaagaaacgacggtggtgacgaagccggcatcaatgaaggcggtggctgcggcgagaagaggtgaaccgtacatcgccaggctgatctgccgacgagctcggcggcaacatggtcggtcaactggcgctacggtcgatctggatggctcactcacaaggcaagcctgtcatcacaatgtcctagagccgggtcgccccattgagggtctggtgctgcgtccctcctcatcctctccctcacgcagctacaagattggaatcactccggttaacgagaaacgcgtccagccaaccacttctcctcggtgactatttttctcttccctccagccctggcagcaatagagcaagctcatgtcaccgtagtcgcatgctcttgggggaggagatactagcagccggcctaaggaaatcttcaattcttcatcgccgtcgcttcctcaagttcaagaactggtgtaatagttgatagagctatacttgcagaagataaaaaacatggtggcttcaagagctccaaggagtgaatctccatggctaaagaagcccatgcatggagtttcaggctcaactgccatggctagcaccccatggagctcgatgccaccaagcagccattccctgggggcccaaagccagctcgtctgctctgggtgccgtaacctgctcatgtatccagccggagcaacgtcgatttgctgcgcagtctgcggtaccgtgaccgcggtgcctgcccccgagcagaaatctagctgcaatgttcacgaaaataaagagagattaaaggggaatacaaatggcttcagggctccgcaacggtgcgcgcgtcgcgttgatggtgcctgcactcaggtcgctcgagaagtacacactgaagttgctctggtcatatttacattgttgtgtgtaactcttcctggtttgcttttcagtctaggatagagatttacatgtcaaagagtcagtgcacttttgaaagtgtaatgcgatgcaagtaaaaacagttttggacaagatcgaaaggatccatgtcatttgctgtcagaatagtaatgtttgttacttaatgaggtttgttacaaaccttaattacaggaatagcattgtagtagttcttaactttttacactcctatttgtagatgtacaattatcagatggactattttatacactactttctccctctct

SEQ ID NO: 4013 - DNA, 1324 bp, Oryza sativa
  ref <308>: DATABASE ACCESSION NUMBER: AK104617
  ref <309>: DATABASE ENTRY DATE: 2002-08-28
gtgcgtcgcggcctccgctacccgacgacgccgccgcggcccgcgtcatctccttggctcgccgcctgcgccgtcgtcgcgccggtctccgtcgccgggcgccctgctgcttccatcgcatactctcgcctctgaccccgagtccatctccccgtcccggcgtcgcctcggcctcgactcccgtctcctcgaggagttcgccccgtcgcctgcggccgatctccatccatcccgcgagcggcggtgcggtgttcctgctgcttccgcctccgggcgggagagggaggagcgggtgaccatggtgagcatggaggtcaccgatgagatgttcaagtgcatggaggttgggctggccttccgggactataatggaagaatcagttctatggatttccacagcaaggctacaaattacctcgtgacagcatgtgatgatgaatcaattcgcctatatgacattcaaaatgctgtgtgtttgaagacgattaatagcaaaaaatatggggttgagcttgtgtgcttcactgaaaacccaacttatgtcttgcattcttcaaaaaatggatgggatgattctctccgtctactctcactggtcaataactgttttttgagatatttcaaaggccatctagacagggttgtttctatctcattgtgctctgagaacgggaacattctctctggttcacttgatcgaacagttctcctatgggattcaagggttgaaaaagcacagggtttgctgcgtgttcaggggaggcctgcagtttcttatgatgatcagggtttggtttttgcaattgcatatggtggctacataaggatgtttgatgctcgaaattttgagaaggggccttttgatattttctctgtcggtaatgatgattcagaagccaatgtcataaagttcagcagtgatggcaggcggcttcttttaaccaccaaagctgggcgtgttcatgtgctagattcatttcatggcaataatatagcaacatacaacgtgaagccagtggtaagcaattcgacgctggaagcatcattcagccctgatggaaaccatataatatctggctctggtgatggcagtgtatatgcttggaatgttaggagtggaaaggttgctcgctggggaagcacagatagtgagccaccgctaattagatgggctccaggatctttgatgttcttgactgcatcttcggaactgtcttgttgggtccctgatctatctaagctgggatcctttactgttagtaagtaattcgaatggtacgagttgttgtttgtgtatgctcaggcctttgttctagctgtttgc

SEQ ID NO: 4014 - DNA, 1091 bp, Oryza sativa
  ref <308>: DATABASE ACCESSION NUMBER: AK104618
  ref <309>: DATABASE ENTRY DATE: 2002-08-28
accctcccccaaatccgcgagcctctagggttcgtgggatcccccggaaatggatccgaaccctagacttctcatcctactcgtcctcctcgcgttctccgccaccgtggcggtcgccgaggacggcgaatcgacggggggatcgaaggtctcgctggggcgccgtgcaggggggttcttgcacgggctgaagaaggaagcagtggtggagggagaccatggggtggccctcgatgaggtcggccccgggctgttcgatgcgctcttcgcgagtctctcgatgatcttagtcagcgagattggagatgaaacctttattattgcggcgctaatggcaatgcggcaccccaagtcaatcgttctgtctggtgcgctatcggcgctctacgtgatgacggtactatcaactggacttggtaggatagtccccaacttgatatcaaggaagcacactaacagtgctgctacagttttgtacttgttctttggactacgtttgttatacattgcttggaagtctgacccaaagggatctcagaagaaggaaatggaagaagtggaagagaagcttgagtcaggtcaaggaaaatcaacccttcgccggttctttggaagattttgtacaccgatctttttggaggcttttatcttaaccttcttagctgaatggggcgaccgaagccaaatagcaactattgcgcttgcaacccacaagaatgcaatcggagtagcagttggagcatcattgggccacactgtctgcacatcacttgcagtcataggtgggagcatgttggcatccaagatttcacaacggacagttgcaacaatcggaggtgttctcttcttggggttctccgtgtcatcgtacttctatcccccactatgattaacagcattaacagctccttactctttcttgataccctttggtcaccctgctccctgtgttgagcaaatgagtagaggaattaaattgattctttgggcacctctacgctacgattcgcaattcatgtatagcccttgcaaatgaaattgttcctgaccatgctacttcacttcagtctatagcagaagccgtctcgatg

SEQ ID NO: 4015 - DNA, 1152 bp, Oryza sativa
  ref <308>: DATABASE ACCESSION NUMBER: AK104619
  ref <309>: DATABASE ENTRY DATE: 2002-08-28
acacattctcgaagaaggagaagaaggagaggagcagccatggcgtcgtcggtggcagcggcggcgagcacgttcctggggacgaggctggcggacccggcgccgcagagcgggaggatcgtggcgaggttcgggttcggcggcgggaagaaggcggcggcgaagaaggcggcgaggccgtcggcgccgacgacggacaggccgctgtggttccccggcgcggtggcgccggactacctggacgggtcgctcgtcggcgactacggcttcgacccgttcggcctcgggaagccggcggagtacctgcagttcgagctggactcgctggaccagaacctggccaagaacaacgccggcgagatcatcggcacccggttcgagaccggcgaggtgaagtccaccccgttccagccctacaccgaggtgttcggcctccagcgcttccgcgagtgcgagctcatccacggccgctgggccatgctcgccaccctcggcgccctctccgtcgagtggctcaccggcgtcacctggcaagacgccggcaaggtggagctggtggatgggtcgtcgtacctggggcagccgctgccgttctcgatctcgacgctgatctggatcgaggtgctcgtcatcggctacatcgagttccagcgcaacgcggagctggacccggagaagaggctgtacccgggggggtcctacttcgacccgctcgggttggcgtcggacccggagaagaaggagcggctgcagctggcggagatcaagcacgcccgcctcgccatggtcgccttcctcggcttcgccgtgcaggccgccgccaccggcaaggggcccctcaacaactgggccacccacctcagcgacccgctccacaccaccatcttcgacaccttctcctcatcctcttaatttaagctctttcgcgcgcaattcaaacgggatcgatgcgttggtgtgcgttcgcgcgcgctgtttagttttgtgatgacgagcgagctgggagggtatggagagaggagaggtcatccttttgttgattactacttaaattaggaaagctgggttggtggttaatggcgacttgcatggtggtgatttgtaatataagaacacccaagatgatgaattaatgcatccacttgtacatcg

SEQ ID NO: 4016 - DNA, 1276 bp, Oryza sativa
  ref <308>: DATABASE ACCESSION NUMBER: AK104620
  ref <309>: DATABASE ENTRY DATE: 2002-08-28
cttcgcgccgccactctctccgagctctcgcctctcctcctcccccgtcttcccttcgcgcgcgccacccccacacacgcgaccatggcggcagtggcaggaggcgcagcgcgggcgctgtcgcaggcggagcaggacgtgcagatgatgctcgccgccgacgtccacctcggcaccaagaactgcgacttccagatggagcgctacgtctacaagcgccgctccgatggtatctacatcatcaacctcggcaagacatgggagaagctgcagctcgcggcgagggtgattgttgccattgagaacccccaggacatcattgtccagtcggcccgcccctacggccagcgcgccgtcctcaagttcgcgcagtacactggcgcgcacgccattgctggaaggcatacgcctggtacatttaccaatcagctccagacctccttcagcgagccccgtctgctcatcctcactgacccaaggaccgatcaccagccaatcaaggagtctgctctgggaaacatcccgaccattgccttctgtgacaccgattccccaatgcggtatgtcgatatcggcatcccggccaacaacaaggggaggaacagcattgggtgcctgttctggctcttggctaggatggttctgcagatgaggggtactatcctccctggccacaagtgggatgttatggttgatctgtttttctacagagaccctgaggaggccaaggagcaggaggaggaagctccagcacaagactttgctgccatcactgattacaccgcacctgaacaatggtctgctgaccagtggacctctgatgtggctgctcccccagctgctactgttggtgattggggcgcagctccagctccagttgctgctgccgaaggatgggatcaagcaggagcacccgtagccactgaagccgccgtcgttccaccggttgcgcctactggatgggacccggcagctcaaccagctgctcaaggctgggattaggctaggcaatcactttgagatgtcttccgcagcttaagttaaatatttcccgaggcatgaatgaacacccaaaatccaatgtgatcatctatagctacaccatgaactcaactgtttttaggaatttctagctgaacctgtgttgtttgtccgtccctatttcgaacaacaatgctgtgagggtgagctcggcaagatgtgtggtatatgttaagctttctacttttgtcctaagtttattctgtagcgtttatatcaatcttttcctcggtgc

SEQ ID NO: 4017 - DNA, 1102 bp, Oryza sativa
  ref <308>: DATABASE ACCESSION NUMBER: AK061510
  ref <309>: DATABASE ENTRY DATE: 2001-12-06
aagcaaaagctgctgacacagcactcctatctgctcaaccacttgcttggcttcctctgctccggcgaccgggcggccggccggccggcggcgagaggtagcgccaggggcacagggctgcaattggaacctgaacttgaaagcaagttgtgcaagaggacagaaaagaatcagtctgaatatggctgcctcaaagcttcaggccttttggaaccatcctgctggccccaaaacaattcatttctgggccccaacattcaaatggggtatcagtattgccaatgttgctgactttgccaaacctcctgaaatgatatcctaccctcagcaagttggtaggtttagttgtcagttaatcttattcctgacatcagtttatcatcaattcatgtataatgttgttgtgcttactctgatgtatgatgtatgatgtatgatgtgcagttgtggcttgcagtggagtaatttgggcacggtggggcatggtcatcacacctgtaagcccctgatatttagccatacatacaatcgtttctcgttattatggaaaaatatttggaattttggattgtatatctcatttgaatgcagtctaaacagcaacttttttgcgcaatgtctagtacgattctctagtgtaggttagtgcggtgtactgtaaaggagtaactgttttgaaactgaatcaagccaaagacctgttttatgactgttgtacttggatagactgattcagatatctgttttatgactgttgtattgttgcagataaactggaacctctccagcgtgaatgctgcaatggccgtgacaggcgtgtgccagctttcccgtaagataaggcacgattacttctctgatgagaagagtgctactgcgtcgctggaaggatgataggaagaagaagaaattgttgtcatggaatggaacactaatttcattatcagtcgaccagcacagtgttcactgtgaatgtgtccgcttccatgataacaaattaacaatcccatgtgtgtgtatgatcattatgaattgggctatgggtatgaaatgtttttataccctttggtatacagatagtaagcgagtctgaacttaactg

SEQ ID NO: 4018 - DNA, 1602 bp, Oryza sativa
  ref <308>: DATABASE ACCESSION NUMBER: AK061511
  ref <309>: DATABASE ENTRY DATE: 2001-12-06
atccacttcatcaccggccactctgcctagagcattatcatcgatcgtcgtctacctagctagcttcacttgtgctccactgcaaccagtacaccacattaacttaattcacacctagcttagctcactatatagcttagcttcgcttaagcttaagctgatctcggagaagacgtacatgatggtggtggtgatgaggcggcggatggcggcggcggcgatgctggtgctggtcgctatggcgggcggcgccaccgtgtgcgcggcgcagctccggcggaactactacgccggcgtgtgccccaacgtggagtccatcgtccgcggcgctgtggcgaggaaggtccaggagacgttcgccaccgtcggcgccaccgtgcggctcttcttccacgactgcttcgtcgacggctgcgacgcgtcggtggtggtcgcgtcggcggggaacaacacggcggagaaggaccaccccaacaacctctccctcgccggcgacggcttcgacaccgtcatcaaggccaaggccgccgtcgacgccgtgccgggatgccgcgaccgcgtctcctgcgccgacatcctcgccatggccaccagagacgccatcgcgctggccggaggaccgtcgtacgcggtggagcttgggcggctggacgggctgagatcgacggcgagcagcgtcaacgggaggctgccgccgccgacgttcaacctcgaccagctcacggcgctcttcgccgccaacggcctctctcaggccgacatgatcgccctctccgcggggcacacggtggggttcgcacactgcaacacattcttgggtcggatccgtgggtcgtcggtggatccaacgatgagcccaagatacgcagcccagctacagaggtcgtgcccacccaacgtggacccgcggatcgccgtgaccatggacccggtgacgccgcgggccttcgacaaccagtacttcaagaacctgcagaacgggatgggccttctgggctctgaccaggtgctgtactcggacccacggtccaggcccatcgtggattcttgggcccagagcagcgccgccttcaaccaggccttcgtcacggctatgaccaagttgggccgggttggggtcaagaccgggtcgcaaggcaacattcgtcgcaattgtgcagtgctcaattaattattaactgatgatcatctacatggttgttcttacactgagcttaattaatccagttttcaaattattgctttcttttgcacaaatgtaaagggaaaacataagcaaaattcaagccatatatagatgcatgtaaactacaatcaaaatggttggtcataaagttctttaatgctatgatacctcggtgtagtgatgaactgatgaacatcatctccacttggtggtcgaagctaagtggccactggccaacatatatgaatggcgtgtatttttttttttcagctagaaagtgaaacatcacatcgttgccaatgttgccacgtaccaaggtcatatggttgtacgtgaaagtgtcattgatcagatggcactaaaacaagcgggacgtgatctgtatgcgtacattttatattgatgtatttcctcct

SEQ ID NO: 4019 - DNA, 1187 bp, Oryza sativa
  ref <308>: DATABASE ACCESSION NUMBER: AK104621
  ref <309>: DATABASE ENTRY DATE: 2002-08-28
gagagagagagagagagagggcagtgcaggtgtcgctggccatggcgaggaggagcagcagcagagcgtgcgcggccatggcgacggccgccgtctttgcgctgctggccgcgacggcgacggcgtcggggctcgtacgggtggagcacccggccaagagcgacgggtcgctgagcctgctcgtcgtcggcgactggggccggaagggcacgtacaaccaatccagggtcgccgagcagatggggaaggttggggagaagctaaatatagacttcgtcatatccaccggtgacaatttctacgaggatggactcactggcgtcgatgaccaggcgtttgaggaatcgtttaccgatatctacacggcaaagagcttgcagaagccatggtacctggtgctgggaaatcatgactacaggggtgatgtgctagcacagcttagcccagtcttgcgaaagatcgaccagcgattcatttgcatgaggtcgttcattgttaatgcagagattgtggatttcttctttatcgacacaactccatttcagctgaaatattggactcgccctaaagaccatcattatgactggagaggagtggcacctcgacaaaaatacataactaatctacttaaggatatggatgaggcaatgaagaaatcaacagcgaagtggaagattgctgttgggcatcataccattaggagcgtcagtgaccatggtgacaccaaggagcttctgcaacttctacttccagttctgaaggtcaatggcatcgacttctacatcaatgggcacgaccactgcctggaacacattagcagcagagacagtcctatccaatacttcacaagtggaggtggttcaaaagcatggagaggagtcttgcagccaaattctgataagctccagttcttttacgatggacaagggttcatgtccctccagataaaccaggaccaagctgacttcatattttatgatgtttctgggaacatcttgtacaagtggagcaagagcaaagcaaactacctccagccctccacctatatcactgaagcatgaggcagatgcaaaaccacaaaacggagaattagcttggctaagatatttgtatcaaatttgaatgcattattgtggcacgcaagggaagaggaccggaaaggaaataggaaagtatttaagcatggc

SEQ ID NO: 4020 - DNA, 1032 bp, Oryza sativa
  ref <308>: DATABASE ACCESSION NUMBER: AK061512
  ref <309>: DATABASE ENTRY DATE: 2001-12-06
ctagagtagtgttagtcttagcgaatccagcagcagaagcagcagcagcagctcagccgccgccgatggcgtccacgatcatggccccaacctcccgcgtcctcgccgccaagacccccttcctcggccatccccgcccctccaatgcccccgtccgcgacatcgccgccgccgccaccggccgcatcaccatgagcaaggagctgtggtacgggccggatagggtgaagtacctggggccattctcggcgcagacgccgtcgtacctgaggggcgagttcccgggcgactacgggtgggacacggcggggctctccgcggacccggaggcgttcgcgaggaacagggcgctggaggtgatccacggccggtgggcgatgctcggcgcgctgggctgcatcacgccggaggtgctcgagaagtgggtgcgcgtcgacttcaaggagcccgtgtggttcaaggccggcgcccagatcttctccgacggcggcctcgactacctcggcaaccccaacctggtgcacgcccagagcatcctcgccgtgctgggattccaggtcgtcctcatgggcctcgtcgagggctaccgcatcaacggcctccccggcgtcggcgacggcaacgacctctaccccggcggccagtacttcgacccgctcggcctcgccgacgaccccgtcaccttcgccgagctcaaggtcaaggagatcaagaatggccgcctcgccatgttctccatgttcggcttcttcgtccaggccatcgtcaccggcaagggccccttggagaacctgctcgaccacctcgccgaccccgtcgccaacaacgcctgggtctacgccaccaagttcacgccgggctcgtgaatggcccagccgccattgtagactactctctctctccatcgctcgatgtaccaatgcttgcacagattgtacgatgctgtgatgaatctgatatgatccatccagaattcagaaactgaaaaaagttggggtttgcaacttatgtgtcagctgctgctttaagctt

SEQ ID NO: 4021 - DNA, 1132 bp, Oryza sativa
  ref <308>: DATABASE ACCESSION NUMBER: AK061513
  ref <309>: DATABASE ENTRY DATE: 2001-12-06
tcacctacgccaacggcgcgacggcgaccgggacgtatagctccgacgacctcacactgggcccctacgacgtcgtcaggggcttcctcttcggctgcgcgcacgccgaccagggaagcaccttcagctacgacgtcgccggaaccctggctctcggcggcggctcacagtctttcgtgcagcagacggcgagtcagtacagcagggtgttctcgtactgcgtcccgccgtcgacgagctccttcgggttcatcatgttcggcgtgccgccgcagcgcgccgcgctcgtcccgaccttcgtctccacgccgttgctgagcagcagcaccatgtcgccgacgttctacagggtgctcctccgctccatcatcgtggcgggacgcccgctccccgtgccgcccactgtcttctccgccagctctgtgatcgactccgccaccgtcatctcgcggattccgccgacggcgtaccaggcgctgcgcgcggcgtttaggagcgcgatgaccatgtaccggccggcgccgccggtgtccatcctcgacacgtgctacgacttttctggcgtccgcagcatcaccctgcccagcatcgccctggtgttcgacggcggggccaccgtcaacctcgacgcggcggggatcctgctccaaggctgcctcgccttcgcgcccaccgccagcgaccgcatgccagggttcatcggtaacgttcagcagcgcacgctcgaggtggtgtacgacgtccccggcaaggccattcgattccggagcgccgcctgctaaattaatttgcttgcttgccaaactagcttggtttattaattagcttggttgatgaaataattagtcaatttaatcgctgtttatcttctcatgacatgtttatcctacagtactagtagagcatctatgatctctatggaaagggattaaagtagctggcttgcagcatgcattgtctgctaaagtttaggctagctagcaaagctcttttgtttatgttgtctgcaataattagttaattatcttgatgtcatttgtgctcgtgtgagattgtaatatcgagttatgtccatcttatcaagtcatgtactacttttcccatatctatagcctttttacatgatttgttc

SEQ ID NO: 4022 - DNA, 1012 bp, Oryza sativa
  ref <308>: DATABASE ACCESSION NUMBER: AK061514
  ref <309>: DATABASE ENTRY DATE: 2001-12-06
taattaattgcctcactaacctctgcttcttcttaaggtagagagagaaatagagagagagagagagagagagagagagagagctcaggatcgacgagacaccagcgaagacgttgaggcgcgcacgtgggcagcccgcgcgtcccctcccccatcgccgccgtgctgcttagatccgtcgagctccggtcccgccgtttcttgcggcggcgagcgagcgagcgagcacaaggagttcttgctgcgcctgggaggaggaggaggaggtgcagcacgatggctgtggaccgtgggctcctcctgctcgtcgtctcggccgccgtcctcgtcgggctcgcctccgcgtcccccttcatttccgacagcgtgttcctggggagcgtcggatctacggggaggagcttgctgcaggccaagaagaattgccctgtgaattttgagttccaaaactacacaataatcacaagcaagtgcaaagggccacggtttcctgctaaacagtgctgcgatgctttcaaggaattcgcatgcccatttaatgaatatatcaacgacgagagcaatgactgtgcatcaacaatgttcagctacatcaacctctatggcaagtatccacctggtctgtttgcaaacgagtgccgagaaggcaagctaggtctttcttgcgaaggcgtttcccaaaaagatagtgtcgtttcaagtgctggccagcaagctcagagcagcttgcttgctttcatcatgctgacctttggactagctgcattgtggttccattgagttattatgtcttccatttatccaaagttggtgtgctgttgtaaccaatgaggattgagttagttcacccggctgggcattttccttttgcgtgtaaaatcctttgtaatttatggcagaggctacgtattatctggaatctcacttctcggttgactacttagaactcaccttctgtcgctgcattgtaactgctacattatgttgcatcaaattcatgtcattcatgtgt

SEQ ID NO: 4023 - DNA, 1133 bp, Oryza sativa
  ref <308>: DATABASE ACCESSION NUMBER: AK061515
  ref <309>: DATABASE ENTRY DATE: 2001-12-06
aatcttcgccctcctcctcctcctcgtacgcgcccacgcggttctctttctgccccctcgatcgatttgagggaacggaagggggaggtttttggaggaggccatggtgccgtcggagaggggggacgtcgccaccgccatcagacccgccgctgccgacaagctcgtccatgggcctatctctgacaagaagtgccggaagaaggtcccgaggaaggttcacaaatctgagagggagaagcttaaacgcgggcatctcaatgatctgttcggcgagctgggtaatatgctagaagcggataggcagagtaatgggaaggcatgcatactaactgacaccacccggatcttaagagatctgctttctcaagtaaaatctctccggcaagaaaacagcaccctccagaatgaatctaattatgttacgatggaaaggaatgagttgcaggatgaaaatggtgcgctacgcagcgaaatctctgacctccaaaacgagctgaggatgcgtgcgacagggagtccaggttggggccatggcgcgactggatcacctctccccgttcctccctctccaggcacggttttcccatcgcagcagccaatgcagccatctcccatgacaacaagcacagtgttccccttgcagcagccactgccacaaccaacagtcattgagccctctgcaagacagccactggaactgaagctcttcctagaagcaccccccgccgaagaccctgaaccatcagaagaccaggaggctccgaacaatgtggcacgaccgcagccgaggtacccaacagaggcatcttcttggcctattagcctgggacttccaagaatggaagatgagcaaatgtagtggtagcacgatagatgatagcacaggtagagattgagagggtctgtttttaatgcatgcaggaattccacacgaaaacacttctgtccttgcatgaaaactggaaaatttcctgcattccaagtaagacctgagtagatcagctccaaccaatcagaaactcactttgagcctagaggatatactactgaatgatgtgcatgtaaatatttcaatctcccttttgtttctgtaaactctagtgagaatagaacccgttttatccccttgc

SEQ ID NO: 4024 - DNA, 1074 bp, Oryza sativa
  ref <308>: DATABASE ACCESSION NUMBER: AK061516
  ref <309>: DATABASE ENTRY DATE: 2001-12-06
aaccggcactaccgaaccgctcggcgtagcatccacgcagcgcaggggaaggaaagccgaagcgcggccgccgcgcgtgagatcgacgcgcggcgacttcgccaaccttccctataaagcgctgccccaatcgccaagcccaccgacctcctcctcctctccagtctccaccaccgacttcttcgtttgatctcgggctccggaggaccggaggatgtccggcgagagatgcgccgggcggccgctgttcggcggcgccatctccagtaccttccccgtccggttccaggatgtgagcaacatcaggcaagtccccgaccatcaggaggtgttcgttgacccggcccgcgacgagagcctcatcttcgagctgctcgacctcaagggcgaggtagaggacggcggcagcgcgctctggttcctgcgcgacatcgccaacgagcaggacgcgggggacaacttggtagttgagcattctgggacgatcgagctaggtggtctgcgatttggagatgctcctgcagtggctggaactgcggttggtcagctggctatctcaaaaggaaggcaaggcagagaagcacagaacattgttcgactttacttggccaatatacgcctcaagaatgcagctactgatgtagttattactgcatatgagccactgttgataaaccccttgagtgaaagcgccagtgcagttgcagccggtccagcagtaccagcagaacaagcaggatgcttagcaatgtctgagatcttcaagctcgccgtgatgaacttcaatgtccatgactggaatcttttcaatggcagcagttgaaacagggtggatagtttatcatagtaccactactgagcatcgcatgaacttttccttggtctagtatctgaacattattttagatcggcaacattcgttttgttaatgtagtgtcatcagcagacccctgttgaacttgagtatcatgttagcttcaggaatttactcatttggcccatgatagttaatagtaagcactaaatcagtaaagaagaattatgtgtatctatcaagttagctatgagttctgg

SEQ ID NO: 4025 - DNA, 929 bp, Oryza sativa
  ref <308>: DATABASE ACCESSION NUMBER: AK061517
  ref <309>: DATABASE ENTRY DATE: 2001-12-06
taaatttggtgggtttcgattcgattcgagagctctcttccttccttagttccttggttcaggagggttggttggttggttcacaaggcaaggcagatgagatgaggaggaggaggagaggaattgatcgatgatgatgatggattcaagtgcaagtgcaaggcgctgggtttggatctgagctcccatcgttacctcttgtctgccgccatggccaacaaatcgaaatcggcagcggcgtccccttcttcttcctcctcaccgtcagtcgcccttggccttgccgccaccacgcccaccacctccccactaccactagcacctgcagctgcagcctcttcctccaaccccaatgccacgccggccgacaccactcccacttccccgccgcccgcctccccacctctaccgtccgcaacgccaccgcttgctgcctcgccaccgccaccaccaccaccaccgccacccagaaattcaccatcgcctcctaaaccgccaagccaagcagcgagcttttcaatgtggcgaacacagcagaggttaggatgttccagcggatggtgctgggcaaccacgatgacagctccgacatgagccaatacggttggagcagcagtcgccagtagaggtactctactcatagcctcaagctccaggatcctgtagcgtgcagtagttgctttctttgctcagtattgactagtctattcttcttcactcactaatccgggttgaattgggtatggagtgtccagtgtaatccttactatgttagggctaagcaaagcgaactgaattgattgtttgattgttattcgcagaagaatagggtggcgaattgagtgctcccgtaacgtgtagatcgatcatgtatgtacacatgaactcattcttcttgtttgacaaaattatggtgttggtcaaagcac

SEQ ID NO: 4026 - DNA, 1032 bp, Oryza sativa
  ref <308>: DATABASE ACCESSION NUMBER: AK104622
  ref <309>: DATABASE ENTRY DATE: 2002-08-28
atccatctctacacatcagcaatatttagctacacagagctagctaggattagctcagcaatggcaggtgctcctcgaggactagttctcctcggcgtttgtgccgtcttgatggcggtcgccgtcggcggtgaggcggcgtcggttgtcgtcggcacggccaagtgcgccgactgcacccggaagaacatgaaagctgaggatgctttcaagaacctccaagtggcgatcaagtgcaagaacaccaacggtgagtacgagagcaaggctgccggaaagctcgatggcaccggcgctttcagcgtccccctcgacgccgaccttgacagctccgactgcatcgctcagctccacagcgccaacaacgagccatgccctggtcaggagccatccaagatcgtgccaatgtcggagggcacctttgtcgccattgccggcaagacacactacccatcagcgttgtgcgcgtcagcgaccatctgcggtcccatcaagaagaagatcatagaccacttccacaagaagccggtgccacccaagccggagccgaagccggagccacccaagccgaagcctgagccggaacaccccttcctcgaccatatccacaagaaggagaagcacttcttcgaccacttccacaagaagccagtgccacctaagccagagccgaagccagagcccaagccagagcccaagccgcagcctgcgccggagtaccacaacccgagccctccggcaaagaactgatgaatatgatccgcactggacgtttgatcatgccgtcctgccccctgtcagattgtctgcataataacagtttgagatcgaagtcatgcattagctttcatcgacaggagttttaatttgtacttgtatctatttcttctctatcaaatgcagttatatatggtaagataatttatttatatttaatcagtactgttgtggcggactattcactgtatcagccaaagccattggatcgtaagaggttagcattggttaaagaaaaagttatttttatctgac

SEQ ID NO: 4027 - DNA, 1251 bp, Oryza sativa
  ref <308>: DATABASE ACCESSION NUMBER: AK104623
  ref <309>: DATABASE ENTRY DATE: 2002-08-28
acacctcgcagttcgtagcagcgaataagcgagctccatttgattctttgattacaatggagtccaccaaggtctcggcgatgctcctgctcgccatgctcgcgctctcctcctccccgctcgccctcgcgtgcggctcgtgcggctccggcggtagcggcagtgcaccgtcgggcggcggcggcagcgcgccctcgggtggtggtggtggtatcggaggagtcgtcggaggaatcgtcgggggtgtcgctcccgtcgtcggaggaatcgtcggcaaagttcctcctgtcgtaggaggagttgtcgggggagtagctccggtcgtcggtggaatcgtcgggaaagttcctccggttgtaggaggagttgtcgggggagtagctccggtcgtcggtggaatcgtcgggaaagtccctcccgtcgtcggcggtgtcgtcggaggtgtcgccccggtcgtcggtggagtcgtcggtggcgtcgccccggtcgtcggaggtgtcgcccccgttgtcggtggcgtcgtcggaggcatcgccccggttgtcggaggaatcatcggcggcggcagcggcggcggcggctacagcccgagcccgagcccgccgaagcgacacggcgggaggaaggcgtgcccgccatcgccgacgccgacgccgtccaccccgacgccgtcgtcctcggacacgtgccccatcgacgcgctcaagctcggcgtgtgcgtggacctcctcggcaacgaggtgcacatcggcgacgcccacgtgacgtgctgcccgctggtgaaggacatcgccggcctgtccgccgccgcctgcctctgcaccgccatcaaggccaaggtgctcgacatcagcatctacatccccatcgcgctcaagctcctcgtcaactgcggctgcgacgtcccgcctggctacacctgcgcctaagccatcctcatgcacgtcacgtcccaaaccatgcacgtcacgtcccaagccatgcacgcattcattattctctctcgagtacacagtttagcttcaatcaaattaaggtcggtcgttaatttggtcaaatcggtcgggtgatgaagccactcgcttctgggatgttcaattattcagtgaacttcttttttattggatttgcttttcttgttttgcaatgttaatttgtacatgtagtggctccggaaattgtcatcaattgtactgtatgcatgtattgtaaaactatttaatttaattcccagatgtaactcttgtttgc

SEQ ID NO: 4028 - DNA, 1026 bp, Oryza sativa
  ref <308>: DATABASE ACCESSION NUMBER: AK061518
  ref <309>: DATABASE ENTRY DATE: 2001-12-06
caatcagtacccttgctggagaggttgagaatccaaagagaacactcccaagggcactttcttatgctctagttttagtggtggggggatacctctaccctctgatcacctgtacagcagcagttccagttgttcgggagttctggacggatggatatttctcagacgttgcgagaattcttggtggtttctggttgcactcgtggcttcaagcagctgctgcactgtccaacatgggcaatttcgtaactgaaatgagcagtgattcttaccagcttctcgggatggctgagcgtggaatgcttccagagtttttcgccaagagatctcgctatggaaccccacttattggcatcatgttctccgcgtttggtgtggtcctgctgtcctggatgagcttccaggagatcatcgctgcggagaactacctgtactgcttcggtatgatcctggaattcatcgccttcatcaagctgagggtggtccacccaaacgcctcccgaccttacaagatcccactgggcaccatcggcgctgtcctgatgatcatcccacctaccattctgatcgtcgtggtgatgatgctcgcgtccttcaaggtgatggtggtcagcatcatggcaatgctggttgggttcgtgctgcagccggctctggtgtacgtggagaagagacggtggctgaagttctccataagcgcagaactgccagatttgccgtactcgaacgttgaggaagacagcacaatcccacttgtgtgctgacctgcatatgcatgccatgaaagtagaatccccaaccatagccatgctagacggaaggaacactgcgatttgcgacttgtttcgtctcacggcttttcaaagcctcttcatctgccatgtataattagaagagaagcaagttcaaaattgtgatcatgctatttgtataccatgttggcgtcagggaggattgtaaatcccagggccagtttgaggaaaatacttcacttggctattgccaatagcacctggttattcgttc

SEQ ID NO: 4029 - DNA, 1326 bp, Oryza sativa
  ref <308>: DATABASE ACCESSION NUMBER: AK061519
  ref <309>: DATABASE ENTRY DATE: 2001-12-06
ctttgtgagaagacatcatataaggcgggaccggcctagaattccagaagcccgagaattccatggaatgagcagtcaattagtcaaggcaatgccaagccttatcttcacgaaggtgcaagaggacaactgcacatcatcaatgtgtgccatttgcttggaagactacaatgtcggagaaaaattaagagtgttgccttgccgtcacaagttccatgcagcttgtgtggacctttggctcacaacttggagaactttttgccctgtatgcaaacgtgatgcaagtactggaataccagatcctccagcctcagagactacaccattgctttcttctgcagttcgtttgccttctcagtcatcttcgttccggtcaagcgtggcatcatcgcctccaagaccaataagtcgacgaccttcatcacagtccatatctcggatttatgctgcttctggtacccccaactctcctaaccccataaggtctttcacaaactcaactgccatgagcataagtagaagcaatgtggacttatcaaacatgtcttcccgccctcgcgcctcacacctcgcctccgcacattctttggttggcagtcacttgtctccaccaatcaatataaggtacgcatcgccgcatatgtcccactctggctatgcatcacctagtccacatgttagctcatcctatgtctccaactctgggtatggatcttcaagctactatctcggttcatccagccagcatcggtcatacctaaggcgctgtggggaatcagggcctagcttgtctaccatggcccctcagtcgccgcaacagtcccagttacgtcatggcggcgaatccgacttaaatctagcaggagcatcctcaggccagtctttccggcaatcctacctgagacactgtgctgattcagaggtaaatctagcaggagcatcctcaggccagtctttccggcaatcctatctgagacactgtgctgattcagatgcaagcttatctgccatggcatcagctcaatccttgccaggatgctgatttctctgggatcagatcagcttctgtctgtactaagacctggcgtgacttgtgtatacatttgaggcatgtactataggctattggttgagagaaaatggtcgtatttgtttgtgtttctcctgctgccctgcccttttggttgtagtgattgttagcgctctatttgtttcaccctagagtgtatagtacaattgtacagcaactttcttttaaactaagcaatatcatccgcgcgttgcccataaaaaaaaaaaaaataaaaaaaaaaaaaaaaaataaat

SEQ ID NO: 4030 - DNA, 1051 bp, Oryza sativa
  ref <308>: DATABASE ACCESSION NUMBER: AK104624
  ref <309>: DATABASE ENTRY DATE: 2002-08-28
acacaacctcttcaatactctcactgcaatttctggagctcacactgcatgcgccggccaataatggcgacgacgacggcgaggttgctcctcctgctcacggtggcgggcttctgcctctgccacaccacctgccaggaggcggcgccgccgccgccgccgtactgcggcagcctgaggacggccgtggaggcgcggaacatcatcgggtggaagacggtgccgccgccgtgcgccaagtacgtcgccgactacatcaccggcgagcggtacggccgcgacgccgacgtggtgatcaacgaggccatcgcctacgccgagagcctcaagctctccggcaccggcaaggagatctgggtgttcgacgtcgacgacaccgccctctccaccgtgccctaccaagccaaccatggctacggagttcaaccgttcgacaaccagagcttcctcaagtacgtggtgcagggaagcgcgccagcactgcagagtacactgcggctttaccgacggttactccagcttggtataaagccggtgttcctgacagaccgcaccgaggaccagaggacggtcacaaccaacaaccttattaagcagggctactgcaattgggagaagcttgtgctgcagccggttaggcttcagacctcgacgttggcgttcaagacctgcgaacgacagaagctggtgaatgatggctacatcatcgtcggcaacattggcgaccagtggaacgacatccgccgctcgccggatggttgccgcacctttaagttccccaaccccatgtactatgtcgactagctagctagctatccatggatatataccttgtttgtgtctgtttcatctactcgttttttgtcatgaatttgcatctagtaattaatctttgacgcgtgcatatgtttgatatgtttgttaatttttcgtgagatgaaaattgaatttgtaataacgcttgtttggcagttggccattgattggtcaatgtactgtgttgagcaagcttgttgtatttttacagaattaataatggaactgatgggcc

SEQ ID NO: 4031 - DNA, 1127 bp, Oryza sativa
  ref <308>: DATABASE ACCESSION NUMBER: AK104625
  ref <309>: DATABASE ENTRY DATE: 2002-08-28
atccattccatccgcgacagggagcgtagcatgcaggtgcagatgcagatgcagcaggctaccaccgttctcagcagcagcagcaaccggccttggacgctgtggtgccatcctgtcccagtagtctcctccccatcccacgccaaaaataagaagcatggcctccgactccgagcaggcatggccatggcctcctccgagcttcctgacctgagcgcaatacaacgcgtggtgctggacatcgagggcaccacgacgcccatctccttcgtggcggacgtgctcttcccctacgcgcgcgacaatgtccgccgccacctggccgccacttacggcagcagcgaggagacgcgcgctgacgtggccctgctgcgggcgcaggtggaggaggacctcgcgcagggcgtcgacggtgccgtggcggttccgccggatgcggaaggggaaggggaaggcgccgtggtggaggccctggcggcgaacgtggagagcatgattcgcgcggacaggaaggtgacggcgctgaagcagctgcaggggcgcatctggcggcggggcttcgacagcggcgagctgcggagcgaggtgtacgacgacgcggcggacgcgctgcggcggtggcgtgccaaggcctacatctactccagcggaagcagggaggcccagcgcctcatcttcgccaacaccgctgcacacggcgatctccgcgaccacctctgcggattcttcgacaccacaataggggccaagcgcgaggttagcagctactacgagatctggcagactctgggcacggaccgcccctcccagatcctcttcttgacagacgtctaccaagaagccgctgcagcaaagactgcaggccttgaggtgataatatctgtcaggcctggaaacgcacccctccctgataatcatggttttcacacaatcacatcattcgctgaaatctccatctgaacctagccagaaatgtcttgtactatacaatctgatccgaacaatattctaccgtacgctagcagcacagttagcaaatggtttggttaggtttaaggcaagacaatctggggtgtaaataaatgtgtaatagtcccaatcaagctaatactatcatgctcccattc

SEQ ID NO: 4032 - DNA, 1132 bp, Oryza sativa
  ref <308>: DATABASE ACCESSION NUMBER: AK061520
  ref <309>: DATABASE ENTRY DATE: 2001-12-06
ctccctttcttctctcgccgccgagagacacgaaaaagatggtgggtgtatagctacatattcacgccacaccgcatcgtcatctacacatctccacctcccgcggcatcaccactcactccaccgccgcgcgcttgttcgcagctcttcctcctcctcgcattgcaggcggctgccgactgaatcaagatgaagcggaccatcatcgtcaaagtggacttggaatgcgagcgctgctatgccaagatcgacagggtgctcaccaggatcagagacaagggtgagttcgtcatcgacgacatcgagttcgacgtgaagcacaacaaggtgatcgtgtcggggcccttcgacccggacaagctcgcagacaagctctgctgcaaggcgtgcaagatcatcaaggagatcgagatcgtcgacctcccgccgccgcctccgccgccggcgccggagccggagccggagccacccaagaaagaagagccccagccaccgcctcctaaggaggaggagaagcccgagccgccgccggcggtgattatcgtggagccaccggcgccggcgcccgagccggagcccgagccgccgaagaaagagccgccgccgccgccgcctcccaagcaggagccatgcccgccgccgcccaaggtcgtcgaggtcccttacccctggccctacccctacccgttcccgtcgtggccgtccgactgctgctgccaccatggccacggcggctgccactgctgctcctgcgggaaggcgccggagccggcgccggcgccggcgcctccgccgccgcagtacatcccctgctacccgccgcagcagccctacccttgcggcggctacaggatcgtctgcgaggaggacccctcctacgcctgcgccatcatgtgacctaatgatcatcgttatcttctccttaattaccttctccgatctctcctcctgtataattaagcacgcaccgtacagacacgcacatatatactacacatcctacacgtactcctctttatctactcttatacactccctctgtaactgttgatttccttacgtcccatttagaggtgaaaaataagtaagtatatatcgtcattaataaacagtcccaagtaaattcatgtac

SEQ ID NO: 4033 - DNA, 1401 bp, Oryza sativa
  ref <308>: DATABASE ACCESSION NUMBER: AK104626
  ref <309>: DATABASE ENTRY DATE: 2002-08-28
atacaacgatttcctcttgtcaccctgaatctacttctgctgcaaaagcaataagcaaggagcagttagccaggtaaagctctagctagctagcttaggcagcaatggagcagcatcagggccaggcaggcatggacttgccccctggcttccgcttccacccgaccgacgaggagctgatcacgcactacctcgccaagaaggtcgccgacgcccgcttcgccgccctcgccgtcgccgaggccgacctcaacaagtgcgagccctgggacctgccatctctggcgaagatgggggagaaggagtggtacttcttctgcctcaaggacaggaagtacccgacggggctgaggacgaacagggcgacggagtccgggtactggaaggccacggggaaggacaaggacatcttcagacggaaggccctcgtcggcatgaagaagacgctcgttttctacacggggcgcgctcccaagggggagaagtctggctgggtcatgcacgagtaccgcctccacggcaagctccacgccgccgccctcggcttcctccacggcaagcccgcgtcgtccaagaacgagtgggtgttgtgcagggtgttcaagaagagcctcgtggaggtgggcgcggcgggagggaagaaggcggccgtggtgacgatggagatggcgaggggagggtcgacgtcgtcgtccgtggcggacgagatcgccatgtcgtccgtcgtcctccctccgctgatggacatgtccggagccggcgccggcgccgtcgacccggcgacgacggcgcacgtgacctgcttctccaacgcgctggagggccagttctttaacccgacggcagtacacgggcacggcggcggcgactcctcgccgttcatggcgagcttcacgcagtacgggcagctgcaccacggcgtgagcctggtgcaactcctggagagctgcaacggctacggcggcctcgtcgacatggcagcgtccggcagccagctgcagccggcggcgtgcggcggcgagcgggagaggcttagcgcgtcgcaggacaccggcctcacctccgacgtgaacccggagatctcgtcatcctccggccaaaaattcgaccacgaggccgcgctatggggctactaaggtttgatatgatcagcgccgtgtacgttaatcgcgggcgattagcgaagtagcgattactgtaaataaaaccatgagatcgcgatcgaggcatctaccaaggttcgcttaatttgcttgtacctataggtgtagattatttggtgatttgggagatgtaattagcattgtttgtttgtaattcgtatcagaatgatcgatgcagtattgtttggagggttagttaagcaattggccactcctcagttgccagttaattagttag

SEQ ID NO: 4034 - DNA, 1462 bp, Oryza sativa
  ref <308>: DATABASE ACCESSION NUMBER: AK061521
  ref <309>: DATABASE ENTRY DATE: 2001-12-06
gatgtatgaagaggcaagccaagtggcaaatgatgcagtgagcagcataaggacagtagcctcattttcagctgaagagaaggtaatggatttgtacaagatgaaatgtgaaggaccactaagaacaggaatcaggacggcgataataagtggtatcggtttcggtgtttctatcttcctgctgtttggagtctatgcagccagcttctatgccggtgctcggcttgtcgaggacaggaaaacaacatttcctaacgttttcagggtgtttcttgctctcacaatggcagcaattggggtgtcacacactagcaacctcacatcagattcttccaaggcaaaatcagctgtatcttctatattcgccatcgtagaccgtaaatctaggattgatccaagtgatgatgctggagtgagcttagaaccactaagaggcgatatcgagttccagcatgtgagcttcagatatcctacacgaccagatgttcagatctttgaagacctgtgcttaacaattcaatctggaaagactgttgctcttgtcggagagagcggtagcgggaaatcgacagcgatatcattgcttcagaggttctatgatccggatgcaggccatatacttctagatggagtggacattcaaaagtttcagctaaggtggctaaggcaacagatgggtctagtgagtcaagaaccagctctgttcaatgacacgattcgcgcaaacatcgcgtatgggaaggaaggggatgcgacagaatcagacatcgtatcctccgcgcaattggcgaatgcgcacaagttcatcagctcattgcatcagggatatgaaaccatggtcggggagcgtggagctcagctatccggagggcagaagcaacgcatcgcgatcgcccgcgccattgtcaaggatcccaagatcctccttctcgatgaagccacgagtgcgctcgacgcagaatcggagcgcgtcgtccaagatgcgctggaccgggtgatgatgaacaggaccacggtgatcgtggcacaccggctgtccacaattcagggcgcagacatgatcgcggtggtgaagaacgggatgatcatcgagaaggggaagcatgatgcattgatcggcatcaaggatggagcttacgcctccctcgtcgccctccatgtttctgctgctgccatttcgtagcagatctagcagacgccatggatgaaaagatcatggtttgttgctgaatctgtgagaggagcaagagactggtgtaactgtagcttgtgcaggctccagctcttgtcatccagcagcagcagcagaagaagaaaaatttgatgaacacaaatatgtcatgtatacatagatagataagatcatacaaagatgtgcaaatgtaaatgcaacgagttgtatgaatgaatgttcatatgatatgaagcagatgatgatgatgatatggatattcattggcat

SEQ ID NO: 4035 - DNA, 936 bp, Oryza sativa
  ref <308>: DATABASE ACCESSION NUMBER: AK061522
  ref <309>: DATABASE ENTRY DATE: 2001-12-06
ccctcttcgcctctcctccgccggcgccgcccctgcccaaaccctagagtgttgttgagttatcggccgcaaacatgagtaagttacaaaccgaggctctcaaggaagccatctcccaggttgttgctgattgcaaggaaaagaacaggaagttcaccgagaccgttgagcttcaaattggtctcaagaactatgacccacaaaaggacaagcgtttcagcggctccgttaagctgccccatatcccccgccccaagatgaaggtctgcatgcttggtgatgcccagcatgtcgaggaggctgagaagattgggctcgactacatggatgttgaggcccttaagaagatgaacaagaacaagaagcttgtgaagaagcttgccaagaagtaccatgctttcttagcatcagaggccatcatcaagcagatcccccgtctccttggtcctggtctaaacaaggcaggcaagttccctacattggttactcaccaggagtctcttgaatccaaggtcaatgagacgaaagctacagtcaagttccagctgaagaaggttctgtgcatgggtgttgctgtgggtaacttgtcgatggaggagaagcagatccagcaaaacatccaaatgagcgtcaacttcctcgtgtcccttttgaagaagaactggcagaatgtgaggtgcctgtacatcaaaagcacaatggggaaaccgtacagggtgttctaagctggtttgctccacattgaagctgataagatgctgggcggttgaactgagcttgtccttacattagatctgcttgcactgatatcagttttgtgcttacccaagagaacatcgagatatgttatcatattttgtagtagtttattcagtgcacttcggatttatgcaaatgaggcttgtgttatttatgaatagtttcgttcatggggag

SEQ ID NO: 4036 - DNA, 1327 bp, Oryza sativa
  ref <308>: DATABASE ACCESSION NUMBER: AK061523
  ref <309>: DATABASE ENTRY DATE: 2001-12-06
agtgagcagctgccgacggaaagaagccatcattaggcaccaaatgcagcatgcacatgcttagcagcatcagctgctgccggccaggggagacaagaaaacagaggagaagaagaagaagaagaggaaagccatcgtcatcatcgtgtcgtgattagaatccggccatgtcgacagcagaagcagccgtgtggaggggccatggcagcagcaacatcacgcggcaaatcctcaagtgcacgaggtggcagctggaggagaccacggacttcatcacatgcccctaccactactactgcgacagcgcctaccccggcgactactcccccgccgtcggcgcgctcgtcgccgccttcgccgcgtactgcctcgtttccgccgccgcattcgccgtactggacatcggcagggccggcggcggcggcgggaggaataggcggaagtacatggtgccgtcgggcccattcttgctgccggtggtgctcctggcgctcgccaaggggcagcggatcaacgccgtgttcccgctcgcgcagctcggcccggcattgctgctgacgctgcaggcgtcggcgctggctttccggaacgaggccgacggcgacctccggtacgcggtgctggaggcgtccaccgtgtccgggatccttcacgccagcctctacctcgacgccgtcgttctgccgtactacaccggcaccgacgcgctccggtggtcgcggttctccggcgagtgcgccacatgcctctgccggatggacccgctcgtcgtcggcggccggacggtgctctaccggggcctgtccaagacggctctcgccatcatcttcgcgctctgctcccggatggtgtgccggatctacggcgaggagcgggtcagcgcgtggacgcggtcggcgctggaggccgcgagctgggtgttcgtcgccggcgacgccgtgtacctcgccgggtgggcgttcgcggagggcgccgcggcgagcgtcgcggcgtacgctctcgtggccggcctggtgttcctgtgcatttttggtaaggtgtacaagttcttggcttggatggagacgaggcaggtgcagtggaaaccaagcgtcagctgccacagtaatgtggtttgatcattaatttcttttcttttttcgttttttggatcgagttgtttctttctttgattcacaggaaattgtaaagcataaatgcataataacccattaattcaggttttgtgtgtataacaaggaaaagagatttaacactgcatatatgctgtggagatttgcatttctaacgtattccgcaaaactctggagattttttatgactgtct

SEQ ID NO: 4037 - DNA, 1043 bp, Oryza sativa
  ref <308>: DATABASE ACCESSION NUMBER: AK104627
  ref <309>: DATABASE ENTRY DATE: 2002-08-28
aatcccaatccacctgagcgagagagagagaaagggtctcctcctcaacatcaacaatggcggtcgcaacctccttcgccacactcgccatcgcgcggccggcggcggagcgggccctcctcgcctccaaaaccccctcgccgctcctctccatccgcaccggcaccggcaccgcacgcctcccctcatcggccgtctttggaggtttcactcctgcgctttccgctgctcacagccgcgcgcgcttcgtctcctccgccaccgctgaccccaaggaagtggacctccagtccaaaatcacaaacaaggtgttttgacataagcatcggaaaccctgttgggaagaacgttgggagggtcgttattggcctatacggggatgatgttccccagaccgcagagaacttccgtgctctttgcactggagaaaaagggtttggttacaaggggtccagtttccaccgtgtcattaaggacttcatgattcagggaggagactttgacaagggcaacggtactggagggaaaagcatatatggccggaccttcaaagacgagaacttcaaattggttcatactggacctggagtggtcagcatggccaatgctgggccaaacaccaatggcagccagttcttcatctgcactgtcaagacaccttggttggatgggaggcacgtcgtgtttgggcaggttattgaaggcatggacatcgttaagatgatcgaatcgcaggagactgacagaggggaccgcccgaagaagaaggtggtcatcagtgagtgtggggagcttccagtggtctaataggtgccagagggctaatcttcttcccccggagactttgctgtttttggtttcatagtaagctgtgaacttatcgcatgttctccgcgcagtcagagatcatgctgagttgaggccaagatttctaagttgagaagaatcctctattgttcggctggaataaaacgttcttacctgtcgagggtcaggaaataatgttgtggttcatgaaagatcaaatgtctgtcttttcgtgc

SEQ ID NO: 4038 - DNA, 1602 bp, Oryza sativa
  ref <308>: DATABASE ACCESSION NUMBER: AK104628
  ref <309>: DATABASE ENTRY DATE: 2002-08-28
gtatgcatttcatcgaacaccttgcgatcaccctctcaccaccgctagagatcaccattgtgaggctccccggccggagcaggaggttagagggagtggaggaagagccgtgctgccgccgtcgccatgggggaagccgggtagccgctggacatcaagaaacgccgtcgagcaccttacgtcgctgccgtttgcccctgtcctgcaccgcgtcgagctccacttcgctgcgtttcgccatctcgccatctcgcgaaattgtgtatcgattagtggtgaggcaacgtatgcagcttccaggaggtgaaggttgatcaagattataccaagaataagaactatcctgagcaggtctagacagtgacaccggggggcgccgcgtcagtcaggtgatcatcagcgccccctcagcgacgggcgagatctcgatccccctttgcgagaagggaacggccgaacgcgccgctgcgatcaatgctctccctctgacggacgtaatcgggccactcatggaccaccaggcggcagcgtcgttgaaggagagcatcgccaaggaggcctctgacgctgttgctgccaccacgagtggtagcaacgtcccaaagaggggaaggaaattctcctccgtacgagggacccgtcggaaagcgaaaaactctacggactcggacgcgtctcctccaccttagcgaaggcaaaggttggtgacgatcggtgagaaggcggcgcgggcaaagacggcacaaggtgggactgatgccgctttcagcgtgtcccctgcggcgacctcgctactaaggaccaggaggcggcacggagtggccctgctgtcagcctcatgcctacccgaggcccgtccaccgatgccctcacctgggaggagctccaagcggagatggagcgcatcctctaggccggtgctcgcggcgtaggtcacgagatcgaggaggccagggcggcggcgtcatcggcaaaccaacgtgccgactagctagcgagcgacctggccggaggcccacgaggacctcctaaagatgagggagctagtggccggcaacgagatgcagcggcgcggactcgagcaccggatgtccgagctcgagggccacatgatcgacatctgcggttcgctgcgaacgtcattcaccagcctgcaccaactcgccggggagtgtagtgtcacgactaccatcccggcgcatcccgatgagttctcgctgacgtcatcgcttgtggagctggctacggcgatggaggagatcacatccaagcacgcggctaggatcggggaggagacgtccaacggcatctacaccggggcgtgccatgtccttgcgtgcatgaggctggcatatcccgatctggaccttaagaaggctttggatctgggggccgctgatgacgcacgcaaggatacgatggaagaagtcggtgacttgggggagtccgtcctcccccttttttgaagagtaggacatttgttttcccttgtaccccttaaccttcatgctgtaaaacttgtctatggatccgaactattcttatctgaacaactgtctgatggtatttcttaacgacattactagaaatataattcccagc

SEQ ID NO: 4039 - DNA, 1487 bp, Oryza sativa
  ref <308>: DATABASE ACCESSION NUMBER: AK104629
  ref <309>: DATABASE ENTRY DATE: 2002-08-28
gcacgcccgcgccaccacaaaaccctagccgccgccgccgccgccgccgccgccgccatggccacccaaacccgccccctcgtctccgtcaaggccctggagggcgacatggccaccgacaacagcagcagcctcgccctcgccgaggtgttccgcgcgccgctccgccccgacgtggtccgcttcgtccacaggctgctctcctgcaacaagcgccagccctacgccgtgtcccgccgcgccggccaccagacctcggcggagtcgtggggcacggggcgcgccgtgtcgcgtatcccccgcgtccccggcggcgggacgcaccgcgccgggcagggagccttcggcaacatgtgccgcggcgggcgcatgttcgcgccgaccaagacatggcgcaagtggcaccgccgcgtcaacgtccacctccgccgcgtcgccgtcgcctccgccctcgccgccacctccgtcccgtccctcgtcctcgcccgcggccaccgcatcgagaccgtccccgagctccccctcgtcatttccgactccgccgagtccatcgagaagacctcccaggccatcaagatcctgaagcaggtcggcgcctacgccgacgccgagaaggccaaggactccgtcggcatccgccccggcaagggtaagatgcgcaaccgccgctacatcaaccgcaagggccccctcatcgtctacggcaccgagggatccaagatcgtcaaggccttccgcaacctccccggcgtggatgtcgccaacgtcgagcgcctcaacctgctcgacctcgcacccggtggtcacctcgggcgcttcgtgatctggaccgagagcgccttcaagaagcttgaggaggtgtatggcaccttcgaggcgccgtcgctgaagaagaaggggttcatcctgccgaggcccaagatggccaatgctgatcttggcaggatcatcaactctgatgaggtgcagtctgtggtgaagccgctcaacaaggaggtcaagcgcagggagaagaggaagaacccgctcaagaatgtcgccgctgtgctcaagctcaacccctacttcggcactgcacgcaagatggccacccttgctgaggctgcccgcatcaaggccaggaaggagaagcttgactccaagaggaccaagcttagcccggaggaggctgctaaggttaaggctgcaggaaaggcatggtacaagaccatgatctcagacagtgactatgctgagttcgacaacttctcgaagtggctcggagtgacgcagtgagcgttgtcttgttttaagttttgagtagcagcgttaccggatcttatctcaaggatttatcaatctgtttttacctgaacatctccataagaagttatctgtgggattttgagactagtttctctgttttgttaatgtgctgtcgtgagaacatagagtatgtggtttggaccagctatctaaattatgtatgcacttccatgttctctgtg

SEQ ID NO: 4040 - DNA, 1039 bp, Oryza sativa
  ref <308>: DATABASE ACCESSION NUMBER: AK104630
  ref <309>: DATABASE ENTRY DATE: 2002-08-28
atatgcaaacctctcctacctcacactccaccctagctagcccactacacctcctacaccctcaccatccaatagcgcagtgacagtgccaatggcctctcacaccaccctcatcctcctcctccctctcctcgccgccgcggccgtcgccgccgcggacgtcgcccctgcgccggcgccacctgcggcgcagacgatcaacctcacgggcatcctcgagaagggcgggcagtacaacacgctgctccgcctcctcaacgccacccgcgtcggcgagcagctgggcagccagctgaagaccacctacgacggcctcaccttcttcgcgccgacggacgccgccttcgccgcgctgaggccgggcacgctcaacggcctgagcgaccaggagcaggtgcagctggtgctctaccacgtcctcccgcgctactacaccctcgccacgttccagacggccagcaacccgctgcgcacgcaggccacgggccccgccggcgtgtacaccgtcaacgtcaccaccaccacggggcagagcctcgtcaacgtgtccaccggcgtcgccgccgtccccctcggcaccacgctctccgccgacttcccgctcgccgtctactccgtcgacggcgtgctcctgccggagcagatgttcgggaaggccaaggctcccgcgccggccgccgcgcccgcgtccgccgccgggaagggcgccaataaggagcacaagaagggcggcgccatgcccaagaatgaggtcgcggccaccgcgccgacggccggagctggaggagaagattcagatgacagcgccaccaccaatgcggtggccgttgcaggcgcggccggtgtggtgtggactgctgctctcgtggggattgccaatcttgtcatcgcgtagaaagtgtgtgcttgtctttttctccttcgccgttttctttcgttttcgtcgttgcatatgtttcattgcacgtgtcctattttgtatgtatgcaagagtatttatatatgttgatgatgattcactcagtgaaatttactggct

SEQ ID NO: 4041 - DNA, 1187 bp, Oryza sativa; identical to SEQ ID NO: 3690
  ref <308>: DATABASE ACCESSION NUMBER: AK104631
  ref <309>: DATABASE ENTRY DATE: 2002-08-28

SEQ ID NO: 4042 - DNA, 1624 bp, Oryza sativa
  ref <308>: DATABASE ACCESSION NUMBER: AK104632
  ref <309>: DATABASE ENTRY DATE: 2002-08-28
atcatagacgattttatcgatgaacctgaaatagacatggcttgccacttgagattatttccctttactcaactactagtattggttctgtacaaaatcgccgccgtaggggcagatcctgcaaacgcagaactatccacaaagatcacccaacactctccattgtacaacccacagcctcaagactttccaaacgaggagctctaccgcaactatctagtcatccagcggttcaagaagacaatcacttccgaccccaagaacatcaccgccacctggaccggccatgacatctgcggcaacacgacctacctcggtttctactgtgcagcattgcctgggcgtactaagaagcccacggtcactgtggtgatctttaacggttatggcctgcgtgcaccgaagctggaaggatttattgaccatctccccgatcttgcacttttccatgctgcctccaacgacttcggtggtgacatcccctacctcacaggcctcgcctacaactacaagatcaatgtcgacagcaatctccaaatacaggatgattttagtcgtgacatggtcgggtcgcatgtaacaactaaagttcatggttattgcgttaatttagatctagatatcacatttcacctccggcccggaaaagacgacaagaaaggacgaagcatccccggtgccacagattctaaggcgctcctcctcaactacaatcacctgtccgggccattaccggtgaacatcggtttctccaagttaagctacctggccctcgccaacaacaggctcaccggcgcaatcccgccatcaatcttgcatttgcaagactccctcctcgaggtgctcctcctgaacaaccagctctccggctgcctcccccacgagctcggcatgctcaccaaggccgcagtgttcgacgccggcatgaaccagctcaccgggccgatcccctcctctttctcatgcctcaccagcgtcgagcagctcaacctgggcggcaaccgcctctacggagagatccccgacgcgctctgcaagctcgccgccgtcccagccggccgcctcgccaacctcacgctgtcgagcaactacttcacgtcggtcggaccggcgtgcttgtcgctgatcaaggacggcgtcctcaacgtcaggaacaactgcattccgggcttcgccaaccagcggcggccggcggagtgcgcgtcgttccacagccagccgaaggcgtgcccggcggcgagcgccacccacgtggcgtgccccgccggagctgccaacgctgcggcggcgccggcggacagggtggtcaaggactactccagctacgtgacgtacgccaccctgcacgagtgagcccggcgccacggcacgggcgcacgacgtgcgtgcatgcatgcagtaggggacagctagaagctagcgtctcggggtggtatttgctcttgtattcttgtgttcgtttgttgtgctcgtgagtcgtcattgtggtttgttttctctgcacgtgtggctagctatggctgtcacgtctagatctcacctcctgtactcttgtgtactgtactatgtgaaaatcattggtgattactaaagtttggtgtgtgccctgccctacatgtttgat

SEQ ID NO: 4043 - DNA, 1382 bp, Oryza sativa
  ref <308>: DATABASE ACCESSION NUMBER: AK104633
  ref <309>: DATABASE ENTRY DATE: 2002-08-28
gcttcttcttcttcttcttcctctctggcggtggtggtggtggcggcggcggtggcgctggtcgccggcggcggcgcggcggtggcgcagctgtgcgaggagtactacgactgcacgtgccccgacgcgtacgacatcgtgcggcgggtgctgatcgatgcgcaccggagcgacgcccggatcttcgcgagcctgatccggctccatttccacgactgcttcgtgcaggggtgcgacgcgtcgctgctgctggacagcgtccccgggatgccgtcggagaagacgtcgccgcccaacaacaactccgcgaggggattccccgtcgtagacgacgtcaaggccgcgctcgaggacgcctgccccggcgttgtctcctgcgccgacatcctcgccctcgccgccgagatctccgtcgagctgtcaggtgggcccgggtggggagtgctgctggggcggctcgacggcaagacctccgacttcaatggctccctcaacctgccggcccccaccgacaacctcaccgtcctccgccaaaagttcgccgccctcaacctcaacgacgtcgacctcgtcgccctctcaggtgggcacacgttcgggagggtgcagtgccagttcgtgacggacaggctgtacaacttcagcaacacggggaggccggaccccaccatggacgccgcctaccggagcttcctgtcgcagcggtgcccgcccaacgggccgccggcggcgctcaacgacctggacccgacgacgccggacaccttcgacaaccactactacaccaacatcgaggtcaaccgcggcttcctccagtcggaccaggagctcaagtcggcgccggaggcgaccgggacgacggcgcccatcgtcgaccgcttcgccaccagccaggccgccttcttccgcagcttcgcgcagtccatgatcaacatgggcaacctctcccctgtcactgacccttccctgggtgaggtccggaccaactgcagaagggtcaattaattatcacttcatgtatgacgttggttagtttaaaattgaagtaaccaacgtcatcatgtcaaacataattaattacgtatgtgtcgattattattgttgttattattagcaaaatgagagagatttatttgtgcatagttaattaagcgcgcttgcatttgtgagaaatattagtagtccagcttaattaatcaaggagaagaggatggaaaaaagaatgtacatgtgttcaatttggatgtgtgatcaaggatctattatgatcacgcgcatccagcttaataattggccaattggttgaccaatgtaattgtacgtaccatgattgtgtttgttccaaattaaaggtgcaataaacggtttacatgtttgattcc

SEQ ID NO: 4044 - DNA, 1261 bp, Oryza sativa
  ref <308>: DATABASE ACCESSION NUMBER: AK061524
  ref <309>: DATABASE ENTRY DATE: 2001-12-06
gggagtggcaaatgacgagactacccctcctcctccactcgccccgcttcgccgccgcactgaccacgccgccgccgccgccgctgccaccggcgcgccgcctcgtcgccgccgctgcaggaggagacctatcgctcgcgatgtcggcggcaaccggggagtacccggtcccggtctcccctccctacccggcggcgtccaaggacgtggagctccggcgcgccatgacggcctcggcgcgctccgccgcctactcctccgcgcccgtcgtgttcgaggacgagtggctcgccgtcgtcgacaagcccgcgggagtctactgcgacgccctcctctccgctctcccttgctccgctgccacattaggggatgaagcaactaaacctaaccttcacctcgccaacaggctagaccgtgataccagtgggctcatggttattaccaaatgcaataaggttgctgggaagctagtgaaggcgtttacagagcacaaagttaagaaaacatatctagctctttgcataggttacccaccagcatgggagaagattaagatatgctctggccatggtcgatcaaaacatggtgcttggcgtgtgtacgctatgtctgatgttggacgatcactaccagggggttccgttgtacgcgacatgagtacacgatttgaagttctgggaatcaatggcaagggacagtttagagaaccatctaattttgaagttgatgaaacagagtctattaccgtacaagagaaggcagctgacctgacttcagatggtgatgagaagaacagcataattttggttagagcctatcctcagagtggacgaacacatcagattcgtctgcactgtcagtatcttgggttccctatcagaggtgatgtgaagtacagcggagttattgagtggaatggtgtggattatgatggccatgcattgcatgctgagagcttgtcatttgtacacccagtcactggattgccagtcaccttccggtcacctctcccttcatgggcgaatgaatttatttcgacgatggcataagttctttcaacgttattatgaacttgtggatgcattgcctcccaattgatgctgattttttattttttaaccaagagcacatccctaaactgtcgaaagcaactcttggagctatcttcggggagaagtattggtcagtgcccagttgtcatataacaatctcctccagcaaaacagtgccttcttggtcgttgttcgtggaaaaaaaaaat

SEQ ID NO: 4045 - DNA, 1089 bp, Oryza sativa
  ref <308>: DATABASE ACCESSION NUMBER: AK061525
  ref <309>: DATABASE ENTRY DATE: 2001-12-06
aaatcccaattccccatctggctcgctcgacatcttcttcactcctcacttcccccactttctctactcctagcatagcagcctcactttccctcctcgatcgaagcagcaggcggaggcggaggggatcggcgatggagcagcaggaggaagtgccaccgccgccggcggggctggggctgacggcggaggagtacgcgcaggtgcgggcgacggtggaggcgcaccaccgctacgccgtggggccgggccaatgctcctccctcctcgcgcagcgcatccacgcgccgcccgccgccgtctgggccgtcgtccgccgcttcgactgcccccaggtgtacaagcacttcatccgcagctgcgtcctccggcccgatccccaccacgacgacaacggcaacgacctccgccccggccgcctccgcgaggtcagcgtcatctccggcctccccgccagcaccagcaccgagcgcctcgacctcctcgacgacgcccaccgcgtcttcggcttcaccatcaccggcggcgagcaccgcctccgcaactaccgatccgtcaccaccgtctcccagctcgacgagatctgcaccctcgtcctcgagtcctacatcgtcgacgtccccgacggcaacaccgaggacgacacccgcctcttcgccgacaccgtcatcaggctcaacctccagaagctcaagtccgtctccgaggccaacgccaacgccgctgccgccgccgccgctcctcctcctcctccaccggcggcggcggaatagcctttttcttttctttttggacctctctgcaatttcacttctattcagggaggtgcttcgaatttgctccatgtctcatgaagttggaggaggaagggtcagcttctaatacatctcattcctggtggtgctgcctgtaataatctcttcatcttcttttttcctctcctcctcctcttctcttcctggatttcttttgcttggaatttttacttacctttgtgtgtgtgtctcacttcctgattggaatccatatttgcttttcggtggttttgttcttcattcaaattcaaattaatctatctagcatttgttc

SEQ ID NO: 4046 - DNA, 1024 bp, Oryza sativa
  ref <308>: DATABASE ACCESSION NUMBER: AK104634
  ref <309>: DATABASE ENTRY DATE: 2002-08-28
aacgaacagaacacacacccactgtgctcatggcttcctcttcctcctcccttggccttggcgccatcttccaaagcggctgccccctcctcccgcctcgccccgccgtccgccgcgcgcccaccaggcgccgcgccgtcgccaccaagatctcctgcatcggatgggaccccgagggcgtcctcggcccgccgcagggcggccacatcgtgcgcctcgagttccgccgccgcctcgagagggactccgacgcccgcgaggccttcgagcgccaggtccgcgaggagcacgagcgacgccgccaggagcgcgaggcgcgggtcatccctgacacggacgccggcctcgtcgagttcttcctcgacacggaggcgcgcgagatcgaggtagagatcggcaggctccgccccaggctcaaccagcccttcttcgactacatccagcgcgagatcgcccagatcaagttctcaatcacccgaacagcggaaatggaggaccgattgatcgagttggaagcgatgcaaaaggttctgcttgagggagtggaggcctatgacaagttgcaaaatgaccttgtcagcgcgaaagaacgcctcacaaagatcctgcaatcaagcgacaaaaaatcgacacttcttgaaatggttgaacggaatgagctcaacatgtccatactaacactcctcgatgaaaatatagcaagcgccaagaccaacaatcaggaagaagctgtggctttcatggagaatgttcgctcatccatcctgaaatatattacagtatgaaattggtaggcatgtggacttagccctgtcacatggttatcaaaattaggtcatgaacctgtaatttgcaaggacatgtcacatattcaagggtctgattatgtttctctcttgtatttagttattgtgttccatatatgctcatgtcagtgtcaatagttttttggtaaagagaaattgtacaatcatatacttgtaccaccaacatatacttgaaccagtttcctggttggacagct

SEQ ID NO: 4047 - DNA, 1019 bp, Oryza sativa
  ref <308>: DATABASE ACCESSION NUMBER: AK104635
  ref <309>: DATABASE ENTRY DATE: 2002-08-28
ctcggcagcggctgcgcgttcgcggccgcggccagctccgcgttcccgccggccaccgtccccggcgggatattcgcggggaggaggaggaggaggccggcgaggctggttcttgcgtgggcgagctcggatggctcggacggtggtggtgccgccgctggtgcagtggcggccgaggcttccgctgtgggagagagcaaagaaggggaggtggccagtggcggaggttcttccgctgagtcgtcggcggagaagaagccggctcctgttgatcccaagattgagaaggagctcaagaaggcagttcagaagaccgcagcaacgtttgcaccaagggcgtccactgccacaaagaaccctgcagtgcctggaacagctctgtacactatctttgaggtccagggatatgcctccatgctgttgggtggagccctttccttcaatctcgtgttcccgtcgaatgagccggacatttggaggctgatgggaatgtggtccatctggatgttcactataccttctcttcgggcccgtgactgctcaagtaaggagaaagaggctctcaactacttgtttctactggtccctctaatcaacgtcattatcccgttcttcgtgaaatccttcgctgttgtctggtcagcagatacggttgcattctttgtgatgtatgcttggaagcttggatggctgcaacggtcagagtgaacaatttcctgaacgaaggagcatttgaactgcaaattttgcctaagtgaattttggagggcacgctacatgcgatgaatttttcctagatttagtttcgtgtacatccatggagtgtaaagaagcttgctatgtagatgtaccttaaattgtcaacattagtgttgactaggaactgggcatctctcaacctgttatggtttcccagtagatcatatatgtctgcgcgctggcatgaaacggttgccaattgcatctgcttcgttcttggggctacaattcgcaactgaatttgctatatatttgtcgac

SEQ ID NO: 4048 - DNA, 1091 bp, Oryza sativa
  ref <308>: DATABASE ACCESSION NUMBER: AK061526
  ref <309>: DATABASE ENTRY DATE: 2001-12-06
tgataacagtggatatggtaggggtggatttggacgaggaaatcgaggcagagggagaggaagaaattttggtgatagtggatcctcatggagcggaggaagttacagaaatgatgagtcacgtggagagagatctgaagatcgctggaacacacgagattctgatggtggcagaggaagaggaagaggacactttggcagaggtgatcgcaatcaaggtaataactatggttcgggtgacaacaatgacagaacctggggttctggcaggggaaacagggaccaggatggttgcaaaaattggaaccgaaatgatgacagaagaccgttcggtcaagatcgaggtggtgactggtctcaatcttccgactggaacgccaacaaaggacagtccagctggggagcgccaaaaccttctggtggagatgaccaggcaggaaaaaacaatggaaacaatccgtggggtgctcctgctgacagcatgactggtggtggatccggtggaggagggtcttggaaaaataagactgaggatacctggaattcgtctggaggaacaagggattcaggtacgaccccaggaaaatcttcttggggtggatcagaagatggccaaaagaaagaaggatcatgggggaaaagcgaggggagcgggagacaagtcggtggaggcagctcctgggacaagccggatggaggatggaacagcagcaagtgcgagggcacccaaggaggtggcggcggtagctcctgggacaaggcggatggcgggaacagtaacaagggcacccaaggaggtggtggcggcagctcctgggacaaggcagatggcggatggaacagcagcagcaagggtgggagctccggcaatggtgggtggtaagctcgatccaggatcagctgcaatccattagtgcatgtatataatggttgccatgcagcttgaacttgctgtatatttctactctttctagacttagaacgctattattagtaataacgtcgccatgctactctaaactacgaacttaccttaattccagcagaacattatctattgctgacggttattaaggtagctttgtatcacc

SEQ ID NO: 4049 - DNA, 1126 bp, Oryza sativa
  ref <308>: DATABASE ACCESSION NUMBER: AK104636
  ref <309>: DATABASE ENTRY DATE: 2002-08-28
acatttcagctcaccactgctagcttgggaagaggaggaggagcttgagcttggagagagacaacaatggcggctcaggctcttctctctgggaggcagctgctggggaggccattgcaatcttcagtctccaggtcttcttcctccaggaaggcacccttcatggtcagggcagaggccactccccctgccaagcaaggtgctgacaggcagctgtggttcgcatccaagcagtccctgagctacctggatggcacgcttccgggagacttcgggttcgacccgctggggctatcggacccggaggggaccggtgggttcatcgagccacggtggctggcctacggcgaggtgttcaacggccggacggcgatgatgggcgtcgtcggcatggtcgccccggagctcctcggcaagctgggcctcgtccccgccgagacggcgatcccgtggttccagaccggcgtgatccccccgcgggcacctacacctactgggccgacccttacactctcttcgtcttcgagctcgccctcgtcggcttcgccgagcaccgccgcttccaggactggtacacgccgggctccatggggaagcagtacttcctcggcctcgagaagtacctcgccggctccggcgagccggcctaccccggcggcccgctcttcaacccgctcggcttcgggaccaagagcgaggcggagatgaaggagctcaagctcaaggagatcaagaatggcaggctcgccatgctcgccttcctcggcttctccgtccaggcgctcttcaccggggttggccccgtgcagaacctgcttgatcacctcgctgatcccgtccacaacaacatcctcaccagcctcaagttccattagagatgccatcaactacgtatttaattaattacgagtttttaattatgtatgtatgtacgtgcgtatgcgtatatgtgtgtacgtatgtatgtacgcaactttgtacgatcgatggtgcgtgtgatcgagaggggtatgtatgtacgtacgtatatacgatgtattattatgcatgggtgtagggtgtgggtgtaacatgtaaatttgtgctccaactgatttgcacgcatggtcgcatggatcgatttgct

SEQ ID NO: 4050 - DNA, 1409 bp, Oryza sativa
  ref <308>: DATABASE ACCESSION NUMBER: AK061527
  ref <309>: DATABASE ENTRY DATE: 2001-12-06
atgccctcaccctcgcgcactcccattcccatcctccacatcccgcgccatcgacctcctctccccgggaccgcgtcgctcgcgcgttgcctccacctccagtagcaagtatcaatggcggactccggcaagaagcgggacgggtcggccaacggcgccgagaagaaggcgtcgccgacgccgaagccgccgtcctcctccacatccggtttctccaagaatgtccccctcctcgtgtttgtgttattgctggggctgctgtaccggcagcttcagcctccggttccgaaaatctgtggaactccgggaggccctccggtgaccgggccaagattgcagctcaaggatgggaggcacctggcctaccacgagtacggcgtccctaaggatcaggccaagcacaagatcatcttcgtccatggcttcgactcctgcagatacgacgccctccaagtgtcacctgagctcgcagaagagctgggtgtctacatggtctcgttcgatcgtcctgggtatggagagagcgacccacaccccggtagaacggaggacagcattgcgttcgacatcgaagggctcgccgacgggctgcagctcggccccaagttctacctcatcggctactccatgggcggggaaatcatgtggagctgcctcaaaaacatccctcacaggctcgcgggggtgtcaatcctggggccggtggggaactactggtggtcgggttacccgtcgaacgtgtcgacggaggcgtggtacgtgcagctcccgcaggaccagtgggccgtccgcgtggcgcaccacgccccctggctcgcctactggtggaacacccagaagctcttcccggcctccagcgtcatctccttcaaccccgccatcctctcccgggaagacttgaccgtcatccccaagttcgcctaccgcacctacgccgggcaggtgaggcagcagggggagcacgagagcctgcaccgggacatgctggtggggttcgggaagtgggggtggagcccgctggagatggagaacccgttcccggcgggcgaggcggcggtgcacctgtggcacggcgcggaggacctcatcgtgcccgtgcagctgtcgcggcacatcgcgcagcggctgccgtgggtgcggtaccacgagctgcccacggcgggccacctgttccccatcaccgaagggatgccggacctcatcgtcaggtcgatgctgctcaccgacgagtgagatcaccgaccgaccgaccgagacgcgcatctctctgttttttttggtttttggaattttgggtactgtcacgtaccgacgtacggtggtacgcgtagttgcttgctcctattatcctatcctatatagagaaatgacaataatattttgcggagtcattttgcctcgtttcatct

SEQ ID NO: 4051 - DNA, 1112 bp, Oryza sativa
  ref <308>: DATABASE ACCESSION NUMBER: AK061528
  ref <309>: DATABASE ENTRY DATE: 2001-12-06
gcgttacaatcagcacacgctctctgctagtctgatcgctctcgccatcgcacctctgtctcgtcgaacaatggcctccaccgccgccgcttcctcccctttcgactgcgtcctctttgacctcgacgacacgctgtacccgggaagcgcgggcatcgggctggcgacgaagcgcaacatcgacgagttcctcatggcacggtgcggcgtcacggcggagcgggccgccgcgctccgcgtcgagctcttccgctcctacggcagctcgctcgccggcctcatcgctctcggctatgacgtgcacccggatgagtaccacagctacgtgcacgggaggctgccctacgaccggatcgccgccgacccgcagctcgccggccttctgcggagcatcccgcagcgcaaaattctgttcaccaactctgatcgcgcgcacatgaggaaggcgctgcagcggctgagcgtcgacgagggctgcttcgacgccgtcgtgtgcttcgagaccatgaaccctcacctcttcggtgaggcgccgtgcgcctccggcgatgaccgccccggcgtgatcctcaaaccgtcccccgatgccatcgtcgcggctctgcgcatcgccggcaccaatccacaccggacgctcttcctcgacgacagcgagaggaacatcgccgcaggaaaagctcttagcctccgcaccgtcctggttggcaagagggtgaggagcaaggaggccgactacgctcttgagagcatcggcagcctccggcgagccatcccggagatttggggcggcgtcgccgtcgccgtcgccggcgaacagctcgaccacggcgccgcggagaagacgaagggaatgaggtccgatctggactccatcatccagccaacgtcagtcctggcgtaatcggttcctaatccattcgcacataaacaaatcgccactaataaaagcaagtactgtccattaattatcatgtaaattattctgattcctgatgctgagtgcgtgtgcagtgtatttgtatatgggcctggctgacaaggaaatatgcatgtgtatatcagttctgatgatcagcttttgtttgctgtaaaatgtaaatggcactatgagc

SEQ ID NO: 4052 - DNA, 1851 bp, Oryza sativa
  ref <308>: DATABASE ACCESSION NUMBER: AK104637
  ref <309>: DATABASE ENTRY DATE: 2002-08-28
agctgctctccaccaagagctgctccgcccccctaccccgcaacccgttgctttgtgccgcgcctcgctttggtcttcatccgcctcagatctgattcgttctaggttggtctggggaagatggcgatcacggtgaggcggtcgacgatggtgcggccggcgtgggagacgccgcgggtgcggctgtggaactcgaacctcgacctcgtggtgccgcggttccacaccccaagcgtctacttctaccgccggggccccgagggagggggcgcgccggaggggttcttcgacggggagcggatgcggcgcgcgctggcggaggcgctcgtgccgttctacccgatggccgggcggctcgcgcgcgacgaggacgggagggtcgagatcgactgcaacggggaaggggtgctcttcgtcgaggccgacgcgcccgacgcctccgtcgatgactacggcgacttcgcgcccaccatggagctcaagcgcctcatccctgccgttgattacaccgacgacatctcctccttctcgctcctcgtgctccaggtgacctacttcaagtgcggaggtgtctcccttggagttggtatgcaacaccatgtggcggatggcatgtccggtttgcactttattaactcatggtctgacctctgccgaggaactcaaattgccatcatgcccttcattgaccgcactctcctacgagcccgagatccaccaactccatcatacccacatgttgagtaccagcctgccccagccatgctgtcctccgtaccccagtctgttactgctaataagacaacaccacctccaactgctgtggacattttcaagcttacccgctcagaccttggtcgactgcgttcgcagctcccatcaggagaaggtgcaccacgtttcagcacatatgcagttcttgctgcacatgtctggcgatgcgtatctcttgcacgtggcctgccttctgaacagcccactaagctgtattgtgccactgatgggcgacaacggttgcagcctccacttccagaaggttactttgggaatgtcattttcaccgccactccacttgctgaggcaggcaaggtgaccagtgggctggcagatggagcagcagtcatccaagaggcgctagataggatgaacgatagctactgccgctcagcattggactacctggagctgcagcctgatttatcagcattggtccgtggagcacacactttccggtgtccgaacctcgggctcaccagctgggtgcgcttgccaattcatgatgcagattttggatggggaagaccagtgttcatgggtcctggtggcatcgcctatgaagggctggcgtttgtcctcccaagcgcgaacaaggatggtagcctatccatagccatctcattgcaggctgagcacatggagaagttcaggaagctgatcttcgaggtgtaagcagactacttatgttatgtcagggagaagttgtagagctagagttctcaggtaaaataccttcaagtgagtcatgggggctatgctcttgctcctgttgagcaaattgtctggccacgttctcttgtaccttagcttgcaaggatatttggccatcaccacagccgtgtgacgatgtgagcaaccaataatgagctgtttttttgttttcgtttaggataggaatcaacaatgaagaaaaggtgctgtattctgtgaaactacatggcagtgttgttcttaccaaaaatacatgacaagtgaattgggtcaagttattgcctgttgtagctcaagtcgatagatgaacatcattgtacagtacgaatgtacgatacgactataacagcctgattgcctatg

SEQ ID NO: 4053 - DNA, 976 bp, Oryza sativa
  ref <308>: DATABASE ACCESSION NUMBER: AK061529
  ref <309>: DATABASE ENTRY DATE: 2001-12-06
atccatctctacacatcagcaatatttagctacacagagctatctaggattagctgatcagcaatggcaggtgctcctcgaggactagttctcctcggcgtttgtgccgtcttgatggcggtcgccgtcggcggagaggcggcgtcggtggtcgtcggcacggccaagtgcgccgactgcacccggaagaacatgaaagctgaggatgctttcaagaacctccaggtggcgattaagtgcaagaacggcaacggcgagtacgagagcaaggccactggaaagctcgacggcaccggtgccttcagcgtcccccttgacgccgacctccacagctccgactgcatcgctcagctccacagcgccaccaacgagccatgccccggccaggagccatccaagatcgtgccaatgtcggagggcacctttgctgccgtcgccggcaagacccactaccgatcggcgttgtgcgcgtccgtgaccatctgcggcccaatcaagaagaagatcatagaccacttccacaagaagccggtgccacccaagccggagccaaagccggagccacccaagcccaagcctgagccggagcacccattcctcgaccacatccacaagaaggagaagcacttcttcgaccacttccacaagaagcccgtgccacccaagcctgagcctaagcccgagcccaagccgcagcctgcgccagagtaccacaaccctagccctccggcgaattaagcaatggaagtttgcatgcatgcatggttcgtttggttagtacgtttggtgttgttgcatatgatttcctgtcatgtcagtttgtctgcagaataatggttttctttgatgcattagcttttactcacaagtttaatttgtgtgtgtgtgtctatttgtttggtatcagcaagtaattaatataatcagggatgtgcataatatatgtgcaacttgtttgatctcaattgtaaggtac

SEQ ID NO: 4054 - DNA, 1377 bp, Oryza sativa
  ref <308>: DATABASE ACCESSION NUMBER: AK061530
  ref <309>: DATABASE ENTRY DATE: 2001-12-06
gatgcgctcagctagttagataagcatattgagcttcgttcgcagccaagcaaacgctcgcgcgcgcagccggcaatggcgtcgttgtctgacccgaactcgccgccgccgcacgtcgtcgaggactgccgcggcgcgctgcagctgctcagcgacggcacggttgtccgcgccgccgcgccgccgccgccgttctacgtacgcttggacatcgacgacggccgcgtcgagtggaaggacgtcgtgtacgacgccgcccacggcctcggcgtccgcatgtacaggccggcggcgacggggggagcggaggagaagctgccggtggtggtgtacttccatggcggcggcttctgcatcggctcctgcacctggcccaacttccacgccggctgcctccgcctcgccgccgagctccccgccgtggtgctctccttcgactaccgcctcgcgccggagcaccgcctgcccgccgcgcacgaggacgcggcggcggcgctcatctggctccgcgaccagctcctctccgacccgtggctcgccgacgcggccgacgcgcgcaaggtgttcgtctcgggggaatccgccggcggcaacttcgcgcaccacctcgccgtgcggttcggcgcggcggggctggacccggtgagggtcgccgggtacgtcctcctcatgccggcgttcatctcggagaggccgacgccgtcggagctggcggcgccggccaccgcgttcctgacgcgcgacatgtgcgaccgctactgccgcctcgcgctgcccgccggcgccgacaaggaccacccgctcgtcaacccgttcgggccggcgagccggagcctggaggcggtggacgtcggccgcgtgctggtggtcgccgccgacggcgacctcctcagggacaagaacgtcgagtacgcggagcggatgaaggcgatggggaaggacgtggagctggtggtgttcgccggcgaggagcacgcgttcttcggcgtgaagccaatgtcggcggccaccggcgagctcgtcgaggtcatcaggcggttcatcgccggcgccgccgcgtaagtgatcgtgatcgagcgaacgccggcgacggcgaggtggtttgcctcgtgcgccacgtgttcgtaggcttattccacagatgcgacatggtggcaggcactgtgtccttgcaacaataattgagacaagcttaattacttcgtactacatttgtgtttttttttttgtggttacaaattgggcacaatggcaagcaacaaaggtcgacaaatttatgtcattgttgtgaaatagtggtcgcagtttatatggctgcgaaggaagtgtgacagtgaccgtaagcagaggtaataaagtcagcgtgcatttattatt

SEQ ID NO: 4055 - DNA, 956 bp, Oryza sativa
  ref <308>: DATABASE ACCESSION NUMBER: AK104638
  ref <309>: DATABASE ENTRY DATE: 2002-08-28
actcaacccaagcatctctcttcttcactagctacttctccaagttgaagagatcaaagctagaatgggcagctgcaagattctcctggtcacagctctcctggtcggcattgcctcccagcagagctctgccaccaggaacctgcacggagatcatcacgtcgcggaaaagaagttcggcggcggcggcggcggctacggtggcggtggcggtggagggtacggtggcggtggcggcggcggcggctactcaccgtcgcccacgaccggtttcaccgggagctgcgatttctggaagagccacccggagaagataatatcgtgcatcgggtcgctggggagcatcgtggggtcgttcggggacgtgtgcagcggcttcttcgggagcaagctgcagacgctgcaggacgcgctgtgcagcacccgcaaggactgctacggcgacctgctccgggagggcgccgccgcgtacatcaactccgtggccgccaagaagcaggccaagttcgcctacaccacgcagcaggtcaagtcctgcatcctcctcggcctcacctccaaggccgccgccatcgagcaggccgccttgttcaagaaggccaacctcgcctgccactacacctagctacccatacctcgccgccggccggccatctctccggccatctctctctcttagctagttggtagctagtgtcgtcatggtgttgatgatgaataagtccttgcatggatgcgtcgtggcaaaccatgcgtatattattcaagaattgtgtgagtgttcagatctgacctcagctgtggcttgtgtgcgtttgcagttaaattgatgaggtgcacggcgccacgacgacgtctcgtcgtcggtgcttagttgcatgctttgtttgcttttcttagtttcttggcgatgtacttattaagagaataagatgagtttgatttggttagtgatg

SEQ ID NO: 4056 - DNA, 1254 bp, Oryza sativa
  ref <308>: DATABASE ACCESSION NUMBER: AK104639
  ref <309>: DATABASE ENTRY DATE: 2002-08-28
aagcttacagctcacagcaatcagctaagccagtagccaatcctcactcactactcatcttctcttcccacctttgttgcttgcattcagagatcatccaatcggccatggctgatgaaatccagcatctgaccagggccttctcagggctcggtggcctcggcgtggacgagccggcgatggtgtcggcgctggccaagtggcgcaggcagccggagaagctgtccgggttcaggaagagcttcaatggcttcttcaaggatcatggcggcgtcatcgagaagtgcgaggaggagtacatgctccacctcgccgccgagttctcgcggttcaagaacctgatggtgatgtgggcgatgcacccgtgggagcgcgacgcgcggctggcgcaccacgtgctccaccaggcgcacccggcggccatcgtcgtggagatcgcttgcacccggacggcggaggagctcctcggcgctcgcaaggcgtaccaggcgctgttccaccactccctcgaggaggacgtcgcctaccgcgccagggacaagccctactgcggcctgctggtcgggctggtgagcgcgtaccggtacgagggcccgagggtgagcgaggagacggcgcgcgcggaggcgaaggcgctcgtcgccgcggtgaagagcgccggccacgcggcggcgaagctggtggagaacgacgacgtcgtcaggatcctcaccacccggagcaagccgcacctcgtcgagaccttcaagcactacaaggaaatccatggccgccacatcgaagaggatcttgggcacgaggagacactgagggaggcggcgctgtgcctggcgacgccggcgaggtacttcagcgaggtggtggcggcggcggtgagcgacggcgccgaccaccacgcgaaggaggcgctgacgcgggtggcggtgacgcgggcggacgtggacatggacgccatccgcgcggcctaccacgagcagttcggcgggaggctggaggacgccgtcgccgggaaggcgcacggctactacagagacgcgctcctctcgctcgtcgccggcggcaagtgacccggccgatcagccattgctcctccgatctgtcgcctcgccttgtcagtgcgtcgccatcgtgtacgttgttgctgctgctgttgttgttgttgtgtttttgttgcatgcgtggatcgagacttgtaaacttagcatttcgcagcagagctgttggtatggaataaggtcgatttaatttttcttg

SEQ ID NO: 4057 - DNA, 1617 bp, Oryza sativa
  ref <308>: DATABASE ACCESSION NUMBER: AK061531
  ref <309>: DATABASE ENTRY DATE: 2001-12-06
agcttaccaataccaattggagtagaaccaaccaaggaaagaatggcccggctgctactctccggcgtcgcgccgctccccctcctcccctgccgccgtcgcgccattgcatttgcgctcccacttgggaatgtccgcctccgcctccgtgtggccgcacccaccagccgcgtggccaccgtggaggaggacgacaatgaaaataatgctcctcctcctccttgtgaggacttcgacccgggcgcggcgcccccgtttggtctggccgacatccgcgccgctatccccaagcactgttgggtgaaggacccctggcgatccatggggtacgtgctgcgcgacgtggtggtggtgttcgccctcgctgccgccgccgcgcgcctccacagctgcctcgcctggccgctctactgggcggcgcagggaaccatgttctgggcgctcttcgtcctcggccacgactgcgggcacgggagcttctccaacaactcgaggctcaacagcgtgatgggccacatactccactcctccatcctcgtaccctaccatggctggaggattagccacaggacgcatcatcagaaccatggccatgtcgacaaggatgagtcctggcatcccctccccgagcggctgtacaggagccttaacagagccacccggatgctccgcttctccatacccttccccatgctcgcctacccattctacctgtggtctcggagcccaggaaagtctggttcgcatttccatcccagcagcgacctgttccagcccaacgaaaggaacgatgtgctgacatccacagcgtgctgggtggccatggctgccctcctcgcaggcctcaccttcctcatgggacccctcctcatgctcaacctctactttgtcccttactggatttttgttatgtggctggacttcgtcacctacttgcaccatcacggccacaacgacaagctgccctggtaccgtggcaaggaatggagctatttgcggggaggactgacgacagtggacagggactatgggtggatcaacaacatccaccacgacatcgggacacatgtcattcaccatcttttcccccaaatcccgcattaccatctaattgaggcgacggaagcagcaaagggtgtgatggggaaatactacagggagccggacaagtctgggccttttcccttacacctgtttggagcgctgtcccggagcttgaaacgcgaccactatgtcagcgacaccggagatgtggtctactaccagaccgaccctgctaactaaattaattttacatttccttcaattcttttaagcccggaggcttaaattagcttaattagatagctgcgactgacctggacatgtattcaacattcgatccacagacagatagaaagagacctatatatatcgccgatcaatcgatatatatgtgcgtgtccgtgtggagatatggaggtcacaattctttccatggatatataggagtatacatacatgtattgaaggatatgtagctagatttgatgtgcgtgcgtgctgtactttgtaagacgcagcataaagctagtgacaatttggacaaggccatattgatatatccattatatacac

SEQ ID NO: 4058 - DNA, 1235 bp, Oryza sativa
  ref <308>: DATABASE ACCESSION NUMBER: AK061532
  ref <309>: DATABASE ENTRY DATE: 2001-12-06
atgatgctgacttgtgacgagtagtccactgactagggtagacagtactaggacgaggcaacagcgactgcgttgtcccacccacacatcttgcggttgcgcggcggagagagagattgatgatgtcttcttggttgttccggcggagtgggccctcgggcttctcgtgggcctccaccgccgaccaagtcaccgccgggctctccgccgccggcctcaccgccatcgtcaccggcgcctccagcggcatcggcgccgagacggctcgcgtcctcgccatccgcggggcacacgtcgtcatggccgtccgcaacctcgccgccgcgcagcccgtgcgcgacgccatcctcgccgacgcccctgccgcctccctcgacctcatggagctcgacctcgcctccatggactccgtccgcgccttcgcctccgacttcgccgccaagggcctccccctcaatatcctcatcaacaatgcaggggtgatggcaactcctttctctctctcaaaggatggtatcgagttgcaatttgccactaaccatgttggtcattttcttttgactcatcttctcttggagacaatgaaaaagacctctcgtgaatcaaatgtggaaggaagaatcgttaatgtttcatcagaggggcacaggtttgcatatcgggaaggcatccgctttgccaagataaatgacgagtcggagtacaactccattggagcatatgggcagtcaaagcttgcaaacattttgcatgcgaatgaacttgctaggagatttaaggatgagggtgtcaacataactgcaaattctcttcatcctggatctatcatcacgaaccttcttcgtcaccacagtatcctagatgttctccatcggacacttggtaaattggtgcttaaaaatgctcagcagggggcggccaccacttgttatgttgcattgcacccacaggtgaagggtgtgtccgggaagtacttcagtgacagcaatgtgaacgaggcgagtgagaaaggcaatgacatggagctggccaagaggctgtgggagtacagcatcgagctcatcacctgacctgacctgacctgattcatgaactgaatgagagatactatgtaatgttgaagtttgagagagtgcctgtaaagtaaattgtggtaacttaactatggcagctaccatctggtgtgcgtgcgtacgtacatcaaaccaacatgatactagtagtgagtaataagc

SEQ ID NO: 4059 - DNA, 1163 bp, Oryza sativa; identical to SEQ ID NO: 3699
  ref <308>: DATABASE ACCESSION NUMBER: AK104640
  ref <309>: DATABASE ENTRY DATE: 2002-08-28

SEQ ID NO: 4060 - DNA, 1292 bp, Oryza sativa
  ref <308>: DATABASE ACCESSION NUMBER: AK104641
  ref <309>: DATABASE ENTRY DATE: 2002-08-28
actagacagcttagctagcaggtagctgagagagttccttcgatctcgatctctgcacggcgacgataagataagcaatggcagtctcgtcgccggcgccgtcgtctctgcatgtgccgatggccgctgcggcactattagggatgctgatgatgatgtcgtcggcgccggagatgaaggtggaggcggccggcgggttgtccgtcgggttctacgccgaatcgtgccccaaggcggaggcgatcgtccgggacacggtgaccaaggcgttcgagaaggcgcccggcacgccggccgacctcatccgcctcttcttccacgactgcttcgtccgcggatgtgacgcatcggtgttgctggagtcgacaccagggaacaaggcggagagggacaacaaggcgaacaaccctagcttggatgggtttgacgtcgtcgatgatgccaaggacctcctcgagaaggagtgtccacacaccgtctcttgcgccgacatcctctctctcgtggctcgtgatagcgcctaccttgctggtgggctcgacttcgagatcccaacaggtcgtcgtgatggcttcgtctctaaggaggatgaggtcctctccaacgtccctcacccggagttcggtgccaaagacctcctcaaaaacttcaccgctaaaggttttacggcggaggagatggtgacgctgtcgggggcgcactctatcggcacgtctcactgctcatcgttcacaaaccggctgtacaagtactacggcacgtacggcacggacccgtcgatgccggcggcgtacgcggcggacatgaagagcaagtgcccgccggagacggcggcgcagcaggacgcgacgatggtgcagctcgacgacgtgacgccgttcaagatggacaaccagtactacaggaacgtgctcgccgggaacgtcacgttcgcctccgacgtggccctcctcgacacgccggagacggcggcgctcgtcaggctctacgccgccggcgaccccgcagcctggctcgcccgcttcgccgccgcgctggtcaaggtcagcaagctcgacgtgctcaccggcggcgagggggagatcaggctcaactgctccaggatcaactaattaactcaaattaaattcgcgtgaagtttgtgattctcatatatacaaacactactgccctgttgccatgcatgcatgaggctcatttgatttatttttccttatatgtttgtgcatgattcaatgtactactactactacaacaacttttgtttatttttattttcagtttcatttttt

SEQ ID NO: 4061 - DNA, 1162 bp, Oryza sativa
  ref <308>: DATABASE ACCESSION NUMBER: AK061533
  ref <309>: DATABASE ENTRY DATE: 2001-12-06
ctctctctctctatttgccgcaatcgacgcgcctcctccgcatcggcgcgaccgcgcatcctctcccgcatctccctctcttccgcattcgccgtgcctcctccgcatccctcccctccgcgtcaggatcgagcgccgcctcgcgcaggggttcaccggcctgctgcaggcgcagccgccgcagttcccgtggccggcggcgtcgcacaagcggattcccttcgagatcgacctccccgtggtccccttcggcgcctcccggggtgcccgggccgggaaggagttcttcctcgccgcggccgtcgcctccatcatcgacatcggcaggaggccaccggcgccagggaggtgattctgccactccgcgcctcaccggtctccactctccatctcgccgccgccaccacgtccgccctctgccgcagatagaggaggccttgatatgtcagttaccggattcatggccattgttccacaccctaggaattatttgaagggcaatatttttatgaagcttaaagattgaatttgaatccatctgccctggcttgaagtacaatccaaatattatggtatatcaacagcagcttcagtctgggacagagcaatacaaggtcctccctgaggagatttggcttttcagtatgcttcagtaaggatttagcagatggcaatctttgctgtctgttagcaaggagcatcaagagttcctcggccttgtcgacaaagagattgaattatattatatactaatggaattccgccggcggtgtgaggcccactcagagtaggatttggagggtgcagaactgtttttgcattgccaatgaaaggaggaagaccgcctcaaagagccttgtccccatccaccaacatggtcatgataatcgttgacatcgaccaagatctctccagggtaagtagaacagcactaaaattaggattagcatttctagacaccatgttatttcagaaattgattagttggaatcttgtattcattttgctagcctgagtgcctaacttagtggaaatatattggaaaagtttctccatggcagattgaggctgttatttcctgtagatttaggtttcgctgtaaatactgaacaattattgcaattttctatttgtattgagtacttgggtggttctttctatc

SEQ ID NO: 4062 - DNA, 1025 bp, Oryza sativa
  ref <308>: DATABASE ACCESSION NUMBER: AK061534
  ref <309>: DATABASE ENTRY DATE: 2001-12-06
aaagcctgaaacgtcacattcgaacaggaaaaaaacacatccatgttcttgacaacccaaatgctaacctccatgaaacccaaatagatcccctgtaaactgtaaaaaaaaatccgctaaaaaatctgcaatttaacactgactgacgtgtacccagcgagtagaataaactgcatgctccaatccaacccagtcaagaagaactcctcacccgtcgagtcgccaacgctatggccaggtccctgcacccatggagattgattcgcgcagagacaccgtgaggccaagcagacaggagatcgagaggagcagagaaggagagtcgcgaaggctaaccggaggcggagaaggcgaggtggctccactccacgcacgcaatagggaggagttgaaaaaactgcagctttcccccttcagagttgctacgaattccacgaactgcttccaagatgcctcctttccgatccaatccgccgcaaccgcatccggcgaaatcaccagccttccccgccggcgactgttcttccccgcctcctccaagaggggaagttggcagaggtcaaactttgcaagtttggaatgattctataaactccaagaaccaagaaccagggtgggacaaaggggggaaattttattttttgtgagttgaggggggctctgatttgttggaactggaagcgattgggcggcagaatcaagtagtagtggatttcagtgtgctgggacaggagggaacgaacgcgtcaaaatcgggctcgtgcgtgttcgtcaatcgtcagcggcgcagcgctcttctgtgccacgctggctctcattggtttgtactcctactccgtagtaccttggaatgcgactgatttttttgatcgatctcttgtttgtttctttgggttaattggaaccatgccattacaacttcagctatttggaaatatgccattacaattagcaaaaccggctgggtgccatcgcaatttcttccaaattggaaccatgccattatatacgtctgaattgccatc

SEQ ID NO: 4063 - DNA, 1078 bp, Oryza sativa
  ref <308>: DATABASE ACCESSION NUMBER: AK061535
  ref <309>: DATABASE ENTRY DATE: 2001-12-06
aatgctagcgttgctgttcacgtcgttgcctagccacaaggagaaggaagaaggaaaagaaggcagaaggcagcagcaggagcagcaggagaaggagaaggcgagaagaaacaatggattgctgcgtgtgcagtcccatggcgtccatgtacaggcttccaaggaacgccatctgcgctgcgtgctatgaaggtgccaaggccatcatcgccttcttcaacgacgacgacgacgagcacgccgatgctgatcaaggctcggtgaagcccagcagattgacaaagctcaatagcacaatcaagggattgagagatgcgtgggaggaggtgaagcagatgcgatgcagagaggaggagaccaagcagagggcatcgtttctccaggaaggcttcgcggcggcgtggaaggacggcatccacaccgacatcgccatcaggcctggaactgggcctccaatccaagcccacaaggccatccttgcgaccaggtcggaggtgttccggcacatcctcgccggcgacgacgactgcaaggcccccgccggcgactctctgtcgctaccggagctgacccacgacgagctctcccacctcctcgccttcctctacacgggctccctggcgacgtgcgcggaggagcggcacctgcacgcgctgctggtcgccggcgacaagtacgacgtgccgttcctccggcgagcttgcgaggcgcggctggcggcgggggtggaggcgggcaacgtgctgcggacgctggaggtggcggagctgagctcgagcgcggcgctgaaggagcgcgccatggggacggtggtggagcacgcggaggaggtggtgttctcgccggagtacgaggagttcgccgtcaggaacgccgccctctgcgtccagatcacccgcacacttctcgccaataaaagcttacccgccaagacgccttaatattctttttttttccttcgttgatttagaatttagttagacgacgtgcgatgtatacgtgtaaatgatagtacatgcatctctggaagattaatgtgatcaatatatgcaatttatattagtttctttgcacgaat

SEQ ID NO: 4064 - DNA, 1464 bp, Oryza sativa
  ref <308>: DATABASE ACCESSION NUMBER: AK061536
  ref <309>: DATABASE ENTRY DATE: 2001-12-06
aagtcaggcttccaattccaactaccaccgcttcaccatggccgctcctctcttcctcctcctcctcctcctcgtctcctccgcctccgcgggttacgaggaggaggcgctgctgcggcgcgcggaggaggagcgggactggatggtgggcgtgcggcgccgcatccacgcccatccggagctcgcgttccgggagcaccacaccagcgccctcgtccgcgacgagctggagcggctcggcctcaccgcccgcgcggtcgccggcaccggcgtcgtcgccgacgtcggctccggcctcccccccgtcgtcgccctccgcgccgacatggacgccctccccgtccaggaattagtggagtgggaacacaagagcaaagtggatggtgtgatgcatgcctgcggtcatgatgtgcacaccgcgatgctcctgggagctgcaaagttgcttagtgagcgcaaggagcagatcaagggcacagtgagacttcttttccaacctgccgaggaaggtggtgcgggtgcatcttacatgataaaagatggtgttcttgatggcgttgaagctatattcgggatgcatgttgactatcggatgccaacaggtgtaatagcagctcatgcagggcctacacaagctgctgtatgtttttatgaagcaaaaatagaaggtaaaactggaaaggctgaaactccacacttaaatgtggatcctattgttgctgcatcatttgtcatcctatccctgcagcagctcatttcaagagaagatgatcctcttcacagccaggtgctctcagttacctatgtcaagggtgggaacactattgatgccacacctccagttattgaattcggaggtactttgaggagcctcactactgaaggtctatatcgtctacagaaaagggtcaaggaggtggtagaagggcaggcagctgtgcacagatgcaagggagttgtccagataaaaagggacgactacccaatgtatccagctgtctttaatgatgagaaactgcatcaccatgtagaaactgtgggcagacgattacttggtccagacaaggtgaagccgggagagaagattatggctggcgaagacttcgctttctaccaacagttagttcctggagttatgtttggcattggtattagaaacggggaagttggttcagttcacactgttcataaccctaagttcttcgttgatgaggatgttatcccaattggagctgcactgcatactgcccttgcagaaatgtaccttactgagcgctccacagaaggtgaagacggaagccagcattcgcattgacattcgtgcgttgaacagttcgagtgtacaagtatccaagagaataatcatgcttcaagaatccagatgatcattttagtagcgtgcaaggcgttcttgtactcaggtatgctcgagtaatgacaagaaatatatacactgtattactc

SEQ ID NO: 4065 - DNA, 999 bp, Oryza sativa
  ref <308>: DATABASE ACCESSION NUMBER: AK061537
  ref <309>: DATABASE ENTRY DATE: 2001-12-06
aaacacacaagctaagcaatctgaattagcaaagcatccagttctgacactaattttcaagaagcttcttgtggttgcaaaggttcagaaatggcggcagcaggagtgagcgggttggcggtggggtgcctcgtggccgccacggcggcgctgctcgtcgccggcgcgtccgcgcagacggggtgcacggcggcgctgatcaacctgtacccgtgcctcaactacatcagcggcaacgagacgtcgccgacgaggacctgctgctcgcagctcgccaccgtggtgcagtcccagccgcagtgcctgtgcgcggcgatcagcggcgactcgtcgtcgtcgatcggcggcgtcaccatcgacaagacccgcgccctcgagctccccaaggcctgcaacgtggtcaccccgccggcgagccggtgcaactctgccggcggaaacactccgggcgctgccacgacgacctcgccggcaacgcagacgccgggcgccaccggtgcaggaaccggcgttggatcgaagacgacgccgacggcgccgtacctgatcaacggcggcgcgtcgctccgcggcgccacgggcttggtgctcgcgctcgcggctgtcgcggtgtacgccgtgtgatgtgagcgtctgtctgctactctgaacttctgaagcgctggcgatgcagaacgtgcttgatgtgtattaatcacactgtttattactactcacattggtttagcatcattgagcattggcaagagagatttgagttttgtcattcacatttgtactattgattgctttgttgcagtcacaataaataacattactatccaaaaaaaaaaaaaaaaaaaaaaaaaaaaaaaaaaaaaaaatacttaattttcacctcttctttttaaatttttatgtccatctttgggctctcgcctctcggcaatgtatattctcggtcgcgggtggcatgtcatggtacatactatgaatgatgaataagaaagagtttgcttc

SEQ ID NO: 4066 - DNA, 1045 bp, Oryza sativa
  ref <308>: DATABASE ACCESSION NUMBER: AK104642
  ref <309>: DATABASE ENTRY DATE: 2002-08-28
gaacaagcgaaagtaaacgcgacggagaagaaccttccccacgttgggttggattggtcaaggcggcaacgaaccgaaggaaggaagggaagcatctgggctacaggtccacgcgatcgattgttcgatcgatctcggattgatcgctttgtgattgtgattaatctcgcggcgacatggcgacgtcgtgggctgcgccgccgccggggtacccgtacgcgcagggtcagggcggcgcccagccgccgcacccgccgcagtccacggccgtcgccgtcactccggtcagcaacggcgtggggaacccctacgtgatcgtcaccccggccagcgcgtccccctccacctgccagtcactaaggaaggcgctggagcggtacggcaggaagctggaggacggcacccgcaaggccgccgacaccaccggcaacatctggcaccaccttcggacggcgccgaacatggcggacgcggcggtggcgaggctggcgcaggggacgaaggtgtacgcggagggcggccacgacagggtgttcacgcaggcgttcggcgtcgtgccgggggagcagctgcgcaaggcctacgcgtgctacctctccacctcctccggccccgtcatcggcacgctctacatctccacggcccgcctcgccttctgcagtgacagccccatatcctaccacgcccccgccgtcgctgtcgccggcgccgccccagctcaccctcctgaggccatctacaaggtagtgcttcccctgaaccaagtgaaatcggtgaacccatccgccagcatgacgaacaggggcgagaggtacatccagatcatgacgacggacaaccacgagttctggttcatggggttcgtctcctacgacaaggcgctcaagaatctctacgaagccctgcagcgccgtgcgtgatcgtcgcccacggccaccgcagctaagcttcactctgatcctaatatacatatctgccgatttatattccattggtgaacttgtaagcttcagatcttgctctggaataagtgtgacacatcact

SEQ ID NO: 4067 - DNA, 975 bp, Oryza sativa
  ref <308>: DATABASE ACCESSION NUMBER: AK104643
  ref <309>: DATABASE ENTRY DATE: 2002-08-28
tctagatatcacatttcacctccggcccggaaaagacgacaagaaaggacgaagcatccccggtgccacagattctaaggcgctcctcctcaactacaatcacctgtccgggccattaccggtgaacatcggtttctccaagttaagctacctggccctcgccaacaacaggctcaccggcgcaatcccgccatcaatcttgcatttgcaagactccctcctcgaggtgctcctcctgaacaaccagctctccggctgcctcccccacgagctcggcatgctcaccaaggccgcagtgttcgacgccggcatgaaccagctcaccgggccgatcccctcctctttctcatgcctcaccagcgtcgagcagctcaacctgggcggcaaccgcctctacggagagatccccgacgcgctctgcaagctcgccgccgtcccagccggccgcctcgccaacctcacgctgtcgagcaactacttcacgtcggtcggaccggcgtgcttgtcgctgatcaaggacggcgtcctcaacgtcaggaacaactgcattccgggcttcgccaaccagcggcggccggcggagtgcgcgtcgttccacagccagccgaaggcgtgcccggcggcgagcgccacccacgtggcgtgccccgccggagctgccaacgctgcggcggcgccggcggacagggtggtcaaggactactccagctacgtgacgtacgccaccctgcacgagtgagcccggcgccacggcacgggcgcacgacgtgcgtgcatgcatgcagtaggggacagctagaagctagcgtctcggggtggtatttgctcttgtattcttgtgttcgtttgttgtgctcgtgagtcgtcattgtggtttgttttctctgcacgtgtggctagctatggctgtcacgtctagatctcacctcctgtactcttgtgtactgtactatgtgaaaatcattggtgattact

SEQ ID NO: 4068 - DNA, 1270 bp, Oryza sativa; identical to SEQ ID NO: 3250
  ref <308>: DATABASE ACCESSION NUMBER: AK104644
  ref <309>: DATABASE ENTRY DATE: 2002-08-28

SEQ ID NO: 4069 - DNA, 1186 bp, Oryza sativa
  ref <308>: DATABASE ACCESSION NUMBER: AK061538
  ref <309>: DATABASE ENTRY DATE: 2001-12-06
acttccgcttccggccaccgcggggtcgccggatatggcccaggcaccagcgcgcgccgcttccgtcgtgcggctcttcgacgcgcactgccacctgcaggacccgcgtgtgctgtccgtcgccccttccctcatacgcgccgccaccgccgccggcgtcgcgcgcttcgccgtcaacggcacttccgagaaagactggcacctggtgaagcagatggccgaggagtacccgtccgtcgtcccctgcttcggcctccacccatggtgggtaccggagagatcgccggattggatggattcgctccggcggttcttcgctgaaacaccagaggcggctgttggggagattggtctggacaaaggttcacatggaaaaaccattgactttggagaacaggttgaagttttccagcagcaacttgaacttgctaaggagttgaacaagcctgtttctgttcattgtgtgcgcgcctttggtgatcttctggagatactaaagagaactggacctttcccagctggtgtgttgctgcattcgtatctaggatctgcagaaatggtgtccagccttgaaattttaggctgttacttttcgttgtccggcttccttacaggcatgaaatccacgaaggcaaagaaaatgctaaaatcaatgcccttagacagaattctgctagagaccgacgcaccggatgcattaccgaaattggatgatatttctctattagcagtacctgtggatagctcaagtgcagataatggagaaagtaaaaaagattctaattcacgggcatctaccacttcaaatgagtctttgaaccatccatctaatatccacattgttatgaagtatgtcgcctcactgcttgaaatatcagaaatagaacttgctgaagtgacatacaagaatgcgaccaagctgttctcttatcatggatccaaagttcacaatgaagtggaagctgtgtgattgggtgggcatccaatttgaaccatgttgttcctctgaaattatgaaccctggtgcgtgcattctgcctctgaacactacccgttatattgtactctctccttttttttttgtttgacgttggttagctcaaaattgaactaaccaacattaaacatttggggaaggcggtagtatattagtaattgcaacataaaagaaagtggttatttcgtt

SEQ ID NO: 4070 - DNA, 1257 bp, Oryza sativa
  ref <308>: DATABASE ACCESSION NUMBER: AK061539
  ref <309>: DATABASE ENTRY DATE: 2001-12-06
aaaaaaaaatctcaaggtcctgaggacgtagttgctgaatactaccaacagcaagtggaaatgctagagggctttaatgaaatggatacacttactgatcgtggttttcttccaggaatgtccaaggaagagcgtgagaaggttgctaggagtgagactttagccatccggctatcgaacatagcaaacatggttctttttgctgcgaaagtgtatgcttctgtgagaagtggttcacttgctattattgcttcgactttggattctcttcttgacttgttgtcaggatttatcttgtggtttactgccttctctatgcaaacaccaaatccctacagataccctattggtaaaaagcgtatgcagccactgggaatacttgtctttgcctctgttatggcgacacttggccttcagatcatcctagaatcagtacgctcgttgttgtctgatggggatgagttcagcttgacaaaagagcaagaaaagtgggttgtggacatcatgcttgcagtgacattagtgaaacttgcccttgttttatattgccggacattcacaaatgaaatagtgaaggcttatgcacaggatcatttttttgatgtcatcacaaatatgattggtcttgttgctgcactactagcgacttatatcgaaggttggatcgacccagttggtgcaatcatcctagcaatctacacgatcagaacatggtcgatgacggtgctcgagaacgtccactccctggtcgggcagtcagcctcgccggaataccttcagaagctgacctacctatgctggaaccaccacaaggccgtgaggcacatagacacggtgcgggcgtacacgtttggctcccattacttcgtcgaggtggacatcgtgctgccgtcaagcatgccgctgcaagaggcgcacgacatcggcgaggccctgcaggagaaactggaacgcctgcctgagatcgagcgagcgttcgtgcacctcgactacgagttcacccatcggcccgagcacgctctgtcccatgaaaaatagccagacgcaggttgcaagttcgcaaccactggtattaagtttagcagcagcaattagtttcagaatttctggtgctcgtcaggaaacctgcgggtgtatgagattttaattctgtatactggattggcgggtgtgacagtgccaaagccgtagattgtgatttgtaactacttgttgtagactataggattcttgactgttaaatccgtcatctcgatc

SEQ ID NO: 4071 - DNA, 1117 bp, Oryza sativa
  ref <308>: DATABASE ACCESSION NUMBER: AK061540
  ref <309>: DATABASE ENTRY DATE: 2001-12-06
gaatgatccggccgctcgggctcgcgcggctcatggcgttctccctcgcgagcttcgtggcgcccacgaccacggcgtctgcaccgtctcttgccattggtccgctccccagatcctctgtgcagatccgcttgtcgcggcgcttcaaccgcgcgacgccgcatccggacccgctcgtcgaggcctcgatcgagcagctctgggccgcgcacaagcagcgcgcgccgcggctcttcaacggcaccaagttccgtctccacgactggcgactcgatgcagacaacagcagactcagtctgcactgcggtctgaccgactacaaggcctacttgggcacgtgctgctcgacgctcgtgacgcaactgaggagcgacggcgagcggctgcatgctggcgacgcgacggcgtttctctcgcgcaaggtcggcgtctctggcgtcgtagagacccgtgaccagcgcgtcgcgctcatcgagcggagtcgcagcgtcggtgtctaccagcagctctttgacacccccggcggccatcccgaaccttcggatttaccgttcacgatggaggatctcgagacgttggaagaggggagcgagcgcgccaccgccgtggaagcgctcgcagtcgaacggctctttggctcgatcgtggacgaagtccacgaggagatcaacttgtcgccgacacagctgtcggatccgctgctgctgggtgtcgtcttccagtttgaggccgagacgccgagctttgtgttccacatggcgaccccgctcttgtccgaagaagtggacgcactctatcgtcttggcccgcaggacaagttcgagtcgacgcggctctgctgggtcgaccaatctacactcgacaaataccagctcacgccggcggcgcagggcagcctctcgctctggcagcagttctgcgcgttccggaccacaacgtagatagaaagaaaactacacacctccttaggtcacgacgtccatgatgagcgcgacgcccgcgaggatccagcgcgccggcggtgacttggtcttgagctgcgccgaaaagacgtacgtcgggcctctcgactcggtcttgtaacacggacacaaataggaccctttcgtgtcgagct

SEQ ID NO: 4072 - DNA, 1071 bp, Oryza sativa
  ref <308>: DATABASE ACCESSION NUMBER: AK061541
  ref <309>: DATABASE ENTRY DATE: 2001-12-06
taacttacaaggtttctgttcgctgagctggtgaacaacacgccactcctcttcgagtaccagtccgagacggacacgtggcagtcatcggaggcggtccaggcggagggggcgtcgacggcggccgggacggaggggacgttcctgtgcgcggcgcacgccgggccggactgcgtgatggtgtactccgggccgggcgtggagcggccggtcttcttccggccgcggttcccgcacaacccgaacggcggcggcgacaggctccacgtgtacggcgacgggagcgccgcggtggtccggtcgacggtgatcgacgagccgggcaggccgcgggtgaaggtggtggccggcgtggacctgtacgggttcgggtcggtcgtcggcggcgactggcagctggcctccaccgtgccgggcgagctggtggaggggttccggaagccgtacgccgtgatgaccgggctgctgtcggagcgggagggcgtggtccggctcgtcctcatctccaactgccgtggcgcctgggacatcgtgtggctgtcgtacgaccgcgcccgcggcgagtggtggtgggtgcccgtgccggactggggcaccaaggggctcaacgtggccggaatcgccgtctcctccaccttctcccgcctctggccgccggccgccgcctcgtcctgcaccaccaccacctcccagtgaaccgaactcgccggcgtctctgcgtcaccgtgcggcttacggcgagcggtggggaattggattgttaggcccaacgtggcaatgggccccgcacccgtgtaagtggtgggcctcctcccccgtgcccgtggggccgtcgcataatgcgacatgatcttgcacaatggcttctccgatggcgacaaatcgtcgagtgcgagtgagtgtgcttcagataaggaggggtgtactggcgtgcgtgcaagcactcttctctatagttctcttttagtatcactgttcattgttcataagccgtgtgagtgtagctttgtgttcatcttctcgtaaaccaagtaaaaagggcaggctggtactctgttctcgattagttgc

SEQ ID NO: 4073 - DNA, 1228 bp, Oryza sativa
  ref <308>: DATABASE ACCESSION NUMBER: AK104645
  ref <309>: DATABASE ENTRY DATE: 2002-08-28
gtgccaatcacaagagcaagaagctactgatcttagctgagctagagttccagtgatcattaaggaaagaattagcacttggtcaatcacacataggtaattaagattaattgcgatcgagatcatatcactagctagctagctgtgtgtacggagtacggtgccatggcttccaggacttggcattgctggttgttgctcgtcttcttcctcctctccgacgacgcctccgggcagctgtcgacgtcgtactacgcagatagctgcccgtcggtggagaaggtcgtgcacgccaccgtggcgagcgccatccaggccgagcgccggatgggcgcctccctcatccgcctcttcttccacgactgcttcgtccagggctgcgacgcgtccatccttctggacgacgtgccggcgaccgggttcgtcggcgagaagaccgccgccccgaacaacaactccgtgcgcgggtacgaggtcatcgaccagatcaaggccaacgtcgaggacgtctgccccggcgttgtctcctgcgccgacatcgtcgccctcgccgcgcgcgacagcaccgccctgctcggcgggccgagctgggcggtgccgctcggccggtgcgactcgacgacggcgagccgcagcgaagcgaacagcgacctgccggggccggggagcaacctcaccatgctcatcgcgcggttcggcaacaagggcctaagcccgcgcgacatgacggcgctgtcgggctcgcacaccgtcggcttctcgcagtgcaccaacttccgcgcccacatctacaacgacgccaacatcgacccgtcgttcgccgcgctgcgccgccgcgcgtgccccgccgcggcacccaacggcgacaccaacctggcgccgctcgacgtgcagacgcagaacgcgttcgacaacgcctactacggcaacctgctggtccggcgaggcctgctccactccgaccaggtgctgttcaacggcgggtcgcaggacgcgctggtgaggcagtacgccgccaacccggcgctgttcgccgccgacttcgccaaggcgatggtgaagatggggaacatcgggcagcccagcgacggcgaggtcaggtgcgactgcagggtcgtcaacgacagctgatcatccatgggctgtatatattttcatgtggatttgtggtgacgtatctttgttgtaaatactgtgatgcaataaagcagcgtggtaacatcgttgc

SEQ ID NO: 4074 - DNA, 1127 bp, Oryza sativa
  ref <308>: DATABASE ACCESSION NUMBER: AK104646
  ref <309>: DATABASE ENTRY DATE: 2002-08-28
acatttcagctcaccactgctagcttgggaagaggaggaggagcttgagcttggagagagacaacaatggcggctcaggctcttctctctgggaggcagctgctggggaggccattgcaatcttcagtctccaggtcttcttcctccaggaaggcacccttcatggtcagggcagaggccactccccctgccaagcaaggtgctgacaggcagctgtggttcgcatccaagcagtccctgagctacctggatggcacgcttccgggagacttcgggttcgacccgctggggctatcggacccggaggggaccggtgggttcatcgagccacggtggctggcctacggcgaggtgttcaacggccggacggcgatgatgggcgtcgtcggcatggtcgccccggagctcctcggcaagctgggcctcgtccccgccgagacggcgatcccgtggttccagaccggcgtgatcccccccgcgggcacctacacctactgggccgacccttacactctcttcgtcttcgagctcgccctcgtcggcttcgccgagcaccgccgcttccaggactggtacacgccgggctccatggggaagcagtacttcctcggcctcgagaagtacctcgccggctccggcgagccggcctaccccggcggcccgctcttcaacccgctcggcttcgggaccaagagcgaggcggagatgaaggagctcaagctcaaggagatcaagaatggcaggctcgccatgctcgccttcctcggcttctccgtccaggcgctcttcaccggggttggccccgtgcagaacctgcttgatcacctcgctgatcccgtccacaacaacatcctcaccagcctcaagttccattagagatgccatcaactacgtatttaattaattacgagtttttaattatgtatgtatgtacgtgcgtatgcgtatatgtgtgtacgtatgtatgtacgcaactttgtacgatcgatggtgcgtgtgatcgagaggggtatgtatgtacgtacgtatatacgatgtattattatgcatgggtgtagggtgtgggtgtaacatgtaaatttgtgctccaactgatttgcacgcatggtcgcatggatcgatttgct

SEQ ID NO: 4075 - DNA, 1346 bp, Oryza sativa
  ref <308>: DATABASE ACCESSION NUMBER: AK104647
  ref <309>: DATABASE ENTRY DATE: 2002-08-28
gtgctctctctcctctgatactgcagaggcgagctgtgctgggcgggagcttacttggcgagatgaagaggaggcattggagccacccgtcgtgcggcctcctcctgctcgtcgccgtcttctgccttctcctcgtcttccgctgctcccagctgcgccattccggcgatggcgccgcggccgccgcgccggatggtggtgcgggacggaacgatggtgatgacgttgacgagaggcttgtggagctcgcggccgtggacccggcggcgatggcggtgctgcaggcggcaaagaggctgctcgaagggaacctggcgagggcgccggagaggcaccgcgacgtcgcgctccgggggctgagggagtgggtcggcaagcaggagcggttcgaccccggcgtgatgtccgagctcgtggaactcatcaagcgccccatcgatcggtacaacggcgacggtggtggcggcggcgagggggagggccggaggtacgcgtcttgcgcggtggtcgggaacagcgggatcctgctggcggcggagcacggcgagctcatcgacgggcacgagctcgtggtccgcctcaacaacgcgccggcgggggacggtcggtacgcgcgccacgtcggcgcgaggaccggcctcgcgttcctcaacagcaacgtgctgagccagtgcgccgtcccgcgccgcggcgcctgcttctgccgcgcctacggcgagggcgtgcccatcctgacgtacatgtgcaacgccgcgcacttcgtcgagcacgccgtgtgcaacaacgcctcctcctcctcgtcgggcgccgccgacgccaccgcggcggcgccggtgatcgtgacggacccgaggctggacgcgctgtgcgcgcggatcgtcaagtactactcgctgcggcggttcgcgcgggagacggggcggccggcggaggagtgggcgcggcggcacgaggaaggcatgttccactactcgtcggggatgcaggcggtggtggccgcggcgggcgtgtgcgaccgcgtgtcggtgttcgggttcggcaaggacgcgtcggcgcggcaccactaccacacgctgcaacggcgcgagctggaccttcacgactacgaggcggagtacgagttctaccgtgacctcgagtcgcggcccgaggcgatacccttcctgcgccaacgcaactccggcttccgcctgccgcccgtgtcgttctaccgctgacacgccacgcacgcaaccccgcaaacgcatagcatgcataaaattcttttttgtaattagatacgtgttttagtcattgcaacaaagcgaagcaaacgtaaacaacaatccgtgaacatttgggtcgtg

SEQ ID NO: 4076 - DNA, 1114 bp, Oryza sativa; identical to SEQ ID NO: 2300
  ref <308>: DATABASE ACCESSION NUMBER: AK104648
  ref <309>: DATABASE ENTRY DATE: 2002-08-28

SEQ ID NO: 4077 - DNA, 1013 bp, Oryza sativa
  ref <308>: DATABASE ACCESSION NUMBER: AK061542
  ref <309>: DATABASE ENTRY DATE: 2001-12-06
atcatcgcctgaagagcaattcaagaggagaggagaggagagctagctaaggcagccatggattactgcaagcagcaggagcgagacgggcaccgcgacgatggcgatgtgacggagtggaagaaggtggccgagctgagagccgtcgtcgaagcccaggaccctgcatgcaaggaggaggacgactaccagctgcgccggttcctgcgcgcgagagaccacaacatcggcaaggcgtcggcgatgctggtgaagtacctgcagtggaagcgcgaggtgaagcccggcggccgcgccatcgccgacgaggaggtgcgcggcgagctggcgcaggagaagctctacatgcagggctacgaccggcaggggcgccccctggtgtacggcttcggcgcccgccacttcccggcgcgccgcgacctcgacgagttcaagcgctacgtcgtctacgtcctcgaccgcacctgcgcccgcctcggcggcaatggcgggcaggagaagttcgccgccgtggccgacctgcaggggtgggggtactacggcaactgcgacatccgcgcgtacgtggcggcgctggagatcatgcagaactactacccggagaggctggggagggtgttcttgatccatgtcccctacgtgttcatggcggcctggaagatcatctaccccttcatcgacgacaacaccaagaagaagttcgtcttcgtcgccgacaaggacctccacgccacgctccgcgacgccatcgacgactccaacctcgccgaggactacggcggcaagctcaagctcgtctcgccccttattaatggcgccaccgaatccaatcgccgccggtagatagctctcgcgtcgcgtgcatgaagatcgatatgatgtatgtacacccatctcgagatccaatttaatggtatgtatgtagcacgtgtacggtgtacgtgaatgtatgttactagtatgtatacgggacaggaggacactacgaattcgaggacgtacgtgcgtgctat

SEQ ID NO: 4078 - DNA, 1295 bp, Oryza sativa
  ref <308>: DATABASE ACCESSION NUMBER: AK061543
  ref <309>: DATABASE ENTRY DATE: 2001-12-06
aacacccaaccccctctctctctctatctctctcctctctctctctctagctctagctctagctcgtcgccgccatgaacgttccaagcaaatgcatggctcctgcaaagtaaaaaaagaagaagaagcagcagctgcagcttctcttcagtatcgatctttaactgtatcgagctagcttagcttagcttagctctctgccattaacttgtgcttcactgagcttgagctagctagcttcttggctgtgtgactgagtagctctagctcctcgtcgtcgtcgtcgtcgtcgtcgtcgtcggcgtcggtggtggtgtgaattgatagaattgatacgatggagagggcggctgcggcggcgccggtggtggtgaggcatggaggagtggtgttgccgccggggttcaggttccacccgacggacgaggagctcgtggtgcagtacctccgccgcaaggcgttcggcctgccgctccccgccgccgtcatccccgacctccacaacctcttcaagctcgatccctgggacattcctggtgcgagcagcgacggggacaagtacttcttcgccgtgcggccacctgcggcgagggggaggaggcagcatgtgacggcgagcggtgggtgctggaagccggcgggcgggcgggacaagccggtggtggtggcccggtgcggcgggagccacctcgtcggcgtcaagaagggcatggtgttcgtcccacggcaagggaggaaggcaccggcggcggcggcggcggccgccggcggtggctgctgggtcatgcacgagtacagcctcgccctgccgatgcacaagaagggttgcttggctgaggctgaagaatgggtagtgtgccggatatttcagaggagcagcagcggcagccggtcgccgaggaggcctgacaacgacgtgaggcgaacgatgccggccgtcgccgagctcggccggtcgccgtcgccatcgtcgtcgtcgtcgcaatccagctgcgtcacaagcagctccgaccaggaagaggtcagcagcggctagctagctgaagaagaatgcaggcagcagcagcaagcagctaagctgcctctcaaagagaggcttgagtgttagcctagctaagcatatatatttatagccggccaaaccctctgaaagtgatctgcatcaatgcatgcccccctttaatttcttcttcctccttaattattttttcccaaccatgtaatgtaatgtaatttaatgtaatgcagtgtaatgtaacgggaaggaagcactgaattaatcaaattaaattaac

SEQ ID NO: 4079 - DNA, 1081 bp, Oryza sativa
  ref <308>: DATABASE ACCESSION NUMBER: AK061544
  ref <309>: DATABASE ENTRY DATE: 2001-12-06
acggttcgggttctccctcacacactgaacaccatggcggcggcggcggcggctccggctctatccttggccgaggcggcgccggtgacagcagttctggcaccgtgtcccacgccctcgaggacgttccgccgccgcagctgggtcgcggctatctgccggcccgccctgaaatgccaccacagtcgtcccctgaccgccgtggtcgccgcggctgcggctgccgctgcggcgggggactcgacgtcggccggcgtattccacggcgagtgcttcgtcgtgggggataacatcgacaccgaccagatcatcccggccgagcacctgaccctggtcccgtccaagcccgacgagtaccgcaagctcggctcgttcgccttcgtcggcctccccaccgcggcctacccgacgccgttcgtcgcccccggcgaggagaccacccgctacgccgtcatcatcggcggcgccaacttcggctgcggctcctcccgcgagcacgcgcccgtcgccctgggcgccgccggcgcccgcgccgtcgtggccgagggctacgcgcgcatcttcttccgcaactccgtggccaccggtgaggtctacccgttggagctagcggacactggagcctggaaggagtgcaagaccggggatgtggtcacggtggaacttgataattgcgtcatgatcaaccacacatccggcaagcagtacaagctgaagcctatcggcgatgccgggccggttattgaggcaggcgggatctttgcctatgcccggaagaccggaatgatcgcatccaagtctgcgtgagggaaaggcgagtttggtctgctgtcaagatagtcgaggcctctgcagatagcaagtaagactgggttgtggatttgaacctattgcacctctatgcgattgtccatcagttgtactgctgtttttacctaggttgtgtgtcatcagtggtgtttttggaataagttaaaagttacagagtactgaactatgatgtattagtccatgtgatcttatgtaacaccttatgtaatacactcgtttatacctgccgatttgcctatctcgtttcgat

SEQ ID NO: 4080 - DNA, 1031 bp, Oryza sativa
  ref <308>: DATABASE ACCESSION NUMBER: AK061545
  ref <309>: DATABASE ENTRY DATE: 2001-12-06
aatgcaggtaattaagcagtacagcaccaattaagcaaagccacagcaacgagagagagcttgtgaagttgtgatatttcattttgaccatatgggttactcctactcttccgccgccgtggcggtgagcgttttggtggtggcgttggcggcggcggcgtcgggccagctgtcgacgacgttctacgcctcgtcgtgcccgaccgcgctgtcgacgatcaggagcgccgtgaacgcggcggtggccagggagccccgcatgggcgcctccctgctcaggctccacttccacgactgctttgtccaaggatgcgacgcgtcgatactgctggccgacaatgccaccttccggggggagcagggtgcgttccctaatgtcaactcgctgaggggattcgaggtcatctctagcattaagatgcaactcgaggcatcttgcaggcagaccgtctcctgcgccgacatccttgctgtcgccgcccgcgactccgtcgtcgccctaggaggtccatcgtacccggtggagctcgggaggagggacgggatgacgacgaaccaaaccatggcgaacaccaacccccaacgccttcgacaacgccttcttcaccgacctcatcgccggccgcggcctcctccactccgaccaggagctctaccgcggcgacggctccggcaccgacgccctcgtccgcgtctacgccgccaaccccgcccgcttcaacgccgacttcgccgccgccatggtgcgcatgggcgccatcaggccgctcaccggcacgcagggcgagatcaggctcaactgctccagggtcaactgatctgtatatctctacgaaatgcgtcgatctactgtacctacgtggatagaatcgaatcgaataagactagactattaataagctaataagtgattagcgatatcgcgatatgtataagtgcgcaacgtgatattgaatttatgtaagggcttgtccggtttattgccattttcaacactatcgacttttaatattattattaaattttggtag

SEQ ID NO: 4081 - DNA, 1211 bp, Oryza sativa
  ref <308>: DATABASE ACCESSION NUMBER: AK061546
  ref <309>: DATABASE ENTRY DATE: 2001-12-06
tagatatataatgtcgatcaagcactgcgagcaacacaaggattgcgagcggcagcgcctgtaccggcgttgctgcgcggccatcttcggcatccttctcctcctcctcctcatcgtcctcatcgtctggctcatcctccgccccaccaagcctcgcttctacctcaacgacctcaccgtcgtctgcctcaacgtcaccaccggtggttcctacgccggcgccaccgcctcctccggctacttctccttcctcaccgtcaccatgcagaccaccctcgccgcccgcaacggcaacgagcgcgtgggcatctactacgaccgcgccgacgtgtacgccgagtacaagggcctccgcatcaccgtgccgacgtcgctgccgccggtgtaccagggccacccggacctcaccgtctggtcccctttcctctccggcaacaacgtccagctcccgccctacctcgccgtctccatcacccaggacgagaccgccggctacctgctcgtcaccatccgcgtcgacggctggatccgctacaaggccggcgccttcatcaccggacactaccacctccgcgtcaggtgccccgccctgctcatcgtcaacgacggccggggaagctacggctccaactccggcggcggcaacggctacttcaggttccagcgagccgccgcctgcgtcgtcgacgtctgatccatccatccatctcctcatcctcctctcatgcatccaacaaatcatatcatccttaattaattctcctccttccatatataattgcttgcttaattgatcgatctacattctacaagcacagccctgatgaagaagctatataattaaaagctcagctcaactgatcgagtgaggatcggagtaatcttgcatatatgcctgccaccagtggttttatgtatttacagtacgaattaatttgacctttttcttacttaattttcatgcctgtgttttttttggtactacgtacagtgccatgcttgtggctagctgcatggttcaggtgtacagctacttgtagtaataattcgcatatagagaggggataattaagcaattgctacaatcttgtaattactactagaatatataataattgtacttatcttcacatgcatactacatagttgcaacattgtaatcaattaatgttctgttcatttttcaacaaagagtgttcgtcttcaccttc

SEQ ID NO: 4082 - DNA, 1390 bp, Oryza sativa
  ref <308>: DATABASE ACCESSION NUMBER: AK061547
  ref <309>: DATABASE ENTRY DATE: 2001-12-06
ctggggcggatgcctcctaaagagtaacggaggtgtgcgaaggtaggctcaagcgttgattctgctcgtgagcgtaatggtataagcctgcctgactgtgagaccgactggtcgaacagagacgaaagtcggccatagtgatccgggagtcccgtgtggaagggctctcgctcaacggatcaaaggtacgccggggataacaggctgatgactcccaagagctcttatcgacggagtcgtttggcacctcgatgtcgactcatcacatcctggggttgaagaaggtcccaagggttcggttgttcgccgatgaaagtggtacgtgagttgggtttagaacgtcgtgagacagttcggttcctatctaccgttggtgttaaagggagaactgcgaggagccaaccctagtacgagaggactgggttgggtcaacctatggtgtaccggttgttatgccaatagcagcgccgggcagctaagttggtatggaagaactgctgcgccgcgggaaatccttctctatacaagttctcgtacgaggtttttgaacagaacttcgataggcgagaggtgtaagcaccgcgaggtgtgaagcgatctcgtactaaacgaaaaatacatgagttgcaaacctgagagccagaaagcttgaaccacttacatggtaggagatggagcaggcagacgagtcgtcggtgaacaaagagagctcagagcagcagcagcttaccagcgagcaagatgatgacggcgcgacatggctgagcctcactcttgccacacagggatcaccagaagaagcaacagccgaagcagaagaaacagaagcagcaaactgctcggagtctgaggctcccaagccttcttctgcaccacacaaggtgttctcatgtaacttctgcatgaggaagttcttcagctcgcaggctctgggcggccatcagaacgctcacaagcgagagcggagcgccgcaaaacgctcctaccatgcgcagaggatgatgatggggctgcctcttgaggcacatgctgcctttgtgcactccctgagagtaaaccagagctcagtgattcagaaggcaggccagcaagcacagatcaggacagcaccaaggtttcatgaaggcagcatcagctggccaccgattgcttatgaggaggtgccgaattcgacatggccagggagcttcagattgagatcacagccttcagaccaaccatcagaacagagtaagatagacttaaatctcaggctttgataggttgatgtacaactctgaccagtacataagtccctcctcaagcttgtccttctgaataaatgagtttgaagtaatcaataggttcagctcaccatcagatcaaaatcatatggtggtactgaacttcg

SEQ ID NO: 4083 - DNA, 1212 bp, Oryza sativa
  ref <308>: DATABASE ACCESSION NUMBER: AK061548
  ref <309>: DATABASE ENTRY DATE: 2001-12-06
cgaagcttttcctcctcctccgcgcatctcggcgccgcgccatggccgctctcagctcgcgccgccgccatggcagcctccgcctcctcgccgtggccctcctggtgctcgccggagtggcctcctccgccgccgcggcggggagcggccgcggcgcatttgacccatcccgcgtcgtgcagctctcgtggcgccccagggcgttcctgcacaaggggttcctgacggacgcggagtgcgagcacctgatctcgctggcgaaggacaagctggagaagtcgatggtggcggacaacgagtccgggaagagcgtcatgagcgaggtgcggaccagctccggcatgttcctcgagaagaagcaggacgaagttgtagctaggatagaggagaggattgcagcttggacgttccttccaccagataatggcgaatccattcaaatattacattatcagaatggcgagaagtatgagccacactatgattacttccatgacaaaaataatcaagctcttggaggacatcggatcgccactgtgctcatgtacctttcagacgttgggaaggggggagagaccatctttccagaagcagaggggaagttattacaacccaaggatgatacatggtctgactgtgctaaaaatggatatgcagtaaaaccggtaaagggtgatgcccttctgttcttcagtctccaccccgatgcaacaacagactctgacagcctgcacgggagctgcccggtcattgaaggtcagaagtggtccgcaactaaatggatccatgtgaggtccttcgacatctctgtcaagcagggagcttccactgacgggtgcgaggatgagaacgtcctctgcccccagtgggctgcagtaggggagtgtgccaagaatccgaactacatggtgggtaccaatgaagcacctggcttctgccggaagagctgcaatgtgtgtgcacagtaagttactgatccacccttgtgatacatagcagcacgccctcgataattgttgccgcggtaccgggtgtatataggactgagcatagcatgtgtaacctggaaggagttaagatgtactaagatccatttcgcctatatgcacctagaaaaattatagccagactcttgtttctgttcattgttcaagctcgaggctagttactcattttagctgaagcaatggaatctacgaccacggattgtac

SEQ ID NO: 4084 - DNA, 1396 bp, Oryza sativa
  ref <308>: DATABASE ACCESSION NUMBER: AK061549
  ref <309>: DATABASE ENTRY DATE: 2001-12-06
atcgaatacaagctaggccagcacgcgtacacgcgcgccgccgaccgcggacgatggccacgcatcaccatggcgctaatccaccaccacctcgccgttccagtggctcccgctcctcctcctcggggtctcggtccggccaccgccgcccggcggctgacccttcaccgccgccgccgtaggagtggcgccgccgccggcaggatgacagtcacagcttcgtcgatggtggagccggcaagtggggaggagacggcggcgcgttcggcggcggacgtggtgagggcgttctacgacggcgtgaaccggcgggacctggcggcggtggagccgctcatcgcggaggggtgcgtctacgaggacctcgtcttccccaaccccttcgtcggccgcgccgagatactcggcttcttcgccggattcatgggctccgtcagctccgacctccgcttcgtcatcgacgacatctccgccggcgacgactcccgcgccgtcggcgtcacctggcacctcgattggaaggggcggccattcccattcagcaggggatgcagcttctaccgcctccagctggacgagaagcagcagcagctgcagatcgtgtatgggcgagactgcgtggagccagcagtgaagccaggggaatccgcgctgctcatcatcagggccgtcacttggatcttcgaacgctttccacgccttgcaaacatgctgacgaagtgtgtgattggaaagatcatctggaagtcccgggcccctgcgagatgtaaattcttcatgtataccgcgatgcggggcgcctgtttgacggctgataacttgcagcggcggggttggcacctagccccggtttgtcacctttgctcccaagatagagagacatgcgcacacatcttcctcagctgtcgttacacgcagcaggtgtgtgcgactgtgcgtggccgccttggtctgtcctccactacaccgtcggctgatctttcctcctggtggcgctccgcgcggaaatcaatttctaaacaagaccgtaagactttcgatgctggagttatcttggtgacctgaaggaacgcaatgctagaattttcgacaacaaggccattccggcggcgcacttatgtgcagcaatggaagatgaatggaccacttggggtgcagcagggctgctgtgtccactgcaagccggaagcaacctgatggcgagagagcaacattaagccggtggtggtagctcgctgctctgtagtacagacgtgctttagtgtctggcaggcagcatcctctgtagcctgaatctgcagcttgcacctttgtaatttgtttcttgtgacttttttcccctatcttaataaacttcgactggcttccgccagcccggcgaattagccactgcact

SEQ ID NO: 4085 - DNA, 978 bp, Oryza sativa
  ref <308>: DATABASE ACCESSION NUMBER: AK061550
  ref <309>: DATABASE ENTRY DATE: 2001-12-06
ctctcactcgcctctctctcgagtcttccttggactcgccggagagatgggcgacgcggcgtcgtcggcgtcggcggcggagatggtggggcgcgcggtgggtgaggtgcgggaggcgctgaacgagcacgccgacgtggtggcggagctctttgggcgcgtctcctccgacctccgctccggattccgccccgccctcgactccttcctcggcttcttccacgccgtcgactggaaggaaccttggttgatcagcatgttaatttttcatgccattctgctgctggtaacaatcatctcaaggagaaatgtcaacttccaacttatcttgtcagctttaacattttctggtgtatttctcgctgagagaataaatacattcttagggcaacactggaagagcttctcaagccagaattattttgatccccaaggtctgttcatttcagttgtctggtctgggcccctccttttgataacgatccttattttggtgaacactcttgtcacactctgcctgctgatggtaagatggaaaagggcggagcttaggcaccgtgctcgtgaggttcgtaacaagcaggattgatcttaagctacctgaaaagctgaaactacgctgtttggtggccagcagacaagttgcttcccttggactgttgatctaaccgaaggaatttttttgtgtgaacttaccatgtgtagacatgtagcagtcgttcacaaaaacagtgtttatttagggatcatttcacatttgaagaaatcatggccagaggcccagagcttgactcttttgcctgtagcttgtgtattcccacgcattcttgtttttcatgcgaaggcaggagtcgagttactgtatttgctgaaatatgtgtaatagggcaaatcctttttccattgagaatctggctccatgaatgacagggtattttgcaattgtaatacttattcaataactcattttgatttaac

SEQ ID NO: 4086 - DNA, 1272 bp, Oryza sativa
  ref <308>: DATABASE ACCESSION NUMBER: AK104649
  ref <309>: DATABASE ENTRY DATE: 2002-08-28
acggccacaccacccaccaactgagagctgagcaggcgagcgagcggacatggcagcatcgctccaagccgcggccaccctgatgcagccggccaagctcggcggccgggcctcctccgccgcgctgccatcgcgcccgtcttcgcacgtcgccagggcgttcggcgtcgacaccggtgccgccggcaggatcacgtgctccctgcagtccgacatccgggaggtcgccaacaagtgcgccgatgccgccaagctcgccggcttcgccctcgccacctcagctctgctcgtctcgggcgccagcgcggagggcgtgccgaggaggcttaccttcgacgagattcagagtaagacgtacatggaggtgaagggaaccggcacggcgaaccagtgcccgacggtggagggcggcgtcgactccttcgccttcaaggccggcaagtacaacatgaagaagttctgcctggagccgacgtccttcaccgttaaggcggagggcgtggccaagaacgcgccacccgagttccagaagaccaagctcatgacccgcctgacctacaccctcgacgagatcgagggcccgctcgaggtcagctccgacggaaccatcaagttcgaggagaaggacggaatcgactacgccgccgtcaccgtgcagctgccgggaggcgagcgcgtgccgttcctcttcaccatcaagaatctggtcgccaccggcaagccggagagcttcggcgggcccttcctcgtgcccagctaccgtggttcgtccttcctcgacccaaagggccgcggtggctctaccggctacgacaacgctgtggcgctccccgccggaggcagaggagacgaggaggagctcgctaaggagaacgtcaagaacgcctcgtcgtcgacgggcaacatcacgttgagcgtcaccaagagcaagccagagaccggcgaggtgattggcgtcttcgagagcgtgcagccgtcggacacagacctcggcgccaaggtgcccaaggatgtcaagatccaaggggtgtggtacgcgcagctcgagtagggaatgaacaaatgttttgtgcgtggccgggttgatatatcgatacatggagagagggaaggaaggctgcaatgtgtgtatctagtaatgcaaactcgatcgggctgttgatggttttaatttttagcttttgtttcttcctctgttctcgtgaactgatgatcatatcccccgatgatgttatttgcatttcgacaagcggagaggacattgtacgatac

SEQ ID NO: 4087 - DNA, 1335 bp, Oryza sativa
  ref <308>: DATABASE ACCESSION NUMBER: AK104650
  ref <309>: DATABASE ENTRY DATE: 2002-08-28
gtgcttcttcttcttctctctctaaatttctccattccgctcgcgatctccactcgcttcgtccagatctccgcatcaacccacagttagcgagcatgtcgtcttcgtcggagaaccccacggtgacggagcgtggcggcgggaaggaccgccgggacgacgacggcggcgaaaagaaggaaggaggcgggggattcatggagaaggtgaaggacttcatccacgacatcggggagaagatcgagggggccgtcggcttcggcaagcccactgccgacgtctccggcgtccacatcccgcacatcagcctccaccgcgccgacctcgtcgtcgacgtgctcatcaagaaccctaacccggtccctatcccgctcgtcgacatcgactacctcatcgagagcgacggccgcaagctcgtctccggcctcatcccggacgccggcacaatccacgcccatggcgaggagaccgtcaagatccccatctcactcatctacgacgacatcaagagcacctacaacgacatcaagcccgggagcatcatcccctacctcgtcagggtcgtcctcctcatcgacgtccccatcatcggcaggatcaagctccccctcgagaagtccggcgagatccccatcccctacaagcccgacgtcgacgtcgagaagatcaagttccacaggttctccttcgaggagaccaccgccacgctgcatctcaagctcgagaacaagaatgacttcgacctgggcctcaacatgctcgagtatgagatgtggctcggcgacgacagcgtcgccagtgccgagctcaccgagtcggcaacgatcgagaagcaagggatcaccaccatgcaggtcccattcagcttcaggcccaaggatttcggctctgctgtctgggacatgatcagggggaggggcactggctacaccatcaagggcaagatcgatgtcgatactccgttcgggaacatgaagctgcccattagcaaagagggtggaaccactcgcatcaagaaggatgacgatgatgacgatgaggattgaagttgtgctgataaaacatacagggtagggaagcagagatggtgatgccctgtgctctgaagcatatggtgctattgttggctgccttatctgagctgagccgctgtgttgtgttgttactcatctagctgcctcccgttattttgttcatgtttattagactcgggacaacttaatttgtggtggaaaccttgataataaaatcaacaggcccttgttctttgtggggtcagttgatatttttcgttatgttttccccaaatactggttgtgagggcgaatgctgttc

SEQ ID NO: 4088 - DNA, 1069 bp, Oryza sativa
  ref <308>: DATABASE ACCESSION NUMBER: AK104651
  ref <309>: DATABASE ENTRY DATE: 2002-08-28
gatcaccacacgcgcacacgacacgacgcaccaatggcgctcgtctccgcctcctcctccaccaccgccgtcgcggcgctccccggcgccgccagggcctcctccttcctcggcggcgccggcaggagcggcaggctgctgctgaggcaggccgagtcgtcgtccgcgcgggcgtcgttcgccgtgcgcgccgcggcgcccgacaggccaatctggttccccggcagcaccccgccgccgtggctcgacggcagcctccccggcgacttcggcttcgaccccctgggtctcggatcggacccggagagcttgcggtggaacgtgcaggcggagctggtgcactgccggtgggcgatgctgggcgcggcgggcatcttcatcccggagttcctgaccaagatcggcatcctcaacacgccgtcgtggtacaccgccggcgagcagcaatacttcaccgacaccaccaccctcttcatcatcgagctcatcctcatcggctgggccgagggccgccggtgggctgacatcatcaagcccggctgcgtcaacaccgaccccatcttccccaacaacaagctcaccggcaccgacgtcgggtaccctggtggtctgtggtttgacccgctcggctggggcaccggctcgccggagaagatcaaggagctgcgcaccaaggagatcaagaacgggcggctcgccatgctcgccgtcatgggagcttggttccaggcagagtacaccggcaccggccccatcgacaacctcttcgcccatctcgccgaccccggccacgccaccatcttccaggccttcacccccaaatgaggagttcttcaggtgttggagtgttagcaatggctgccaatggaggaagatgaaaagactgttcgtcgacgcgacttacctctcttttttgggatcggagtaggctgtgaatggtggtggtgtattgggatgtaattgtggatggagcactgcatgccttgttgattgtgtacctgtactatgatgtaaccgatgtaaaaaacaagttgatactcttttagaagtgaagttctcttcatcactg

SEQ ID NO: 4089 - DNA, 1399 bp, Oryza sativa
  ref <308>: DATABASE ACCESSION NUMBER: AK061551
  ref <309>: DATABASE ENTRY DATE: 2001-12-06
accaacacgccatatactagtttcagaattgagacacactgatcattgtgagagagaagtagaccaaacaaggcaagctcgcatggcttcgggcattagcaggactccggccacgggtgtcaccgccggcggcggcgacgacgaggaggcggcatggttgcacgcgcttgagctgatctcgggcttcaccgtctccatgacactgaaggcggcgatccagctcggactcatcgacgcacttaccgccgccgccgacggccgcgcgctgaccgccggcgagctggttgcgcagctcccggcggtggacgatgccgaggcggcgacctcggtggaccggatgctgcggctcctggcgtcgttcaacgtcgtcaggtgctcgacggaggcggggcctggcggtgatcctctccggcgctactcgccggcgcctgtgtgcaggtggttcaccgccggcgacaaccaccaagggtctctggcacccaggctcatgctcgacgtcgacgaagacaatctgagcacctggcatcagatggcggcggcggtcgtcagcggtgggccatcggcgttcgagagggcgcacgggatgccattgtttgagtacatggggacgaaccaccggttcaatatgctgttcaaccaggccatgtcgcagcagtccatgatggtgatgaacaagctgctagaccgcttccatgggtttgatggcatcagtgtcctcgtcgacgtcggcgggggcaccggcgtcaccctgaagatgatcatctcccggtataagcacattactggtgtcaacttcgacttaccccacgtcatatctcaggctccatctcttccgggtgtgaatcatgtagctggaaatatgtttgagagcgtacctaaaggagatgcaattttcttgaagtcgatgctcctacgaaacgatgaggagtgcatcaagattctcaagaactgccactatgctctctcagacaatgggaaggtgattgttgttgatattgttctccctgaaaccccaaaaccggtacccgaagcacaaaacccactccggatggacgttatgatgctcaacaatcttcgtggaggaaagataaggacagagcaggagtacgcgaagctagctatggattctggcttcagtggttccttccggacaacctacattttcgccaactttatggcaattgaactatgcaagtagctcttgaaaatcatgtcaagttcgtattactcccttcatcactaactgaacttttggctatgtatgtagacaatcattttgctcagatatcttgtccatatgtacagccaaatgctcacgaaggagtatgtatttcaatgtgtaattgtgtatggctaacactataccattcaatggtctgaaaattaaaaacttttcttc

SEQ ID NO: 4090 - DNA, 1057 bp, Oryza sativa
  ref <308>: DATABASE ACCESSION NUMBER: AK061552
  ref <309>: DATABASE ENTRY DATE: 2001-12-06
agaaaaattcggcggaattcgctgttggagtgagtattcatcgaggcaaagctcgaatttttggtactatccgattggtggcgaagcagcggcggagcgagagaaaatcgctgtaggaatcgggggagaaggaggagtagatagagggaggtggattgagctgtgggaggttaggttggtgattggtagaggaggaggaggaggagatggagaggaaggtggtggtggtgtgcgcggtggtcggcttcctcggcgtcctctcggcggcgctcggcttcgcggcggagggcacacgcgtcaaggtttcagatgtgcaaacttcttctccaggtcaatgcatatacccaagaagcccagccttagccctagggttaatatctgcggttgctcttatggtcgcccagtctattataaatacagtggctggttgcatctgttgtaagaggcatccagttccctcagacactaactggagcgtagctctgatctcattcatcgtgtcttgggccactttcataatcgcgttccttctcctactgaccggagctgcacttaacgatcaacggggtgaggagaacatgtactttggcagcttctgctacgttgtcaagccaggggtcttttctggaggggcagtgctctcacttgccagcgtggcactggcaatagtttactacgttgccctatcatcggcgaaaagtccaccaaattggggtccccagcagaaccaaggcatcgccatgggccaacctgtgatccctccacagagcagcgaaccggtgtttgtccacgaggacacctacaatcggcagcaattcccataaatcatgatctgtgcaagctgtttcgagggccattctgatacattatgtttggtttgtataggcctccaggttagaacagtagcagtaacaattgttgttaggtagagtcatgttttttgctttcttcttccccctctttcttgagcgctactgtcgcacgttctgcttcatcacagcggatattcgattttacatgaaccgggcaatgttgaagaaagcttgagtttcttgct

SEQ ID NO: 4091 - DNA, 1226 bp, Oryza sativa
  ref <308>: DATABASE ACCESSION NUMBER: AK061553
  ref <309>: DATABASE ENTRY DATE: 2001-12-06
acagccatttcactagacagcttagctagcaggtagctgagagagttccttcgatctcgatctctgcacggcgacgataagataagcaatggcagtctcgtcgccggcgccgtcgtctctgcatgtgccgatggccgctgcggcactattagggatgctgatgatgatgtcgtcggcgccggagatgaaggtggaggcggccggcgggttgtccgtcgggttctacgccgaatcgtgccccaaggcggaggcgatcgtccgggacacggtgaccaaggcgttcgagaaggcgcccggcacgccggccgacctcatccgcctcttcttccacgactgcttcgtccgcggatgtgacgcatcggtgttgctggagtcgacaccagggaacaaggcggagagggacaacaaggcgaacaaccctagcttggatgggtttgacgtcgtcgatgatgccaaggacctcctcgagaaggagtgtccacacaccgtctcttgcgccgacatcctctctctcgtggctcgtgatagcgcctaccttgctggtgggctcgacttcgagatcccaacaggtcgtcgtgatggcttcgtctctaaggaggatgaggtcctctccaacgtccctcacccggagttcggtgccaaagacctcctcaaaaacttcaccgctaaaggttttacggcggaggagatggtgacgctgtcgggggcgcactctatcggcacgtctcactgctcatcgttcacaaaccggctgtacaagtactacggcacgtacggcacggacccgtcgatgccggcggcgtacgcggcggacatgaagagcaagtgcccgccggagacggcggcgcagcaggacgcgacgatggtgcagctcgacgacgtgacgccgttcaagatggacaaccagtactacaggaacgtgctcgccgggaacgtcacgttcgcctccgacgtggccctcctcgacacgccggagacggcggcgctcgtcaggctctacgccgccggcgaccccgcagcctggctcgcccgcttcgccgccgcgctggtcaaggtcagcaagctcgacgtgctcaccggcggcgagggggagatcaggctcaactgctccaggatcaactaattaactcaaattaaattcgcgtgaagtttgtgattctcatatatacaaacactactgccctgttgccatgcatgcatgaggctcatttgatttatttttcctt

SEQ ID NO: 4092 - DNA, 955 bp, Oryza sativa
  ref <308>: DATABASE ACCESSION NUMBER: AK061554
  ref <309>: DATABASE ENTRY DATE: 2001-12-06
tcaagtggcctcaatcccactttcgacacattcgattgccaacttcacgagttccgtgtcgagggagacaaacttatagcgaacttgacatggagaattcgcacccccgactctggcttcttcaccagaacagccatacagcggtttgtgcaggacccagcacaacccgcgatcctctataaccatgacaacgagttcctgcactatcaagatgactggtacattatctcatccaaagtagagaacaaggaagatgactacattttcgtgtactaccgcggcagaaatgatgcgtgggatggatatggaggtgctgttctgtacaccagaagcaaagttgtgcctgaatcaatagtacctgagctagaaagggcggcaaaaagcgtaggtcgtgacttctccacattcatcagaaccgacaacacctgcggtcctgagccacctcttgtggagagaatagagaagaccgtcgagcaaggagagaagaccatcatcagggaagtgcaggagatcgagggcgagatcgagggagaggtgaaggagctggaggaggaggaggtcacattgttcaagaggttgacagatggcctcatggaggtgaaacaggacttgatgaacttctttcaggggctaagcaaggaggagatggagcttttggatcagatgaacatggaagcaactgaggttgagaaggtcttcagccgcgccctgccaataaggaaactaaggtagcttctagttgccactccagcaagtacaaggcaacaagtaatgctcaaaatatattctattcaccaaggcaataccaatagtaacagattattctacagagaacaaagaatttttgaatctgctaatgcatccccattattacaatacatttccagcttagagatatgtaaagtatcagtaactatgtaacttccattaaaaaaaggtatatagtgaactttgt

SEQ ID NO: 4093 - DNA, 1213 bp, Oryza sativa
  ref <308>: DATABASE ACCESSION NUMBER: AK104652
  ref <309>: DATABASE ENTRY DATE: 2002-08-28
aaagcccaacccggccggcagcacacgcgacgcgcgcgccgacgcgaccacaccgacaccgacgcggccggcgagataagataagcagctagcagggagtggcctccgaaaccgagaggacgaggagtacacaacgtacgggactacggggcgcgggggccatggacaccttcttcctatcgcacggcacgcccacgctctccatcgacgacacgatgccggcgcagcacttcttcaggtcgtggctaccggcggcggtggcgggcgcgcagcctccgcgtgccatcctcatcgtgtcgggccactgggagacggccacgccgaccgtcaacgtcgtccgcggcaacaatgacaccatccacgacttcgagggctatggcttccccaagtccatgttccagctggaatacccggcgccgggcgcccctgatgtggcgaagaaggccaaagagctcttggagcaagccggatttgggccggtgaaggaggaccacggccgcgggcttgaccacggcgcgtgggtgccactgatgttcatgtacccggaggcgaacgtgccggtgtgccagctctccctgcagaccggccgcgacggcgcgtaccactacgatctcggcagagcgctggcgcctctccgggacgacggcgtcctcatcctcggctccggcaacgccacgcacaaccttagctgcatggcgcccgtcgccgagggcacgccggtgccccagtgggcggcggagttcgacgggtggctgcaggaggcgctcctcgcgggcgggaggcacgacgacgtgaagcagtacgaggagaaggcgccgaacggtaagatggcgcacccgtcgccggaccacttcctcccgctgcacgtcgcgctcggcgccgccggggaggatgccaaggcggagctgatccaccatagctggtacaacgcgacgctctcccacgcgtcgtaccgcttcaccaccaccaccaagaacaaaccgattgccgcatgcaaagagtgaaacatgtcttgcttatatcatcgccattttactcttaacaattaataatctccgtgggatctacgttaatatactcctattaacgtagacgtacgttcgtgcctgtatttcctaacggccgtgtcttgtggttttcagttgcaataaacttgcatgcatggtggtttgggttgtggcccagcctctcatggcgttgatatcactatgat

SEQ ID NO: 4094 - DNA, 1184 bp, Oryza sativa
  ref <308>: DATABASE ACCESSION NUMBER: AK104653
  ref <309>: DATABASE ENTRY DATE: 2002-08-28
atccccttttcccttctcctccaccccccccccccaaccacctcaccgccgacgacctcatcctcgtcggcgccgtcggattcaccagcgagggaggttgcggcggcggcggagagcgcgagggaggaaagcgggggaggtgaccgccagcgatggggcagcagtcgctgatctacgcgttcgtggcgaggggcacggtggtgctcgccgagtacacggagttcaccggcaacttcaccaccatcgcggcgcagtgcctccagaagctccccgcgagcaacaacaagttcacctacaactgcgacggccacaccttcaactacctcgtcgaggacggattcacatactgtgtagttgctgttgaatcagttgggcgacaaatccccattgctttccttgacagagtcaaggaagatttcaccaaaagatatggtggtgggaaagcagctactgctgcagcaaacagcctcaaccgagaattcggatcaaaacttaaggagcacatgcagtattgtgtggaccaccctgaggaaatcagcaagcttgcaaaggtcaaagcacaagtctcagaggtcaaaggagttatgatggaaaacattgagaaggttcttgaccgtggtgagaagattgaactgcttgtcgacaagactgaaaacctgagatctcaggcacaagatttcagacagcagggtacaaaggtgcggcgaaagatgtggttacaaaacatgaagatcaagctgatcgtcctgggcatcatcatcgcgctcatcctcatcatcatcctgtccgtgtgccatggcttcaagtgcaagtgagggtgttggcttcccagtcctccacattcaccttgccccccataataccgcctattcctggcgaaaaaaaagaccatatgtttttttttgttctgttagtcatgagtcctgccccgattcttgggtgttcgagtgtccctgatgtcgcgcttgattggtgtcggatagtgactgggtttatgggtcggagtcccgtgtatttttggacgctattcatgtatagcctgtatgctaccctcttttcgctctgctatatgagtagtaggtgttactacgtttgttcccccactttatatcttctcttactccacagctaaatcttagtaagaaggaacaacttgcattttcaaacctgtgatcttcataaat

SEQ ID NO: 4095 - DNA, 1209 bp, Oryza sativa
  ref <308>: DATABASE ACCESSION NUMBER: AK104654
  ref <309>: DATABASE ENTRY DATE: 2002-08-28
aaacccgccgcatcccggttcatgtcctgccgctccccatgtcgccgcccctcgagctcgactacataggcctctcgcctccgccgccgccgccctcctcctcctccgccgccgccgcccgcgcggacgacgtcgacctgaagggcaccgagctccgcctcggcctccctggctccgagtcgccggaccgccgccctgcggctattgccgctgccgctgccactgccaccacccttgagctgctgcccgccaagggtgccaagcgcgtgttccccgacgaggccgcgctgacgccgcccactgccgccgccgggaagggcaaggcggcgagggagggggaggaggtgggggctgaggaggaggacaagaaggtcgccgcgccgccgcagccggctgcgaaggctcaggtggtgggatggccaccaatccgcagctaccgcaagaacacgatggcaaccaaccagataaagagcaacaaggaggatgttgatgctaagcagggtcagggtttcctgtacgtcaaggttagcatggatggtgcaccatatctgaggaaggtggacctcaaaacttacaagaactacaaggacatgtctttgggtctcgagaaaatgttcattggcttcagcaccggtaaggaaggtgctgagaaccagaaagatggtgaatatgtgttaacctacgaagacaaggatggtgactggatgctggttggtgatgttccatgggagatgttcaccgactcttgccggaggctcagaatcatgaaaggctcagatgcaattggacttgccccaagagcaggggaaaagtccaagaacaggaactagaatggttattgcccacagttgaaagcaaaacggagatattaattaactgcagggcagttcctcaaaaccataatttaatagttttacaggatcaccatatgatctgtattacatggtttgctattctgcaagtaaaaaaaaaaactcttttaagactctgttatgttaggtttgcaacatctcctagagatgtacgctctattcggttgcacgtgtctttgtatgtgtagtatttccatccatgtaaatggttggtatgcagtgcgctaccgctattattgagcactcctacctatcctgcaagtgttgtcctgaaacgtatgttcccgtcacgtaagtgtttaaatgtttttaagaggttcctgaagatgtattattt

SEQ ID NO: 4096 - DNA, 1382 bp, Oryza sativa
  ref <308>: DATABASE ACCESSION NUMBER: AK061555
  ref <309>: DATABASE ENTRY DATE: 2001-12-06
aagctcagcctcagcgatcgacaagtaagtagatccaaatccatccatggaagccaccggcacacggctgacgcgctccgcctccctctccccacgcctccgccgctcccccacagccttgtgcgtctccccgcgcagcatgcatcatcatcatcagcagcagcagcagagcctccgccgcgccacctccgacgccgacatcgccagatccgcgcccgcgacggcatcatcgccgctgcccctcctcctccgcgacatcctggaggaggacgtggtcgtggtggtggacggcgccgggcgcggcaagggcaacgacgacgacgacaagacgtccgggcgcggcggaggcggcggcgggcacatggacatgggggagtactaccggcgggttctgagggtggagccggagaacccgctggtgctgcgcaactacgggaggtacctgcaggaggtggagggcgacctgggcggcgcggaggagtgctacgccagggcgctgctggcctcccccgacgacggcgacctgctcagcctctacggccagctgctgtgggagacgagtcaggacaaggaccgcgccgccgcctacctggagcgcgccgtccaggccgcgcccgatgactgctacgtgcttggatcgtacgcgagtttcctgtgggacgcggaagaggatgaagacgacgaagcagaggatgagatgaaaccgccgctggtgccggcgtcctgctaacccaacccggcgtttgcctttgcttgtgtacatatgagagcttgcttttgtcaaaggcagatcgagacacgatccatcctggtgtgcctgcctgcctgcctgcgcttgtacaaattaattactagcacatcgatccttgctccatcagtttgcttcttctgtacatactccagtagctagcgccttcttgatgatggatcgttggctacatccatcgtcaatacacacactgatgaacaccagagatcaattcaactgcagtgcaagccagggcgcgcggcggcgagcagatcgagcaatttggaagatgcaaatcaggccgccgagcagagcagagcagctcagttcaagtgcggacggacggctggatgattcatccacaccgtaccacactttgcacatggataaccagacttgttgcttctttatgtaacacctcataataaattcactctgctaattaattatactcgagtcaaatgctagctactactacctctttcaagctagtttcatttcatctccctcctcactgccaggatgtattccttcctaattgtattgtattgtatactcctacaatacaacttttgttttctatttccatgtccatccattaatacatccatccgttgggacattggtgtgagtg

SEQ ID NO: 4097 - DNA, 1043 bp, Oryza sativa
  ref <308>: DATABASE ACCESSION NUMBER: AK104655
  ref <309>: DATABASE ENTRY DATE: 2002-08-28
gtgcatatgcaaacctctcctacctcacactccaccctagctagcccactacacctcctacaccctcaccatccaatagcgcagtgacagtgccaatggcctctcacaccaccctcatcctcctcctccctctcctcgccgccgcggccgtcgccgccgcggacgtcgcccctgcgccggcgccacctgcggcgcagacgatcaacctcacgggcatcctcgagaagggcgggcagtacaacacgctgctccgcctcctcaacgccacccgcgtcggcgagcagctgggcagccagctgaagaccacctacgacggcctcaccttcttcgcgccgacggacgccgccttcgccgcgctgaggccgggcacgctcaacggcctgagcgaccaggagcaggtgcagctggtgctctaccacgtcctcccgcgctactacaccctcgccacgttccagacggccagcaacccgctgcgcacgcaggccacgggccccgccggcgtgtacaccgtcaacgtcaccaccaccacggggcagagcctcgtcaacgtgtccaccggcgtcgccgccgtccccctcggcaccacgctctccgccgacttcccgctcgccgtctactccgtcgacggcgtgctcctgccggagcagatgttcgggaaggccaaggctcccgcgccggccgccgcgcccgcgtccgccgccgggaagggcgccaataaggagcacaagaagggcggcgccatgcccaagaatgaggtcgcggccaccgcgccgacggccggagctggaggagaagattcagatgacagcgccaccaccaatgcggtggccgttgcaggcgcggccggtgtggtgtggactgctgctctcgtggggattgccaatcttgtcatcgcgtagaaagtgtgtgcttgtctttttctccttcgccgttttctttcgttttcgtcgttgcatatgtttcattgcacgtgtcctattttgtatgtatgcaagagtatttatatatgttgatgatgattcactcagtgaaatttactggct

SEQ ID NO: 4098 - DNA, 1567 bp, Oryza sativa
  ref <308>: DATABASE ACCESSION NUMBER: AK061556
  ref <309>: DATABASE ENTRY DATE: 2001-12-06
ctcgtcgtcgtcgtcgccgccgcgagcgaaccgggaggagaaagtccaaaccctcgcgaaggcagagtcggggatagggatatcgccgaggtgggagaaggcgacgtcgccgacatgaagctgttcgtgaagaccctgaagggcaccaacttcgagatcgaggcgagccccgaggcgtcggtggctgaggtgaagagaatcattgagagtactcaggggcagaatgtgtacccggcggatcagcagatgctcatacaccaagggaaaattctcaaggatgatacaactttggaaggcaacaaagttgctgagaacagcttccttgttataatgctgtctaaggccaaagcatcatcaagtggagcttcaactgcttcaaaggcacctgtgagccagtctcaaccagcaactccagttgcctcagttgcaagaacaccacctccacaagcacctgttgttacacctgaaccggcacctccaagtgcacagcctccagttgcttctgccactccagctgctgctgccactccagctgctgctgtgaccgcatcaagtgatgcggatgtctacagtcaggctgcatcaaatcttgtttcaggtagcaacctagaacagacaatccaacaaattcttgacatgggtggtggcacctgggaacgtgacatggttgtccgtgctttgcgtgctgcatataacaaccctgagagagctattgactatctgtattctggaattcctgagaatgtggagcccccacaacctgtggctcgagcacctgctgctgttcaacagggaaatccacaggttccatctcaggctcaggctgcacctccaccgcctgtgcagccagctggtggtgcctcaggacctaatgcgaatcctctaaacctattcccccagggcattccaagtgctgggtcaaatcctggtgctgctgctggtgccggtgccggtgctggtgcccttgatgcattgcgacaacttccacagttccaagcgctgcttgcattggtccaggctaatccccaaatcttgcagccaatgcttcaagagcttgggaagcagaatccgcaaatcttgcggttgattcaggaaaatcaggctgaatttctccgtctggtgaatgaatctcctgatagcggcgctgctgggggaaacatactaggtcaactagcagccgctatgccacaggcacttacagttactccagaggaacgggaggccattcagcggctggaggcaatggggttcaaccgtgagctcgttttggaggtcttcttcgcatgcaacaaggatgaagagctggctgccaactatcttttggatcatggccatgagtttgaggatcaacaataggtgttgttagtttggtctcatcgtggctgggagaccccaaaaaaaaaatgaaatcgaggcagaagcagtgcagttcagtatcgttattatttctgactgctgagagatacctggccgtgtgtgcaatgccgctgactatgttttaatttcctgtgtcttgggaatgcttttaaagtacatattaatttcatattcacatattatactgtgt

SEQ ID NO: 4099 - DNA, 1047 bp, Oryza sativa
  ref <308>: DATABASE ACCESSION NUMBER: AK061557
  ref <309>: DATABASE ENTRY DATE: 2001-12-06
gcaatgccctatctacctatccaatcccaatccacctgagcgagagagagagaaagggtctcctcctcaacatcaacaatggcggtcgcaacctccttcgccacactcgccatcgcgcggccggcggcggagcgggccctcctcgcctccaaaaccccctcgccgctcctctccatccgcaccggcaccggcaccgcacgcctcccctcatcggccgtctttggaggtttcactcctgcgctttccgctgctcacagccgcgcgcgcttcgtctcctccgccaccgctgaccccaaggaagtggacctccagtccaaaatcacaaacaaggtgtactttgacataagcatcggaaaccctgttgggaagaacgttgggagggtcgttattggcctatacggggatgatgttccccagaccgcagagaacttccgtgctctttgcactggagaaaaagggtttggttacaaggggtccagtttccaccgtgtcattaaggacttcatgattcagggaggagactttgacaagggcaacggtactggagggaaaagcatatatggccggaccttcaaagacgagaacttcaaattggttcatactggacctggagtggtcagcatggccaatgctgggccaaacaccaatggcagccagttcttcatctgcactgtcaagacaccttggttggatgggaggcacgtcgtgtttgggcaggttattgaaggcatggacatcgttaagatgatcgaatcgcaggagactgacagaggggaccgcccgaagaagaaggtggtcatcagtgagtgtggggagcttccagtggtctaataggtgccagagggctaatcttcttcccccggagactttgctgtttttggtttcatagtaagctgtgaacttatcgcatgttctccgcgcagtcagagatcatgctgagttgaggccaagatttctaagttgagaagaatcctctattgttcggctggaataaaacgttcttacctgtcgagggtcaggaaataatgttgtggttcatgaaagatc

SEQ ID NO: 4100 - DNA, 1069 bp, Oryza sativa; identical to SEQ ID NO: 2190
  ref <308>: DATABASE ACCESSION NUMBER: AK104656
  ref <309>: DATABASE ENTRY DATE: 2002-08-28

SEQ ID NO: 4101 - DNA, 907 bp, Oryza sativa
  ref <308>: DATABASE ACCESSION NUMBER: AK061558
  ref <309>: DATABASE ENTRY DATE: 2001-12-06
ctctctcatctgccctcctcgactcgactcgactcccctccgccgccgccgccgccatcttcctcctccaccagaccaccaccaccaccaacaacaactcgtcgtcgcgtctgcctagctagggtttcccttctctacccaaccctaggaggaagatgagccgcagccttggtatcccagtgaagctgctgcacgaggcggcggggcacgtggtgaccgtggagctcaagaccggcgaggtgtaccgcggctccatggtcgagtgcgaggacaactggaactgccagctcgacaacatcaccttcaccgccaaggacggcaaggtctcccagctggagcacgtcttcatcagaggaagcagggtcaggttcatgatcatacccgacatgctcaagaacgcccccatgttcaagcgcctcgaggctaggattaggggtaaaggctcagctattggtgttggccgtggccgtgccgttgctatgcgtgctcgggctgctgctggtcgtggtggtggtccagttggacggggtggtgcacctcctgtgaggcggtagatttacgggcagctcattgtatgctgttatgatatggaggaagtccagggagtctttgtgttcatcatccaaaacgttggttcagcagccagagtgcatgtgagctaagcttatgtacctccatccagtttagtttgcctgtgtgcagaatggatggatgcatgccggtggtgttaactcgtaagcatgatgtattgcagcgaactttagtagctcggctcaagttttcataggtggggcagcgttttcatgtatgtagactagtgactcttgacttgtttcgttattaatccactgtaccctgctgcccgttgatatgaatgaatattgctgctactgtgctattgctgatt

SEQ ID NO: 4102 - DNA, 967 bp, Oryza sativa
  ref <308>: DATABASE ACCESSION NUMBER: AK061559
  ref <309>: DATABASE ENTRY DATE: 2001-12-06
gagctgatctgaatgatcccttctcacttccaagtactccacgaatgtaacaacttgatgtgacctcagttcttctcccatctcctcttctccccaccacgcgcgcgccgccctgcccagatgtttctccactccctcttgatgcaaaacatggccaagaacacaacaacgcagcagcagcagcagacgaggtcgtcgaaagaggcgggcggcggcggcgcggcgaggtcgagaggggtgtcgtcgaagaagtcgccgtggtaccagcgggcggttgaggtgttgctgctgatatggaagcagccgacgggggcggggacggggacgacgacgaaggccgcggcggcgtcggggatgggggctcggctgcggaagtcgtcgtcgctgaacgtggcggcgtcgttcacgcgggtctgcctgtgcgcgcctatctcgtcgtacaatgagcaggcgctctacttccaggcgggcgacgtggcgccgcgccggagctacagctacccgcgggcgtcgtcggcgtcggcgtccgggtgcagcggaggcggaaacagcaacccgctggtggcgccgccgcccgcggccgagcagagggcgctgatgaggacgcctggccccggcggggagagcgcgaggcggccggtgttccgcggcaagtcgctgacggacgacatcctgatgcggcggttcgtcgtcgacgaggaggccacgcggcggcgcaacgagatggaggtgatccggcgccgccacgcggccgccgccaagcggcggcgcctcggccccagcccgctccgccggatggccctggcggaatcggagtcggaggccgacgacgaggaggagacgacgacgacggaagcagccgagccgacgtcacggaggaaaccccaagccgtacccatcgcagcgtaacagcgaagcctccctgcttgtccctgtctcccctctcaattttttttccctcccttac

SEQ ID NO: 4103 - DNA, 1036 bp, Oryza sativa
  ref <308>: DATABASE ACCESSION NUMBER: AK104657
  ref <309>: DATABASE ENTRY DATE: 2002-08-28
atgcaaactaaacccatcaccatggcaccgacgtcgatgctccaccggagcctcctctgcctcgccgtgctcgccgcggcggccggcggcggcgctgctggttctccgcggttgcagtgcctggagaacccgccggagctgacggccgccggcgacggcgaggccggcgtggtcgtccaaaacctgggaggattcgcggcctacgtcaccggcggcgccgcccactccggccgggccatcgtcctcgcctccgacgtctttggatttgaagcaccattgctgaggaaaatagctgacaaagttggtgaagcgggatattacgtcgtggtgccagatttcttccaaaggcgaccttacaatggagacccaagtataaacattacaaaatggatcatggctcactctccggtgaaggcagctgtagattctaaaccgatctttgctgctctaaaaagagaagggaaatatgttgttggagttggaggttattgttggggcggaaagttagctgtcgaggttgcgaaaaccaatgaggttggagcgattgtcatctcccatccttcatcggtgactgctgatgatatgaaagatgtcaaatgccccattgaaatccttggagctgagaatgacgctgtaacaccaccaagattagtgtaccagtttgttaatgccttgcgccaaagacctgaggttgattactttgccaggatctttccaggagtggctcatggctttgcttgcagatataacgccagcaacccgtttgctgtcagaactgctgaacaatctcttgccttaatgcttgactggtttgagaaacacttgaaatgacaatagctaatcatgcatgtaatgcaaggccagtgcaattgtttatttccatcaaaatacattgctagtgtccatgtatatcctggtgttaagtgaaacttatataaataagcactagtgtaaagtgaaagtatgtgttgaatatggtgcgaagtgaaacaaagtgtactttatgaagtgcaaaatgcaaactctttttgttccg

SEQ ID NO: 4104 - DNA, 1142 bp, Oryza sativa
  ref <308>: DATABASE ACCESSION NUMBER: AK061560
  ref <309>: DATABASE ENTRY DATE: 2001-12-06
catagactttgggactcattatcccaaagtgccaccggctctccctctttgcctcccggtgctgcggcggctgtccccgaggccatgggatcaggcctcagacctccggggggagagggaaggccccgctgccgctgtccttgcagttacatggttttccggcggcttgctcaggcggcggtgaggtggagaagggaggaggtggtgggtggcagcaggggagggagacatcgcccatgtcgcccaatcctagagcgacgcaggggcgcaaatggatggtctctcctctgtgctcttcttcccagcatatctcaataattcagttgctggggagtaccacatgcatcagatgccgtgttggcacattgtaagagagcaaaggagccttgaggtggtgattcaaattgtggtgcaaattacacgtggagttgaagcatatgcatggagtagccatgggctagctagctaagctgcttaccagtggatggtaacattgtgagctacatgattgacgaccttgactaggacattatcgccttctcttgcatacagggttggccccgggaacttgccattgacagtgaggataggcttggttgagcaaagccgtgtcatgttccgcatgaccacctgcacaagacacagaaaagacagacaaaaccgtgttatcatgcggcaaagtttgatgacgatatatcctcacattgaacttgtaatgccgggtgatggcgtgggcgctgagagcctgaagcaggaagcaggcggccatgaggagcagggagagccggcgtgactccggcaggacggccatgtttgctgcgtgaccagcggcaggggaaggagaactaagagctggtgagagtgcagtgcagtgcatggaaatacggaggtaacgaatgcttataatggcgcactggctagataggagggaatgggcggtgttgggttttttagctgccatgtcgttttaaaatttaggtggggaagccttgcttaacaaggctaggaaccttctgattcatttactttcacgaccattcgcctaaattttaccagcccaatcccagctgctgctgcttctgtacatgcctgatagtgcattccttcagtaccacataaagctacctacccgattactccac

SEQ ID NO: 4105 - DNA, 1128 bp, Oryza sativa
  ref <308>: DATABASE ACCESSION NUMBER: AK104658
  ref <309>: DATABASE ENTRY DATE: 2002-08-28
accatctagctcactcacacagtctccactcacacgcattgcagaggagaggcgacaatggaggggaaggaggaggacgtgcggctgggggcgaacaggtactcggagaggcagccgatagggacggcggcgcagggcgccggggacgacaaggactacaaggagccgccgccggcgccgctgttcgagccaggggagctcaagtcgtggtctttctaccgggccgggatcgccgagttcgtcgccaccttcctcttcctctacatcaccatcctcaccgtcatgggggtctccaagtcctcctccaagtgcgccaccgtcggcatccagggcatcgcctggtccttcggaggcatgatcttcgcgctcgtctactgcaccgccggcatctccggaggacacatcaacccagcagttacttttgggctgttcttggccaggaagctgtccctgacccgggccatcttctacatagtgatgcaatgcctaggggccatctgcggagctggagttgtgaagggcttccagcagggtctgtacatgggcaatggcggtggtgccaatgtagttgccagtggctacaccaagggtgacagtcttggtgctgagattgttggcaccttcatcctggtctacaccgtcttctcagccactgatgccaagaggaatgccagggactcacatgttcctatccttgccccactgccaattggttttgcggtgttcctggtccacctggccaccatccccatcaccggtactggcatcaacccagccaggagccttggcgctgccatcatctacaacaaggaccatgcctggaatgaccattggatcttctgggttggtcccttcgttggcgctgccctggctgccatctaccaccaggtgatcatcagggcgatcccattcaagagcaggtcttaagccccgcgccgccgctgcgcagccgacgacatgcaacgcaatcgtgatgtcctgtttcccgcgcgctactgctgcgcatctgtcgattccctctatctctagtccccaagatgtttttcctatctgaaccctgaacaactcaatcgtgtaatccagtactcagtcactgtatgtttttatgtgatggagatcttaattctt

SEQ ID NO: 4106 - DNA, 1187 bp, Oryza sativa
  ref <308>: DATABASE ACCESSION NUMBER: AK104659
  ref <309>: DATABASE ENTRY DATE: 2002-08-28
agctcccactttccagtctcccgccgccgccgccgctgttcactccgcaccaactccgacgatcccccggcgagctctcgacgatggcgacggcggcgacggcgtcggctacggcggccacccgcttcacgcggctggcgggggtcgggctccggcgcacggcccgcctccccacggccgtgcggttccagcgccgggtgctcgccaccaccgcgctcctcaggaccgccgagctccggcccaaggagcagggcctgcccgagacgctcgactaccgcgtgttcctcgtcgacggcgggggccgcaaggtgtcgccgtggcacgacgtgcccctgcgcgcaggcgacggggtgttccacttcgtcgtggagatccccaaggagagcagcgccaagatggaggtcgccaccgacgagtcattcacccccatcaagcaggacaccaagaagggcaacctccgatactacccgtacaacattaattggaattatggattatttccccaaacatgggaggacccaactcttgcaaacaccgatgtcgaaggagcatttggggataatgatcctgttgatgttgttgagattggtgaaagacgtgctaacattggagatgttcttaaggtaaaaccgttggcagctttagcaatgattgatgagggtgagcttgactggaaaattgtggctatttctttggatgatcctaaagcatctcttgtgaatgatgtggatgatgttgagaagcattttccgggaacattgactgccatcagagactggttcagggactacaagataccagacggtaagcctgcaaacagatttggtctgggcaacaaacccacaagcaaggaatatgctctgaaggtcatagaagaaaccaacgaatcatgggagaaattggtgaaaaggaatatccctgctggagagctctcactagcctaatcttgtccatgagaagccatcagattcttttggtcatttacctaagcatgttgttttcataagctataagcatgctgcttcttgcgaactctttggtgacctgtgtgcaacaggaacagcttgtggagtgaataaggctttctgagctagtttttctaagggaattgggtgttcttgagcagcgattgtgtttggaacaagctttacaaagtgaacaatcagtttagaagttgaatgataagc

SEQ ID NO: 4107 - DNA, 1122 bp, Oryza sativa
  ref <308>: DATABASE ACCESSION NUMBER: AK061561
  ref <309>: DATABASE ENTRY DATE: 2001-12-06
tgtgcaactacaccggcgtctactgcgcggcggcgcccgacgatccgcacgtcctcaccgtcgccggcgtcgacctcaaccacggcgacatcgccgggtgcctccccgaccacctcggcctcctcgccgacgtcgcgctcctccacctcaactccaaccgcttccgcggcacgctgccgccgtcgatgcagcacatgcgcctcctcttcgagctcgacgtcagcaacaacctcctcgccggcgcgttcccggcgttcctcacctcgctgccggggctcaagttcctcgacctccgcttcaacgccttcgacggcgagctccccgccgccgtcttcggccgccggctcggcctcgacgccatcttcgccaacgacaaccgcttcaacgtgtcgctgtcgtcggcaagcctcaccaactcgacggcgtcggtgatcgtgctcgccaacacccgtctcgccggctgcctgccgccgtccatcggcgacatggcggacacgctggtggagctcatcctcctcaacaccagcatcagcagctgcatcccgccggagatcggcaagctgaagaagctcagggtgctcgacctcagccacaacgagctcgccggtgagctgccggccagcgtcggcgacatggagagcctggaggtgctcaacgtcggccacaacatgctcgccggcgaggtccccgaggccatctgcgagctacccaggctgaggaacctcaccatcgccggcaactacttctgcgacgagccggtgtcctgcctccacgtcccgctccgcgacgaccggatgaactgcatcccggactggccgcaccagcgctcgccggaggagtgcatcgccttcgcccaccgcccgccgccgcactgcgccgccgacggctgcatcgtcatccctccgccgtgagcgatcgatcatggcggccggagtacgtaacgttgcatggtcgtcgttggtgacgtcatcgtcctagttggttggtagagactgcaaatctccatgtggttttctaggagggggtagccaattaatattctatcatccatccatgcatccaaatttcagaattaaatggttgttgttaaaaaaactttcgattatcattaattaagttgtg

SEQ ID NO: 4108 - DNA, 955 bp, Oryza sativa
  ref <308>: DATABASE ACCESSION NUMBER: AK104660
  ref <309>: DATABASE ENTRY DATE: 2002-08-28
aaaaaaaaaactcgggaaaccatagctccagcaatcggcggcggcggcgacgcgggagaggcggtccggcgacgatggtccacgtcagcttctaccgcaactatggtaagacattcaagaagccacgtcgcccttacgagaaggagcgtcttgatgcagagctgaagctagtgggtgagtatggactgaggtgcaagcgtgagctgtggcgtgttcagtatgctttgagccgtatccgtaacaatgcaaggcacctgctcacacttgatgagaagaatccacgccgcatcttcgagggtgaggcactgcttcgccgcatgaaccgttatgggctccttgctgatgggcagaacaagcttgattatgtccttgccctcactgttgagaacttcctcgcaaggcgtcttcagactcttgtcttcaaggctggcatggccaagtccatccaccatgctcgtgtcctgatcaggcaacgccacatcagggtcggcaggcaaattgtcaacatcccgtcgttcatggtgagggttgagtctgagaaacacattgacttctcactgacaagcccattcggtggaggcccccctggtagggtgaagaggaagaaccagaagaaggcaagcggcggtggcggtgatggtgaggaggaagatgaggaatgagaagaagtttgcaactagttgtttccgtaatgatcataaaactttctgtgctgagtaactgggcccaaattctgtagcttgcctatctgggtttcagaattcaagcaggttggccttcagatgttggtttatgttagctctttttggcaccatgttaggtagctcgaattaaagatatgcctggagatgtttaattttggtgttttatatgtttttgcattcggcattgtggtcaatgctgttttatggattcgtttcatggtaatcctcactcgtaccagtgtgcttgaact

SEQ ID NO: 4109 - DNA, 938 bp, Oryza sativa
  ref <308>: DATABASE ACCESSION NUMBER: AK061562
  ref <309>: DATABASE ENTRY DATE: 2001-12-06
ctccatggtcagtctgtccgccgccgtcgctccggccgccggcgtcgtgccgccgcctcaaaaagcccaagctttcgccgtagccgaagcgcatgccccgaccatcccaagaaggcacctcctcctcgcctctgctgcctccacactgcccgcggccgcggccgcggcctctgcctctgccgccgccgcccctagcttcgccgagatccccggctccggcggcgtgaaggccctagacctccgggagggtcccggcgaggtcccggccgacggcgaccaggttgcaatccattactatggaagattggcagcgaagcaaggatggcgctttgattccacctatgatcacaaggacgagaccggtgatccgatgccgtttgtattcaccgtcggagctggaaatgttatacctggtattgaagcagcagtgaagtccatgagagttggtggtcttcgccgtgtcatcattccaccgtcacagggatatcagaacacatcacaagaacccattcctcctaatttctttgatcggcagagattatttactactatatttaacccaacacgtctggcaaatggcgagggttccactctcggtacactcatcttcgacatcgagctaatcagcataaggcagcattcataactgttcagcactgccaaggctgcagattgatcaacaccctgatagaaatctcaaggaagctctgatcatccttctgttcaatcccttctgtaatatgaagaaaacatagtgatggtctccaattctccattccttgagcaaactcaggtgtattataacagattttgtggtacagaaagaaattacaaccagaaatcaagttgtacacatgctttgattgcaattcaaatttgatgtaaatttggcttttgatggatcaaagagggagtaattttgcaccctacagtgcagt

SEQ ID NO: 4110 - DNA, 1158 bp, Oryza sativa
  ref <308>: DATABASE ACCESSION NUMBER: AK104661
  ref <309>: DATABASE ENTRY DATE: 2002-08-28
tgaagtgatgcatgtctgcagtgatcatgatgatgatgaagggacagattcgggtgaagactttgatgaaaatgagggtctactttctctggaatcagattccactgatgatgtagtggatattgataatgaattggtcatatcgcctaccttttctagttgcaatgcatctgaatcatcaatcaacaaatcagactctggaaattcttccattaatggcactccaccgttggtttctgcaatgaaaggaagccgtgcaaagttgggaatcgtcacaagtttgagtgtttcatgggcccctgatgtatatgatcctcctgttacttctgggtctcacactgtgaaggggcatcaaagaagttcaaggaagagccactacaaatacaagccggccaagagcagtagcagccgcagcagcagtggaagcaaaaaggacaggaagcattctcgccacagtagcagcagcagcagcagcagtaaccacaaaagagacaggaaaccttcctaccgcaacaccgttggtggtgtaagcgtcggcagcagcagcagcagcagaaatactgatgctagtgctgctcaatatcgtgatctgtacagcagcagtggcggcaacagaatcgacattgctgttcctcaatacagcaagctatctccgttggtgccgtctgagagtgcaacatatcgtaatgtgtacaacagcactagcggcagcagaactgaccctaccgttcctcattgtagcaagctatctccgctggtgacatctgagagtgcatcacttgcagggaccgttcctgtgctgaagacattggagccgatcaaacgcagctccagctgctgcaaggagcagcctttgagctttctgtcacgccagtttgtggctgcaaagtacaaggggatgttctcactatggagtcacaaccagctagcttcttaatcatctgttgatacatccaactcgtaagctgttggttatcaacaaaatgcaaaacttttaccgcttatgcctttattattttgatttgtgaccacgtgtcttgttctttgttacactgtttgctccgtttgttgaacatccgaagagatgttatcgaaagttgtcgctcgaagtatgtatgcatactcgagctcattatcttcccgttaaaaaaaaaaaag

SEQ ID NO: 4111 - DNA, 1400 bp, Oryza sativa
  ref <308>: DATABASE ACCESSION NUMBER: AK061563
  ref <309>: DATABASE ENTRY DATE: 2001-12-06
attgaagccaagctcccccaggccttctcgttctccccctcctcctcgagctctcgctggtgcggggagcgaagtggagaggagaggccgagagggacgagagatcgagagggagagggagcaccgaagcagcgggcggcagcatgcggccttcgctccgtactatctattttcttcttttgctacttccacatgtggttttttctagaccactctttccactaccaagcaagagtaatggaatagagaagagacccttacaaacttttcgaccatataacattgctcaccgtggctcaaatggggaaattcctgaggaaacagctgctgcttacctgagggctattgaagaaggtgcggattttatagaaacggacatccttgctagcaaagatggggccttgatctgctttcatgatgtaacactggatgctacaactgacgttgccagccgcaaggagttttccaatagaagaagaacctacgaggtggaatggttcaacgctactggctggtttgtagtggacttcacacttgaggaacttaaaacactgaaagtcaatcagcgatacccattcagagaccaacaatacaatggcaagttttcaattatcacatttgaagaattcatttctattgccttggatgcaagcagaactgtcggaatatacccagagatgaaagatccagtttttatcaacaagcatgtcaagtgggatggtgggaagaagtttgaggacaaatttgtggataccttactgaagtatggatataaaggccaatatatgtcagaaaattggctgaagcagccgttgtttatacaatcttttgctcctacttcccttgtacatgcatcaaagttgacagactctcccaagatattcctgattgacgatttctcagtgagaacacaagatacaaaccagtcatactgggacatcacttctgatgactacctagcatatattagtaactatgttgttggccttggtccatggaaagatacggttgttccagcagccaaaaactatacgatggcaccgactgatcttgttgcaagagcacatgctcataatcttcaggtacacccgtacacatacaggaacgagaaccaattcctgcacctcaacttccatcaggacccttatgctgagtatgatttctggataaacagcatgggggtcgatggattgttcactgatttcactggatccctgcaccgttaccaggaactggtagctccacatgcgaaggatgaaactgcaaacagcctcctagtaaaaattgctcaaatgatctcccaatatgaaggtttctgatcatgttttccatttttccgttaatcgacatgcttatatacacgcattagtgatcaagggtgaccttgaatgttacagaac

SEQ ID NO: 4112 - DNA, 1071 bp, Oryza sativa
  ref <308>: DATABASE ACCESSION NUMBER: AK061564
  ref <309>: DATABASE ENTRY DATE: 2001-12-06
agagagagagagagagagagagagagagatggacgccttctactcgacctcgtcggcgtacggagcggcggcgagcggctggggctacgactcgctgaagaacttccgccagatctcccccgccgtccagtcccacctcaagctcgtttacctgacactatgcgtcgccctggctgcgtcggcggtgggcgcatacctgcacgtcgccttgaacatcggcgggatgttgactatgctcgggtgcgtggggagcatcgcctggttgttctcggtgcctgtctttgaggagaggaagaggtttgggattctcttggccgctgccctgctggaaggggcttcagttgggcctctgatcaagcttgctgtagactttgactcaagcattctcgtaacagcatttgttggaactgccattgcatttgggtgcttcacttgcgctgccatcgttgccaagcgtagggagtacctctaccttggtggtttgctctcttctggcctctccatcctgctctggctgcagtttgccgcatccatctttggccactccaccggcagcttcatgtttgaggtttactttggcctgttgatcttcctggggtacatggtgtatgacacgcaggagatcatcgagagggctcaccacggtgacatggactacatcaagcacgcactcaccctcttcactgacttcgtggccgtccttgtccggatcctcgtcatcatgctcaagaacgcgtctgacaagtcggaggagaagaagaggaagaagaggtcttgagagcttctcttcccgctttgcacataagaaaaaaccaccgcggctattgcctctacgtattatgacagagccgcacttcaactgggttttatggtgaatacaagttcttttgcattttgttgatacggtgtgaatcttctcaggtttgtcgtcgtagtagctttgcaaatactagcatgctacatgacacggatctttctgtaatggtggtcgcgttgatcgaaacgtgaaaacacatcttcatttgcgactaatttgtttgccttttggtgattgatgatgatcctttcccc

SEQ ID NO: 4113 - DNA, 1046 bp, Oryza sativa
  ref <308>: DATABASE ACCESSION NUMBER: AK061565
  ref <309>: DATABASE ENTRY DATE: 2001-12-06
attctggaagccggaacaaagcaacaaggaaccatggtggcggtgctcttcaaggacgtggccaagacggcgcacgacgtcctcaacgacgactacgactactcgcgcaagctcaagatcaagagcaaggcctcgaacggcgtgagcttcacgaccgagggccagctcaacgccaacaagtcgatcctcgccaaggtcgccggcggcttcacgcactcgggcagcggcgtcgtcttcaagaagctccaggtgaccacgcagggacgcctcgtgaccgaggccgagctcccgaatgtgctcacccacggcctcaacctcacgttcaagctcgaggacggctcggtcgccaagcacgccagcgccaagcaggtcggtgtgctcggtgccgagtacaagcaggccaagttctccttcaacacggaggccgactttgtgagcaacacggtcaaggctgctggtgcgattgtgcaggacagctttgtcctgggcggccaggtcgcgttcaacgtcgacaagtcggcgctcacggagcacaacgttggcgtgagctacgtcagccacgacttcacgacgtcgctcgtgaccaagaagaactttggtgccctccaggcgtcgttccaccaccgtctctccaaggacacgatctacgcggccgtgttggactacgacctcaagtcggcggccaacacgctcaacgtcggtggccgcttcaaggcggatgccgacacgacctacgccggcaagatcgactcggagggtttcgtgtcgctcgcgtccatccagaaggtgcgcccgtacgtgacgctcaccacgagcgtccacgtcgacgccaagaactttgagggcgacgcacacaagtttggcctgggcctcacgctcggataagcacctggccccccacgtgtcgtcagtttggactgccgtgtcccgatgcaacgtgtgcgtcaatgcgcattagacaatgtgtatcgagaggacgggcctcggacagaaagcaggaaagacccgtaatactgtaaatggagcagcaatgaaactcttgaggg

SEQ ID NO: 4114 - DNA, 1589 bp, Oryza sativa; identical to SEQ ID NO: 129
  ref <308>: DATABASE ACCESSION NUMBER: AK104662
  ref <309>: DATABASE ENTRY DATE: 2002-08-28

SEQ ID NO: 4115 - DNA, 1219 bp, Oryza sativa
  ref <308>: DATABASE ACCESSION NUMBER: AK061566
  ref <309>: DATABASE ENTRY DATE: 2001-12-06
attcccctcccccctcttcgcctgagtcgagtcgcctcccccaccgccggccaaccatgctgccgccggccgcccgcctcgcggcccgccgcctcctagggctcgcgacctcctccgcctcggaatcggccgcggcgcgacgcttgtcccgttctccgatctcctacgccgccgcgggctgctcctccaggctgttctccacggcgcttaactaccacctcgattcgccggaaaacaaccccgacatgccgtgggagttcacggaggccaacatgaagaaggttaatgagatattgtctcactatccaagcaactacaagcagtctggtattattccaatgcttgatcttgcccagcagcagcatggtggatgggtgccagttgcagcaatgaatgctattgctaagatcgttgaagttgcaccaatcagagtatatgaagttgctacattttacacaatgtttaaccggactaaggtgggtaaatatcaccttttggtgtgtggaaccacaccttgcatgattcgtggttcacgtgaaattgaagaagccttgttagaacatcttggagttaaacggaatgaggtgaccagtgatggtttattttctgttggagaaatggagtgcatgggctgctgtgtgaatgctcccatgattgctgtggccgattattctaaaggttcagagggttacacatacaactattatgaggacctcactcctaaacgagttgttgagatcgtcgagatgctgaaaagaggagaaacccctcctcgcggcacacaacacccagagcggaaaaactgtggccctgctggagggaataccaccttgcacggtgagccgaaacctcctccgtgcagggatctagatgcttgctaggtttgctttgaattacaggcacacaaataagttgggccacactatgattatatggtgtggaaactggaacaaagcaaggcgatgtgttgtttgtattttgatcttgttttgtttacctctgcccgcatcttttttctctccttttgcaccatcagagaaatggtacattgataatgacgatatgttattttgtcagctgacatgaggcggcagtggtaaaaagatttgtattcgtctttcggcaaagataaaactcttggacattctctttttgggcattccttttcagcttctgattagtgatgagtgcccattaaagcacgacatcatcgcgtgtt

SEQ ID NO: 4116 - DNA, 1080 bp, Oryza sativa
  ref <308>: DATABASE ACCESSION NUMBER: AK061567
  ref <309>: DATABASE ENTRY DATE: 2001-12-06
atccatctctacacatcagcaatatttagctacacagagctagctaggattagctcagcaatggcaggtgctcctcgaggactagttctcctcggcgtttgtgccgtcttgatggcggtcgccgtcggcggtgaggcggcgtcggttgtcgtcggcacggccaagtgcgccgactgcacccggaagaacatgaaagctgaggatgctttcaagaacctccaagtggcgatcaagtgcaagaacaccaacggtgagtacgagagcaaggctgccggaaagctcgatggcaccggcgctttcagcgtccccctcgacgccgaccttgacagctccgactgcatcgctcagctccacagcgccaacaacgagccatgccctggtcaggagccatccaagatcgtgccaatgtcggagggcacctttgtcgccattgccggcaagacacactacccatcagcgttgtgcgcgtcagcgaccatctgcggtcccatcaagaagaagatcatagaccacttccacaagaagccggtgccacccaagccggagccgaagccggagccacccaagccgaagcctgagccggaacaccccttcctcgaccatatccacgagaaggagaagcacttcttcgaccacttccacaagaagccagtgccacctaagccagagccgaagccagagcccaagccagagcccaagccgcagcctgcgccggagtaccacaacccgagccctccggcaaagaactgatgaatatgatccgcactggacgtttgatcatgccgtcctgccccctgtcagattgtctgcataataacagtttgagatcgaagtcatgcattagctttcatcgacaggagttttaatttgtacttgtatctatttcttctctatcaaatgcagttatatatggtaagataatttatttatatttaatcagtactgttgtggcggactattcactgtatcagccaaagccattggatcgtaagaggttagcattggttaaagaaaaagttatttttatctgacaaactagtcccaatgacggaattttcctgatgttgatacgtcacgaat

SEQ ID NO: 4117 - DNA, 1105 bp, Oryza sativa
  ref <308>: DATABASE ACCESSION NUMBER: AK061568
  ref <309>: DATABASE ENTRY DATE: 2001-12-06
atcacctcaaaacctctcaaaccccacaggcaccggaccaccaccaccattggcaccacctcgcatcacactctctcgctcgccatgagctcccgcgacgccgccgccacgttccatgtctaccagcccgtgcagatcccgacggccacggtggcgcccgctgcggcagtgtcggcggcgccggcagaggccgtcgcccagctggtcccggcgccgagcaagaaggcggccggcgcggcgggtgggaaggaccggcacagcaaggtgaacgggcgcgggcggcgcgtgcggatgccgatcgtgtgcgcggcgcgggtgttccagctcacgcgggagctggggctcaagtccgacggccagaccatcgagtggctgctccgccaggccgagccgtccatcctcgccgccacggggaccggcaccaccccggccgccttcgtctcctcctccgcgccgtccacctcctcctcgcaccagcacaccctcctcggcaagcgccagcgccaggagtccgccgccgccgacgccgtctccgtcgccggcgccgcgtccgcgttctgggcggcgctgcccgcaccaggccggcccgacgcctggggcttctccccgctggacgcgcagccgacgtacgtgccgatggcgcaggcgcaccaccaccacctcaacctcctcgccgcgctctccggcgccgccaggcgcgccgaggaggagtcccggtgaatcacgcacagcagcatgcatcttccgagctctgacacgtctttcgctcaattcaccgacgcgtactgcactggcgtccgtacgccttgttcttgggacagttcttgattggagtgtgcttcttctctctaccccgtggatcgatcgttttgccttcttcctgtgcggttcatcaattgctcaagatgaaattaattgttgctgtggtgtttaagctcaaaactgtaaatacgagtccttagatctcatcttactcctacaaattccagcgccgcatgtgtttgtgtgtttgccacttgtttccagctcttgtgctatgattccatggaacttgtttcagtttagcttcatctacatcgttgtcagaccaaatcatttgacagtt

SEQ ID NO: 4118 - DNA, 1149 bp, Oryza sativa
  ref <308>: DATABASE ACCESSION NUMBER: AK061569
  ref <309>: DATABASE ENTRY DATE: 2001-12-06
attcggcatccgcttctcggtgggcaacgcgacggcggcggaaagccaaggccaacgatgcagcgcctctcccgcttcgtcccctcctcctccaggagagtcactgacctaaaggatgctctctggagtggttctttgactttccaacatgctctttcaacatttgcagcagacgagaacacatctggtagaaaatttgcaagctacaccgtgttcaagggaaaggctgcactttctatgcaacccatactgccaagcttcagcaaactggaatctggaggatctcgtgtgaacaaaaatggatcggtgatgttgacttttttcccggctgtgggacaaaggaaatatgattattcaaagaaacagctctttgctctgtcacctactgaagtcggaagcttgataagtcttgggcctgctgaatcttgtgaatttttccatgatccctccatgaaatcaagtcatgaaggccaagtgaaaaaatcgttgtcagtcactcctctcggcaatgacagtggatactttctgaatataactgttctgaacaacttgcagaagacaactgagcgactttcactcccaatctcaaaagctgagtttacagttatgcgcacagcattgagtttcgcattgccgcacatcttgggctgggaccaggccttgactaatcaccagccaagtccatcaccagctagcaagcccagggtggagcgcccacacccagattcagagtgggaaaggtgaagctcccttgtaggcaccagcagcatggagggatttgaacatcatcgctaccaaaatttggatgctgttgcactttctccacgaaatcgaattaggagatatctattagattcatggagctaaagatcgaatgtcacagattgagcacaccatgaagggttgtgtttgttcaatgcatgtttgaacttcaccaggcctactagttgcaaaattctactccagttagctatgcattgcgtttgacaccttgtgccttttgaatgtgtgacttatgttatttgcaaaatggtggagtcttacaaaactactcaaacgtagttgagtggttatggctttaaaaagctaaacaaaaaacatatctgtttgttaaggctcaaactttttattccactgcatcttaaactc

SEQ ID NO: 4119 - DNA, 1091 bp, Oryza sativa
  ref <308>: DATABASE ACCESSION NUMBER: AK061570
  ref <309>: DATABASE ENTRY DATE: 2001-12-06
aatgcgtcaaacacttgacctgcacttgctcggagcggtggcgtcccaatccaatccattcccaatgcgacttctcaggaggatcccgctgctcttggttgacaggatcatgacatgcaactggaaaatgcttgattatgtttgatagtacgaggattgtccgagtttctgagattattgccttcaatggaggttgaagctgcttgtggtgatggagtagtcagttcaagcaatgagatgcaggaattgtggccactaggtgaagtagaccaaaagggaaccaggttcccttgttgcattgtttggacacctctgccagtggtttcttggctggctccctacataggtcatgtcgggattgcccgggaggatggaactgtcatggactttgcaggttcaaattttgtgagtgtagatgaccttgcatatggttctgctgcgaggtacctccagctcgacaggagaaagtgctgcttccctgccaacctcgcggcgcatgtgtgcgcgaggtcctacgagcactcggaggccgggacggcgatctcgtgggacgacgcgctgcagtccggcgcgaggcggttcgagcacaagtgctacaacctcttcacctgcaacagccactccttcgtggcgagctgcctgaaccgcctcgcctacggcggctccgtcggctggaacgtcctcaacctggccgccctcgtgtggctgcgcggccggtggctgggcaagatggccgtcgtccggtcgctcctccccttcgccgccgtggcctgcgtcggcgtcctcatggccggctggtccttcctcatcagcatggcggcattctcctccctcctcctcggctggttcgtcctcggcgtctactgcttcaagggcttggtctgctgatcgatctgaaggccattttgttgaaattcgaccagaatatgcatcttttttcagttacgcaacgcgcactttcagtaaattatagacagtttttacagtgaaatcagagagttgtacacttgtagtcatctttgaagtttcatggaactataatctcatggatgatgatgaaggagaaccgatgaaaagaccatttctactgt

SEQ ID NO: 4120 - DNA, 1044 bp, Oryza sativa
  ref <308>: DATABASE ACCESSION NUMBER: AK061571
  ref <309>: DATABASE ENTRY DATE: 2001-12-06
agcagatcatcaaaatactcaaactaagctaatccatctccctccaagaccaagaattccattccactagttaatctcaatctcctctttcgaggaatctcatcaacaaaaacaaaaaaaaaaaacattgccgcatccggagtagctagcgcgctaattacatttacatggcgatccaatccaatccagatgccgcatcaccttccatggatctacagactacaggtaggaggaggaggaggaagaagagggtcggccagcggcggcgatggacttggcgtcggagggcagcaggacgaggaggaggagcacggcgaagatggcgacgggcacgagcagcagcatcggcggcggcggcggcagcggcggcagcagcagcggcagcaccagcagcgtcgccgtcaccaccccgagcagcaccgccgcctccacccccaagtaccctcctcctcctccgcctacttccaccgccgccgccgtctcctccaccactctccgcttcactcccacctgtccgtacaatctccctcccgtcgccgccgccgtggacctgtgcccggccatggcgtcctcctcgtaacgcagcaagatgactcctcgcatcaagaagcagatgcagaagcggaagcaatggaggagaagaagacgaggaggaggaggaggagctgaagaaataggcggcgaagagaagaagcgtccgtacgggtgccacttggcgggaagcacgcacgcgtgtgaatgccacgtgggacggccacgtcggacagggacagggatgatccgacggctgggattgagcggcgagggtgaagccggcgatgggattggaaaccggggatacaaaaccggtggcgggatagcggattggccgcaggattgggaaatagaaaggcgacgggtggatggtattttgggaggtgcatgcatctgtccatcaacatcttcatcggctcatcactatcggcctgctttaattcctaactttttctttaaattttcaattttttcatcacattaaaacttttctatacacataaactgtcg

SEQ ID NO: 4121 - DNA, 1217 bp, Oryza sativa
  ref <308>: DATABASE ACCESSION NUMBER: AK061572
  ref <309>: DATABASE ENTRY DATE: 2001-12-06
tgctttcacacttctcctttctgctctgggcgcggcgcgagctcgaatccatggaggccgagtcgagaaagctccttttggctctggccgtctcgctctgctgcttcgtcgccgcgtcgagagcgcaatcgtacatcggggtgaactacggcgaggtggcggacaacctgccggcgccggaggagacggcgaagctgctcaagtcgacgaccatctccaaggtcaggctgtacggcgttgatccggggatcatgcgcgcgctcgccggcacgggcatctcgctcgtggttggcgtggccaacggcgacatcccctcgctcgccgccgaccccgccgccgcgtcccggtggctcgccgccaacgtgctcccgttcgtgccggcgtcgaccatctccgtcgtggccgtcgggaacgaggtcctcgagtccggggacgcctccctcgccgccgcgctcctccccgccatgcagaacctccgcgccgccgccgccgcggccggcgacggggccgccaggatcaagttctccaccgtgaacaccatgaaccagctctaccaggccgccggccgccacccctggaactgcgacttccgctcctccgccacgctcacctctgacaaccccagctatggctcatgtgtgtacaccggaggccaatgatgaacaccaaccatcacggactcaattacctattaaccattttatcctccacacagctccagtccatggcccatatataattcgttttcttctgcagctatcaccatatatgatgatctactatacaagttttccggccctacaaacgcctgcgcgaatcgaataaagccacggacaataatgtaacgttttatggtggcggtggttggctggctcactgtgaggatgcatatcgtcctgtctccgtcttcttctcggcgtagcagatgcttccatttcctcggtttgcctttgtggcttttgtgcctttgtgcgtgcgtgtgtgtgactaactgtgcatatggcgtctcttctagtgcagctttgggcaggttggctttgtgatgactgtgtagaggcgtgtgagtcgttgtcaatggtgatacaggttgtttggtgtgtaatctacctatgcttatatgtatatgcctatatttatagtcgattatgttgcattatttgtacgtgcatgttgtcatgcttgtctggaatatgacagttttatcggatttttggagt

SEQ ID NO: 4122 - DNA, 992 bp, Oryza sativa
  ref <308>: DATABASE ACCESSION NUMBER: AK061573
  ref <309>: DATABASE ENTRY DATE: 2001-12-06
aagccaaagctttgcccctggaaattggaattcaactggccacataactcattccatttccacgcacaaacaaacgccaaaaatcgccgagaagaatccgaagaaaacctcacggcggcggcggcgaccggcgaccagaatcggcgaacgggcacgggccgagcagatctaggcgagggagggagcgatggggtcgagcgagatgacggcgacggaggtggcggcgctgctggatctgaagccgcacccggagggcggctactacaccgagacgttccgcgacggctccgtctccgtcaccaccgcgcagctcccgccgcagtacaaggtcgaccgtgctatcagcactgctatctacttcctgcttccatcagggagtgtttctcacctccatcgcattccctgtgctgaaacatggcacttctacaagggagagcctctcacggtctttgagctacacgatgatggacacattgacctcactgtcatcggtccacacctggaggctggccagcgtccccagtataccgtgccaccaaatgtgtggttcggttctttccctaccctggatgttgaatcattcgcatctgatggcagcgttcttgtcaagtctcgaaagagggatcctgagcttcattactccctagttggctgcacttgtgcccctggcttccagtatgaggatttcgaaatggccaattttgatgatgtgaaatccattgctcctaaggcagaaccgttcctcaagtaccttattccttccaccaagtaatcatgttttgagctcaacatactgtattttagcagcctgtctggtaagattgcctgacggtattggacgccatttttagtgtgattgcttcgggtttgtgttcttgtcttgtacacttaagaacacgcatgtccttggtgatagttgtaacactctcctgtacgaaaacagaataaaacactggcaatgttgagatgaaatttgcttgtgctaagccttc

SEQ ID NO: 4123 - DNA, 1202 bp, Oryza sativa
  ref <308>: DATABASE ACCESSION NUMBER: AK061574
  ref <309>: DATABASE ENTRY DATE: 2001-12-06
agtacgccacgcgccgcctgagccctcgcgtcgcgacaccgctcgccgcggcggcgctgctcctctccagcgaccacgcgaggagggagaagaggaggaagaaggcgagaagggagcaagctagaagagtgggagagggggacatctaggtcgtcgacggcctcaatggggtggggcataccgacgcggccgccggcgacgtcgacgccgtcgcgggtgcaggcgctgtacgagctctgcaagcgcaccttcccgtcgccgtcctccgtcgccgcgtcctcctcgccgtcgtctccacctcccgaccacgccatcggcgccatctcctctctcatggatacaatcactcctgtggatgttggactcagagatgataatcttgaggatggaagaggatttgggttctttgaatcaaacttcttgaagaattcagcaagggttgctagatgggcgcaacccataacctacctgcatgtctacgagtgtgacgccttctctattggaatattctgcttaccaacatcggcggttattcctctccatgatcatccgggaatgactgtgttgagcaaattactctatggttcgatgcatgtcaaatcgtatgattgggtagagcctgctgttctagcaaatggcaagccagtgaaacttggaaagttacatacggatgatgttctgaatgccccttgtccaactgctgttttgtatccccaaagtggtgggaacatgcactgcttcacttcagtaaaatcatgtgctgttcttgatgtcattgccccaccatactctgaatcttctggccgtgtttgcacctattttcacgattatccattttctagcttctcagctggacaagcaaaagtagtccatgggccagataattatgcttggcttgaggccttaatcgtaccggtgaatattaatatgcgccctggcacgtacactggcccaactatacaggaacatctgccataatcaataaaaatggataggacaggagcatcaaactatgtccaagtgcaatctcacaaatacagttcttgtcatgtagtgatgtaaatgtaacatgttcatctttacattttgatttatgttggaacttccttcatagaaaaggtgtggctatagtggtgacatagtcaaaacagtttgtactagctactccgtatcatagttaccaacctgcattctaaattgct

SEQ ID NO: 4124 - DNA, 1205 bp, Oryza sativa
  ref <308>: DATABASE ACCESSION NUMBER: AK104663
  ref <309>: DATABASE ENTRY DATE: 2002-08-28
aaaaaaaaccactcaagaagctgcaaccgcgtaatctcgagaaaacggtttactcggcctaagacagtgggagacgacggcgacggcggcggcgggaggaagccatggttctcgctctgctgttgggctcctcctcttcttctcttgcggcgccacaccctgcttgctcttccaggagaaaatgcagacccgctggacgaaataatttcagatgctctctgcatgacaaggtgccactgaatgctcatggagtattatccacaaaattgctctcatgccttgctgcttcgcttgttttcatctctccaccttgtcaggctatccctgcagagacctttgtacagccaaaattgtgccaggttgctgtggtagcagccatcgacaaggctgcggttcctctgaaattcgatagcccttctgatgatggcggcacaggtttgatgatgaagggtatgactgccaagaactttgacccaattcgctactctggtagatggttcgaagtagcatcgctgaaacgtggctttgctggtcagggacaagaggactgtcactgtactcagggggtgtattcatttgatgagaaatcacgctcaatccaggtggacacattctgtgttcatggtggacctgatggttacatcaccggtattcggggaagggtgcaatgcctgtccgaagaggacatggcgagtgctgagacagatcttgaaaggcaggagatgatcaaggggaaatgctttctccgtttccccacactaccattcatacccaaggaaccttatgatgtgcttgcaaccgattatgacaattacgccgttgtgtctggtgctaaagacacaagctttatccagatatactcaagaacacctaatcctggaccagaattcatcgagaagtacaagtcctacgctgccaacttcggttatgatccgagcaagatcaaggacaccccacaggattgcgaggtgatgtccacggaccagcttggtctgatgatgtcaatgcctgggatgactgaggctttgacgaatcagttcccagacctgaagctgagtgcacctgttgcattcaacccattcacaagtgtgtttgacaccctgaagaaacttgtagaactgtacttcaagtaaactccatattgtaaaacttgtgatcaatgttccctccacatgaagatgcagttgaataaaattctcacacac

SEQ ID NO: 4125 - DNA, 921 bp, Oryza sativa
  ref <308>: DATABASE ACCESSION NUMBER: AK061575
  ref <309>: DATABASE ENTRY DATE: 2001-12-06
atattaaaaaaaaatccacataaaccctcgcttccgaaaaaacccgcatcgccgcgcggagcaaagcagagagggggaggaagccgccgccgccgccgccgccgccgccgcacggcgggatggagtcgacgccggagccggaggacgggagggagctctacgcgctgctccacctctcgccggacgcctccggggaggaaatccgccgggcttaccgccagtacgcgcaaatctaccaccccgacaagtaccaggacccccagatgaaggatgtggcaactgaaaacttccaacgaatacgtgatgcatatgagatactatcagatgagaacaagaggcagatatatgacatctatggtatggaaggtttaaattctggcctggaacttggccccaagctaaacaaaccagaggaaatcaaagaacagttggaacggctgaagcggcgcaaggaagaagagaaatttttagcccatgctcgacccactggctcaataattgctaatttttccgtgccacagtatttagatggctatggaatcatgagaggcatgggaatgtccagtgaagttcagttgccagtgtccaagaaaaatactgttgttgttggtggaaatttggttgtcaatggcacagatggaactggtgcagcaagcgctgtgctgcgtcaccagttgtcttctgtggcatcagtagagtttatggctacagctggactacgttcccttattagcgtacaaacatttcgtcaaatttcaccacattcgacagcaacatctggacttgctctttctttgagagatggatctatcaatctatcaaatgcctggactcgccaactatctgacaatattgttgggaatatacagcttgcccttggtacagactcaagtatttctgttggatggcaaaagaaggatg

SEQ ID NO: 4126 - DNA, 1156 bp, Oryza sativa; identical to SEQ ID NO: 3441
  ref <308>: DATABASE ACCESSION NUMBER: AK104664
  ref <309>: DATABASE ENTRY DATE: 2002-08-28

SEQ ID NO: 4127 - DNA, 1011 bp, Oryza sativa; identical to SEQ ID NO: 785
  ref <308>: DATABASE ACCESSION NUMBER: AK061576
  ref <309>: DATABASE ENTRY DATE: 2001-12-06

SEQ ID NO: 4128 - DNA, 1323 bp, Oryza sativa
  ref <308>: DATABASE ACCESSION NUMBER: AK061577
  ref <309>: DATABASE ENTRY DATE: 2001-12-06
aatcaagaaatccacatttctcctcggaaagtcaaaggcaagaaacaccatggatgccactgccatcggcaacggcgccctgcactccaatggcgccggcgccgacaccaaagggaagccgatcaaatgcaaagcggcggtggcgcacggccccggcgaggcgctggtgatggaggaggtggaggtggcgccgccggcgaggatggaggtgcgcctcaaggtgctcttcacctctatctgccataccgacctcagcgcctggaaaggagagaacgagcttcagcgaaagtttcctcgcatattgggtcatgaggcagcaggggtggtggagagcgtgggagagggtgtggaggatcttgcccctggagatcatgttgtccccatcttcaccggcgagtgtggtgcgtgcacctactgcgagtccagcaagagcaacctatgcaaaacctaccgtgtcaacccattcaagagcaccatggtcaccgatggtggcacgaggttcaccatgatcgaccgctcctccggtgcacgcaacccggtctaccattttctcaacacttccacctttgctgagtacactgtgattgactccgcttgcgctgtcaagatcaaccctaaggctcccttggagaagatgagtctcctcagctgtggggtctccacaggagtgggagctgcatggaacactgcaaacgtctccaaggggtccacagtggcaatatttgggcttggtgccactggtcttgcggttgccgaaggtgccagattgagaggagcatctcgaatcatcggagttgacataaaccctgaaaaattctccaaaggcaaagagatgggcatcactgacttcatcaactcgaaggcatctggcaagcctgtccacgaggttatcatggagatgacagatggcggtgtcgactacagcttcgagtgcaccggcatcaccgatgttctacgggaggccttcgtttccacacatgatggatggggcctgaccgttgtgctggggatccatgcaacgcccaggatgctgccgctgcatccaatggagttatttgacggccgtcggatcactggctgcgtttttggtgacttcaaggggaagtcccagctgcctgaaatcgtggagaagtgcatgcagggtgagattaacataaattttgatgggttcataacacaagagttgcccttcgccgacatcaacaaagctttccagctgctggaagaggggaagtcactcagatgtctgctccatgtctgatgaaacttgtggattgtaaatttgaatacacaataaatgaatcataaatgttttcgcggttt

SEQ ID NO: 4129 - DNA, 1014 bp, Oryza sativa
  ref <308>: DATABASE ACCESSION NUMBER: AK104665
  ref <309>: DATABASE ENTRY DATE: 2002-08-28
atctccacctcccgcggcatcaccactcactccaccgccgcgcgcttgttcgcagctcttcctcctcctcgcattgcaggcggctgccgactgaatcaagatgaagcggaccatcatcgtcaaagtggacttggaatgcgagcgctgctatgccaagatcgacagggtgctcaccaggatcagagacaagggtgagttcgtcatcgacgacatcgagttcgacgtgaagcacaacaaggtgatcgtgtcggggcccttcgacccggacaagctcgcagacaagctctgctgcaaggcgtgcaagatcatcaaggagatcgagatcgtcgacctcccgccgccgcctccgccgccggcgccggagccggagccggagccacccaagaaagaagagccccagccaccgcctcctaaggaggaggagaagcccgagccgccgccggcggtgattatcgtggagccaccggcgccggcgcccgagccggagcccgagccgccgaagaaagagccgccgccgccgccgcctcccaagcaggagccatgcccgccgccgcccaaggtcgtcgaggtcccttacccctggccctacccctacccgttcccgtcgtggccgtccgactgctgctgccaccatggccacggcggctgccactgctgctcctgcgggaaggcgccggagccggcgccggcgccggcgcctccgccgccgcagtacatcccctgctacccgccgcagcagccctacccttgcggcggctacaggatcgtctgcgaggaggacccctcctacgcctgcgccatcatgtgacctaatgatcatcgttatcttctccttaattaccttctccgatctctcctcctgtataattaagcacgcaccgtacagacacgcacatatatactacacatcctacacgtactcctctttatctactcttatacactccctctgtaactgttgatttccttacgtcccatttagaggtgaaaaataagtaagtatatatcgtcatt

SEQ ID NO: 4130 - DNA, 1126 bp, Oryza sativa
  ref <308>: DATABASE ACCESSION NUMBER: AK061578
  ref <309>: DATABASE ENTRY DATE: 2001-12-06
aaacacggtgcaaagtgtgcagcgaactcgataaacattaaacaagctgtgtgaacttcttttttcgtgacaagtttaattctttctcgatcgatcgtcgtgatggctgacgagtacggccgcggcggctacggcaggtccggcgccggcgccggcgacgactacgagagcggcggctacaacaggtccagctccggcggcgccgacgagtacggccgccggccgggaggcggtgccggtggctacaacaagcccggtggcaccgacgactacgacagcggctacaacaagtccgccggcggcgacgacgacgactacggccgcaccggcggcggcgggtacaacaagtccggcaccgacgacgactacgacagcggctacaacaacaggtcaggggctaacgagaagtacggccgcaacaagtccggcgacgacgagtacagcggcggcggcggcgccgaagccgacgaggagtacgtcgacgggttgtcgtcccgggacgacccggagaagtacaggaaggaggagaaggagcacaagaacaaggagcgcctcggcgaggtgggcgccctcgccgccggcgccttcgccatggtacgttcttgaacctcgatcaatttcctcaaacaaattaaactcggtcgcgccattgacgacgatagatgaccatgcgtgcagtacgagaggcaccaggcgaagaaggacccggagaacgcgcagcggcacaggatcgaggagggcgtggcggcggcggcggcgctggggagcggcgggttcgcgttccacgagcaccacgacaagaaggaggccaagcaggcggcgaaggacgccgaggaggaggcggaggaggagtccggctccggcgcccgcggcggcgaggggaagaagaagcaccacctcttcggctgatgatccatcgatcgatcgcgccatgcatgcggcggcggcggcgccatggccggcgtccgcgcgcacgcgtaaggtgtggccatgggcgtgtgcagctgaataagagccggggtttttgtacgtatgggctcagtatgtgtacacctcgtatatggtatggatgtacgtataagcgtatagtgtgtactataccaataaagctatctgttgctctgtg

SEQ ID NO: 4131 - DNA, 1116 bp, Oryza sativa
  ref <308>: DATABASE ACCESSION NUMBER: AK061579
  ref <309>: DATABASE ENTRY DATE: 2001-12-06
ccgttctctaccataccagtagcagctaattaagtgggtgggttcgcttgcttgctttgcttttgcttggagacgggagcgacgctggcttcagcgattggcgtggagaagctagattgttggtgcgactttccgaccgcgaaaatagtagggctggcaaaccggtggccggccggcgatccggccgaggggatggggagcatcgacggccactcgctgcagcagcatcaggggtactcccacggcggcggcgcgggagggagcaacgaggaggaggaggcgtcgccgccgcccggcggtggctcggctacggggtcggcgggccgccggccgagggggaggccgccgggctccaagaacaagccgaagccgcccgtcgtggtgacgcgggagagccccaacgcgatgcgttcccacgtgctggagatcgccagcggcgccgacatcgtcgaggccatcgcgggcttctcccgccgcaggcagcgcggcgtctccgtgctcagcgggagcggcgccgtcaccaacgtcacgctccggcagcccgcggggactggggccgccgccgtcgcgctgcgggggaggttcgagatattgtccatgtctggcgccttcctcccggcgccggcgccgccaggggccacggggctcgccgtgtacctcgccggcgggcaggggcaggtggtgggtgggagcgtcatgggggagctgatcgcgtcgggccccgtcatggtgatcgcggccacgttcggcaacgccacgtacgagaggctgccgctggaccaggaaggcgaggagggcgccgtgctgtccgggtcggagggcgccgccgcgcagatggagcagcagagcagcggaggcgccgtcgtgcccccgccgatgtacgccgccgtccagcagacgccgccgcacgacatgttcgggcagtgggggcatgcagcggtggctcggccgccgccgacatcgttctagcactggcaccggttaatcaatgtctctctacctagctagttagccttccacttctttccctagttgtttgagtaggttaattaatcatttaccatgttaattaatgtgctatgtaatgcataagtactcgtgtgatcttatcgttcc

SEQ ID NO: 4132 - DNA, 1046 bp, Oryza sativa
  ref <308>: DATABASE ACCESSION NUMBER: AK061580
  ref <309>: DATABASE ENTRY DATE: 2001-12-06
caatgaagtttgcagccgagaggacaagaaaactattgctcctgagcatgttcttagagctctgcaggatcttggctttagggagtacattgaagaggttcaagcggcctacgaacaccataagcatgataccctggattctccaaaagcaagcaaattcactggtgtggagatgacagaggaacaagctgtagctgagcaacagaggatgtttgctgaggcccgagcaaggatgaacaatggtgccgccaaaccgaaggagccagaacctgaagcgcagcaacaaacacaacagccaccacagcctcagctgcaccctcaaccacagcaacccctgcagcctcaacttcagctccatcctcaaccacaacaacagccctcacagctacatcctcaacagctgctgcatcctcaatcgcagcaaactccgcagcctcaacctcaggtccaccctcaaccacagcagcctccacagctgcaaccgcaacctcagcttctccagcaaccgcagctgccccaacagctgcagccgcaatctcagctccccccacaaccgcagcagcccccacagctgcagctgcaatctcagctccacccacaaccgcagcagcccccacagctgcagccgcaacctcagctccatcagcaaccgcagccgcaggcagagctgcaatcacagtcacaaccacaaacagaacatggcttggacagttcatgattcagattccatgttgtgtagcctcagtataaggaaaagttggtgtacttccgctggcatttactaggactctgtgtgccccttgatagttttaggtttccatgcttcatgtacaatgtaaatccagtgtgatttcagttaccatgttgctaataatctgaagctctctctagtcactgatgttattacttttccaaacaccctttctctgactctatgactgtagtagtatcatggcatgtatgatgccttgtcaaaagggactccattagcagtgtaacttgacttttgccgatggcgatggtgatttcagtgacttgttaattgc

SEQ ID NO: 4133 - DNA, 1103 bp, Oryza sativa
  ref <308>: DATABASE ACCESSION NUMBER: AK061581
  ref <309>: DATABASE ENTRY DATE: 2001-12-06
accaatccacttttccttccacgctaaggcaaacagcgcaacgcagcacacaacacaagcactagctgctcgatctcgtgaggctcgtagtaagcacactagctgcagatcgagcgaacagccatgaggaagtcaagcatcaacggcgtccatgtcatcggagtcccggtgaccgccaaggcgtttggcatagaggaggaggtgtcgttggccaggggccagtcgttcaggaaggccgacggcgatcaccttgcggtctcgttgtcgcaccccagcccttatacgtctttcggctataagcacagcagcaagggtcaggttatccactgggtgagcaagctgagcagaagggcacagggcttcagggagcatgtgaccttggggccaaagctgtcggagacggtgaaggggaagctgagcctgggcgcgaaaatcctgcaggccggcgggatcgagcgcgtgttccggaaggcgttctcggcggagaaaggcgagcggctggtgaaggcgctgcagtgctacctgtacaccaccggcgggcccatcgccgggatgctcttcgtctccaccaagaaggtcgccttccgcagcgaccggccggtcacggtcacctcggccaagggcgacgtcgcgcgggtgccctacaaggtggtggtcccgctcaggaggatcgcccaggtgcggccgagcgagaatgccgacaagccggaggagaagtacatccacgtcgtcacggtggacggcttcgagttctggttcatggggttcgtgagctaccagaggtcgtgcaagtacatgcagcaagccatctcggagctgcaatgactagtgcgcgtgcatgttggtggtctggtggtgatcgcgaggtccactattgtttgttccgtcggcacgatgagaagagaagttatgggctgctgcgccgtcttttgttgcgaggcagccctggctgaagttgctcgatcttatttcgggttcttccgcgtacgatttggattgacattatgtgtgttctttcaaatactagtagctagtattttgtacgatgggccgcgaaaattaaccatgacccgtgttgatgaatggaaaattttaagttgttc

SEQ ID NO: 4134 - DNA, 1034 bp, Oryza sativa
  ref <308>: DATABASE ACCESSION NUMBER: AK061582
  ref <309>: DATABASE ENTRY DATE: 2001-12-06
gcaaaaccaaaccaaaccaaagcaaagactagtgtagagtagaagagaagagtccaccaagaaaccaagaagctagaagcatcatggggaaggattgcggcaagcacggcgacgacgacttccggcagggatgccggcgattcatcaccgtcctcgtcgtcctcgccatcctcgtcggcatcatcgccctcatcgtctacctcgtcctccgccccacccaccctcgcttctacctccaggacgccaccttccgccagctcgacctctccaactcctcctccaccgccggcggcgtcctctccaccaccatccaggtcaccgtcgcctcccgcaaccccaacgaccgcgtcggcgtctactacgaccgcctcgacgtctacgcctcctacaagtaccagcagatcaccgtcgccgcctcgctcccgccggtgtaccagggccacggcgacgtcgacgtctggtcgccggtgctcgccggccccagcgttcccttcgcgccctacctcgccgacgccatctcgcaggattgccaggcgggctacctcatcctccaggtcaagatcgacggccgcgtccggtggaaggtcggcagctggatctccggccactaccacctcttcgtcacctgcccggccttcctcgtcaccgccggcggcaatggctcccccggcgccagcggcttcaggttccagactaccacctactgccacgtcgaggtctagctaagctagttatgttatgatctactactgtgcccaccgccgccgccggaatctgctatctccggctagtcgccggcgaggtaggtttgatttcttggaggtggtggtgttcttgtgcgtccatagtgaaaaagagatgatggtggtaataatgaattattatgtgggttacaaaatgtaaaggaggtggagaggcaatttaagtaggattaatggtatggttaattataatgctctcttgattattagcttaattgttaataatcctttttttgtcttaattaaggagaaatgcatgtttagttatttgtc

SEQ ID NO: 4135 - DNA, 1069 bp, Oryza sativa
  ref <308>: DATABASE ACCESSION NUMBER: AK104666
  ref <309>: DATABASE ENTRY DATE: 2002-08-28
aattgcgagcgatgtcggctgcgagtgcgagtgccactgcctccctctccgcggcggcggcggtggcggtggcggcggccgctctccgccccacgcagcagcgacgcctgcgcgttgtcgcgccaccgcgccccctcaggctcaccagtctcaacccccctcgcgcggcttccgccccctctactcctctgtgggaggccggcgtccgagctgagtcgtccgactcgcccggagccggagccgggggtgacgtcatgggcctcctcctccgggagcgcatcgtcttcctcggcaacgagatagaggacttcctcgccgacgcagtcgtcagccagctcctcctcctcgacgccgtcgaccccaactctgacatccgcctcttcgtcaactcccctgggggatcactcagcgcaacaatggccatctatgatgtaatgcagctcgtgagggcagatgtttccactattggattgggcatagctggttccactgcttctataatccttggtggtggcacaaagggcaagcgattcgccatgcccaacaccaggataatgatccatcagcccgttggaggcgcaagtgggcaggccttggatgtcgaggtccaggccaaggagatattgactaacaagaggaatgtcatccggcttatatcaggtttcacaggacgcactccggagcaggttgagaaagacattgatagagacagatatatgggtcctcttgaggctgttgattacgggctcatcgacagtgtaatcgacggagacagtatcatcccacttgagcctgtcccggagagggtgaagccgaaatacaactacgaggaactgtacaaggatccacagaagttccttacacctgatgtcccagatgatgagatatactaggtaatgagcctgcctgcctgtcgtttgcatttcgcacggcaagggggctgcttgcaatcaaagacgatgctcctagtcctagcactagttgatttttcctgtcacatgttaaccaactagtgccatattacgattgttgagcacgcagttagacttattggttgtgtttgtcgttg

SEQ ID NO: 4136 - DNA, 1289 bp, Oryza sativa
  ref <308>: DATABASE ACCESSION NUMBER: AK061583
  ref <309>: DATABASE ENTRY DATE: 2001-12-06
acccacaaccaagagaagtagaaacaaacagagagcaattctcttctcctacctagcaacctagtgcagtgcagtgcagtgcagcgaaggtttacttggcgacttccatgggttgcctgttgatgctctgcttggtttctcccctcctcctcgccacctctgtccacggcaacccgtggtatgggtatgggtatggcttgttcccgcagttctacgaccactcgtgccccaaggcgaaggagatcgtgcagtccatcgtagcacaggcggtggccagggagaccaggatggcggcatccttggtcaggctgcattttcatgactgctttgtcaaggggtgtgacgcgtctgtgctcctggacaacagcaccaccatcatcagtgagaaggggtcaaaccctaacatgaactccctcaggggtttcgaggtcgtcgacgagatcaaggccgccctcgaagcagcttgccccggcaccgtctcctgcgccgacatactcgccctcgctgcacgcgattccactgtcctcgttggtggcccgtactgggatgtgccacttggccggagggactcactgggtgccagcatccagggctccaacaacgacatcccagctcccaacaacaccctccccaccatcatcaccaagttcaagcgccagggccttaacatcgtcgacgtcgtagccctctcaggtggccacaccattggcatgtctcggtgcaccagcttccgtcagaggctctacaatcagagcggcaatggcatggctgactacacactggatgtgtcctacgcggcacagctgaggcagggatgcccccgttctggtggtgacaacaacctcttcccgctagactttgtcagccccgcaaagttcgacaacttctacttcaagaacatcctgtctggcaagggccttctcagctctgatcaggtcctgcttaccaagagcgctgaaacagcggcgctcgtgaaggcgtatgctgatgatgtcaacctcttcttcaagcacttcgcacagtcaatggtgaatatgggcaacatctcgcctctgactggatcacagggggagatcaggaagaactgcaggaggctcaacaactactaccactgaggttgtcttgtgtgctgagttttacaaggtggtggtagtggcatgttttgtttaaataagtaaagctggttgtaatgcgtcaaggctgtttgatcatttgtgttattgtgattgcgttgcaaaacgtgtatgtttaataattcaatatataaaatgagttcatttggttgttct

SEQ ID NO: 4137 - DNA, 1085 bp, Oryza sativa
  ref <308>: DATABASE ACCESSION NUMBER: AK104667
  ref <309>: DATABASE ENTRY DATE: 2002-08-28
aaaaaaaaaaaaagttaccaccaccaccacctgcaagcaaccaaccaaccaccacccgctcgctcgccgaccgccaccggcgacccaatcacccctcgccgccgccgccggagaaggaggaggagggagggagcagccggcagcggggagggggcgcgctgcgccgttgatgagatgaaggaggtggtgctccacgtgtacgacgtgacgaacagcgactcggagaagacgaacaacaccatcctccagatcaaccgcatcttcaaggaccggatcggcctcggcggcatcttccacagcgccgtccaggtctatggcgaggaggagtggtcgttcgggttctgcgagaacggcagcggcgtcttcagctgccccatcgggaagaaccccatgtacacctaccgcgagtgcatcgtcctcggggagaccgagtgctccatcgccaccgtgaaccggatcctgcgggagctcagccgcgagtggccgggacactcctacgacctcctctccaggaactgcaaccacttctgcgacgtgctctgcgagaggctcgccgtccccaagctcccaggctgggttaatcgttttgccaatgctggtgataccgctgtggtagttgctgagaacacagcagttaagttcagacaggctaaaacagaaatagtcaatgccagtagagtagcatacagatttatggcaggcctggcatcgaaaaatcaaaacccacaaccagagtccccaagtaaccaaagcagaaatggcccaactttccaggggacttggttcaagaacatcatttcgaatggcgcaaagccttcctcaagcgaatcaacttcatcgcatgacactggtactggtggtgatgaatcctctttgcagaatcaaaaaccgtcggagcagtcaacacggttgtagccgctgccaccagttatcacctgttgaattgaatctgtagtgtaacagtagccagcatttgttaaaaatacatggcatgtttattcacgcatgaatctcttgtatctctgcgttgtcttgcaacgggaaacatgaaatgttaaaacacgtcatccaaagcttgacagttt

SEQ ID NO: 4138 - DNA, 920 bp, Oryza sativa
  ref <308>: DATABASE ACCESSION NUMBER: AK104668
  ref <309>: DATABASE ENTRY DATE: 2002-08-28
atcaaacacacacacacataggcaacaatggcaagcaaacaggcaatgaactctgccttgttctctgcattggttgttgtggtcttggcttctgctgtgaatgggcaactaaacccatgccaagcaccggcaccaaccccgactggaactccagccccagcaccagccccggtggtgacaccgacgcccgcaccaactccagtcccgacgccatcgccggcaccaacaccttcacccaccgttgcccctgtcaatccgccatctccgacgccgcctcccaagtgtccgctggcgttaattaatctcaacgcgtgcattagtgtcggtcttggcaacccgctcttgaaccaggcgtgctgctcgcagctctccagcctcccgagcgacaccgctgctgtctgcctttgcgaagccatcaaggttaatgctctcgtcaatctgaaggtcaaaatccccgacatccttaaagtatgcgggaaggtctccgctgtagtttgtgtttaataagtacgtcgagagatagcgtgcatatatatacgtacgtacgtatgtatgtacatgctatacataggtgtgcagcatatatatatatatatatatatatatatgctgtgtgcttgcctctacatatatactgtattaaacttttggacgacccaaatatatatccgccagcagcatgcgtgcgcgtacgtgccgtgcttcatggaggtagggtcttaatatccatatatgtttaagaataattaagttacaggatctgggattgtgctatatatgtatgtgtacacacacgtggcttgatcatatcattatgtgtacgtgctagaagatttgattgtgtactgatctgtgtgtatgcatgcctgcctacaaaatcaaaatatagtgggtacaagtgtatgtgataatatttcctc

SEQ ID NO: 4139 - DNA, 1256 bp, Oryza sativa
  ref <308>: DATABASE ACCESSION NUMBER: AK104669
  ref <309>: DATABASE ENTRY DATE: 2002-08-28
acgctcgattgcatatttgcattagctctagttgtcttgctaccgatcgatcgaattcatcaatggcattcggtggcgaccagacgacgacgaagagcaggatcctggtggtcggcggcacggggtacatcggccggcatgtcgttgccgcgagcgcgcggctgggtcatcccaccaccgccctcgtcagggacctcgccccctccgaccccgccaaggcgcagctgctccacaccttccgcgacgccggcgtcaccctcctccacggcgacctccacgaccacgccagcctgctgcgcgccgtccgcgacgccgacgtcgtcatctccgcggtgcgcgcgacccaggtccccgaccagaccaggctcatcgacgccatcaaggaggccggcggcggccgcgtccggaggttcatcccctccgagttcggcatggacccggggcgcggcgccagcgcggcggtggagccggtcaggtccatgtacggcagcaaggtgggcatccggcgcgccgtggaggcggcgggcatcccgcacacgtacgtggcgtgcaactacttcgccggattcgcgctgccgtcgatcgggcagttcatgccaaaggcggcacccgtggatagcgtggtgatcctcggggaggggcacaccaaggtggtgttcgtggaggagggggacatcggcacgtacacggtgctggcggcggtggatccccgggcggagaacaagacgctgcacatacggccgccggcgaacaccatgtcgcacgacgagctggtgagcatgtgggagaagaagacggggaagaagctggagagagtgtacgtgcccgaggacgccgtgctcaccaaaatcaaagagttagagtacccgaagaacgttttggtgtcgatcgcgcacgcggcctactgtagaggggagatgagctcgccgctggatgatccgcaggacgtggaggccactcagctctacccggaaatccaatatacaaccgttgacgaatatctcaacaccctcctctaattcatttcgtcatgcatcatatcaccctaaatatgcatgcgccaataaaaacaagtcttgattttattttgttcattgctccatcttcagtcagtgtccactggtttgtctgtcatgcatggatcatttttactcttcaattcagttctgcatttcagttgagctgttcagctgagtgccttgatttgtaccacctatctgccttgttacaaatttatgtcaaagtcttcttgctct

SEQ ID NO: 4140 - DNA, 1079 bp, Oryza sativa
  ref <308>: DATABASE ACCESSION NUMBER: AK061584
  ref <309>: DATABASE ENTRY DATE: 2001-12-06
aaaaacgcagcagcacgaacacttccccgtgcccgcgcctcgcgacgggcccaaatccaacacgacgacgaggaggaggagatcgagtgcgccaccgaatcgaataaccacaagccgcggaagatttcccctccccccggtggatccctcctcctcctcctcctcctcctcctcctccggggtcgcctcctcccctccgatggagtccgggagcgagagcggcagcgggagcgggagccgaggggagatcacgctggccatcggcggtggcggcgcgtcggcggcggcgtggactcggctggtcagctccggcgtggaggacgtgctggtggtggggggcgcgggtggctggcgtggaggaggaggaggagatggagcgggtgggctgctgccgtacgggcacttcctggaggcctgcttcctctgccggaagccgctcgccagcaaccgcgatatctacatgtacaggggggacattccgttctgcagcgaggagtgcaggagggagcagatcgaaatggacgacgagatggagaggaaggagaagaagaacatctccaagaaggtggcgccacgtactcccgaccccagagaggtggagtccactccgaggcctccgaaagctcgcgccggctcgatcctcgccgggtgacaactgacaaggaggagggactgaaagtgaggaaactcctccgggattgtgctgctcgttttccggcaagccaagaccagatgatcctcacaccttaccaccagaaaactatcacttacaaagttacatatgggtttgtgtttttgtttaaaccccctttgctcttttggtggtgtttgttagcgcctccctaatatcggtgatcgatgatgtatagagacggatggaaaggaagatcagcgctggttattagtaggagtgactggctgactgcagctttctgtaatctgtgttatcaaggggggggggggggggtttcctgaccttcgtcttgggggtgttgtgaatttttcctacgtgtagctgattactgtggtaggtgtaaggttttttctaatgaatctgaggaaacatatgcctatagaag

SEQ ID NO: 4141 - DNA, 1826 bp, Oryza sativa
  ref <308>: DATABASE ACCESSION NUMBER: AK061585
  ref <309>: DATABASE ENTRY DATE: 2001-12-06
aattcccctctccagctctctcgcgactggctcaggctcacacactcgccacgccccccccccccccccccaagcccagcgccgaagcctccggatcccgatctgcgagctgccgccgccgctgctgctgttgccggtgtttaggatggaagggcacgagggtggggaggaggaggggttgggggaccagttcgagcggctgcccgacgaggtgctcctcgacgtgttcggccgcatcggcgacgtgaaggcgctggggcgatgcgcgctcgtctcgcggcggttccacgcgctcgtccccctcgtcgactcggtgttcgtccgcgtcgactgcgtcatatccgacgacccgcccccctcgtcggcgggctccgcgcaggccgctgcggcggcggaggggggacctcccgccgcgcgggggcgcggcgcgctcgcgcatctcgcgcgcctggtgctcggcggcatcgtcaggcccatccaggcactcgggcagatcctctccccggccgcggcgaccgtctcccgtcgctccgctgccccgcccgccgcaccggctcctgccgccgcggacgtctcccaccattcgccgtctgaggtcctccgctccttcaaggagctgcgccgcctccacatcgagctgcccaccggcgagctcggcatcgaggacggcgtgctcctcaagtggaaggctgactttggttccaccctcggcagctgtgtcatactcggcgcgtcatctgtaacgtcgaagccacccccaccaccggccgcgccgcccccaactgctgcagacagctcggctgcctctcccgattccagcagagagcccgatgaattagggaacatcccagagtcactctatacgaatggagggcttaagctccgtgttgtctggacgatcagctcactcatcgctgcttcggcacggcattacttgctgcagccaatcatcgcagatcactcaacactcgagagcttggacctgacggatgctgatgggcagggcgtcctcactatggacaagaggcagctgcaggagctgcgtgtgcggcctgtgtcagcttctgggaactcgcaccgcacactcatgccagcacttagtatgcggctatggtacgctccgcatattgagcttcctgggggccaactgcttaagggtgctacactggtagcaatcagaccaagcgaggatgttctaagggaagggggaggaattgaggttgctggcccgacaggagctagctggattttagatgcctttgaggagccatatcgaacagcggcacaggtgcttctcaagcggcggacatatagtcttgaaatgaactcattctgaccatcagagaggcagcttcagagagctctacactttggggaggatatgatgggatgctattgagacgtatctaggagtcatggtggacatcaggcatctgtaagtatatacacctgtttatgttgggctgtttggcatagagttggaatggaatgtgttatctgcagcaaaagcaccctgaagaaatgccatgaaatacatctacacatgaggttggagtgcccggtcatgcagacaacgcatctgttgattgtctcttctacgaggaggccccatcgattattagatttaatagtgtcattttttgcttttagttgcccgcactgtgctgttagctctgtatcaaattatggacaaaacatgctctgctttccagaaaagtttgagccgtgctgcctcatgtgaccttgtaaccttttgtgtatcagactacaaagttacttcccgactgactttttcttttattggataaaagggagtgcgtgactac

SEQ ID NO: 4142 - DNA, 1555 bp, Oryza sativa
  ref <308>: DATABASE ACCESSION NUMBER: AK061586
  ref <309>: DATABASE ENTRY DATE: 2001-12-06
atccactcctccgccttcctcccctccccctccccctcccaccatgattcggattaccacccacctctctcccaccctcaagcctcctcctcctctatccctccacccccacctccctctcctccgccgccaccgccacccctcctccaggcccatctccgtctccgccgccgccccgtccgacctcctcgccagcgtcgagtccgtcgcctccgccgcctccgtcctcgccgccatcgtcctcgtccacgagtcgggccacttcctcgccgccacctcccgcggcatccacgtctcccagttctccgtcggcttcggccccgccctcgcgcgcttccgcctcggccccgtcgagtacgcgctccgcgccatcccgctcgggggctacgtcggcttccccgacgacgacccggactccggcttcccgcccgacgaccccgacctcctccgcaaccgccccgtccccgaccgcctcctcgtcgtctccgccggcgtcgccgccaacctcctcttcgccttcctcatcgtctacgcccaggcgctcaccgtcggcgtccccgtccaggcgcagctccccggcgtcctcgtccccgaggtcatccccggctccgccgccgcccgcgccggcctcctccccggcgatgtcatcctctccgtccccggcctcgcaccggacccctccgttcctgtcctcgtcgacctcatcaaggcaagccccaacaaggatgtctccgtcaccgtctcaagaacagggccaggacccggcgaccggaggtccatcgacctcaccgtcgtgccggacaccagcgtcgacgggaccggccgcattggcgtgcagctctcgccctacttccgtgtcactcgcgtccaccccaacaacctggccgaggccaccgtcctcgccttgcgcgagttcaccgcattgagcgccacggtgctcgacggcctcaggcagacgttcctcaacttctcgcagacggcggagaaggtgtctggtccagttgcaatcattgcggttggcgcagaggtggccaggtcaagcgccgagggcttgtttcagtttgcggctgtgataaacctcaaccttgctgcaataaacttgttgccattgccagcattagacggtgggacgttggcgttgatccttctcgaggcggcccgtggtgggcagaagatcccccgtgaaatcgaacagaggatcatgtcgtcaggtatactggtggtactcatggttggcatgtttctgattgtccgcgacacgctcaatcttgacttcatcaaggacattttgtgatacttgggtgatgaaaacttggatcacagttagtgaagtcaaaagtttcagacattggttggcctctgaaaaggttagtagttgtgcaattgggattcatttgccccatttgttgggattgctctagcattctagcttcttatactgatcataggtccttgtattgttatctgaatgaagctctaatgttgcatttagtcgcatttctagatgaatgggaacactgaattgttgatatgtaaattgccccccttgtgaagc

SEQ ID NO: 4143 - DNA, 1184 bp, Oryza sativa
  ref <308>: DATABASE ACCESSION NUMBER: AK104670
  ref <309>: DATABASE ENTRY DATE: 2002-08-28
ctgcttgcttctcttgctggttcgtcggtcggtggagtttgagcctgcgccatggctgtcggcgggagagggagacggccgctgctcctgctcctgctcctcctcgccgtggcgctggcgctggcggcgcgcgcgcgggcgcagctgtcgccggggttctactcggcgagctgccccaccgtgcacggcgtcgtgcggcaggtcatgtcgcaggccgtcatgaacgacacgcgcgccggcgccgccgtcctccgcctcttctaccacgactgcttcgtcggcggctgcgacgcgtcggtgctcctcgacgacacccccgcggcgcccggcgagaagggcgtcggccccaacgccgtcggctcgacgaccgtcttcgacctcgtcgacaccatcaaggcccaggtcgaggccgtctgccccgccaccgtctcctgcgccgacgtcctcgccatcgccgcgcgcgacagcgtcaacctgctcggcgggccgagctgggcggtgccgctcggccgccgcgacgcgctgtcgccgagtcggagcgcggtgtcgaccgacctcccgggccccgaggccgacatctccgcgctcgtctccgccttcgccgccaagggcctgagctcgcgcgacctcgccgcgctgtccggcgcgcacaccgtcggccgcgccagctgcgtcaacttccgcacccgcgtctactgcgacgccaacgtgagcccggcgttcgcgtcgcaccagcggcagtcctgcccggcgtccggcggcgacgccgcgctggcgccgctggactccctgacccccgacgcgttcgacaacggctactaccgcaacctcgtcgccggcgccgggctgctgcactccgaccaggagctgttcaacaacgggccggtggactcggtggtgcagctgtacagctccaacgccgccgccttctcgtcggacttcgccgcgtccatgatcaggctcgggaacatcggcccgttgaccgggtcaaccggcgaggtcaggctcaactgcaggaaagtgaattcctgatcgatactactagatagcattgccgcgcgcaaattgttcatagtacaaagtttaaagttatataatcagctgtcaatttcatgtattaagtgaattatgacataagaatgcaatagaaatgtcccaattttagacatcaatcactagtggat

SEQ ID NO: 4144 - DNA, 882 bp, Oryza sativa
  ref <308>: DATABASE ACCESSION NUMBER: AK061587
  ref <309>: DATABASE ENTRY DATE: 2001-12-06
attgcagtaccagagccaagtactgctggatcaacatatgcaacttatctgactgaacttgctgagagcaatgccccagccttcctttcccactattacaatatttattttgcacatacaactggaggggtggctataggtaacaagatatccaagaaaattttggaaggaagggagctagagttttacaaatgggattctgatgtagaacttttgctaaaagataccagggagaagcttaacgaacttagcaagcattggtctcggaaggacaggaacttgtgcttgaaagaagctgcaaaatgtttccagcatttggggcggattgttcgcttaatcatcttatagttcctcatagatgagcaactgatcaaatcaacctataatctattcctgaaggcaggaaagctagagatatattaaacttgaggcttagtgcagtcatttttgtcgaagactacacgtcttaactatgttgaagtctggtacagaaggatcttctggtgtgagactgaagctgatcagcgagcactatcctggagattgaaaacaccaggccacaacaatagcctcttttctggcttgcatggtggagctgctcgttggagtgagctcttgctttcagcaacttcgaactgtgcaaagttgaagatgcttgctgctgtcgatcaggatctcacgcgttcaatcgcaatgatgccagcctgacacaattcacttagcagcagaacaccatgctagccagccaggatccccccatgcctgccaaagcttcgtctcctcttgtacctcaccacattatccatttatccttgcaatgaattcgctttgcttgtaccaatcctagctactactactactaccatcttacattatccttgc

SEQ ID NO: 4145 - DNA, 2067 bp, Oryza sativa
  ref <308>: DATABASE ACCESSION NUMBER: AK061588
  ref <309>: DATABASE ENTRY DATE: 2001-12-06
acactcggatatctccaaggctgcagctgcctgcagctcaccacactccaccagttgtccagttcaccaccaaagctgtggtcgatcccctccacacgaagatatggcggccgtcgatacgccggagaagccgtacgagggtaagccggcggcggaggcgaggagctactggcggtggcagaaggaagatttcttcccggagccgtccttcgcgagctggggcgcgtaccgcgcggcgctggccgcgacgcccgcgcggttccgcgaccgcttcgccggccgctccaccgacgccgacgagctcggcgcgctgcgccgccgcagcgagaacgagatgcgccgctgcctcacgtggtgggacctcacgtggttcgggttcggctccgtcatcggtgccgggatcttcgtgctcaccggccaggaggcgcacgaccacgccggcccggccatcgtgctctcctacgtggcctccggcctctccgccatgctgtccgtgttctgctacacggagttcgccgtcgagatccccgtggccggcggctccttcgcctacctccgcgtcgagctcggcgacgtggcggccttcatcgccgccgcgaacctcatcctcgagagcatcatcggcacggccgcggtggcgcgctcctggacgtcgtacctcgcgtcgctcatcaacaagccggcgagcgcgctgcgcatacagacgtcgctcgccgaggggtacaacgagctggaccccatcgcggtggtggtgatcgcggtcacggcgaccctggccattctgagcgccaagggcacctcccgcgtcaactgggtcgcctccgccgtgcacgtcctcgtgatagccttcgtcatcgtggccggcttcctccacgcgaagaccagcaacctgaccccgttcatgccgcacggcgtgccgggcgtgttccgcgcggcggcgatcgtctacttcgcctacggcgggttcgacaacatcgcgaccatggcggaggagaccaagaacccatcgagagacatccctctcgggcttctcggctccatgtcggtgatcacggccatctactgcgtgatggcgctggtgctgagcatgatgcagccgtacacggcgatcgaccggagcgcggcgtactcggtggcgttcagcaacgtcgggatgcggtgggcgcagtacgtggtggcgctcggcgcgctcaaggggatgacgacggtgctgctggtcggggcgctcggtcaggctcggtacaccacgcacatcgcgcgcagccacatcatcccgccggtgttcgcgctggtgcaccccaggaccggcacgccggtgcacgccaccgtgctcatcgccgccgccggcgcctgcatcggcctcttctccagcctcgacgtgctctccagcctcctctccgtcagcacgctcttcatcttcatgatgatggccaccgccctcctcgtccgccggtactacgtgcggggcgtgacgagcaggacgcacgcgaggcggctggtggcgttgctatcggtggtcatcggctcgtcggcgggcatcgcggcgtactggggcgcggcgccggagcggtgggttgggtacaccgtgctggtgccggcgtgggcggcgggcacgctcggcatccagcttctggtgccggcggcgcgcgcgcccaaggtgtggggcgtgccgctcgtgccgtggctgccgtcgctgtccatcgccaccaacctcttcctcatgggctcgctcggcgcgcaggcgttcatccgcttcggcgtctgcaccgccatcatgctgctctactacgtgctcgtcgggctgcacgccacctacgacgtcgcgcacggcgcgtgctccggcgacgacgtcgacgaggaggtctacgctgatgccgcccacgtggacgatgcgaaggcggcggccgcggtcgctgccaacgcagacgtggagagggcgggcgcgaagatctgatcacatgcctaatgatttggtacattgatgcgaagaatattcaaaactgtagcgtgcaactgcaaatatcattatctattgaacagtatctcaccaaagtgggaaatggattc

SEQ ID NO: 4146 - DNA, 1437 bp, Oryza sativa
  ref <308>: DATABASE ACCESSION NUMBER: AK061589
  ref <309>: DATABASE ENTRY DATE: 2001-12-06
atcagacaaacctctcactacctcagttagctcagtagcacagctcacctcggctgtccgaatcgagaggcacggccatggagaagccgacgaagaagggggtggcgccgccgatggcgtggcggacgcgcctctccatcctcgccgcggggtgcctcaccgacgccacgtgccgcgccgacggcaccatcaaccgccgcctcctaaacttcctcgacccgcacgtcccgccctccgccgcgccgcgcaacggcgtcgcgtcgcgcgacgtcgtcgtcgacccggcgatcccgctccgcgcccgcctcttctacccctgcccctccggaggagacggcggcaccggcgacgcgacgaagccgctgcccgtcgtggtgttcttccacggcggcgggttcgcgtacctgtccgcggcgtcgcgcgcctacgacgccgcgtgccgacgcatcgccaggtacgccggcgcggccgtgctgtccgtcgactaccgccgctcgccggagcaccgctacccgacgccctacgacgacggcctcgccgcgctccgcttcctcgacgaccccaacaaccaccccctcgccgccgacgacggcgacgttccaccactcgacgtcacccgctgcttcgtcgccggggacagcgcgggcgccaacatcgcgcaccacgtcgcccgccgctacgccctcgcctccaccaccttcgccaacctccgcctcgccggcctcatcgccatccagccattcttcggcggcgaggagcgcacccccgccgagctccgcctcgtcggcgcgcccatcgtctccgtcccgcgcaccgactggctctggcgcgcgttcctcccgcccggcgccgaccgcacccacgaggccgcgcacgcggcctcccccgccggcgccgccggcattgactccccggcgttccctccggccacggtggtgatcggcggctacgacccgctccaggactggcagcgccgctactgcgagacgctccgcgggaaggggaaggcggtgcgcgtgctggactaccccgacgccatccacgccttctacatcttcccggagttcgccgaggcgcgcgacctcatgctccggatcaaggacatcgtcgccggcggcggcggcgagcactgactggtcggcgtcgcagtgcacgacacgagcacgagcagtaccgtggttggttggtggtggtgagtgagtgattggggtggggttgcgtgatgggggtggtgagtgatgacgtggactgattaggcgagatgccacgtattgtagctatcactaggcactagtgagcttatccagtagtaagatgacacgtgggacttgtgttggtcgcatatgttatactgcatggtgtaggatgaggtcgtcaataatttgttaggagtaaaaagtagaggccaccaataaaatgggatttatggttttagat

SEQ ID NO: 4147 - DNA, 524 bp, Oryza sativa
  ref <308>: DATABASE ACCESSION NUMBER: AK061590
  ref <309>: DATABASE ENTRY DATE: 2001-12-06
aaggggggaagggagcaagcaaggcaagggattccgcctcgcgagaacgatggggttcatgctgcgggtgaggctggcctccttcttcgccggcgccgccgccgccggggccgccggcggcttcttcctctacaaggactacaagctcgcccacgactccatggccctccaggtcaaaggcctacaagaccatgtggatgcccgttacaaagctcttgacaaacgacttgctacattggaagaccagaaaaccagcgagactgctccagacgtgggcgtgccatctgattagtctgttcattggctggcttgagtatggatgatttacgactgtttactttaacctgtgttatcgtctcttggaggcataagccgatgactgactgcaaaataatttagtgaagagtttttttttgtgtgtggcaatgaagcttctgtagtgttatagatgcccatggggatacccaaccttgcaaaaccatttcacttttgatggcactgaaccttggcagtcaagctcgatc

SEQ ID NO: 4148 - DNA, 783 bp, Oryza sativa
  ref <308>: DATABASE ACCESSION NUMBER: AK061591
  ref <309>: DATABASE ENTRY DATE: 2001-12-06
cggtctcgtctcagagagagccagcctccggtggaggaaaagctcaagaagtccaccaccacttcgcgaaaccccaattccaacccgacttctccactccacgaagagagccagctccgccgccttcaccatggcgtccgtctggtgcctctcggcctcggcctccgccgctgcgccggtggcggcggcggcggcggcgcccgggcccctcggggcctcggtggcctccgtctccctcgcgcgggcggcggtcccctcgaggaggcggcgaagatgggacgcgctcgtggtgtgcgcggcccccgacgaggagaagattacgcggcggtcgcccctcgattttcccatcgaatgggagaaaccaaagcctgggaggaggcctgatatcttcccaaaattcagccctatgaaaacaccattgccccatccattgccagctgatgatcctctggatgatgatgaggaggaggaagaggaagaaccacaacctcaggaggaaccacaggaggatgatcctgacaaggaagaacctgaggaggatgacccggacaagccaacggagtaattttggatgatgtgggttatgttagataaaaacactatgtttagatctgccatatccttgagagaacgtcataggtctcagggtcaggtttgacctgttagttctgccggctcatataggctgtagacacgtttgttttgggagcacccctgagcttttctaaagccatggaagttttgtctgactgatcacaaatatgcaatgttatatttctgcag

SEQ ID NO: 4149 - DNA, 800 bp, Oryza sativa
  ref <308>: DATABASE ACCESSION NUMBER: AK061592
  ref <309>: DATABASE ENTRY DATE: 2001-12-06
atagctcccggcctccgaagatggagacctcctccttcctccgcaccaccctccccaccgcgaagcccctcccggcgttccagaccctcgcaccccgcccccgcccccgcccgctccgccgctccaccatcagcgcggccatcacccgaggccgcaaggaggacacggtggccgccgtccgcgagcagctggagggctgctacctcctcgccgggatccgctacgagggcctcacggtgaagcagctgcagggcatccgcgacaccctcccggagacctgccggctgctggtggcgaagaacacgctggtggggaaggccatcgagggcacgccgtgggaggcgctcaagccgtgcatgaaggggatgaacgcgtggctgttcgtccacaccgaggaggtccccgccgcgctcaagccctaccgcgccttccagaaggaggagcgcctcgaggggaccaacgacttcgtcggcgcggtgttcgagggcaagttctacgcccccggggacttcaaggcgctcgagacaatgcccagccgcgccgaggtgtacgccaagctgctcggctcgctgcaggggcccgcgacctccgtcgtcaccacgctgcaggcgccggccagggacgtcgtctccgtgctctcggcgtacgtgcgcaagctcgagcaggaggtcggcgccgcctgatggctgttgagagatggttttgtggcttcgtttctctcatctcactcatttcttgtagaattcctgtacttttactgcctcacgtttgaattgaatcacaaaagttttacctcttac

SEQ ID NO: 4150 - DNA, 722 bp, Oryza sativa
  ref <308>: DATABASE ACCESSION NUMBER: AK061593
  ref <309>: DATABASE ENTRY DATE: 2001-12-06
gtttttcgccggcgacgacgcggatggcgaccgacggcggcggcgccaccccctcaccggcggcgaagaaggccaacctcctcgacccctactccatcaagcatctcctcgacgagaccgtctccgaggtcgcgaagagcaaggggtacccagaggacgcgcggctgagcaaccggaggctggcggtcggcgcggcggtgatcgccgtcgcgctcctcgcgcagttctacccccgcaagttccccgagaacagggacgtcctcctcgcctgcatcgcgctgtacgcggcgctcaacgtggcgctgcagatcgttacctacaccaaggagaagaacgccatcctcttcacgtaccctcccgcgggatcatttaataggactgggcttgttatatcttcaaagttaccaagattgtcagacatgtataccctcacaatagcaagtgcagatccacattctaaatcttccagtgaaccagtccatttcactaagagtgtcacaaaatggttcaccaaggatggggttcttgtggaaggtttgttctggaaggatgttgagaagctgattgatgactacaacagtgaccacaggagcaaatgaaaggatagcttgtacttattgatatcaatatgtcatgaaacaaccaaccattcacctactacatctgttagtttttgcatatgactagcaaggaatcgctttacaaaatcaaatcttaactgc

SEQ ID NO: 4151 - DNA, 1858 bp, Oryza sativa
  ref <308>: DATABASE ACCESSION NUMBER: AK061594
  ref <309>: DATABASE ENTRY DATE: 2001-12-06
cttcaacatcttctacatgctcttcaacctcggcctcaccgcctacctcatcggcaacatgaccaacctcgtcgttgagggcacccgccgtaccatggaattcaggaacagcattcgtgctgcctccaatttcgtgggccggaaccacctgccgcctaggctgaagcagcagatactggcctacatgtgcctcaagttcagggcagagagcctgaaccagcagcagctgatggatcagctccccaaatccatctgcaagggcatctgcgagtacctcttcctccccgtcgtcaaggacgtctacctcttcaagggtgtctcaagagaagtgctccttctcatggttacgaagatgaagccggagtacataccgccgaaggaggacgtgatcgtgcagaacgaggcgccggacgacgtctacatcgtggtgtccggcgaggtggaggtgatctactccgacggcgaagccgaggagcgggtggtggcgacgctggggacgaggggcgtgttcggcgaggtgagcgcgctcagcgaccgcccgcagagcttcacgctgcggacgcggacgctgtgccagctgctgcgcctgcgccaggccgcgctcaaggaggccatgcagagcaagcccgaggacagcgtcgtcatcatcaagaacttcctcaagcatcagatcgagatgcacgacatgaaggtggaggacttgctcggggaggacgccgccggcgagtacgaccacggcaacataccgtgcaatctgctgacggtggcagccaccgggaacagcagcttccttgaggatctcctgaaagttggaatggatcctgacgtcggtgactccaagggaagaactgcactgcatatagcggcatcgaaggggtacgaggactgcgtgctggttctcctcaagcaagcgtgcaacgtaaacatcaaagacgcgcagggcaacacggcgctgtggaacgccatcgccgcgaggcaccacaagatcttcaacatcctgtaccacttcgcgcgcgtctcgagcccgcaccacgccgccggcgacctcctctgcctcgccgcgcgccggggcgacctcgacacgctccgggagctcctcaagcacggcctcgccgtcgactcggaggaccgggacggcgccacggcgctccgcgtcgcgctcgccgagggccacgccgacgtcgccaggctcctcgtcctcaacggcgccagcgtcgacagggcggccagccacaacgagcagcaggcggcggcggcggtgtcggtcgacgagctgcgggagctcatgaagacgcgcgagctcgcgcacccggtcaccatcgtcgtcgactcgccgtcgccggccgccgcagccgtcatccgggaggtcggctcgtcgggggacagccggaatgggcggcgccagagcgcgagatcagacggcgcgcactggccacgggtgagcatatacaggggccatccattcgtcagaaaccgtagctcagaagccggcaagctgatcaacctgcccggcaccatggaagaattcagaatcatcatagaggagaaactgaaagtcgacgcgaggaagacgctgatcatgaacgacgaaggagcggagattgactcgatcgacgtgatccgggacaacgataagctgttcatagtgaccgaggagcatatgacagcagtagcatcgatggactcggtgtctggatcatagcatattcgagtttgctgaataaggccttgtccagcttggagggatttgagtgggaatgtttttgcatcacaataggtgtaaaactagtctccccaatctgttccttttaggattaaccgaacaaagcctaatcaagttttctattggcgacaatcc

SEQ ID NO: 4152 - DNA, 752 bp, Oryza sativa
  ref <308>: DATABASE ACCESSION NUMBER: AK061595
  ref <309>: DATABASE ENTRY DATE: 2001-12-06
agcccttgccgttcaccggtgacctgtagccacgcgcgtggtaaatacgaagcccacggcggcggcggccgcagcagcgaagcctgcgcctctcgctcgcctgacctccatctcacatcctcctccgcctctctccgattccgagaccctcgccgcggcggcgaacgaaggatgccggcgatggcctgcggcgcccgcgcgggggccgccttcccctccccccgccccgcccgcgccccgtggcctcccgggcgcttccgggcccttgtccctgctccgcccgcgctgcggctagggctcctccgccttccccctcccatggcctccaccatcgactcacccgggagctcctccgacttcgccaagcgcatggagcgcgcgtggctcatctcccagcaaccaagacctaacccatgttcatcttgtcaatctgctgggcacgtggagtgcaagtggtgtaccggcacaggtttctttatcctcggcaacaacatgttgtgtgaagtaccctcaaaaaacacgaaatgtgtgatatgctctggaaagggcttcgcaacttgtgctgattgcaaaggaactgggtttcgtgccaagtggcttgaggatcctcctgtcgacaaatgaagcagaggaagtttaccataccgtaaaacttttctagttaaaattaatctttgctaattgtatgtacatctgttcatattcctctgtacgtacaagtggtactatgatatttttgcactgcctcagct

SEQ ID NO: 4153 - DNA, 694 bp, Oryza sativa
  ref <308>: DATABASE ACCESSION NUMBER: AK061596
  ref <309>: DATABASE ENTRY DATE: 2001-12-06
aatggcatcgttacctccaggccccagctagtgcagagatttctcttcctttgcccagtttccaggcagaagcatcaggccaagagctcaagacccaaccagtgtagtggttgcagtcagtgagtgagtgagtgaccagtgagatagtggcatcgatggctcggggaagaggcagtgcaatgcgaggcgccgtcgccgtcgcgtttctcgccgtcgtcgtgagctgcatcttcctctccggctgcggcgtcgccgacgccgccacctactacgtcggcgacagcctcggctggtccctcggcagcgggagctggcccagcggcaagaagttccacgccggcgacatcctcgtgttcaggtacttgccgtggatgcacaacgtggtggccgtcgacgaagacgggtacgccgactgcaacccgccgccgttctcgaggtactacacctccggctccgacagcgtcaggctcgccaggggggacaacttcttcgtctgcacccgctacggccactgcaacctcggcatgaagatggtcgtcaccgccgtgtgactgagggagaaacatgtcaagactgtttcgtacgtctcgatcgagcgaaaatgctgtgaaatgtcacactctctctatcttgttccatccggttcgttctcagtttttagcattttggatgattgattagaggattctctagc

SEQ ID NO: 4154 - DNA, 491 bp, Oryza sativa
  ref <308>: DATABASE ACCESSION NUMBER: AK061597
  ref <309>: DATABASE ENTRY DATE: 2001-12-06
gtgcaaggttgaagagaaaagtgagcttagatttgtatcaaaagagagatcattcttggttggcctgatcgatcgaagaggagaagctagccaagatgtacaaccctccggcgcagcaggacatgtcctactacgatcactgcaccaagcggcatgaggagaagggctgcctctacgcatgcatcttcactgcactgtgctgcttctgctgctacgagacctgcgagtgctgcctcgactgcctctgctgctgctgcaactaggctgccatatcaagccatagcaagaacatgatcaagatgaggatggagatcgcctccatctctcttacccctgagatttcataatttatcagcccgttgtcatcatgtaaaattaataaacatgtagtagatggaaactttgtcagaatcgagcatttgtgttctgaaaaagaggactattgtaagaaacccagaatactgttatctgaagtgctttctatgcgtgtg

SEQ ID NO: 4155 - DNA, 855 bp, Oryza sativa
  ref <308>: DATABASE ACCESSION NUMBER: AK104671
  ref <309>: DATABASE ENTRY DATE: 2002-08-28
aaagcaagcaagacgtccatgaagatgaagcgcaccatggctgctacttccatcctgttcttcttcctcgccggcctcgccgccgcccacggcagcacagcggacgacaccacgaccaccaccaccaacaccatacgcctcccgatcgacggagcagtggcggcgcgaaggaggacgaggccgtggaagtgctgcgacaacatcgtgaggctgccggagaggatcaacccgccgttctggcagtgcgacgacgagctggagcccgggcagtgcttccgccagtgcgaggcgtgccgggatccgccggggcggccgttccccggccggccgctcatctgcgacgacgtcttctggggcgacgacccgggcacctcgtgcgcgccgtcgtcggagtggccgtggggcccgtgctgcgacatcgccgtctgcaccaagtcgctccctcccatctgccactgctccgacgaggtggagtcgtgcgccgccgcgtgcgggcagtgcgagatggtggactcgtggtcgtggcgccctctcttcgtctgccgtgactccttcaccggggacccaggccccaggtgcacacctgaaatgcacaactaagaagagaactacttctctgtataacaagcagagaggctcatcgtacgtattctctgctagcttgaacatgtctctgtgttcatgtacgtgttggtatatgcatagcttgaacatgtctctttgtgttcatatacgtgttggtatgtatgcatagcttgaacatgtctctgtgttggtatgccaacatgcatcttgtctttgtgatgatgcataaataaatgaataaaagataaataagagatgagatctacccat

SEQ ID NO: 4156 - DNA, 899 bp, Oryza sativa
  ref <308>: DATABASE ACCESSION NUMBER: AK104672
  ref <309>: DATABASE ENTRY DATE: 2002-08-28
ctcgatcttctcgcttcctcctctcttctctcttctctcttctcctcgcttccacccacccaccatcggccgtcgccctgtccaccctccaccggctgtcgcttccccccacgacgaccggctgccgcggcctcccgcctccctcccatgaccgcgtcgccgtctccttcgctcgccgccggcctccaggagctcggggccgccgtctcctccccccgtctcccaatagccggtcgccggatccggcctcgacgagtttggaggatgcggatccagcgaccgccggcgtctgcggccacctcccccgcctcctgaccgtgagccgccgccgcctgccgccggatccgacctcaacaaatttgggggacgtggatccggcagcagccgcctcccccgccgaccgaccgtcgaccgccggcgtcctcggccacctcccccgcctcctgaccgcgagccgccggatccgacctcaacaaatttggaggacacggatctggcggcagccgcctcccccgccgaccaaccgccgaccgccagcgttcgcagccacctccctcgcctcctgaccgccagccggcgccgcctgccgcctcccccgccgaccaacggccagatctggtggacgtccgccgcctccatccccaactgttggtgtctgcggctcgtccccccgaccgccgacgtcctccacatctccttcacccacaagcgccgccaccatttccgattaggttggctatattcattgctaattttcattgccaaatttcagattaggctatatcttgattgcttgtgtggatttgtagtttgttaagatgggaatcattactgtgtgatgtatattgttacataagttgtgtgatctgtgatatatattacttgtgtggaagtgcttc

SEQ ID NO: 4157 - DNA, 635 bp, Oryza sativa
  ref <308>: DATABASE ACCESSION NUMBER: AK104673
  ref <309>: DATABASE ENTRY DATE: 2002-08-28
tcaagcagtggtgcccataggcttgcgaccattttgatgtatctttctgatgtcaagcaaggtggtgaaactgttttccccagatctgagatgaaggatgctcaagctaaggagggggcaccatctcaatgttctggttatgcagtgcgaccagccaagggcaatgcaatactgctgttcaatttaaggcctgatggagaaacagataaggatagccaatatgaagaatgtcctgtcctcgaaggagagaaatggctagccataaaacatataaatttgagaaaatttgattatccaaaatcatcacttgcatccgaggatgagtgcacagatgaagatgataggtgtgtgagttgggctgctagtggtgagtgtgacaggaatccggtgtttatgataggaagctcagactactatggctcttgccgaaagagctgtcgagtgtgctgattattttgcaattttttgctagtagaaatattgatgtcataggcagagaatggtgtaacaaactgtatatgttgcccgtttttcttttatgatttactttgcgtttgttaggaaatttaatttggagttaatggattgaccactgttcccaaattatggaaaataattttgttccatcagatgat

SEQ ID NO: 4158 - DNA, 760 bp, Oryza sativa
  ref <308>: DATABASE ACCESSION NUMBER: AK061598
  ref <309>: DATABASE ENTRY DATE: 2001-12-06
gtcccggccctctactccactccacccaccggattgctaacttgcttcctccgtccgcggccaccactttctcctctcctcctcagagcaagatcattcaagtataatcctgcctcctactagctataatggcagcagctgcagcatcatccgtgtccctccccggggcgagggctctcccgacgtggtccagctccgtgtccggcgactcgcactcgttggcgctgagctcgtgggcggcgcggcctcggtcggcgcggccactgcgggcgccggcgaggatgggcaacgtggacgagggcaaggggatcttcgcaccggtggtggtggtggtgcgcaacatcgttggccgcaagcgcttcaaccagctcaggggaaaggccatcgcgctgcactcgcaggtgatcaccgagttctgcaagaccatcggcgccgacgccaagcagaggcagggcttgatccgccttgccaagaagaacggcgagaagctcggtttccttgcctgatcgacatgcccttcctaattcctactagctcatttgattggtgtggatttcctctctgaatgaatgaatttcctgtagctagctagccagccgcgccttcctccctgcgtataaatgtgtcttgtgcgtacgtatacctcctcttctgaccttcaattccatccatccatgccatggcggcatgaacgaatgaattagtagtaagtaatacgcgcatgcatgaacgaatgaataatatactatataatgcgtgt

SEQ ID NO: 4159 - DNA, 2801 bp, Oryza sativa
  ref <308>: DATABASE ACCESSION NUMBER: AK061599
  ref <309>: DATABASE ENTRY DATE: 2001-12-06
atctctccgcccttccccccacttgtcccctagctccgccgcgataaagtcttgtagccgttggagatcaaaatcaccaagcaatcccatcccccgcggcgccccttcccccccaattctccgcctcgaattcaccctctctctctctccccccgaatccacagatcgagatggctgcggcgacggcgaggtctccgtcccccggccccggcgcgaggccgggctgcgccgttaggaggagcgccgactccagccccgccgcctccccctgcgatttggcggcgctgaggagctccgtggtgtgcaggaacgcgtcgccgcgggcgtcgtggtgcgcggagaaggagaacagcgggcagcgcgacgcggcggcgagggcggcggcggcgcccaagcccgctcgccccgcggccggcgccgcgaagaacttcatggcgccgaccatctccgcggcgtccgaggcctcgccaaggaagaaggtgctcggggagcgcaacgagcagcagcagctctaccccgtggcctcgtcccccgtcaagcccatggcgtccgaggcgggcgccccgcgacgcctccggctctcgttcgatggggcgcccaatactgccccacccgccgcatccacgccggtcaccgcggcggccggctccaggcactcgttcggcggggaggaggagcggagggtggagaatcccccgtgcaagaaccaccaccacgccacggccttcgacgacgctgcttccgcggaggcggaccagggtgcggctccgtacgatcccaggacgaactacctgtcgccgaggcctcggtttctgcactacaagcccaacccccgcatcgatctgtaccggcaaggcagcagcggtggcgtgaggcggctcgaggacgggttcgcctccgagagcagcgaggaaaccgtcaccaccaccaccaccaccagcagcgaggaggaggtggttcttgtagacgaagaacaacaagcgcatctgtcgtctgagctcggagatggcgccgctgttcccgcggctgatgcttgtgccctgccgctggagcctgcgtcgggttcaccgcgggctcgcgtgctgacgccagagccagcgacgcgttccccgcgcgctcgtgtccagacaccggagccggagcctacggcgagctccgagcgagctcgtcgtcccaggaagaggtcttccctgaggttcctggttgctccccttgcgctggtcgtgttcatggctgctgctctcatctgcgtgccgccgccgccggtggattctccggtcatgccgctaaccgccctgtcgaaggtgtcggactttctgtcagttcaagaattgcatcctgtggagttggctgcttggctgaagcaatggtcaagcagttcgttgaatctggtcacatcctactgggaatcccttgtttgggcgcaagagcaagagttctttggtccgcacttcgcagccaatttgagtgctgcaactgcaagtgcgcacgagggtgttgatctctactgcaactttgttgaaacaaggccagttctaatggaagatatcggtgccagtgcctttgagcaggattccaagatccaggaggctgtttcagcaagtgattctgagttgatttcagagatcagtgatgtggagcaagaagatatcactgataagggagatgtgatcgatgatgggttcttagcagaggagcttaatgttgagatgccggaagaagacgctgagatgtcacaagaagtttcaggtagcaatggtgaagagatggcatccttcagtcaggatctggagccctcccaacctgcaggagaagctgagccactagagaacattgaaactagcacttcttccttgaagcaggatgttcagactgatgattctgagggtgatcgtgctgccgacggagaggagagcccagaggcggatcatggaatgaagtcagaattggggatgtggccaagctacctggacaaaatctcaaagcctgctgctgctggcgcagctctggctgccgtcattgttccagctgcactggccttcctcctcatgagcaagaagcaagatcaggctgtcgcaaatgctgccgctgaggcaccagctgatcaagctgaaccggttgtcgagaagaccctatctggttcggggagcagcgagggtcatcttcgtgtgaagggttcacagcttcagactcctcctgtggcagatgaaaccgagagattcggcggcggctccggcgcttcgatgtatagcagcagcttgtcttctggctatggcaggaggaagagtgccaaggaggacgagagcctgagccttgatccagtgtccaggagggattctgccgcgcaacccacatcgtcctatggtagtttcaccacctacgagaagatccctgccaagaagagaaacaaggatgatgaggcggtgaccaccccagtccggcgttccagcaggttgaggaatcaggttaaatcaccggaggcgtaaagatgggcagccccagtgctaactacgatctgtaggggacctaactatcagcttgattttagcacttgctgctttagcttaactgctcctcagctttcattgacattgctttagcacttgaattcgactgatgtatgatgataaataacagctctctgctgttcttttcatcgaaaaatggattacgatttctgttttttccccccttctttttagttgtgtctgttgagatgactgctttcgtgcagctttgttatgtttgctacctgaatatgaatgtattaatccaggacatcgctttgttaccattctgtc

SEQ ID NO: 4160 - DNA, 876 bp, Oryza sativa
  ref <308>: DATABASE ACCESSION NUMBER: AK061600
  ref <309>: DATABASE ENTRY DATE: 2001-12-06
aatccatttccaccgaaaccgatcccctttctctctctccctctctcaaattccagtgggcggcggcggcgccctccccgagcgtctgcggtggcggccttccccagcgcggacagcagcggtgacccttcgccccatcctctcgctcttctctccctcggatccgcaccggcggcggctccctccaccccgtatcgcctccctcgccccctcctctccctctcgcctcgtggtagccggcggtggcggcaagcggcagccgcgggtagccggcggtggcggcagccgcgggcggatgcggcggtggcggcggccgcgggcggatgcggcggaggcggctccctccgccctctctcgcctccctcccgcgggtggatctgccgggcggcggccgcaggcggatgcggcggcggcggctccctctgccccctctcgcctccctcccgtgggtggatccgccgggcggcggcggtggcggcagccacgggcagatccggcggcggcagctccttccgccccttctcgcctccctcccgcgggtggatctgccgggcggcggcggccacgggcagattcggcggcggcgtcatctgctgagggtggatccggcaacggcggcttcctccgccgcctctcttctccctccggcgcggtggtcgcgggtggatccgacggtggtggcgtctactgagggtggatctggcaacggcggcttcctccgccgcctctcttctccgtccggcgcgatggtggtgcccgatggtggatccggcggcaggggagtgaacttctgtgatgtatgttattcttgttgttattcttggatgtgatgtatgttgttgttgttcttggatgatttcgttatgttgttgtttt

SEQ ID NO: 4161 - DNA, 843 bp, Oryza sativa
  ref <308>: DATABASE ACCESSION NUMBER: AK061601
  ref <309>: DATABASE ENTRY DATE: 2001-12-06
aacccgatgaggcggacgacgagcatgacggagttctcgccgccggacgtgctggcggcggtggtggaggaggagggtgaggatctcgaggccatgatgatggtgggccagcccggcggcggcggcggagacggggcgcaggactggctggcgtcgttcggccgcgaaggcggcggcggaggaggaggaggaggcgcgccggggcaggactggctggcggcgtaccgcgcgcgcgccgcgccggcgagggcggggctgaggcggaactccgccgactactgctccgtcgagaccgcctcgttcctccgctcctgcggcctctgccgccgccgcctcggccccggccgcgacaccttcatgtacaagggagaggcggcgttctgcagcctggagtgcaggcagcagcacatgacgcaggaggagtggcaggacaagtgcggggtgacgtccatgaagaaggaggcgccggcgccgcccaacggccgccgccgctccagcaagaccaccaccagcggcggcacggtggcggcggcatgatcgatcgatagccaccacagcctctagctacctagcaagaacgccgagctcatcagcatcacacacctaagtatactacaagctacaaccaccatgcacacggctcaattacgacgacgacgacgacgacgaagaaagcaaagcaagaatcgattattaatccaccattattgtatggttcgatcgatcgatccatcgatctgcctttagagagataccattagttttgatcaatccatgtatgtatcacctgatcagtacttggatcgatcgagatgttaattagttgcagagttcttgccgatc

SEQ ID NO: 4162 - DNA, 924 bp, Oryza sativa
  ref <308>: DATABASE ACCESSION NUMBER: AK061602
  ref <309>: DATABASE ENTRY DATE: 2001-12-06
acacacacatcccacctccccacacgcaagcttcgcagcgcagcttcgcggagacaacgtgagaaagaaagaaacgagacgaacgcgaggtggtggaggtggacgccatggccgccgccggcagcagcagcaggttcgccgtcacgtgcggcctcctcagccagtacatgcgggagcgccagcagccgcagccgccggtgacggttcttgaggcggtggcggaggaggaggaggaggaggacgcgcggactatgcagctcttccccccgcgcgccgccgccgccgacggcgtcgcgacgccgtcggcggggacggccccgctgaccatcttctacgacgggaggatggtcgtggtcgacgacgtcccggtcgagaaggccgcggagctcatgaggctggccggctccgcgtgctcgccgccgcagccggcgcacgccgccgcgctcccggagatgccgatcgcgaggaaggcgtcgctgcagcgtttcctccagaagaggaagcacaggatcacgacaacgagcgaaccatacaagaaggcggcggtggcgtcgccggcgccggagaaaagcttcgccgtcgcgccggtgaaagatgagccggcgacatggctcgggctctgaagatttatctgcccggtttagaggaggagaatatcacaaagggagaaaaaaaattaagtactgactaaattgttgttttccatgatttaagttcgtctctgtttgagatttctttggcccaaacccaaagagttctttcactgatttaagtgattatttcctccactagagcatatacagtgttctgaaaaataatggtagatttatccatttttgttgatgtacaagtacaactgtctccatttctatgcatagtatgtaattaataattattactcaaaagactggaaagactgttgtc

SEQ ID NO: 4163 - DNA, 687 bp, Oryza sativa
  ref <308>: DATABASE ACCESSION NUMBER: AK061603
  ref <309>: DATABASE ENTRY DATE: 2001-12-06
aaaaaaaaaaagcagatagtacaccggctatctatccatctatctactcagctttgcgtcctcccgcgaattcaccgcagcaatggcgtccctcgtcgccgtccagcctgtcgccgtgaagggcctcgccggcagctccatctccggcaggaagctcgccgtcaggccgtcgccccgggcgctctgccgcaccacccgcaggccgcgcgccgccgtggtggccaagtacggcgagaagagcgtctacttcgacctcgaggacatcggcaacaccaccgggcagtgggacctgtacggctccgacgcgccgtcgccgtacaaccctctccagagcaagttcttcgagacgttcgcggggcccttcaccaagagggggctcctgctcaagttcctgctgctcggcggcggatcgctggtggcctacgtcagcgcgtcggcgtcgccagacctgcttccgatcaagaagggcccgcagctgccgccgacgcccggcccacgcggcaagatctaaattaaattcctcgtctctgcctcaccttcttcttgatccgatccatccatgcaaatcctctgtactgtactgctagtcccccatggccggatcgccatggattaattccccctgtttatgatgttgatataattgtactattcctatggctatataagttgtaaaggatccaattc

SEQ ID NO: 4164 - DNA, 384 bp, Oryza sativa
  ref <308>: DATABASE ACCESSION NUMBER: AK061604
  ref <309>: DATABASE ENTRY DATE: 2001-12-06
gaaagcaagcattggcagatactacaaattaaatgaaacatggctcaaagttaaaatattttatctgagctgcagatacaaattaactcaaacatggttcaaagttaagatcttttatctgagctacacatatatatgcagaataaagactctttacagcatgcataaacaattgtgggagtatgtatcagctatgtttcctattctcagttttaattatgaatacttgatttagtaccagaaccgtgtacatatgtttgcaaaattgcaagtaaaatgaaggtgtagaactataatgttgttctatggtttcttttgcgctacatctggactatggctatggcgtggctgtgtatgccttgcaagagaaatattcccaatgac

SEQ ID NO: 4165 - DNA, 785 bp, Oryza sativa
  ref <308>: DATABASE ACCESSION NUMBER: AK061605
  ref <309>: DATABASE ENTRY DATE: 2001-12-06
aacagtgagtttgaacagaacaacgcgacgacccttgcagcgcacgaccccgcggactcgatccagatctagggcttctcgtcggcggcgatggcgggcaagggaggcaaggggctcctcgcggccaagaccacggcggcaaagagcgccgacaaggacaaggacaagaagaaggcccccgtctcccgctcctcccgcgccggcctccagttcccggtggggcgtatccacaggcagctcaagtcgagggcgtcggctcatggccgcgtcggcgccaccgccgccgtgtactccgcggcgattctcgagtacctaaccgccgaggtcctggagctggccggcaacgcgagcaaggatctcaaggtgaagcgtatcaccccgcgccatctccagctagccatccgcggggatgaggagctcgacacgctcatcaagggcaccatcgccggcggtggcgtcatcccccatatccacaagtcgctcatcaacaagacctccaaagagtgatgcgaaaaaaaaaaactccctcatgtgctttgcttgactcgaagtttggtgggtgttttactgttaatttgttatgttttctcatttgatttgatgtatttgtgctacagtgttcaatccttagtgggtttaggtgccttttagtcttttgaaattatcgtgacaatgttggttgcagctgaattcttgtgaattcttcactccgtatgctgttctgaaccatccatctcgatgcttcagttcagattatcttgttaatgtttaagatcagttcgatt

SEQ ID NO: 4166 - DNA, 760 bp, Oryza sativa
  ref <308>: DATABASE ACCESSION NUMBER: AK061606
  ref <309>: DATABASE ENTRY DATE: 2001-12-06
acaaagcattcaagcaactaggtatctagctaagcagtggtgtgatcagtaggaagttgcaggtgggggatatatcaccaatggctccggtcagcatctccgacgagcgcgccgtctcggtgtcggcggagcgggtgtggaaggtcttctccgacgcgcccgccatgcccaaggtttgtgccggcttcatcgacgccattgaggtcgagggggatggcggggcgggcactgtcaccaccatgaagctcaaccctgctgtggatgatggggggtcattcaaaacacgtgtggtggcacgtgacaacgcagctcacattatcaagtcagaggttctggatgtgccggccggaagtaaggtgggcaagctcaagtcgcacgtgacagagacgaagatcgaggccgccggtgccggctcttgcttggccaagataaacgtggagtatgagctcgaggacggcggctcactgtcgccggagaaggagaagctcatcctcgacggctacttcggcatgctcaagatgatcgaggactacctcgtcgctcaccctaccgagtatgcttaaaaattgtcataaaccaaaataatatacatccatctccgtattgctgcttcctgataattaaataatgtgagccacgacaaatccaatcttttgtggtgtttgattttgtgagagtgatttgtgtttgaggttatgtaagaaataaatcataattgtgatcgtgttctatatgtgtgcaaatgaacatgtttgctgct

SEQ ID NO: 4167 - DNA, 719 bp, Oryza sativa
  ref <308>: DATABASE ACCESSION NUMBER: AK061607
  ref <309>: DATABASE ENTRY DATE: 2001-12-06
gcgccactcaccactccgagtccgaggctccgagcagacgagccgagctgagctgagcaaaacgccactcaccaccatggccgtctccaccaccgcctccaacctcgtcctccgcgccgcgccaaccaccaccaccacccgccgccgccgcgtggccgcctccgccgtgcggttcgaccggcgctccgcggcgctcctgctcctgtccgcggcggcgggtgcggcgccgacggtggcgtccccctcccccgccaacgccgctggcatcgggctcttcggcatcaggaagaagctggagcgggcggaggaggcggcggcggaggcggtgcgggaggtggaggaggcggcggtggaggccgcggaggtgggtggggaggcggtgaaggcagcggagaaggaggcggcggaggtcgccggggaaggggtgcagctggtggccggcgcggagctcgccggagacgggctcgtgcaggccggggcggtcgccgccaccgaggcgctcggcgtcgtggtgggcctctccgtcgtcaatggcatcctgaggcctgaatcctagagagagatcactctgctgctgcatgcgtagtgctctgtagtttaggccatggatggtttcagactttcagtgaagagcttaactggatgtgattatctgctgatgactctgtgggtgtaaattaattgtcatagagtgatggatcatggtggtgttcatgttt

SEQ ID NO: 4168 - DNA, 667 bp, Oryza sativa
  ref <308>: DATABASE ACCESSION NUMBER: AK061608
  ref <309>: DATABASE ENTRY DATE: 2001-12-06
ttagatggttttacagttcttttgtttattttgggtgaggtgtgtgttccaaactgccaatagccattagttggatacattttgttgttactgcaaatgctgaagacagtgttatgtaactcactgttgtgcagttcagagtgtcatgctggcaggcaactacctgttccccctttattttttttgttgtcttgcttcacagtggatttcagaacagaaaactgtgtcagcttgtctcgatgataaccaacttgtttggccctttccacaatatagaagccactttgtgctcagtgtcaagcttgctccttcaaagaaattccagtctcagtcctgcagtgtaaaagagagatgatttggctacagcaacaatgtttgaggcacttcttttgcaaaatattctgagatcaaccagtcgttttcgcccaaaaagcatctccaacatttcagacaaatatttgaaatgaatggacatcagtgagtatgctctaatgtcatttcaaggggaatttaaacatagattcagaatcattacagattttgagaagagaattactttgttatctctccctcagtgaaaaaggattgtgacacatcacctgaaagtagagtttatttcttcaggatgctgctcactttggacctggcttttggacctcactttgcc

SEQ ID NO: 4169 - DNA, 1743 bp, Oryza sativa
  ref <308>: DATABASE ACCESSION NUMBER: AK104674
  ref <309>: DATABASE ENTRY DATE: 2002-08-28
ttctcccctcccccttctcgccgctctactcaattccgccgtcaaagtcttcgattgatccgatctctcgtctcgtctcgtcctccccatcggaaccctagccgcctcccgtgcccgcgcccgcgccgccacatggagccgaagccaagcacgccgacggccgcggcgaccccgcggtttaagctggggaagcagtcgtcgatggcgcccgaccgcggcggtgcgggggagagctcggaggaggggtcgagcgaggcggtcggggtcatgggcttccagctgatgtacatggcccacgagggcgacgtcgaggggatccaggagctcctcgacgccggcgccgaccccaacttccgcgactccgacggccgcacggcgatgcacatcgccgcctgcgaggggcaagccgaggtcgtcgagctgctcctccagcgtggggcggatgccgtcgccgaggaccagtggggcagcacgcctttggcagacgcattgcattaccagaaccatgatgtgatcaagatcttggaaaagcatggctccaagcttaagattgctcctatgcatgttaaaaatgtccgtgaggttcctgagtacgagatttccccgaacgagctagatttcactaatggaaatggtatatcaaagggtacatttaggaaagcaacatggaggggcattctggttgctgttaagaagcttgatgacgatctaattatggacgagaacaaagtacaagcattcagagatgagcttgatgtgctacaactaatacggcatccgaatgtcgtgcaatttttaggtgctgtaacacaaagcagcccaatgatgattgtaatggaatttatgcccaagggtgatttgcgcaagcacttgagtaggaaaggggctctggaaccgtcatatgcagtgaaattagctcttgatattgcaagagggatgaattatttacatgagcataaacctcaagctatcatccaccgtgaccttgagccttcaaacatattgagggatgacactggacatctgaaggtggcagatttcgatctgtgtaagatgctaaaatggagaagaaaagttagagaagagaaagctgtaacttctccaggcaatgcatgtaggtatgtagctccagaagtcctgcgaaatgaagaatatgatactaaagtggatgtcttctcatttgctttgatacttcaagagatgattgaaggatgtctccctttttatgacaagaaaaataatgaaattgagaaggcacataattctaaagaaaggccacctttcagagctcctccaaagcattatgcttacggattgagagagctgattgaacaatgctggagtgaaaatcctgctagcaggcctgactttagaacgatcattgaacaattgtcttatatccagaatgaaatatctcagagaaaccgttggaaggtgaaacctctcaaatgcttcctgagctttgagggcatgtggaagaaagatcgaaatgagggcagcaccactcgttcatcacgttcatcgagatcctatttttaacagtcagttgggcctgttgttgatttcgtgtggaggattgtatgcatgattgatagaaaatcaactcattatataccatagatttgtgtttcactggaaatagttttgcaacttgttgcttcactgtcgatcacaatgcggttgtacatcagacagcattgaaagcaatacaaactggaatatacagactgttgtttttgtttt

SEQ ID NO: 4170 - DNA, 415 bp, Oryza sativa
  ref <308>: DATABASE ACCESSION NUMBER: AK061609
  ref <309>: DATABASE ENTRY DATE: 2001-12-06
gaaattctgacactgtccactggcatgatgatatggtgtccaacccgttgtgcatctgtgtgaaagctttttgtccttttaaccagctaagtagagctagcttctgtaaaatgtatcgtgggtacaccatgatgtatgtttctttgctaggcttcgaaatggatgcttgctaaaatatgggcgtaggtattttgcatacaatagatggtgttgacaccctgtgaactttgtaaggtcacttccagttgagaaactatccttcgtgtacccatatttcgtgcaatgtcatgctgggtttaccttaagtgaaaaatacccctcgtgtaaaatctcgaagtgtagtacttccaccattgtttctctcctagtcctatggctgagccaggaaaccaataaacagatgttgattgaaatt

SEQ ID NO: 4171 - DNA, 805 bp, Oryza sativa
  ref <308>: DATABASE ACCESSION NUMBER: AK104675
  ref <309>: DATABASE ENTRY DATE: 2002-08-28
accatggactatcacagaggtggtggtgttgaggtgcgcattgctcgcattttcaatacatatggccctcgaatgtgtctagatgatggccgtgtggttagcaattttgttgcccaggcattgcgtagacagcctatgacagtttatggtgatggaaaacaaactagaagttttcagtatgtttctgatctggttgctggactgatggctctgatggagggtgatcacattggccctttcaacctgggaaacccaggagaattcaccatgttggaacttgcacaggttgtgaaggaaacaattgacccaatggcaacaattgaattcaaacccaacacagctgatgatcctcacatgagaaagccagatattaccaaggccaagcacctgctacgttgggagccaaaggtctctctcagggaaggtcttcccttaatggtgaaggacttccgtcaaagaattttggatgagtaatcaaaacaatgtgtgtttactcatctggattctatatgatgctgcaaatatagtcagtagcacttcacctgctggatcacgcagtacaacgttatttactgcatacacgataaatgttgtagaattacttgatttttttgtatcttggtgagacagaacagaattagttaattatttgtccacattgtgaatcttagtaagtcttgtgagaagtataggtttgtatatcaggagctgttattggtttcaaattttcatctagctcctaattgtaatacgaatatctgattcaagtgaaatatattcagacgagttcgcttttttgctcttc

SEQ ID NO: 4172 - DNA, 2250 bp, Oryza sativa
  ref <308>: DATABASE ACCESSION NUMBER: AK061610
  ref <309>: DATABASE ENTRY DATE: 2001-12-06
tcttcgaccgcgtctacgactacgacgtctacaacgacctcggcgaccccgacttcaagatcgagcacctccgccccgtcctcggcggcgacgaacacccctaccctcgccgctgccgcaccggccgcccccacaccgagatcgatccgcggacggagaagaggagggggccggtgtacgtgcctcgggacgagcagttctcggacgtgaaggggatgacgttcagcgcgacgacgctgaggtcggggctgcacgcgatgctgccggcgctggagccgctgctggcgaaccaggagctgaggttcccgcacttcccggccatcgacggcctctacagcgtcggcatcccgctgccggcgcagctcgccgccgccggcgccgccactgccacggccggcggcgccgcggcctcctcctccacctccaccaacatcgtcggcggcgtcatcccccgcctcgtccgcatgatcgaggacaccaccgaccacgtcctccgcttcgacgtccccgagatgttcgagcgagataggttctcgtggttcagagacgaggagttcgcgaggcaggtgctggctggcgtcaaccccatctgcatccagctcctaacggagtttcccatcatgagcaagctggacccggaggtgtacgggccaccggagtcggcgctgacgaaggagttgctggagagccagatcgtggagtcggtgacggtggaggaggcgatggcgcagcggcggctcttcatcctggactaccacgacgtgttcctcccctacgtgcaccgcgtccgcgagcggccggagacgacgctctacggctcccgcacggtgttcttcctcaccggcgccggcacgctgtcgccgctcgccatcgagctggcgcggccgcagtcgccaacgaggccgcagtggaggcgcgccttcgtccacgggcccgacgccacggcgtcgtggctgtggaagctcgccaaggcgcacgtcctctcccacgacaccggctaccaccagctcgtcagccactggctccgcacccactgctgcgtcgagccgtacatcatcgccgccaaccggcagctcagccggatgcacccggtgcaccgcctcctccacccacacttccgctacaccatggagatcaatgccctggccagggagagcctcatcaatgccgacggcatcatcgaggagtccttctggcccgggaggtacgccatggagctcagctccgtcgcctacgccgccacgtggcgcttcgacgccgaggccctgcccgaggacctggtgcgccgcgggctcgccgttcgacaggaggacggcgagctcgagctcaccatcaaggactacccgtacgccaacgacgggctgctggtctggaactccatcaagcagtgggcgtcggattacatcgacttctactacaagtccgacgaggaggtcgcctgcgacgaggaggtgcgggcgtggtgggaggaggtgcgcaccaaggggcacgccgacaagaaggacgagccgtggtggccggcggtggacacccgggacgggctcatcggcgtcttgaccaccatcatgtgggtgacctccggccaccacgccgccgtcaacttcgggcagtaccactacggcggctacttcccgaaccggccgacggtgatgaggaagaaaatgccggtggaggagaacaaggaggaggagatgaagaagttcatggagatgccggagcacgtgctgctggacaccatgccgtccaagatgcaggccatcacgatcatggcgacgctggacatcctgtcgtcgcactcccccgacgaggagtacatgggggagcacgccgagccggcgtggctggcggagccgagggtcaaggcggcgttcgagaggttcgcagggaggatgaaggagatcgagggcatcgtcgacgagcggaacaacgacccggagctcaggaacaggtgcggcgccggcatcgtgccgtacgagctgctcaagccgttctccacgcccggggtcaccgggaggggcatcccaaacagcatctccatctgagtttcgctagctaagatagctagctgcatttgggacaagattggagatggttaagatttgtacactaagatcatgtaccaacactaatagctcccgtgtatgcctgcctgccacgggagaggcatttgctagtgtgtttgagttactagaatgccacaaattagtaaagaggttattgaactaaagctcagttcgctgagttttctag

SEQ ID NO: 4173 - DNA, 647 bp, Oryza sativa
  ref <308>: DATABASE ACCESSION NUMBER: AK104676
  ref <309>: DATABASE ENTRY DATE: 2002-08-28
agagcaagcttgcttcagcaaatcagggataagtcaggtcagcagaagctgaatggacatgaaaagtcaaaagcagtaggcaatgatactaaaaacttggatgaaagggaggagttgcttcaacaaatcaggagcaagacattcaatttaagacgaacaaatgcatctaagacaaacacctcatcaccaaccactgccaactccagcgttgtagcaatcttggaaaaggcaaatgtaatccgccaggctgtggccagtgatgagggaggtgatgatgatagttggagtgatatatgaatactcaactggaacgcgtatgaaactctttttctgtatattcagctagtacaagatgaagtgaaaaaatgtgaataacatccttttcttcattgtaattagattttccaggtctgttttgtacctctttttagttcacattagtgtattctctcataggcccatgcggttgtggaaatggttagatcattttcacattatgtaaattaactttattatttatatttttgatagtgaaattaactggtaaaataagcatgttaaactgttttttctagcaatgtattgaaataatatctctttgcattcataataatatgggggtgtatctgtgcaacagatttattttt

SEQ ID NO: 4174 - DNA, 830 bp, Oryza sativa
  ref <308>: DATABASE ACCESSION NUMBER: AK061611
  ref <309>: DATABASE ENTRY DATE: 2001-12-06
agcagtgcatctcaagaagtactcgagcaaagaaggagagagcttggtgagctgcagagatggccccctccgtgatggcgtcgtcggccaccaccgtcgctcccttccaggggctcaagtccaccgccggcatgcccgtcgcccgccgctccggcaactccagcttcggcaacgtcagcaatggcggcaggatcaggtgcatgcaggtgtggccgattgagggcatcaagaagttcgagaccctctcctacctgccaccgctcaccgtggaggacctcctgaagcagatcgagtacctgctccgttccaagtgggtgccctgcctcgagttcagcaaggtcggattcgtctaccgtgagaaccacagatcccccggatactacgatggcaggtactggaccatgtggaagctgcccatgttcgggtgcactgacgccacccaggtgctcaaggagctcgaggaggccaagaaggcgtaccctgatgcattcgtccgtatcatcggcttcgacaacgtcaggcaggtgcagctcatcagcttcatcgcctacaagcccccgggctgcgaggagtctggtggcaactaagccgtcatcgtcatatatagccttgtttaattgttcatctctgattcgatgatgtctcccaccttgtttcgtgtgttcccagtttgttcatcgtcttttgattttaccggccgtgctctgcttttgtttttgtttcacctgatctctctctgacttgatgtaagagtggtatctgctacgactatatgttgttgggtgaggcatatgtgaatgaaatatatggaagctccggctatatatatt

SEQ ID NO: 4175 - DNA, 926 bp, Oryza sativa
  ref <308>: DATABASE ACCESSION NUMBER: AK061612
  ref <309>: DATABASE ENTRY DATE: 2001-12-06
cagtgaatatgctgtttggagaagtgatgcaggtagaggaagtctacttgcttcattggcagaggcagctttccttactggactggagaagaatagtgatgttgttcagatggcaagttatgcaccactcttcgtgaacaacaatgatcaaacgtggaacccagacgccattgtatttaactcctggcaacaatatggaactcctagttactggatgcagactcttttcggtgaatctagcggtgctatgtttcatccagttacaatcacttccagctactctggttctctggcagcatctgcaattacttggcaggattctgaaaatagcttcttaagagtaaagattataaactttgggtctgatccagtgagcctcacgatctctgcaactgggcttcaggcccgtgttaatgcactgggatcaactgccactgttctcacatccagtaatgtgatggatgagaactcttttagtaacccgaataaggttgttcctgtcaaaagccagctttccaatgcagcagagcagatgcaagtcacgcttgctcctcactctttctcctcattcgatcttgcgcttgcccagtccaaactcgtggcagagatgtgaagcagcaacacaaggttagcgacagaaacacaagaaatacacgagatgtgatatgcgaataccagaatgctgtccatatatgtgcatgtatcttgaagcactactgtatagtgtaatacacagggaatgatgaataaaattcactcctggcttacttccttcttttcgtttcttttcttttcttttcttttttttttgctttctccatatttatatcggatgagactagatggcgcattgccaccgtgttgctttgttccaaggataacaaatatgagctctttggcctgggaaagagaaaataatttggtcc

SEQ ID NO: 4176 - DNA, 1729 bp, Oryza sativa
  ref <308>: DATABASE ACCESSION NUMBER: AK061613
  ref <309>: DATABASE ENTRY DATE: 2001-12-06
aagctatagcttggtaatccgcagccatggcgccggacgtcgaggcgcggctgctcgccgcctcctccaagccggccaccgccgccgccgcctcgctgccgcgccgcaacaagtaccccttcttctgcgccgtcctcgcctccatgacgtccgtcctcatgggctacaacgtggcggtgacgagcggggcgcagatcttcatggcggaggacctgggcgtgagcgacgcgcagatcgaggtgctttcgggggccatcaacatctactcgctcgtcggcgcgctgctcgccgggtggacctccgaccgcctggggcggcggctcaccatcgtgctcaccaacggcttcttcctcgccggcccgctcgtcatgtcgctcgccggcgggtacgccgcgctcatggccgggaggttcgtcgccggcatcggcgtcggctatgccctcgtcatcgcccccgtctacgccgccgagatctcccccgcctcctcccgcggcctcctctcctccctccccgagatatttatcaatgggggagtgatgctgagctacgtgtcgaacttcgccttctcggggttgccggtgcacctgtcgtggcggccgatgttcgccgccggcgtggtgccgacggtgttcctggcggcgggcgtgctcaccatgccggagtcgccgcggtggctggcgatgaaggggcggcgcggcgaggcgagggtggtgctcgaccgcacgtccgacacgccggccgaggccgagcagcggctgcaggagatcgaggacgtcgtcgccgccgccggctccgttgccggcaacggcaacggcggcggcggcgcgtggaaggaggtggcgaccaagcccggcgtgcggcgggtgctcgccatcgtgctgacgctgcagttcttccagcaagcgtcgggcatcgactccgtggtgctgtacggcccgcgcgtgctcgccgcggcgggtgtggcgtcgaacaccctcctcctggggctcaacgtggtgttcggcgtcgccaaggcgagctccatcctcgtcgccatggcgctcaccgaccgcgtggggcggcgctcgctgctgctcgccagcacgggcggcatgacggcgtccctcctcgctctcggctcggtgttcgccgcgttcggcggcgcgagggacgacgcggcggtggcggcgggcgccgccgtcgccgtggtggtggcgttcgtgtgcgcgttctccgtcgggatcgggccgctggcgtgggtgtacagctcggagatcctgccgctgcggctgcgcgggcagggcgccggcgtcggcaccgccatgaaccgcgtcgtcagcggcgtggtcaccatgacgttcatctcgctctacggcgccatcaccatggcgggggcgttctacctctacgccgccatcgccgccgcctccttcgtgttcatctacgcctgcctgccggagaccagggggcggagcctcgaggacatggaggagctcttccacaccaagtgatgatctcatcttccatcaatgaatcaattcacatatatatgcatttgggttgttgcaacattttgaatggaaagtttgattctttcttggtaagattatcaaaggtttttcatgttcatttggctgattaattggtatactataaatttattattactgttgaaattgacatgtaaagatcggtgggacagtggatacatactggctgaatatggggaaaagagaaaagtttagaacgg

SEQ ID NO: 4177 - DNA, 476 bp, Oryza sativa
  ref <308>: DATABASE ACCESSION NUMBER: AK061614
  ref <309>: DATABASE ENTRY DATE: 2001-12-06
cccgacaccacttgggttttcgttgctggcggcaacggctgcggcggccgcgcacggagggagcagctgcggcggttgcgaccgcgcgccgagggagagagcggtggcgtcgtggcgctgaaggaggaagcgtcggtaacagttgcggccgttgcactcggagaaaggaagagagcggcgtcggctgcggctgtccttggagcagaggaagggagctgcgcctgcgcaagatccagctgtgagggcatcctatgctggatccagctgcgcaagatccatttttgcagttctactgttgattgaagcaagcaatgatctagaagaatggtctgcagttttgctgtaggcttggattttggcatatttttttctcttcgcacctttttttctagcttgttcaattgttcttgggtgtatacgcaaattactttgtttacagagagcggttagtaaatggatctcgttttgagcgatgc

SEQ ID NO: 4178 - DNA, 376 bp, Oryza sativa
  ref <308>: DATABASE ACCESSION NUMBER: AK061615
  ref <309>: DATABASE ENTRY DATE: 2001-12-06
atgcgaaatttgtcaacagaggaacccgtagcctaatggaatagcaaatgactatcagagtatgaaaaattttgctgttaccatcataccatggaatcttatatagtaccttacaatactaacctgttgtggttctgtccttacaagtcgtttttggtcattgctaatagttaagtcttatgttagtttctgtagttctgtcatatttctgctcttatctttatcagtccttttcttacctgtggccatctccccttatctctgaagttggggcacttgatccttttgtttatatctctatatgttaaggatctgaagcccaacactacaatgcagtatgtgtttgttgtttgaaagacagttggattgacatgac

SEQ ID NO: 4179 - DNA, 643 bp, Oryza sativa
  ref <308>: DATABASE ACCESSION NUMBER: AK061616
  ref <309>: DATABASE ENTRY DATE: 2001-12-06
aaaggacaggcaaagaaggaaaatgccagcacaaacccatcagctctgaagctgcaaggctcaatcagtctaagcaacaacatcaatgatcgaaaagcccctaagaagaagtcatcaccatctccccctgatcagaagaaaccggtagcagcatctcctcctgatcagaagaaaccggtagcactgtctcctcctgatcataagaaaaccgtaacaccatctcctcctgatcaaaagaaaccggtagcaagggtgcagaaggcaaaggcagctggtcctccaaaggcaaagcccaaggacatgaaagggggccaacagaagaagcaacaacaactagaggttccttcgctcagtgtgtaaaattcgccgcgaaatggttaccgctcattgtatgatacatcttgtgaagttcacttttgttttttctccccactctttgtttctctcttctttttgttttttacagtgacatggaacaaacaagtgaccaatgtagaatgtatttggttgagaggttgcacacatctgatgagagtggctttgattaggactaggattcattgttgtgctgttgtaatatgacttgtgatgtgcctgcctatatgtttgaattgaagggaagggttttgttggaacaacagtt

SEQ ID NO: 4180 - DNA, 540 bp, Oryza sativa
  ref <308>: DATABASE ACCESSION NUMBER: AK061617
  ref <309>: DATABASE ENTRY DATE: 2001-12-06
atgttgatgctatgaaagctgttgctgatgcctactcaaaaagatctctcaagtactttgaaactgcccttcgtgattacaagtctcaactggaggaggaccctattgtgcacaggcatctttcatctctgtatgataccctcctggagcagaacctgtgcaggctgattgagccctactcaagggtggagattgcacatattgcggagatgattgagttgccagttgatcatgttgagaagaagctgtcgcagatgatccttgacaagaagtttgcaggaactctggatcaaggtgctggctgcctcattatctttgaggatcccaagaccgaggcaatcttccctgctacacttgaaactatttcaaatgttgggaaggtcgtcgacagtctttacatgaggtctgccaagatcatggcttaaatgccaaaatgtctttacagtcatgtgctagttatgttggctattatttcatattgcttcagttcccgttggtctccacagacatttaatcctgcatattgacattttgttctgc

SEQ ID NO: 4181 - DNA, 892 bp, Oryza sativa
  ref <308>: DATABASE ACCESSION NUMBER: AK061618
  ref <309>: DATABASE ENTRY DATE: 2001-12-06
tgaggaagttagacaagaattgcaggcatcacatcctgatgatccacaaattgttgtcctaaaacacaatgtttggcgtgtcaagggcctcatccagatctcaagatctattggcgatgtatatctaaaaagaccagaatataacagagaacctcttcacagcaagtttcgacttcgggaaaccttcaaaaggccgattcttagttctgaacctgcaattgctgtacaccaaatacaaccaaatgatcattttgttatatttgcttctgatggtctatgggagcacctcagtaatcaggaagcagttgaccttgtccaaaataatcctcgtaatgggattgctcgaagactagttaaagtcgcaatgcaagaagcagccaagaagagggagatgagatactcagacctcaagaaaattgatcgtggcgtgaggcgtcatttccacgacgatataaccgtcattgtggtgtttcttgattcgaatgccataagcaaagcaaactggagccgaggtccttctgtttccctgagagggggtggtgtcaccctccctgcaaattcccttgcgcctttctcaactcccacggtgttaagcagcacctattgaaggagctatactgcaaagaacatgaacatctacagtaacacagatggaggtgaaagcagctgccgttatcaactgtactgtactccttctgtgttgctcttatgaaactgtttagaccccacctggtaattagtgtactgatagcgaggtataagattagattattccttagcaacgcaatcttttttttcttttctttttctttttccttctttattcttatcctttctcttacccacgagagaacaggtggttgtaaattgcccagaacacctttttcgtaat

SEQ ID NO: 4182 - DNA, 650 bp, Oryza sativa
  ref <308>: DATABASE ACCESSION NUMBER: AK061619
  ref <309>: DATABASE ENTRY DATE: 2001-12-06
tcagcgagggcgggctcgactacctcggcaacccgagcctgatccacgcgcagagcatcctcgccatctgggcggtccaggtggtgctcatgggcgccgtcgaggggtaccgcatcgccggcgggccgctcggcgaggtcgtcgacccgctctaccccggcggcagcttcgacccgctcggcctcgccgacgacccggaggccttcgcggagctcaaggtgaaggagatcaagaacggccgcctcgccatgttctccaggttcggctgcttcgtccaggccatcgtcaccggcaagggccccctcgagaacctcgccgaccacctcgccgaccccgtcaacaacaacgcctgggcctacgccaccaacttcgtccccggcaagtgagcgccgccgccgccgtgctgccatggcgacgcatcgccttcagctaagctagctaggttgacgacgatgcgcgtctctgcaggagagtgtgcgtgtgtgtacgcggtgcagtagatgtacgtacgtgtaccgtatagatgtacgtattcgtgtggaccgcgtggatggatgtacgagtattggagagagggtgagatctgtaccggtagtgtgtatttctgtgcaggttctgaacctgatcaatgaaatatggtgttgtgaatt

SEQ ID NO: 4183 - DNA, 701 bp, Oryza sativa
  ref <308>: DATABASE ACCESSION NUMBER: AK061620
  ref <309>: DATABASE ENTRY DATE: 2001-12-06
tcatgctccacccgaccaagtacaccgccatgctcgccgagaagatgcagaagtatggcgccaccgggtggctcgtcaacaccggttggtccggtggaaggtacggagttggcaagcggatcaggctgccgtataccaggaagatcatcgacgccatccactccggtgagctcctcaccgccaactacaagaagacggaggtgtttggcctggagatccccactgaaatcgacggcatcccgtctgaaatcctcgacccgatcaacacctggacggacaagggcgcgtacaaggagacgctcctgaagctggctggcctgttcaagaagaacttcgaggtgttcgccaactacaagatcgggggagacagcagcctgacagacaagatcctcgctgctggaccaaacttttgagttactgaagaataaaaaatatgcagataaagaacgcgatgaagctagtcagttggttacaataaagaagtgggtctatgcgtgtttgccaatgatgatgacgaaaatgttggatcgatgtgcagctaccggtagagtttagctagcttcctataagtttcatgcgtgtctgttaggttctgtcagtttgtctagcttgacggtgtgtatgcagtatgctccattcccccttcccctgtacacatctctattttctgaattggaatttgaaagcatcttgatttgatc

SEQ ID NO: 4184 - DNA, 579 bp, Oryza sativa
  ref <308>: DATABASE ACCESSION NUMBER: AK061621
  ref <309>: DATABASE ENTRY DATE: 2001-12-06
tcaaacaacaccctgcaaaatatagctggagttcaaacaggacctgcttggcttgaagctgatactgcagcaaacatgtttttggaatcaaaggataaagctcatgattttgcaagcctacggcatgcgcttctggaacaggataggcaggttcttttaactggtgccaatcctttagcaaaggaactaaacatcaaggagctttacaatttgcaaagcagactagctcaggaaaaggctagagatgtatatcgccaaagatttcaaatgccagaatttcaaggcctggttcaggagcaaaataccccaattgacctgtgtggtcttcacgtaagcgaggcgatacacgccctgaactatgagctcaacaaccggcggaagattgctcgatccacaggccgtcgtctccaggtgatcataatatcaagcacacgtactccggcgaggctgaccgccgccgtcgagcagtacctcctggagcacggcattcagtatacgcaggcacagccgggccttttccgtgtcctgttacagtgaagtaacaggatggtaggctcatcatgtttgtgtacacctttg

SEQ ID NO: 4185 - DNA, 497 bp, Oryza sativa
  ref <308>: DATABASE ACCESSION NUMBER: AK061622
  ref <309>: DATABASE ENTRY DATE: 2001-12-06
atcaagctacatgatgaacgagacaagacgaattcccacgatttcggatacctggcaggatatcagccagttgaaggtccaaagcccctacggctccccaaagaggttctgagcgtcagtcatccatgagtgctgatgaatgttcagcaggagaattgttcccatgacatcgtagatatataatgttagagatgtcagcaacatgtcgtaactctgttactacaccgatctgattttactgtacagtatagaaaggctccacgaggaaagaggctgttgacaagagaggaatttctgtatatctgtaggcggttgtcgcctccactttgtattatgctgtactatatcagtacataaaaatacggcctgtaaattcgctagcttggagaagctgacgtttggatgatgtagttagtttagcgcttccctagcagatgtaaggatttctccctactgggcactggctactgcaatgaatatagctaaagtttacattt

SEQ ID NO: 4186 - DNA, 590 bp, Oryza sativa
  ref <308>: DATABASE ACCESSION NUMBER: AK061623
  ref <309>: DATABASE ENTRY DATE: 2001-12-06
gtgccaaaagcaaacctgatggttacttcctctctaactacccatccttttatttcttttcttttgcatagcttgctccattcctcctttcacctcctctctatgaggccatagccggaggtctcagcagggcttcctcatggggtggctccactccctcttctcccctctgaggaagctctgggttcgtgcgcattccgcacgtcgaaaccggaggggaatgcacattctgtacaaggatgtcaagtcttgccaggatgaggatgtgcatgttctatggtccatattggtggattcgcaccgtcacccagctctgatgaagctgaagctctagggttcttgaagaacagagcagggatgatggcagctatgaattttctgtgattttgccgtttactcggccattacctctgtatagaacagcatgatttcaatggcatcaagattgaaggggcaaaaaaaatagaaggacaaaataggcagatgtttatatgcctttcttgtgtgtattgatgtttctgtcttgtggctttgtgagtgaggttgaaatgtcacctttggttgatgtgaatgcgagtgaggttgagttt

SEQ ID NO: 4187 - DNA, 1939 bp, Oryza sativa
  ref <308>: DATABASE ACCESSION NUMBER: AK061624
  ref <309>: DATABASE ENTRY DATE: 2001-12-06
ggacgcccactcgcatcgccgacgaatttctcgctagggtttcgaggcgggccacatggcctcgccggcggcggagggggacgcggtgagcgcggggttcgcggagctggagcggcagcagcagctgctggcgagctgcacgaggctgtacaagcagctggaggagcacttcgcgtcgctggagcgcgggctggcggcgaggtcggactcgctccgccacaagcgccgcgcggcggaggcgcgggcctcggccgccatggactcgctccgccgccgcgaggcctccatcgatggctccgtctcccgcgcgctcgaccacctcgacgacctcgcctccgcctcgtcggtgccgtccgacgccgccgcggcggcggagggggtggccgagagcctgagggcgatgtgcgccaggatggactccgcggggttcttcgggttcgtggtcgcgcggcggaaggaggtggacgcgctgcgcgccgagatgccgcccgcgctcaagtgctgcgtggatccagccaaattcgtcatggacgcggtcgccgacgtgttccccgtggaccgccgcgaggcgaagaaccccaccgacctggcctgggcgtgcgtgctcatcctggaggcggcggtgccggcgctggccgatcctgacccggagattggggcggcaaggctactggtgccgcgtgcggcgcgcgagcgcgcgcgggggatggcgagggagtggaaggaggcggcggagcgcaagggcggggtggagtggaccaagccgcccgacgcgcacgccttcctgcagcacgtggcgacgttcgccgtggcggagagggaggaccgggggatttaccgcaggattgtggtcagcttctcgtggcgccgacaaatgccccgcctcgcgctcaccctcggccttgaagaagacatggctgatattatcgaggaactaattgctaaggggcagcagcttgatgctgtgaattttgcgtacgaggctggtcttcaggagaagttccccccagttcctctcttgaagtcctacctggcggactcgaagaagacttcatgcaccgtttcagataattcaagcaccagcagtggtcaatctgggagcaatgcaaacaagaaagagcaatccgtgctgagggctgttataaagtgcattgaggatcgcaaactggaagctgagtttccactggaggaccttcagaggcagcttgaagaactggagaaggccaagactgagaagaaaaaggcaacttcaagtgcgtccagcggcggctagggtttcgaggcgggccacatggcctcgcacacatcgtacgccatggcctccccctacccttacgataggccggttggtcatggcctctactgcaaccaaagcccaccggcgatcagggagccatatgtctacccagccaaggaggtaactaattttgcgccaggtttgccgtactcttcccctcccataagctatccccacgcctatggcgggtacaacaatggaatgggagcttacaacaatggaatggcacctgccttccaccaggcttactaccggtaggatcagtcaggaaagtcgctgatgaatgacatgacaaataactgatgatgtcgacgacaactcaatctgcacaatggctcatattttgtagtgactgactacaaacggtaggttgggtatctcatcttatctgtgcttactaagttaccactactactagatgcactctactctgcattgtgttaggttatctcatgcctagatcactactttgtactaccactaagaaacctggatgtaaattatgtacgctaccattgagactgtactgcattatgtaattctgttcagaaacaatgaaaaaaacacccaaaaaaataaactatcatgtaatccttcggcaccttgatggaccacttaatcaaagacaattcttagtttagc

SEQ ID NO: 4188 - DNA, 724 bp, Oryza sativa
  ref <308>: DATABASE ACCESSION NUMBER: AK061625
  ref <309>: DATABASE ENTRY DATE: 2001-12-06
tgacaagaatgctgtggctgtcttcaatgatccagctagagcagcgacagctctgaggcggctggattatggttctgcttaccagggtgctgctgtgtttttgccaagcagcagcgctcagccaggcaatgtctgggttgcagggcagaaagatggagtggcggctaccaagagcagtgccaatccatggaagaaggccactgcctctgagcctgatccatcctcaggagactggacaggtgtgcttggtcaagctccaggatcagtatggaggcgtggcggtgacactgtcgcccaagtcatggggacatcgaaccgctggaacgccctggagtccgatgcggccacaagctccaggccagtcgaggagagtaagcctgctcctcgcaccgatgctgtatccagcgcagggccaagtactgcgccaccggttagtaagatgcagcctgaagtcgaagtggatgattgggaagaagcttgtgaatgagtcatcaggaagctcggtttcagatggtttacctccattcagatccttttttggtcgaattttatttgctagtaccaaatgtatcctcacacttttatgtggttcctgatgaaggcccgctgactgatctgttgtgagcacactgatcttgtcatgccggcatccctgtaacgctgctgcttcttttgcagtcgtccgttcgaactgaggaaaaaaatacgtcgtagattgccgacc

SEQ ID NO: 4189 - DNA, 735 bp, Oryza sativa
  ref <308>: DATABASE ACCESSION NUMBER: AK061626
  ref <309>: DATABASE ENTRY DATE: 2001-12-06
accgatcgatcacgcgtccaccgccgcgccacccgctcggtcaccccaccatggccgccaccacctgccgcctcgccgccgcgccgctcgtcctcgcaccgctgcctcgccgccccaccacggtcgcctttgccgtcgccgccaccggcatcaagtacggtctcagggcgtcgaggggcgtggcgatcagggcggccgacggcaccggcagcgagacggaggtgccggaggtcgtcaaggcagcccaggacgcgtgggccaaagttgaggacaagtacgccgtcaccgccatcggcgtcgccgcgctcgtcggcctctggactgccataggcgccatcaaggccatcgacaggcttccacttttgcccggcgtgcttgagctcgttggaatcgggtatacagggtggtttacataccggaacctcatcttccagccagacagggaagctctggtgagcaaaatcaagagcacctacaatgaaatcaccgggagcagcagctaatttcataccattttcgagaagatttctgtaaatcagagagcagcaggactgcatctgtcggcagccatgccagtgaagaggaggttgctaacgttttgagactggtccctccattatttccatcttatcccctggctcaaagcagacaaaatactattattgctgatgagctgctcatgtacctattttaattcaacaataatgaaatatgttttcagtttccgctccagac

SEQ ID NO: 4190 - DNA, 910 bp, Oryza sativa; identical to SEQ ID NO: 2104
  ref <308>: DATABASE ACCESSION NUMBER: AK061627
  ref <309>: DATABASE ENTRY DATE: 2001-12-06

SEQ ID NO: 4191 - DNA, 817 bp, Oryza sativa
  ref <308>: DATABASE ACCESSION NUMBER: AK104677
  ref <309>: DATABASE ENTRY DATE: 2002-08-28
aagcaagcaaagccacatcttattgtcacttccatctcattctcctaattgtcatcactagcttctagctagcttaattaattaattagccatggcggaggagaagcaccaccaccacctgttccaccacaagaaggacgacgagccggccaccggagtagactcctacggcgagggcgtctacacgtcggagacggtgaccaccgaggtggtcgccggcggccaggacgagtacgagaggtacaagaaggaggagaagcagcacaagcacaagcagcacctcggcgaggccggcgccctcgccgccggcgccttcgccctgtatgagaagcacgaggcgaagaaggacccggagaacgcgcacaggcacaagatcacggaggagatcgcggccacggcggcggtcggcgccggcggctacgccttccacgagcaccacgagaagaagaaggaccacaagagcgccgaggagtccaccggcgagaagaagcaccacctcttcggctgatcgacctcatcacaacgtcgccggcggcggcgacgacctcgccgtacgtcgccggccgccgtgtcgtcgatttgtgtgtgtaataatttgtcttcttctgcatgcgtggtgttgctgtttttcacaagagtctccggcctcgaccagtgagaggctgacatgtggggccgtgagttcagcttgtgttgcttgattttctctgcagccttgccctctgtgtgtccaaataagtggtgtgcatggctctctccgtgtcatgtatcaatgtatttttatctgtactttgtacaagtgaagcaatatttatcg

SEQ ID NO: 4192 - DNA, 1973 bp, Oryza sativa
  ref <308>: DATABASE ACCESSION NUMBER: AK061628
  ref <309>: DATABASE ENTRY DATE: 2001-12-06
atacgcaccactgaaccacctgcaagacggaggtggtttcagagtttagagataagatggcgctgcatcttcttcacctgcttgccttctccctgctcttcgcagtggcgacccctatcagggacatcaccgatgtgtgctcgtcacagatcaaggatttccagtacctgaacagcacgggcctgcaccttgagctgcaccacccgcggagcccctgctcgccggcgccggtcccggccgacctcccgttcacggcggtgctcacccacgacgatgcgcgcatctcgtcgctggcggcgcgcctcgccaagacgccgtcggcgcgcgccacctccctggacgccgacgccgacgccggcctcgccggctccctcgcgtccgtgccgctcagccccggcgcgtccgtgggcgtgggcaactacgtgacgcgcatgggcctcggcacgccggcgacgcagtacgtgatggtcgtggacacgggctcctcgctcacctggctgcagtgctcgccgtgcctcgtgtcgtgccaccggcagtccggcccggtgttcaaccccaagtcgtcgagcacctacgcctccgtggggtgctccgcgcagcagtgcagcgacctcccctccgccacgctcaacccgtcggcttgctcctcctccaacgtctgcatctaccaggccagctacggcgacagctccttctccgtcggctacctcagcaaggacaccgtctcgttcggctcgacgtcgctgccaaacttctactacggctgtggccaggacaacgaggggttgttcggccgatccgccgggctcatcggcctcgcccgcaacaagctctcgctcctgtaccagctcgcgccaagccttggctactccttcacctactgcctcccgtcgtcgtcgtcatcggggtacctgtcgctcgggtcgtacaacccggggcaatactcgtacacgccgatggtgtccagctcgctcgacgactcgctctacttcatcaagctgtccgggatgacggtcgccgggaatccgctgtccgtgtcgtcgtcggcgtactccagcctgccgacgatcatcgactccggcacggtgatcacgcgcctgccgacgagcgtgtactcggcgctgagcaaggcggtggcggcggccatgaaggggacgtcccgcgcgtcggcgtactccatcctcgacacgtgcttcaagggccaggcctcgcgggtgagcgcgccggcggtcaccatgtccttcgccggcggcgcggcgctcaagctgtcggcgcagaacctcctcgtcgacgtcgacgactccaccacgtgcctggcgttcgcgccggccaggagcgccgccatcatcgggaacacgcagcagcagacgttcagcgtcgtctacgacgtcaagagcagcaggatcgggttcgccgccggcggctgcagctgagaacgccgagagcgccgccgaacgcgcacccaggcatggtccgcatggatacttgggtaaattaatgggcaatccatttgctattggctatactagctagcacgccattcatcaattcaaccacacaagctgttacataagcatagggatgaacatatcacaaggtagataaaaacgaattggtaaaggtgtttgctctagcgcttagataagaaaacacaactcaaaaacaatattagcgtaatgttaattaatttatgttgtcgaggccagggggtacagagtatttgaaagtggaacagcagaactccaaatatgatacactacacaaatccagtagaggtgacatatatagcttgtcatgtagtaattctttggcaagtactggccgaaatgtttactctgtaaatgtaaattaatgggtgtgtgtgtgctgcgtttgtagcttcttctttagtaagtacaagagctccaaaactgtaagcctgtattcgtgtgtgagtactttggacaatgaaatcaagttggtttatatactcc

SEQ ID NO: 4193 - DNA, 895 bp, Oryza sativa; identical to SEQ ID NO: 3761
  ref <308>: DATABASE ACCESSION NUMBER: AK104678
  ref <309>: DATABASE ENTRY DATE: 2002-08-28

SEQ ID NO: 4194 - DNA, 1124 bp, Oryza sativa; identical to SEQ ID NO: 3777
  ref <308>: DATABASE ACCESSION NUMBER: AK104679
  ref <309>: DATABASE ENTRY DATE: 2002-08-28

SEQ ID NO: 4195 - DNA, 916 bp, Oryza sativa
  ref <308>: DATABASE ACCESSION NUMBER: AK104680
  ref <309>: DATABASE ENTRY DATE: 2002-08-28
ttccagttcctatccaatctctggtcttccggcaggtccccgaagaaggagcggcggcgatggcggcgcctgtgacggtgtacggtccgatgatctcgccggcggtggcgcgcgtggcggcctgcctcctggagaaggacgtgccgttccaggtcgagccggtcgacatgtccaagggcgagcacaagtccccttccttcctcaagctccagcccttcggccaggtccccgcattcaaagacagcctcaccaccgtcttcgagtcgagggctatttgccgttacatctgtgaccagtacgccgacagcggtaacaagaccctcatgggcaggaaagaagatggggcggttggccgcgctgccattgagaaatggatagaagctgaaggccagagcttcaacccaccgagcttggcaatggcattccagctcgcatttgcgccgttcatgggtagggccactgacatggccgtggttgaacaaaatgaagcgaaacttgtgaaggtgctcgatgtttacgagcagtggctgggggagaaccagtattttgcaggtgatgagttctcgctggcggacctggtgcacatgcccaacacagatcttcttgtgcgcaagaccaacaaggcagggttgttcacggagagaaagaatctggcgaggtggtgggatgaggtatcagctcgtccttcatggaagaaggttgttgagttgcagaatgtaccacggccctcatgaggcttcttgttttttcccctctgagcgtcttgtgttagttgcgttaaagattcggtcttgttcagttgtttgtatcatttgacaaaatgtgcaagctcttcctatgggtccctaatattgtgctaccatctgtaccttttagtttggataaggttgaatctattttcaggttctcaagtttt

SEQ ID NO: 4196 - DNA, 994 bp, Oryza sativa
  ref <308>: DATABASE ACCESSION NUMBER: AK061629
  ref <309>: DATABASE ENTRY DATE: 2001-12-06
aaatcccaacagagaagcatttcctcgaacacatcgccgtcgccgccctccatggccgctcccaccgcagcagctctctccaccctctccaccgccagcgtcacctccggcaagcgcttcatcacctcctccttctccctctccttctcctcccgccccctcgcaacaggcgtccgcgccgcgggggcgagagcggcgcggaggtcggcggcgtcggcgtccaccgtggtggcgaccatcgccgtcggagacaagctccccgacgcgacgctgtcctacttcgacccggcggacggcgagctgaagacggtgacggtggcggagctgacggcgggcaggaaggcggtgctgttcgcggtgcccggcgcgttcacgccgacgtgctcgcagaagcacctcccggggttcatcgagaaggccggggagctccacgccaagggggtggacgccattgcctgcgtgtcggtgaacgacgcgttcgtgatgcgcgcgtggaaggagagcctgggcctcggcgacgccgacgtgctcctcctctccgacggcaacctggagctcacgcgcgcgctcggcgtcgagatggacctctccgacaagcccatggggctcggcgtcaggtcgcgccgctacgcgctcctcgccgacgacggcgtcgtcaaggtgctcaacctcgaggagggcggcgccttcaccaccagcagcgccgaggagatgctcaaggcgctctgaagatggaatccgagctctcgtaggtggcaacaatggcaggatcagcccgttgctctcgcgcgttggtgagtagcgtcgtcgttgtgaagaggaaattttgtgtgtgttttttttcggttgaatgttgcatgccatgtgcttgacgaaatgacggaataacaaaagaaaaaaaactacttttatttttttgttgaaatttgcaaaccatgtgtttgacgaaatgtcgagatatgaaagctgtgaaatcgcttacgtcacgtgcacc

SEQ ID NO: 4197 - DNA, 901 bp, Oryza sativa
  ref <308>: DATABASE ACCESSION NUMBER: AK061630
  ref <309>: DATABASE ENTRY DATE: 2001-12-06
cgatgtgacaatgaaggatggcttctggacaacccaatgggcatacggacagagagagaagtacatgcagagttagaaggagcaaccatatacaggaggatgtaccaaaaaactagagatgtttctcactagagatgttcatcggttcagtggacacaggagttatccaagcggtaatggttaatggcgttcagctttaatcttgcatcctaaatcaaagcagccatctttcaccctcggtcgtctattactgaagcaagtttcattcactgcgtgcaattcagacagtcttgattttttcttgtcagatgtgatgagcgaaacctgccaatggttcgcatctctccaatgttttggcccatcttttttctgtcggatcattcctacgacagatatctgcggtggtaaccatatgtaagttcagcgtctgctagtccatgatcatgagctaatgaacagctttcagggttggggttgttctctaggaatcgaagtgtaatgtgtcttggcaatcttgatggtgactttgattataaggaaattttacaaacttgccgcagcaaactgaccatttttgagacgcagctgctaaagaatggtgtttacaatagagaacttggctctcactggtgaagtggtgataataggagagaaggatgatcatgtttttttcacattacactgtgttatgatgtagatccctgaactttgtatggcctgtaaattgtaaccttatgaatgtgtggcagcagtggacattttgctagcaacagaatcatgcaatctgaagtagccgacaaacttttttttagaggagcttacaatctttgagaattgatatcactgtatgggtttcattctacaattcgtttcacagtaaccgcatgaatgagtgaactgc

SEQ ID NO: 4198 - DNA, 1292 bp, Oryza sativa
  ref <308>: DATABASE ACCESSION NUMBER: AK061631
  ref <309>: DATABASE ENTRY DATE: 2001-12-06
cacttccccttcgaatctagggttacgactccgaccaacctcgccgtcgccaagctcgccgactcaccggccttcctcgtcggccgcggcgcagagggagaaggtggggagcgaagatgccgcagcggcactcgaagaacaacaacgacctcgccttcttcacgtacgaggagaagcggaagctcaggtacggcacgcagcgggagcgcctcggcaaggactccatcaagcccttcgacgcctgctgcctctgcctcaagccgctcatccacccgctctgctgccccaagggccacaccttctgcaaggagtgcatcctcgagtgcctcctcgcccagaagaaggacatcaagcgcaaacttgctgctcatgaggcccagaaaaagctggagaaggaagaggaggatgagaagcgtatgctgcaaaagtccaaggagttggacgcttttgatcagcagaatcatggagccgtcccccaataccacgatcgcagcggctctgaagacaagaatggttttcatggagcaaacagcgtgaaggttacttcctttgaggaggaagcccttcgcaacatgaaggcattctggcttccatcagctacacctgaagctactgccaaagtagaagctccctccactgacacaatctgccccgagggacaggagaagctcaagttgaaatcgctcttccctatctccttcactgaagaaaacaccgaccagaaaaacaagaagtcggtggagaagagctacatgtgccccagttgcaagtctaccctaacaaacaccatgtccctggtgacgatcagcacgtgtggccatgtcttctgcaagaagtgctctgacaagttccttgtaactgataaggtctgcttggtgtgcaacaaaccgtgcaaggagaggaatttcgttcctttggaaaaaggaggaactggattcgctgcccatgatgagcgtctagaggcgagagatttcaagcatttggggagtggttctggactgggtttagtgaaacctgccccaaagaactactagcctcaaaatatcttagctgctgttgtatatatgttaacctgaaaattttgtttcaagcatcccctttcgctgtgaacagtctggagcaaattcagtcttgttatgctagtggcactatggttgctaattgcagctttgcttatttgctatggctaaatgcgttagttcgcagctgttgtactatttatctaccaagtttgaagcacagtcaaaatcatctttcttgttacatcgaagctatcgaatatgtatcgcatg

SEQ ID NO: 4199 - DNA, 472 bp, Oryza sativa
  ref <308>: DATABASE ACCESSION NUMBER: AK061632
  ref <309>: DATABASE ENTRY DATE: 2001-12-06
agaatgtgaaggagttgatcaacccagaggttaccgtcacaatgactgagaacactcctgatgatcctcgtcagaggaagccagacattacaaaggcaaaggaggttttggggtgggagcccaggatcgttctgcgtgatggcttggtgctcatggaagatgatttccgggagcgcctccaagtgcccaagaagaaccaggcctaagctgctgcatcgcatttggcgaaagatgtcactggagcatacttaatagttgggtttcaccattatttgtgtcgcagttcattgtggaatttgggttccaataaattctgatacacctttgttgttcacctgaaatattgtgttactagaatcgtcatacggggctgggctatttgtatcattaccgcttttggagaactctttatacttttgtttgtagcctgtgtactcgcctaaatcaattatagcaatgttgatgaattttt

SEQ ID NO: 4200 - DNA, 728 bp, Oryza sativa
  ref <308>: DATABASE ACCESSION NUMBER: AK061633
  ref <309>: DATABASE ENTRY DATE: 2001-12-06
agcggcgggtgtgaacaccctccattttttccccccaatcccttccgacgcgctctcgagctccccgcattccccgtctcccctccgcctgccccgggagctcctccggcgagatccgcctctgacagccaccctcccacggctgctcgtcgtcctcacctccggcgaccggctcagaaagtaacttgagccatgggaaagaggaagtcagcggctaagccaccacctaagaagaggatggacaagcttgatactgtattttcctgcccattctgcaatcatggcagtagtgttgaatgccggattgatatgaagaacctgatcggcgaggcttcatgtaggatctgtcaggaaaacttcagcaccactgtcaatgcactgactgaaccaatcgacatatatagcgaatggattgatgagtgcgagcgtgtcaacaatgtcgaagacgacgacggagcatgagcaacgcaaaatgcctgatgttgccgtacctgcactggtgctattgactgccaccttcagccacgtctgtaatagtgtaatggctgattggtttgttagtaggcagttcattcccgcacctaaataaacacctgaagacgtgatgttataccggcttcccatcaaaaactcaaaaacagttatatgcgtgtgtaattgtatgggcctagtgccttacctgggatattgtaaccgtaacttttcaaatcagcatgtttccatggatg

SEQ ID NO: 4201 - DNA, 2245 bp, Oryza sativa
  ref <308>: DATABASE ACCESSION NUMBER: AK104681
  ref <309>: DATABASE ENTRY DATE: 2002-08-28
aattgcttcctcctcctcctcctccttctgcacctgtccgattcggttcgattcggtttgattgggttccaatctgcggaggagcggcaacgagctaggcggaacagagggttggtcgtcggatccgtggcatggagatctcgttcgaggcgtgggagggcgtgcagcggcacggccaggacatcgcggaccgcctcgcgcaggggttcaccggcctgctccaggcgcagccgccgcagttcccgtggccggcggcgtcgcacaagcggattcccttcgagatcgacctccccgtggtccccttcggcgcctcccgcggtgcccgggccgggaaggagttcttccccgccgcggccgtcgcctccgtcatcgacatcggcgggaggctcggccaggctggcgtggagattggggcgtccgtcggtggcgccgtgcagcacgccgtgcgccagctgcccctgccgttccggagcggccagatccggcgccgcaagctgccgccgcagcctcaggcgccctcgcccgcggctgcggtgggtgaggcggcggtggggctctcggtagagagggctgtcgacaggtgccctctagaggcagctgcggcggccgccgctgccgcaaccggtagcgctgcagcgtccacggtcagtggtgctgtgggcggagatgacgtagatgaggaagatgagggattcggctgcgagattggtacttttggaaactttaagaagtctaagggtacagtaaatgtctcggcttcatacaataccaggaaccacgacattgagagttctgttgttgcacgtggagacctttggaggctggaggcatcacgcagcagttcaacttccggaaacgatagctcacctctataccttgttcagttgggaccgttactttttgtccgagactctacactccttttgcctgttcatctatcgaagcaacatctgctttggtatggttatgatcgcaagaatggagtccattctctctgccctgctttttggtcaaaacatcggaaatggttgatgatgtcaatggtttgcctcaatccagtagcttgttccttcatggacctgcagttccccaatggacaactaacatatgttgctggcgaggggattacagcaagtggttttcttccattatttggtgggttgcttcaagctcatgggaaataccctggagaaactagagtcagcttctcttgcaagaataagcaaggcaccaggttcactcctatgtttcaatggcctgacaagtctctgtcatttggagttactcaagccttagcatggaaaagatctggtctcatggtgaggcccagtgtgcaagtcagtttatgccctacatttggaggaaatgatcctggggtacgtgcagaggttatccattcattgaaagaggaattgaatgtaatgtgcggtttgtcttgctcaagacatccatcagcctttactgctctgtctattgggagatccaagtggaatggtcaaatgggcagttccggagtggtcgttaccttggaaacaccccttaataacattggaaggccatctttatccgttcaattgaatggaggttttgaaatttagcattctgcgcagtaagttgtatataccactgtacatagccctactaatgtccatgtcctatctctgtggagatggctgtgcaacgcctatgaatggtatctggaagtggtttctgctcgtttttgttgtcagactcataggtgataagtctcagctcaacaaatcaactggtttattccccatgccaacaaaggcatccatatatataccttaaagagatggtgatcaagtgtgtaggcagttcaaggtttcttttgaagaaattggagagaaaagctgcaagatcagcacttaatactttttggaagttgggagaaggaaaaggctatgaggtgttttgcggctgtgcaagaagccaagacgaatgtggctttgcaagaagccgaagatgttcacccagaagctatgttcctttggagcaggactgaccatactggatgtttgctgatagtgaattgcttactggcttttgctaattgtgatggataattattatccatcacaattgatcgttagacgatctcattgctgagacaagctttgatggatgaattggtgtgcttttttcccctgcactcttgtattcctcatgtaagactcatgatcagtgaagctaagaaatgtctactgggatgggatggaggacc

SEQ ID NO: 4202 - DNA, 714 bp, Oryza sativa
  ref <308>: DATABASE ACCESSION NUMBER: AK104682
  ref <309>: DATABASE ENTRY DATE: 2002-08-28
aacaccctcccgggggcgcacttcaccttcatcaacgcgtacaacatcttcagcgacatcctcgccaacgcggcgtcgtacgggttcacggagaccaccgcggggtgctgcggcgtcgggaggaacaacgggcaggtgacgtgcctgccgtacgaggcgccgtgcagcaacagggaccagcacatcttctgggacgcgttccacccgtcggaggcggccaacatcatcgtcggccggcgatcctaccgcgccgagtcgcccaacgacgcctacccgatggacatcgccacgctcgcctccgtctgagatcgatcggatcggtagctgctcgcggctcagtatatacatacatacatacgcacgcagcctcaagattcccagcgcccacaagctaaagggtgtaactctctctttttttcccctttttttgaggtggttatattacttcggtttgtaccgggtaggcaataattgttgtcataaggattggtgtcttcctagtcgttttcaacctactgcgtgcctggaatcttgatgggtgagagaggagagaacaggcattcggttcttcggtttatagatgtgttcagtgctggagagagcacagataaatatgttcagacaagacatattttagattcggagatttttcatacaactgtacaccgaatagatgtattcctcattctttgtatgcatggcaacctttttctc

SEQ ID NO: 4203 - DNA, 1410 bp, Oryza sativa
  ref <308>: DATABASE ACCESSION NUMBER: AK104683
  ref <309>: DATABASE ENTRY DATE: 2002-08-28
agtcaaatggttccttgatccaacaaggccagaatttccggtgtcattcttatggttctcataacagcagtgaaactaaagagtgcagccttgaagatggcactgattcatacagggattttgaagaacattcaagaggagcctcccaattttcagataatcaagttgcagcaaagaaaaaatcagtcaaatctagtcaagggttggctgaagcttgcaaatttgtttacaacgatgcaaaatttgtgaatgaaagagctcaaaatgatattctcttgctttcacgtggcataacaaggctgaacaaacgtgcgtgccaggatgttgctgttttagggtcaggatttctcaagcttgatgctcgtgcaaggaaggacactaaaaaaattgaccacagtgtgaaggaaagggcagcgcggcttacccattttgcgagaatattaaaggaacaggctcagtcagacttgaagaaagcagcagatcagcattggagcgatggtgctttggaggcagatctgcgacgagctgactcggttgttagacgacgtgccatggaagatgctttcatggctttaaagtttgttcgggatatccatgacatgatggcaaacagattacaagagcaattcgcaaaggatggttcctcttctcctgctaattcaagaagtttcatcacccttgagaaaaatggaaataccttcgagctgtttcctcatgaagtttcaacggaccagattaccgccatagagcaagcatactggagtatggcatctgcgttgtctgaggctgatggtatcgactacacagatcctgaggagcttgagttgttagtagcaactctcattgacctggacgccatggatgggaaaaagagtgtttccttacttgctgaatgttcaagctctccagatgttaataccaggaaagctttagctaatgcactggctgcagctccatccatgtggattcttggaaatgctgggatgggtgcattacagagattggctcaagattccaattatgctgtagccagggctgcaacaagagccatcaatgaactcacaaagcaatgggagcttgaagaaggtgacagcctgaggtttgtactgaatcaaaatatggtttctaaagagacagccgatgacagtgcagcagcagatgacaccaggtgatcatgtgcaaataagaaggaaaaaattacactagggttaacagaaacttatacaaacatcacgtttcagagcatatatatggataaggtgaatgtctatctctgtcacagtttcagagcataatgtgctgcttggtatcaaaccagatcaccagaatcatcagaatgacagaatgcatgtaactgacacatcttttcagtgccaaactgccaaagaaattaggaactggtgtaaagat

SEQ ID NO: 4204 - DNA, 669 bp, Oryza sativa
  ref <308>: DATABASE ACCESSION NUMBER: AK061634
  ref <309>: DATABASE ENTRY DATE: 2001-12-06
ttgatgccaacaagaatcagatcaagtctacttctgtcccgcaactcccgcagcagaaggagttgctttctgccctgcgtccataccattccagactagtgggagagagttttctagcaagaaagaggcccgtttatgaatgtacagatgcccaggtggaagctgccaaaggtttcttggcagtgcttagatcctaccttgattcgctgtgttccaacttgagatctcatacgattactaatgtgcaatccaacaatgacaaggtttccttgcttttaagagagagcttcatcggttctttcccgacccgtgagaggccctttatgaagctctttgtggacacgcaattgttctcagtacatacagacctagttctctccttttatcagaaggactaagtctcttttaagaatttaaccatcttcagtgagctgatttgccaaggtacattctctccttttgttatggcaattctggcatggatattttctgaggcaataactgttaatgttactgctatacttagttcctgtgcacaagtctaaagtgatttgtatgtagaatcgaatggaaatcactttctctggcactatgatgcacctgactttgctaccctcctgatcattgtgtgggggaaggaaagtcctaaaagaaaatcatatgttgatg

SEQ ID NO: 4205 - DNA, 1787 bp, Oryza sativa
  ref <308>: DATABASE ACCESSION NUMBER: AK061635
  ref <309>: DATABASE ENTRY DATE: 2001-12-06
aacccagcgcgagacgatcccctcccctgcacggttcaaaacggggatcggtagtgttctgcatcagtgatgggctggagatttgcgttgttactgttacatgttcttctgtgccttgtcaatggcgtctcctgtggccgcacgagctcttacgtgcgtacggagtacccatcgactgatatacctctagaaagcgaatggtttgcggttccaaacggctacaatgcgccacagcaggttcatatcactcaaggtgactataatggaaaagctgttatagtatcatgggttactgtagcagaacctgggacaagtgaggtgctctatggtaaaaatgagcaccagtatgatcagagagtggaaggaacagtaacaaattataccttttacgactataaatctggatatattcaccattgccttgttgatggtcttgagtataacaccaaatattattataagattggaagtggagattcagctcgagaattttggtttgaaactcctccagcaattgatccagatgcatcatacacatttggcataattggtgatctggggcagacatttaattccctctcaacccttcaacattatgagaaaagcgaaggtcaaactgttttatttgttggggatttgtcatatgctgatagatatcaacataatgatggtgttcgttgggattcttgggggcggcttgtggaacgtagtaccgcttatcaaccatggatttggagcgctggtaaccatgaaattgaatacaggcctgatctgggagaaacttctacatttaagccatatctgcatagatgtcacactccatatttggcatcaaagagcagttctcctatgtggtatgcaatcagacgtgcatctgctcatatcattgtgctttctagctattctccattcgtaaaatacactcctcaatggacctggttgaagtatgaattgaagcatgtggatagagagaagactccttggcttattgttctcatgcattctcccatgtacaacagcaatgaagcacattacatggagggtgagagtatgagggctgcttttgagaaatggtttgtgaagtacaaggttgacttggtatttgcagggcatgtgcatgcttatgagagatcgtatcgtatctctaacatcaactacaacataacatcgggtaatcgatatccagtgccagacaaatctgctcctgtgtacataacagttggtgatggaggcaaccaggaagggcttgcttcaaggttcagtgatccacagccagactactctgcattcagggaggctagttatggtcattcgatcttgcaactgaaaaacaggactcatgctatctaccagtggaatagaaacgatgatgggaagcatgtacctgcggacaatgtggtgtttcacaaccagtattgggcaagcaacactcgccgcaggaggctgaagaagaagcattttcacttggatcaaattgaggacttgatatccgtgttctaggagttgatctttcagaacactgcatcgcagactttctgaaacggtggcggaatagctctgttgccctttggtcttgagcctcgaccgagtgaggcagaggctctcggctctcatgtaaaggaaccatgcacaggtttgtgggattactattattgagcactgtattgtatgatgaagacaatccgatcagcagatgattagtgctgtacacatgtagcatttcacagccagcgacagtttcgcaatgtgacagtatcttcaataaagtttcaaagggttgtgaaccg

SEQ ID NO: 4206 - DNA, 1222 bp, Oryza sativa
  ref <308>: DATABASE ACCESSION NUMBER: AK061636
  ref <309>: DATABASE ENTRY DATE: 2001-12-06
agggttaagattaaatggaaaaggagaaatgaatggttagcattgcaaaagttgcgaggtttcctgctacttcaaaagaggagtgggaggaacaatgcaaactttggccaacatcttatcatcccccacacgacttggatggtgtatctggattcaaagagtgtgaattgccatcaatatttaattgcatgagaactgcactgcggttatctgaggtgggcaatgctgctgttgttgttaatccatcaaccatgcagattattgcaaaggctacagaccaaacgctccaacatgatagtttaaaaagtaacaaatgtgctgaattgaattcagacagccccttctcatcacttgaagtaactgagaagaaagggagcaggttgttcctgtcaaactccaatgtttctaaatgcaacagcctgaatatggaagcctcatgtttaaacccttggggatggatgaaaccaaggccgtctgagcagaagtcattgccctgtgaaggtggttttccatggcaccctctgagacatgctgccatagttgcgattgaaaatgctgcggagagggataaagtgatgttcccttcaattatatcatcaaccaaaccaaattcagatggaaatatggagtattattctgttaatgaatcagcaaaacgactaaaggtggatagaaatgacgacaaaaaaattgcacatgaagcaatctgcgatgacttgtcagaaaccagaccatacctttgtacaggatttgacatttacctagtctgggaaccttgctcaatgtgtgcgatggcacttgtacatcaaagattcaaacgtacttctatgctttcccaaatccaattactggagcactgggcagtgtctacagattgcacggggagaaaagtttaaatcatcgttactctgtatttagggtaaaagtgcccgagtcatattcgaatagttcgggcgattgttctgacaaatgctgatacagcttggcgtgctctgcatgaagggtgcgccgttttccagttttgatttttgtgaacagcttggcatgttgtatcatgatattatgtaattcaacctcaactgcatagtttgtactagctattttcctagcttttgttactgtcttatttccttcaggttcgggtcgcagatattttcttgacgtttgctgactaatttgcctgaggaacggaagttggtgatcgatattatcgtattcgttc

SEQ ID NO: 4207 - DNA, 684 bp, Oryza sativa
  ref <308>: DATABASE ACCESSION NUMBER: AK061637
  ref <309>: DATABASE ENTRY DATE: 2001-12-06
aaaaaaaagctactgatggatcacatcaatgagataacatcgtacaacggcggtgaccaaggatatctgaatgagatattcacatggtggcaccgcatccccaagcacatgaacttcttgaagcatttctgggagggggacgacgattctgcaaaggcgaagaagactgagctgtttggcgcagacccgcctatcctctatgtcctccactacctgggcatgaagccatggctgtgcttcagagactatgactgcaactggaacatccccctgatgcgcgaattcgcaagcgatgtcgcgcacgcccggtggtggaaggtgcatgacaatatgcccgagaagcttcagtcctattgcttgctgagatcaaagctgaaggctgggctggaatgggaacggaggcaggctgagaaggcaaacctggaagatggacattggcggcgaaatatcaccgatccaagactgactatctgctacgagaagttctgctactgggagagcatgctgctgcattggggtgagaagaacccaacgaacaacaaccctgtgccagcgacaatatcaagctcatgatctgtagatagctcaagatattattagtacacaaaaatccatcctatatagcactatacatgcatagaaacagcttgtgtaggttgccatgcttaggcctttccaacacac

SEQ ID NO: 4208 - DNA, 1358 bp, Oryza sativa
  ref <308>: DATABASE ACCESSION NUMBER: AK061638
  ref <309>: DATABASE ENTRY DATE: 2001-12-06
aagcacaagaggattagggaaagcacttgctcgggagttccttctttctggagatcgtgttgtaattgcttcacgcagccctgaatcagtccttcagaccatcaacgagcttgaagagaacatacaggagggcttgtcagttgcgaaaaagaaacagagagaaattttgctacatgccaaggttgttggtacatcatgtgatgtttgtaaaccagaagatgtgaaaaagttggtgaactttgccaaggatgagcttggatcaattgatatttggataaataacgctggcacaaacaaaggttttaggccactggtaaacttttcagatgaagatatttctcagattgtctcaacaaacctagttggctctttactgtgcaccagagaagccatgaatgtcatgcaacaccaacaaaagggaggtcacgtatttaacatggatggagcaggttctggaggatcaagtacaccattaacagctgtttatggttcaactaagtgtggccttagacagtttcaagcatcacttctgaaggaaagcagaagatcaaaagttggtgtacacactgcttctcctggaatggtccttacggacctccttttgagcggttcttctctgagaaataaacagatgttcaatttaatatgtgagcttccagaaacagttgcaaggacattggttccgaggatgcgagttgtgaaaggaagtggaaaggcgataaactacttgacaccaccaaggatcttgcttgccttggttactgcatgggttcgccgaggccgatggtttgatgaagagggaagagcagtatatgcagcagaggctgatagaatccgtaattgggctgaaagtcgagcacgcttctctttcacagatgccatggagatgtacacagaaaacacatgggtttctgtgttctcgctctctgtcgtctgcgcattcataattctttccagctcaggtggacctcttccaggcacatgatcccaggagttgccaaactagatggctacacacaccatttttcttcagtacggggattctattatgtactgatatatgacacacgaaacttatgaaggggggaaattgaacccagaaagcttactgcgtacatacgcccaacggtgagaagcatcagctgccactcaccatttaaggtcaagctaaccatgtgctcagtaaaaatgggtaaatagcatttgttgtgtgggcattccactgtttgtaagctgacttgtaaaaacgtgtatctgagctaaactgagcacgaacagattcgatggacaatgttatctgctgtacatgcatgtagtaatgtagttttgatgactgtaattctctggtcgtcgcttcc

SEQ ID NO: 4209 - DNA, 1078 bp, Oryza sativa
  ref <308>: DATABASE ACCESSION NUMBER: AK061639
  ref <309>: DATABASE ENTRY DATE: 2001-12-06
gaataaaggaaagaggaaaagagaacataaatgagattgaggagaaggcaacatctttagtaacttgcacttatgagcataggacacagtggggtaatgacattggagtgaaatacggtttcccggcagaggatatcattactggattggcaatacattgcagaggatgggagtcagccttcataaatcctaaaagagcagcatttttgggtttagccccatcaacacttgcccagaatatactgcaacataagagatggagtgagggtaatctcacaatttttctttcgaagtactgctccttcttgtttggacatggaaaaatcaagttacaactacagatggactactgcatatgtggattatgggcagccaactcactgcctacactctattatgttgtgattccatcactaggtcttgttaagggcacccccctattcccacagattatgagtccatgggctacacccttcatatatgtattttgtgtgaagaccctctacggtctttatgaggcattattatctggggatacattgaaaggatggtggaatggacaaaggatgtggatggtgaaaagcattacctcatatctatatggcttcattgacaccatccgaaaatgtgtaggaatgtcaaagatgtcatttgaagttacagcaaaggtaagcggtcacgatgaagcaaagaggtatgagcaagaaatcctagaatttgggtcatcgtctcctgaatatgtgatcatcgcaaccgtcgcattactgaacttcgtctgcctagttggagggttaagtcaaataatggcaggtgtctggaatatgccatggaatgtgtttttaccccaggccatcctctgtggaatgatagtaatcattaatatgccaatttatgaggcaatgttcctaagaaaggacaatgggagaataccaacagcagtcacactagcttcaattggctttgtaatgttggcattcctagtaccaatagtttgaggtccctaaaatgggatttgatgccttataaaacattgggtgtttctgatgatgatcatgaaaataaattgcattgccatttc

SEQ ID NO: 4210 - DNA, 364 bp, Oryza sativa
  ref <308>: DATABASE ACCESSION NUMBER: AK061640
  ref <309>: DATABASE ENTRY DATE: 2001-12-06
ctggcttggtctgtactgaggtagtcgagctcgggccatccttatatgttgtcgaattgaagaaatcccatggagatcctatattgtatagacagctatgtgagaggctatcagatgagctaggagtgtgcaagacagagcagattcagaggacggagtcgctggaggatgatctagagagcttcgacagcggatcttctctgcctggtttttgaagaattgccgccctggatcattttggttagagttagaggaacatgctctgttcttcatacaagcgtaggttaggatgttgtatagtgtacaaagtgagtggtgcaagttagccaccgatgtttaatataaggattgctctcttcttgcc

SEQ ID NO: 4211 - DNA, 1571 bp, Oryza sativa
  ref <308>: DATABASE ACCESSION NUMBER: AK061641
  ref <309>: DATABASE ENTRY DATE: 2001-12-06
ccagcgcctttcggtccgaatacaatggaaaatcccaagagcatacctcaccctgaaccaagaggtgtagttgtcgcggccgcaaatcatggatccaccaattcatccggtggcacgttcacttctagctcggagctagccaatggttcatcgaagagctccttgtcagcgtcgttcgattcctcatccaagctggggaacagcttagagttcaggtttgcttctgtcaaagggcatggcaagaacatgtgcaaggatggcgaggccggtagagttgaagactcgggcacttctccagctgtggcagttagccatggtgagccggtaataggactcaagttagggaagagaacttactttgaaaatgtttgtggagggcagaatgtcaagagctcctctgcagcttcaggtgtgacttgtccatctactgtggtcaagaagatgaaggtgtctcagcagagcacacaaagctcatactgccaagttgaaggctgcaaagtcgatctgtcctccgcaagagaataccatcgcaagcacaaagtttgtgaagctcattctaaggcaccaaaggttattgtttctggtctggagcgccgtttttgccaacagtgtagtcggtttcatggtttagctgaatttgaccagaaaaagaaaagttgccgcaggcgtctatctgatcataatgcacgaagaaggaaaccgcaacaagaggcaatttcatttggttcatcaaggctcgccacgatgttttacgatgcaaggcagcagacagatatttactttggccaatctccttttggccaagtgagaagcaatgcaatttcttcatgtgacaacctgggaggcttcaaatttacagaagcaaaactcccctggatgaagccaatgaaaactataggccttgaggatctgaatttctctaccctgcagatgccaggcaatgttgtgtcgcatacggtgcatcatcatgattttgatgggctcataccattcaagggaaacaccccgaaggtcctcaaccaaggtgtggatccagcctgtgccgtcgtgtcctccaactcgaatggagccccggatcttcggcgtgctctctctcttctgtcaagcgattcctggggcccggccgacgttcaggccggctcccaggtgcatcccggtggagtgatgccgcccctcgccgttgccgccgccaccgtcaccgccccgacgaaccctgtcagtgtgatgcatgctctgcacccgtccaccggaggaggaggattctggcaagacggcgacgacccgcctccgctcgatcatgcctcgcaggctcaggcgttcatgcatcctggcaatggcagcagctccggctatggccatctgcactgattctgctgcatctatttggaacgggttgatgactggttactccgttcatgatcttaccctgtcagtgatggactctgaataatttgggggcgaattgtcctgcaaccccaggatttattatttctatttttgaaaccaaaccaccaggatatttgccattggatgagaagtgttcatgatcatgaaatgatctgttttgttcc

SEQ ID NO: 4212 - DNA, 1568 bp, Oryza sativa
  ref <308>: DATABASE ACCESSION NUMBER: AK061642
  ref <309>: DATABASE ENTRY DATE: 2001-12-06
aggcaaggcacgcgagccctagccgccagccgactcgaccagcgcccggaggcggagcacccgccgccgccgccctcgccatcgtcggcttcacccctcatcggcaacctagtgcaggttgttttctgaagatggctgacgatttgggccctcccactgtgctccagaagatacatgggcagtccatgatgttcagcaagatctcaccttattctttgatgaagaatcccgcactctacaatgccaacacttcttacagtgtgcctctgaagtcatacaatgggatggatgggaacaatgggttctcatctgtcacatctgtatccccagtctttgcttctgccccaaaggagaaaggtctttctgggtttatgattgacttcatgatgggtggagtttcagctgctgtctccaagactgctgctgctcccattgagcgaatcaagcttctcattcaaaaccaggatgaaatgatcaagagtggtaggctctctcacccatacaaaggtattgcggactgctttggccgcacaattaaggatgaaggtgtgattgcactgtggagagggaacactgctaatgtcatccgttactttcctacccaggccttgaactttgccttcaaagaccatttcaagcgcatgttcaactttaagaaggacaaggatggttactggaagtggtttgctggaaacctggcttctggaggagctgctggtgcttgctctctcttctttgtgtattctctggattatgctcgtactcgtctggctaatgatgccaaggctgcaaagaagggtggtgggaggcaattcaatggacttgttgatgtttaccgcaagacccttgcgtctgatggtattgctggtctgtaccgtggattcaacatctcctgtgttggtatcattgtctatcgtgggctgtactttggaatgtatgattctctcaagccagtcgttcttgttggcaaccttcaggataacttccttgccagcttcttacttggttggggcattaccattggtgctggccttgcttcatacccaatcgacactgttcgtcgtcggatgatgatgacatctggtgaggctgtcaagtacaacagctccttggatgcgttcaagcagattgttgcgaaggagggtgcgaagtcactcttcaagggcgctggtgctaacattctgcgtgctgttgctggtgctggtgtgcttgctggatatgacaagctgcaggtggtcgtctttggtaagaagtacggttctggtggtggctaagactagatgatgatgataagcagtggggaactatggacatattaggtgctttcggatgctgttgcgtttaaataaatttaacgtatggacaccgtttacatgttattaggcgtcaggtgaggtttctgagtgtgtaaatcggtggcagatgcttatgccttttttgttgggggatcgagcaagacgagttttcctagttgaaaacatgccaaattattgtctgtgaaagcgtttcttgagattgttattgatgtggttcctagtcgattatatagattatcactccattgtagc

SEQ ID NO: 4213 - DNA, 1018 bp, Oryza sativa
  ref <308>: DATABASE ACCESSION NUMBER: AK061643
  ref <309>: DATABASE ENTRY DATE: 2001-12-06
gatgtacccggaagtggacttgattggaggtaatgtggtgacgattgcgcaggcacagaatttagttgcttctggggtggatggattgcgtgttgggatgggctctggctcaatttgcactacccaggaggtttgtgccgtgggccgaggacaggctacagcagtgtataaggttgcatcttatgccaaagatcacaatgtgccagtcattgcggatggtggaatttcaaactctggacatattgtgaaggctttgtctctgggggcatccactgttatgatgggtagcttcttggctggcagccatgaagctcctggtacttacgagtacaaggatggccaccgtgttaaaaaataccgaggcatgggctctctcgaagcaatgacaaaggggagtgacgccaggtacctaggcgataccctcaagcttaaagtcgcccagggagttgttggagcagttgctgataaaggttctgtgctgaggttcattccttatacaatgcaagctgttaagcaagggttccaagatcttggtgcgtcatctttgcagtcagctcatgagctgctgcgatcggagactatcaaattagaggtgaggactggcgccgcgcaagttgaaggggggatacatgggctagtgtcgtacgagaagaaggcattctagttccagatttaatcaagcatcaggacaaagcggctattgcatcctaaggaaacaactgttccctatctttacctgatcaatgattttcaagaacagctcgtctgcttgatgaacctggcatgctgtttcatcggtcggtagcatcaccatccgtttaccatcgcaacgacatgatcgattgtgctttaacttcagttttgctagaggggaagctatcccatgatttgcctcaaccggttgatgctgatgtactttgcctttttgtgcaaacttccaaccgcaaactcatcctgttgtagcgaattcggcttatgttttttttttcatgaataagaataaataagtttggtttgt

SEQ ID NO: 4214 - DNA, 924 bp, Oryza sativa
  ref <308>: DATABASE ACCESSION NUMBER: AK061644
  ref <309>: DATABASE ENTRY DATE: 2001-12-06
tacataaggtatacatctaccagtttaatccaccatgccaagataacgacaagggattgcttcatctgccattgccagtgaagattgctgaatgcccaatggacaaatttctatacctgctcaactttgctgaatgtggttcagagctcttgctggttgcctataatggtgtttctcgttcaaagctgctagtatacagacttgctgaccttgtcagtggaaggattgagccagtaacgaccattggagaccacgccttgttccttgatgaacgttgtctctgtgtctcactctcaaataacaaggaggggagtaagatccttccctccgatttgtctaactctatcatttgcatgcatagtttgcaggtcgatcctagttcactagatatatttcgttttgagcaatatgacctaggtactggtacctgggctccagctagtgacggagacattttccataaaccaccaccgagtccccatacacttatccatcatatctttacttgctgcaatcgcagatattggaataaaggaatcatgtattgcagtaaaagacagcctatttggttggtgaagcaagaactgcggtttggggcttgatgggctcttgtttccgctgaggtcttttcctccagaatatctagaggagcaaataaactatgggtgtgttcggagggggcattttacagcagcggctgcggctgcagcagttcaaaactgctgcggcagcgatgccgccgaacagagtcgatgtgttctctattgaaagtccctggatcaatcgtccaattagtgtatggacctttgatgccttcttccctggattaatcgtccaattagtgcatggacctttgatgccttcttcttggctgtttgacggacctttgttgccccatctttaacagtatgctacacatctatt

SEQ ID NO: 4215 - DNA, 2363 bp, Oryza sativa
  ref <308>: DATABASE ACCESSION NUMBER: AK061645
  ref <309>: DATABASE ENTRY DATE: 2001-12-06
gcaccgctacactactcggctcggctgcttcttcttctccttctcctcatcctccacatcgctgcggattcgagcggcgaggcttggattttctcccggcgagatctccccggcggccgtctcgcgatgcctgaggcaaatgcgggtgggcgggcggcgccggcggcggagcagcggagcaagaacacaacagagatggatttcttcagtgaatatggtgactccagccgatacaaaattcaagaaatcgttggtaaaggaagttatggagttgtttgttcagctattgaccaacataccggtgacaaagtagcaatcaagaaaatacacaatatctttgagcatctatctgatgctgctaggatcctccgtgagatcaaacttctccggcttttacggcatcctgatattgtcgagatcaaacatataatgttacctccatctagaagggacttcaaagatatttatgttgtcttcgaactgatggatacagacctccaccaggttattaaggctaatgatgacttaacgaaggaacatcatcagttctttctgtatcaaatgcttcgagcattgaaatatatccatactgctaatgtttatcatcgtgatttaaagcccaaaaatatattagcaaatgctaactgtaagctcaagatatgtgattttggactagcaagagttgcatttaatgacactcctacaacagttttctggacggactacgttgcaactagatggtacagggctcctgagctgtgtgggtctttcttttctaagtattcaccagctatagatacatggagtattggttgcatttttgcggagattttgactggaaaacctttgttccctggtaaaaatgtggttcatcaattggacttgatgactgatctcttgggtacaccatcaatggatgctatttcaaggattcggaatgacaaggcaaggaggtatctgagcagcatgaggaggaagcagccagtacctttttcagaaaagttcccaaatgtagatcctttggcactcaagctcttacaaaggcttctagcatttgatccgaaggatcgacctactgcagaagaggcgttggctgatccatattttaaaggccttgcaaaagtggagagagaaccatcatgccaaccaatttcaaaaatggagtttgagtttgagcgaagaaaggttaccaaagatgatatcaaggaacttatattccgtgagatattagagtatcatcctcagcttctgaaggattacatgaatggctccgaaaacacgagctttctatatccaagtgctgttgataatttccggaggcaatttgccatcttagaggaaaacggaggaaagagtggtgcactagataggaagcatgtttctcttccaagggctacaacagttcactctacatcaattcctccaaatgaaggcctagatgcaacatcccaagttactcaaaggatcccaacagctagaccaggaagaacggttggtccggtattaccattcgagaatccaggcgccgcagatccgcacagcgcacggagggtggtgaggaatccgatggttcctccagcagctgccaacaagtcaggatacagctacaacctaaagtcagactactctgataggcaacatcaggaagagcttgagaaagatcgtgtgcagtacaggcctgcacaacacttgatggatgctaaagttgctccagatacagccccggacatacggtcttcacaatactactttacgaggagtgctcccagaactgatctaacagacagggctgcactccaggggagcatgctatacggcattgctccgttcaacggcatcgcagcagttgctggtggatacagcaaggttggtgccgttcaatatggtgtttcaaggatgtactagagttttagtcaggcagttgtggaattgctccatagatgagcaagatgggaatgccggagcatggctttgtgttgtgcccatccacccagatataaggctggcaagggaattggtcgcatctggtcatggatgcaggcgaaggttgaagaaaggagaagggaaactcctattccatctcaggcggccattgtccatttgaaatggcagtgagctcgcgatggtgaaagaggaaaagagggagagaaagttcatggtggaatttctcgcactttatttgttgtggagaaaaggagaaaatgtgaataacagcactaggctgggcttgtgtacatacctgcaacccttgatttttttttcttgttttcttgctagaagctgttgcttcttgtgtaaacctgcaaaagcatactccgaaaatgaatcattcgccaaaaaattgagacggcggattatttggt

SEQ ID NO: 4216 - DNA, 618 bp, Oryza sativa
  ref <308>: DATABASE ACCESSION NUMBER: AK061646
  ref <309>: DATABASE ENTRY DATE: 2001-12-06
tgtacctaaatgattgccaacgtactacattctatgaagggattggtctggacaccaaagaattcgacatgcatgtgataattgagaccaaccgcacaacagcaaggattttccccgctgttcttgacgtcgagaaccctgaattcaagaggaagttagacaggatggtggagatcaacaaaaagatcattgccataggcgagtctgacgatatccccctggtgaagaacctgaagaggattcctcacgttgccgctctggtgtctgagatcattgctgcgtacctcatgcccccaatcgagtctggctctgttgatttcgctgaattcgagccccagcttgtctactgattctgtaggaagaccatctccagcttttttttccttcaaaaaggaatgctgatattttctgcctgaggggcttcgaacggtgagatgatgggtggttagcagaatctgcacctcgtgtgttcctttgtaaagtattgagacttcaacaatgtaccatttggcaaaggttttgttatgatctccatttaagtggcagtgaactgcatcacagtgggggttacagttttccaacagaagggtaattatatgatgttttggggttgttgat

SEQ ID NO: 4217 - DNA, 916 bp, Oryza sativa
  ref <308>: DATABASE ACCESSION NUMBER: AK104684
  ref <309>: DATABASE ENTRY DATE: 2002-08-28
gaaaaaacagtcagaagctaaggaagaaaaagtatagacacagtgatacaatggcctgcatcaacacattccagagctgctccgtcctcaagggagcaaagatcaatggtaccaagatcggaggagggaggggatcaccaaccttccggtgccgggcatcgacgttcatggacgggagcctccggctagagatcgacgagaaccctgaagccatcatctccggtgagtggccggagaacttctccctgctcagctacgacgatctccacgcctacctccagtcacaggaggccgctgctcaagccgacaaccagcgtgtggcgctcctgagtgaagccatgtcggcgcctgtgctggtagccactgccgagcagacgctggaggaggttgagtgccactttgagacggtctcaggtctcccagttatagatgccagcctcagatgtgttggagtgatcgtcaagagtgaccgggccagggcttctcatgggtcaaagacgaagattgcagaagtgatgacctctccagccatcactctaccatctgacaaaacagtaatggatgcggcagctctgatgctaaagaagaagatccacagattaccaattgtaaatcaggacagacaagtgataggtatagttacccgtgctgacgttcttcgcgagttggaagccctgctggaggtttagacgtgcagtggtccatatgcttcggccttgttgtatatatgtaaatatatgccatggtgtttttgaatagcaggcatctctaatctgtaagagtgttgtagcgcgaatcaccaagataagcctgagaaaataaccggagagcttttctttgtacaataagcacactatgagacctccagtgttgtatgcctgtgaaaaaatttacgttagtgaatggtctccacaac

SEQ ID NO: 4218 - DNA, 1386 bp, Oryza sativa
  ref <308>: DATABASE ACCESSION NUMBER: AK061647
  ref <309>: DATABASE ENTRY DATE: 2001-12-06
aagatattcaacagcaaacatggcactgtcttagatagtggaaccacatatgcttacctgcctgaacaagcatttgttgcatttaaagatgctgtgacaaataaagtaaattctctgaagaaaatccgtggcccagatccaaattataaagacatccgctttgcaggtgctggaaggaacgtctcccaattatcagaggtatttccagatgttgacatggtatttggaaatgggcagaagctttcgctttcacctgaaaactatttgttccggcattcgaaggttgaaggggcttattgcttgggtgtgtttcagaatggaaaagatccgacaacactattagggggaattgttgtccgtaatactcttgtaacctatgaccgtcacaatgagaagattggcttttggaaaactaactgttcagagttgtgggagaggctccatattagtgaagttccttcatcagcaccttcagattcagagggagatatggcaccagctcctgctcctagtggtttgcctgaatttgatgttggcctaatcactgttaatatgtccataaatgttacttatccaaacctgaaacctcacctccatgagctggctgagcttatagctaaagagctggacattgactcccgtcaggttcgagttatgaatgttacaagccaaggaaactctactctaatcagatgggggatttttccagctggaccttctaattctatgactaatacaacagcaatgggtatcatttatcggttgacccaacatcacgtccagttgcctgaaaatcttggcagttatcagttacttgaatggaatgtgcagcctttatccaagaggtcatggttccgagatcatgtagtctctatactgcttggaattttgctagttgttttgctgactttatcggcccttttagtactgattgtctggagaaagaaatttagaggtcaagcggcatatagacctgtggattcagcagttcctgagcaagagctccaaccgctataatttggagtggttcaacggagtaaacatataggcgattctttggtagaaataccgttgtgcgggctgccatgttgcagcgggttcacatccgctgctgggagttgccctttttctttgtatgtaacacaagctacaagcttacagaagaagcacaagattacataacttctcgattcagcacttagagcctctgttcataaactgtctagcgattcagatcaagagcttcctcttgtagcttacagtagaagaaggttttgttcgtgtaatgtagattaagtagaatagagcaaggcacaaaagcacagcagccatggacggaatgttgtattatctagtatctgataagtgctgaggatattcggcttc

SEQ ID NO: 4219 - DNA, 1293 bp, Oryza sativa
  ref <308>: DATABASE ACCESSION NUMBER: AK061648
  ref <309>: DATABASE ENTRY DATE: 2001-12-06
ccgcccacgcggcccagcccaaccaggtcgcacaacgcaactcgcgagggcgagcgactgagaccgtctcctctcgtctcgtctccccgctagggttcaggccatggcgcacggccgcgccgccgccgtacgccgccccaagtcgtcgtcggcgtcgtccgcgggggcggctgccgaacggaagcggaagcgcgccgccgccgccaagaccgtttccctcaagaaccagatccgctccaccgagcgcctgctccgcaaggaccttcctaatgacattagggtagctcaagagaagaaactggaagaattgaagcggcaacaagagcttcagaatcaactggctattcaacgaacagttcagctgagagatagaaagataaaattctttgagaggcgaaagattgagaggatgatcaggcgccttgagaagcagcaacgttcaaatgccgatgatgccagcaataaactgtcaaaattaaaggaagatcttgagtatgttaggtttttcccaaagaatgagaaatatgtctcactgttttctggagggaataccccagatatgttagagaagaggaataagtggcgtaaacagataaaagaaaatttgatggctgctgcagaaaatggaaaagacttggaagagacagcaagcgatgatgatactgtggatgtgagtgatgacgacttcttcatgtcggggagttcaagtgatgaagaggctgatgatgaatggactgacaaaagtgccaaagaaccagcttccagtgcttcaggtaaggcagcgtctggcatgtcaagcgatgaaaagaatcagcgtcagagagatgctcgagttcttatgccaccacctcgttcattagcaccaaatagaactagaccaggggtgaaacacgtgttatccagctcaagcaatacttcaaatagcacaagtggtggcactttcaaaaataggagagcagcaaatcagcctggagatcataacagcaacctgagttcaaattctgatgctcataaaccacgtcgcaaaaggagacatcggaagaaaaagaagctggcatgaatattctggagcgtgaggtggaagctgattttattcccgcaccaaagtgtgtactaaggctggttactatcaaaagaatggagacaacatgtgtgccctgaggaagttgctgattttgtgcgccctctctcgatgtaaaatgaatctcctatcgctcttcactcaatcactcatttgttttacagtaaccatccaaaaagttccgattattaactgaatgcatgctggtcttt

SEQ ID NO: 4220 - DNA, 1886 bp, Oryza sativa
  ref <308>: DATABASE ACCESSION NUMBER: AK104685
  ref <309>: DATABASE ENTRY DATE: 2002-08-28
aaaaatcgtagggtaacccacagcttagctagcaagcagcagcaagccaacatagtagctagcacgtacaaatgatcgccatgactcctcttggactactgctagtgcttctcgtcctctgtagctccattcttgttgcccatggaggagacgctgcagccggcgcctatatggtcatagcaaccagcaccatgaaaccgaaaactttctgctccggccacaaggttgctccaggggacgtgccgtcgccgaacagcacttgggcaccgttgcatcacctgtatgggccatgctcgccggcgccgtcgtcggccaacagcaccgccgccgacgtcgccgcttccatggccgacatggtcgacgacgaccaacgccgcgcggactacatccaaaagaggctcaccggcgccaccgacgacaagcagccgatggccttttcgagcagaacctcgcaatacgagaagaacggccagtacgccactaatggtggcttaggcagtgtgcctcacctcaaaagtttatcaacgacggcgacgacgaattcggcgccggatggcacgtcggcggtgacccagacggtgataatcgactccggcagcgacgtttcatgggtgcaatgcaagccatgccccttgccgatgtgccaccggcaacgggaccccctgttcgacccggccatgtcgaccacgtacgccgccgtcccctgcacctccgccgcctgcgcgcagctcggcccctaccgccgcggctgctccgccaacgcgcagtgccagttcggcatcaactacggcgacgggtcgacggcgaccgggacgtacagcttcgacgacctcacgctgggcccctacgacgtcatcaggggcttccgcttcggctgtgcgcatgccgatagggggagtgcgttcgactacgacgtcgccgggtcactggcgctcggcggcggctcgcagtcgctggtgcagcagacggcgacgcggtacggcagggtcttctcctactgcctcccgccgacggcgagctccctcggcttcctcgttctcggcgtgccgccggaacgcgcccagctcatcccgagcttcgtctccacgccactgctgagcagcagcatggcgcccacgttctacagggtgctcctccgcgccatcatcgtggcggggcgcccactcgccgtgccaccggccgtgttttccgccagctcggtcatcgactcctccacgatcatctcgcgcctgccgccgacggcgtaccaggcgctgcgcgcggcgttcaggagcgccatgaccatgtaccgggcggcgccgccggtgtccatcctcgacacctgctacgacttcaccggcgtccgcagcatcaccctgcccagcatcgccctcgtcttcgacggcggcgccaccgtcaacctcgacgccgccgggatcctgttaggcagctgcctcgccttcgcgcccacagccagcgaccgcatgcccggcttcatcggcaacgtgcagcagaagacgctggaggtggtgtacgacgttcccgccaaggccatgcgattcaggaccgccgcctgctaagtgctaattcaaatttgcttgcttgccaaactagcgtattgttagcttattattcgaatataagctagctagttgatgaaataattagtcaaagtgattgttgtttatgttttgatgccatgtttatcctacatggcgtactagtagagcatctatctctatggaaagggattaaagtagctagcttaattgcagcattgtctgctaaagtttaggctagctactaaagctcttttatttatcttgtctgcaataatttgttatcttgatgtgatttcggtcgtgtgagattgtaatatcgggttatgcatctccatcttgcatgtc

SEQ ID NO: 4221 - DNA, 1697 bp, Oryza sativa
  ref <308>: DATABASE ACCESSION NUMBER: AK061649
  ref <309>: DATABASE ENTRY DATE: 2001-12-06
tgctggggctgccgtacacgttctcgcggaccgggtgggcggcggggtccattctcctgctctccgtcgcggcgctcaccttctactgcatgatgctgctcgtcgcctgccgccgccgcctcgccgacgagcacccgaagatcgcctcctttggggacttgggggacgccgtgttccgcggtccggggcgcctcgccgtggacaccatgctggtgctcagccaggccagcttctgcgtcgggtacctcatcttcatctcgaacaccatggcgcacctttaccccgtcttcgcgccctcctccaacgcgctcctctccccaaaggcgctcttcatctgggccatgctgccgttccagctcgggctcaactccatcaagacgctgacgctcctcgcgccgctcagcatcttcgccgatgtggttgacctcggcgccatgggcgtcgttctcggggaggacgtgtccgtctggctcgccaaaccaccacccgtcttcgccttcggcggcctgagcgcgatcctgtacggcatcggcgtgtccgtgtacgccttcgagggaatcggcatggtccttccgcttgaggcggaggccgccaacaagaagaagttcgggaccacgctcgggctatccatggggttcatcgccgtcatgtacggcctgttcggcgccatggggtacatcgctttcggcgacgccacgcgcgacatcatcaccaccaacctcgggaccgggtggctctcggccgccgtgcagctcgggctgtgcatcaacctcttcttcaccatgccggtgatgatgcaccccgtgtacgaggtcgccgagcggctgctccacggcaaacgctactgctggtggctgcggtggctgctcgtcctggccgtcggcctctcggccatgtacgtgcccaacttcaccgacttcctggcgctcgtcgggagcagcgtctgcgtcctgctcggcttcgtgctgccggcctcgttccacctcaaggtgttcggcgccgagatgtcctggtccggggtgctcagcgacgtcctgctcgtcctgctcggcctctcgctcgccgtcttcggcacctacacgtccctgctgcagatcttccattcctccagcgcttaatctctggagaatctttacggatagctgcgccgatgattgatttgctcatttgcttcgcgcgcgggtgtcagcctgtcaggtacgctggttgcattcttcgtgtacagagaaggtgatcggtcgatcagaggggcaatgcccaattcagcttgctgttgatttgggcatggacagcgtgcatcggccgcattctttcgattacaagtcagatggtttgtacaagttagcgtggatggcatggagaaatctgtatggttttgcaacgacagattcccatagctactcgtgtcagttaatatttatgtgtatgtcttggatgtttcagctgctgcattgcacggtggaatcgatgaaaggacatagtaagtttcagtctaagtttaagcctatttagttgataaataaagtgtctagttgaggttgcagcttgtgtgcggtactgcgggttgtgtcaattaggaaggcaagcaatcgggacgacttggcaaagtatacattctattctgttcattctgttttgtcccaagcaagtaaacttgtaatgccccaactaccaatcgaaatatcgaatcttctttc

SEQ ID NO: 4222 - DNA, 1881 bp, Oryza sativa
  ref <308>: DATABASE ACCESSION NUMBER: AK061650
  ref <309>: DATABASE ENTRY DATE: 2001-12-06
cattctgctaagctgcccacggccatggagtcgccgctgagccatccggcgatggtcgccttgtcgctgctgctactcgtggcgctctacctcgcgcgccgcgccgtgctggggaagaaacgcaggtatccgcccgtggccggcaccatgttccaccagctgctcaacttcggccgcttgctggagtaccacacggagctctcccgcaagtaccgcaccttccgcatgctcaccccgacctgcaactacgtctacaccgtcgagccggccaacgtcgagcacatcctcaagaccaacttcgccaactacggcaagggcccgatgacccacgacgtgctggaggacctcctcggcgacgggatcttcaacgtggacggcggcatgtggcggcagcagcgcaaggtcgccagcctcgagttctccacccgtgtgctgcgggactacagcagcgccgtgttccgcgacaccgccgcggagctcgccggcatcctggagcgtggtccggcggcgaaggggcgggagagggtggacatgcaggatctgctgatgcgggcgacgctggactctttcttcagggttggtttcggggtcaaccttggcgtgctctccggatccagcaaggagggcttggtgtttgccagggcgttcgacgacgcgagcgagcaggtgctgttccgattcttcgacctgctctggaaggtcaagaggtttctcaacatctcgtcggaggcaaccatgaagcagtcgatccgcaccatcaacgacttcgtgtactccatcatcgacaggaagatcgaacagatgagcagagagcaacacgaattcgccaagaaagaggacatactgtcgaggtttctgctcgagagggagaaggatcccggctgcttcgacaacaagtacatcagggacatcatactcaacttcgtcatcgccggccgcgacacgacggcggggacgctgtcgtggttcctctacgccgtctgcaagaaccagcgcgtacaggacaagatcgcgagggaagtgcgcgacgccaccaccggcgaccgcgacgtcggcgtccaggatttctcttcatttctgacagaagacgccatcaacaagatgcagtacctacacgcagcgttgacggagacgctccggttgtaccctggcgttcccctcgtgagtactgttgttggtctttttttttttcgaataagagggcaggaggactgctactgttgttggtcttgattttttttttctgaaggtagaaactgcagcgcatttgttacgtggctgtgtttgcgctgtaggatgtcaaatactgcttctcggatggcacgttgccggacgggcacgcggtgaagaaaggagacatggtgaactaccaaccgtaccccatgggcaggatgaagttcctgtggggcgacgacgccgaggagttcaagccggagcggtggctcgatgacagtggtatgttcgtcgccgagagccccttcaagttcacggcgttccaggcggggccacgaatctgcttggggaaggagttcgcgtacaggcagatgaagatcgtttcggctgtccttctctacttcttcagattcgagatgtgggatgacgacgccaccgtgggttataggccgatgctgactctgaaaatggatggcccgttctatctccgcgcattggcccggtgaagcttcacaccatatcaaaagttcaaaactcaagggcggcgctggtctatttcatccattttggcggggataatgacggttagatatggttgtcgaagacaacagtgctcctaaggtgtaggtatgtaagaaaaataacgtgtgtattatactcttaaaaactttttactagagggctatgtgtactccctccgttccacgt

SEQ ID NO: 4223 - DNA, 1480 bp, Oryza sativa
  ref <308>: DATABASE ACCESSION NUMBER: AK061651
  ref <309>: DATABASE ENTRY DATE: 2001-12-06
accttggcgtaaaagaaaagaaaatctgcagtctgtgtcgtctcctccggtccttgcgcgcaagaccgagtcgcggctgccgatctccgtctgccgatcgagcagagcatagcaggggatcctgctcttctgtaggaaatggctgacggtgaggacatccagcctcttgtctgtgacaatggcactggaatggtcaaggctggtttcgctggggatgatgcaccaagggccgtgttccctagtattgttggccgtcctcgccacaccggtgttatggtaggaatggggcagaaggatgcctatgttggtgatgaggcacagtccaagagaggtatcctcacgctcaagtaccccatcgagcacggtatcgtgagcaactgggatgacatggagaaaatctggcatcacactttctacaatgagcttcgtgtggcgcccgaggagcaccctgtgttgctcactgaagctcctctgaaccctaaagccaacagagagaagatgacccagattatgtttgagactttcaatgtccctgcaatgtacgtcgctatccaggccgtgctttccctctatgccagtggccgtactactggtattgttcttgattctggtgatggtgtcagccacacagtgcccatttatgaaggatatgcgcttcctcatgccattctccgtttggatctggctggtcgtgacctcacagactcccttatgaagattctgactgagaggggttactccttcacaacctccgctgagcgggaaattgtaagggacatcaaggagaaacttgcgtatgttgcccttgattatgagcaagagttggaaaccgccaagaacagctcctcagttgaaaagagttatgagctacctgatggtcaagtaatcacaattggtgcagagaggttcaggtgccccgaggtcctcttccagccatccatgatcggtatggaggctgctggtattcacgagaccacctacaactccatcatgaagtgcgacgtggatatcaggaaggacctttatggcaacattgtgctcagtggtggtacaaccatgttcccaggcattgctgatcgtatgagcaaggagatcactgcccttgccccgagcagcatgaagattaaggtcgttgctccacctgagcgcaagtacagcgtctggatcggagggtcgatcctagcctcactcagcactttccaacagatgtggatatcaaaggacgagtacgacgaatctggcccagcaattgtccacaggaaatgcttctgattttctcaagtgctctgctcttgtcatctgtagtatcgagttatgtttgattcgtttttctagcgatgtattggagatttgcaggctatgtttgttttctttttggagacgacttctctatgtgttcgatcagtgtaagaatgtcctatgtttgtgtcatctcagattgtttgtttgagttcacttgtcaaacttggttcgtttgatt

SEQ ID NO: 4224 - DNA, 383 bp, Oryza sativa
  ref <308>: DATABASE ACCESSION NUMBER: AK061652
  ref <309>: DATABASE ENTRY DATE: 2001-12-06
aaaggttatcttgttgagacaccagatgagctaaaatccgccctttcagagtcgtttcgtgccaggaagccagcggtgataaatgttatcattgatccttatgctggtgcagagagcggtagaatgcagcataagaactgaaggtgtttgtatcataccagaacgcaggtcccagttaataagcaatgtcctattgaaattaaaacggacacccatggaagaacatcttatatcactgtccctgaaataagaaagatcctgggtagtactccgtacttaatggcatgtgagatatcgaattcaagctgtctgttttgtaatgtaccgtacccgtgttaccgtgtacagtatactaaagaaaaaatgtttgtggttagtaattc

SEQ ID NO: 4225 - DNA, 612 bp, Oryza sativa
  ref <308>: DATABASE ACCESSION NUMBER: AK061653
  ref <309>: DATABASE ENTRY DATE: 2001-12-06
acttgcatactgatgaagagatacgctattgtcttgagggaagtggatacttcgatgtcagggaccaaaatgatcagtggatccgtgtagcagtgaagaaagggggcatgattgttttgcctgcgggaatgtatcaccgcttcacattggacagtgacaactacatcaaggcaatgcggctctttgtgggagagcctgtctggacgccgtacaaccgtccccatgaccatctgccagctagaaaggagtatgtcgaaaaaattatcaacaggggtggaactcaagctgtcgaagctcgttaaaggcatatcaagatgtgcttcctagttcggtgttctgttacactctacagatactgaataaactgtgctatcagctgttgcaatgggctcctaccgacatcttacatcatttggcagtattttgcacaaacccgcttaaaatctccctgaaaatacgcacgtcaccatgtcagagtgtttatatacaataatgacacttcagtccacagtcagcaagggactaatgacaatcattgtacttgtggtgtgtgtgatgaaaccacaatgatcaaaccgagtgtctgaatctctgaattgttttttttagcac

SEQ ID NO: 4226 - DNA, 737 bp, Oryza sativa
  ref <308>: DATABASE ACCESSION NUMBER: AK061654
  ref <309>: DATABASE ENTRY DATE: 2001-12-06
acattcttgctaactcactcctctcctcctcgtctaccttacctagcagcagcagctagctagcttaattagctatagcagccatggcggcgacggcactgagcagccaggtccggttgccgatgtccctgcgggtggcgacggcgccggcgccggcgcgcgtgtcggtgctgccggcgagcaacaagctgggagacaggctgcggatgcaggcgacgtacaacgtgaagctgatcacaccggacggcgaggtggagctgcaggtgccggacgacgtgtacatcctgggccaggcggaggaggaagggatcgacctgccttactcctgccgcgcgggctcctgctcctcctgcgccggcaaggtggtctccggcgagatcgaccagtccgaccagagcttcctcgacgacgaccaggttgccgccggctgggtcctcacctgccacgcctaccccaagtccgacgtcgtcatcgagacccacaaggaggacgacctcatctaatcaatcaagcaagctccatatttataaatctctcgatccatctccatgcgttcttgagtttatcaattaagaatataatgtcgtcgtccctatgctatgcaagcaaagtattacgtacgtatatgttgagcgagataacaaaacacaggcgtgcccgagggttaattgttgttgtttaattaatgtacgttttgctgcacctgcttaatcatatccatatcacattttggtgtc

SEQ ID NO: 4227 - DNA, 1587 bp, Oryza sativa
  ref <308>: DATABASE ACCESSION NUMBER: AK104686
  ref <309>: DATABASE ENTRY DATE: 2002-08-28
acacccctatctcacccaccaccatcccaaggcggcgcgacgacccatctcgccgccgcgaattctctctccggcgaactccaactcgaaccctccctccgccgactccgctcacgagacctaaaccctccttccctctcctctcgtctcgttcccaccaccatgctgggcatcgcgaggaggcgcctcggatccggatgcgcgctggggcaactcatgcaggcgctccgaccggccgccgccgccgccgcggcgaggacctactccgccgccgccaaggagatgactgtgcgtgaagcattgaattctgcccttgatgaggagatgtctgctgacccttctgttttcttgatgggagaagaggttggagaataccaaggggcatataagatatcgaagggtttgttagacaaatatggccctgatagggttcttgacacaccaatcacagaggctggttttactggaattggtgttggtgctgcctatcaaggtcttcgccctgtggttgagttcatgacatttaacttctctatgcaggcaattgatcacatcataaattcagctgccaagtcgaactacatgtcagctggtcagataaacgttcctattgtttttagagggccaaacggtgctgctgctggtgttggtgctcagcactctcagtgttatgcggcttggtatgcgcatgtaccaggattgaaggtcctaactccttattctgcagaagatgctcggggcttgctaaaagcagcaatcagggatccagaccctgttgttttcttggaaaatgaactgctctatggtgaatcattccctgtttctgcggaagttcttgattctagcttctgtcttccgattgggaaggctaagatagagcaagaaggaaaagatgttacaattaccgcattctccaagatggtcggatatgctcttcaggctgcagagatactttccaaggagggaatcagtgctgaggtgatcaatcttcggtcaattaggccattggatagagctactatcaatgcatcagttaggaaaaccaacagattggtaacccttgaagaaggatttccacaacatggggttggcgctgaaatatgcatgtctgttgtagaggacagctttgaatatcttgatgcgccagttgagaggattgctggagctgatgtgcccatgccctacgctgccaaccttgagaggatggctgttccacaggttgaggacattgttcgtgcagcgaagcgagcctgctacagagcagtaccaatggcagcaacagcctaattcagtgacagtttttgtttctccatcttgtcttcttcccaatggccaggagtatgtaccacagcataatggtgtcttcccaagtctcaactagtgtaagctgattttgtagatccaccatgaggtgtcaatccccttctttctttagtcgcagtcggatggctgcatccgttcatagtccaaactgaatatacacatttgaaccatgcgacttctggagattttacatgaccggttgatgtcaataacatgtatgtaatggagctccataagtcggcaaaccaaacccccattagattc

SEQ ID NO: 4228 - DNA, 1440 bp, Oryza sativa
  ref <308>: DATABASE ACCESSION NUMBER: AK061655
  ref <309>: DATABASE ENTRY DATE: 2001-12-06
gtggaagaactgactcattggcctcaggttgcttgcatggggaccctaatgaggatgtctggactgagctcaatgatgtggttaaatctaatttgtctaaaagtgtcgcgtcgcttagtttgcgcaatggagacacggtcttatttgcatgcacaggtgcagctgtagaccgccaggggcgtcttacaaagttcctcacttctgcaagtttggtagagcttttggttagagctctcaatgatacaaacaaaaaccatggtgacttagagctcgaagtgtaccatgaaggcaatgaagtatgccagggttatttgactgattttgatttggatcacaatctggccatcgtcgaaatctggactgactttgatgttcatgttggacttctccaacatgcggtggaatttctgccccattgtaaggtaatagctatagggcgtgaaatcactggcaaactgatggccaggagggtgcagttaatggatgatttaagtgtatctgaagatagtgaagatcttgactgtaaaatcaaagaggcttgggaaggtgcaccacttttttcttttgatgggaactttgttggcatgaacctttttttggctatgggaagagcctttttcctgccatggggcactattcagaagcattgggcatccctgcaaaacaagacgggacttccagagtcaaacagtttgaaggtttataggtttggaacaagttccacagctgagaaatctaacagccatccagaagtaaacaacgatattctcgacccggagcagattcatatagactctatgggctatccaaagtttccaacacacatgtttgctgatgggatgattttggttaatactttcgaagagactttcggcgatctacgtggtgaaggtgtatggagtaaactcagtaaaaaatcttgttctaacatagaccgcagtgttgtcgcactagcttcattcagtggagagagaaggttttttgcatgcacaggcttttttgttgaatacaaaggctgggattggaggccctgttgttactcttgatggggattgtattggtatgaacttctatgatacgagaataggaacccctttcctgtcgtgggaggtgattgttgatattgtagcatcctttgaggaaaaaaggtggccagtgcctatgccatattgatgccacccggactgtgtgtaggatgagtctgaagatgatgaagagttggggttttcatccacatttggctgcaagctgaagtacaattacataaatggagagaaaagcgtgttcttttagttgctgttagatgtagaagaaacctaacctgaacttgttgtcaatctcactatatcctaaagcctgaacttttatataggaaaaacaagtgaagccagaacttgttgtcaatctcactatatcctaaagcctgaacttttatgtagg

SEQ ID NO: 4229 - DNA, 578 bp, Oryza sativa
  ref <308>: DATABASE ACCESSION NUMBER: AK061656
  ref <309>: DATABASE ENTRY DATE: 2001-12-06
atgtgtgtatggggccttctgatcctcaaccaaactggcatcttgggatgcgtggaacccagcacagggcagtgatgtggagagtgtggaaggaaggtggaacaggattcctttattggggtaccaactgctacgagaaggctatgattccaagtgctgagatttgtttccgacgtggtcttcctcctggcgatggggttctgttctatcctggtgaagtgttttcttcatcacatgaaccggttgcgtccactaggctagagcgcattctcagtggcatgcaggacatcgaatacctgaagctttattcgtcaaggtacggcagggaggaaggtttagctctccttgagaagacaggcgtgtatcttggcccagatcgttatgcacttgaccatggaccaattgatgtgatgcgtggtgaggtataccgcacttgcaggtcttagggcagagctatcaacttctggtgtttcactgtagcatccatcctgttgttgtacatatgatttctcatgtactgggagttgctagcagcaaatacttatcgttgaacccatcaaagctccgttttcacgctc

SEQ ID NO: 4230 - DNA, 1332 bp, Oryza sativa
  ref <308>: DATABASE ACCESSION NUMBER: AK061657
  ref <309>: DATABASE ENTRY DATE: 2001-12-06
atactcgccactaatttcttctctctttctctctctctccgcgccctcgcatcgcacgtgaggcagtcgagggatagcggcgcaatggcggcggcggtggtggcgaacggcgcgagcggcgactcctccaaggccgcgttcgcggagatatacagcaggctcaaggaggagatgctcgaggacccggccttcgagttcaccgacgagtcgctccagtggatcgaccgcatgctggattacaatgtgctcggaggaaagtgcaaccgcgggatctctgtcattgatagtttcaagatgttgaagggcactgatgttctgaataaggaggagacatttcttgcctgcacccttggttggtgcattgaatggcttcaagcttattttcttgtgcttgatgatattatggacaactctcaaacacgacgtggccagccttgctggtttagggtgcctcaggttgggctcattgctgtaaatgatggtattatccttcgcaaccatatttcacgaattcttcaacgccattttaaaggaaagctgtattatgttgatctcattgatttgttcaatgaggttgagtttaagactgcttcaggtcaattgttggatcttattactactcatgagggagaaaaggatctcacaaagtacaacttgacagttcaccgccgcattgttcagtacaagacagcttactactcattctatcttccggttgcatgtgctttgctgctatctggtgagaatttggataacttcggtgatgttaagaacattcttgtggaaatggggacatacttccaagttcaggatgattatctagattgttatggtgatcctgagtttattggcaagattggaacggacattgaagactacaagtgctcatggttagttgtgcaagctctcgagcgtgctgacgagaaccaaaagcacattctatttgaaaattatgggaagccagatcctgaatgtgttgcaaaagtgaaggatctgtataaagaacttaatctggaggccgtatttcatgaatacgagagggagagttacaataagctgattgccgacatcgaagcacatccgaacaaagcagttcagaatgtattgaaatccttcctgcacaagatctacaagaggcagaagtagagctaagctcatggagaagctgtttcatgtttgcttggtaactagagtcgtggggacaaataactggtaactagaatcatggggactgttccctgatgttgtgtgtattatggttatgttcgtaccgtgtagtacagcgtgctactccgtaaaataatgaagcatggtgctatttatgcgtgcgtg

SEQ ID NO: 4231 - DNA, 1897 bp, Oryza sativa
  ref <308>: DATABASE ACCESSION NUMBER: AK061658
  ref <309>: DATABASE ENTRY DATE: 2001-12-06
gatccgatggccaagccctcaaggccgtcgcatcttatggcggcaagttcatggccggccaatccggtggtttgacggatgatggaggggatggtggtgatggagcagtggggcgaaatccttgcccatgccaccagcatcccttcgccacgtccctctatcttctgctcttgcgatacacgagccgctgccgtcgtcgagcattgcctccctccccaacatcttccggggcgttcgaggtggtaaggtgctcgatccggtgatgatacgatcgacctcaacggggagaagctcggttaactggcgctacgatcgatctagatggcttactcacaaggcaagcctgtcatcacactgtcctagaatcgggtcgccccagtgacgcccttgtctggtgctgcatgcctcctcatcctctccctcacgcgactgcaagatttgaatcactccggtgaacgagaaaagcgtccagccaaccacttctcctcgttgactgtctttatcttccctccagccctggcagcaatagagcaagctcatgtcaccatagtcccatgctcttggggaaggagatactagcatcccgcctacggaaattgccatcgccgctgcttcctcaaggcgagattctcagtggtgatgcagacggaggcagtacaacattcacagtggtaacatgacactaaggtttggttgattgggcgaagaaaaatagagtttggtcaggatgcagtgtttcctctgagaaaattgttgcaaaaagcagctgcacaagacaattgtgagcgcttctgaaaaatgaatatatatcactggtgacagattatagatttggacttacgtaaattggtatggtatccttgtgagtattcatctacagttcaagacaagatatgatggcaattgttccacatgaaatctgctaacacatgcatatttgcatttcagcgtagaagctgggtaaagtatgggacaagtatgtcgctgatcatctccacttaagatgaggctgacagtgcaaacaacaatgagctgtagtacaagttgaagctggctttggaacccaacacctctaagcggaaatgtgcacgcatatcagagctggctaatatgctgcgtgcagtttgcgactttactcagaaacacaaggccgcaaccaagtcgctaaagtgattaattaagtgcatcgctattttggcctggttgttcttggctacataagattgatccacgatattaatgccagatccattgatctatagcaattgtagatcagttggcagtggcggagggtaaaattaatcagcggtgagcagcttgatgctctcagagggatgcatgaagtttgaagaaattttggaactaatatgagaaagaggacgcaatgctcatttgtggcaattgatgcaaaaagcagctggataatacaactgtgaggatcgagagattatcagcattgctccctgatattggtgcaatacaaaagcttatctgacccctttccatcggtgggatcgagaaattatcagaattgctccctgatattggtgcaatacaaaagcttttctgacccctttccatcggtgggagacaatacttagccattgtgttaggctgtgtttagatctaaagtttagatccaaacttcagtccttttccatcacatcaacctatcatacatataacttttcagtcacatcatctccaattttaaccaaaatcaaaactttgcgctgaactaaacagtcttagtctatttcactgctagactgtacatgtgtttgttatgctgaaactatttcgttgaattttatgtacgtatatcggaagcatgcgaggatgttggcagggcagttggaccaaacagtttagtaataaaatctcagaaatccactgg

SEQ ID NO: 4232 - DNA, 1234 bp, Oryza sativa
  ref <308>: DATABASE ACCESSION NUMBER: AK061659
  ref <309>: DATABASE ENTRY DATE: 2001-12-06
ctggtatgggtaccctgctcatctcaaagatcagggaggagtacccggacaggatgatgttgacattctcagttttcccctcaccaaaggtttctgataccgtggtggaaccttacaatgccacactatctgtccatcagcttgttgagaatgccgatgagtgcatggtacttgacaatgaagctctatatgacatctgcttccgcactctgaagctcgccacacccacttttggtgatctgaaccatcttatttctgcaaccatgagtggtgttacatgctgcctgcgcttcccgggacagctgaactctgacctccgcaagctggcggttaacttgatccccttccctcgtctccatttcttcatggtcggctttgcaccgctgacctcgaggggatcccagcagtaccgcgccctcactgtcccggagctgacccagcagatgtgggacgccaagaacatgatgtgcgccgccgaccccaggcacggacgctacctcacggcgtcagccatgttccgcgggaagatgagcaccaaggaggtggacgagcagatgctcaacgtccagaacaagaactcgtcctacttcgtggagtggatcccgaataacgtgaagccgagcgtgtgcgacatcccttcccacggcctgaagatggcgtccaccttcatcggcaactcgacgtcgatccaggagatgttccgccgcgtgagcgagcagttcacggccatgttcaggaggaaggccttcttgcactggtacaccggggaggggatggacgagatggagttcaccgaggccgagagcaacatgaacgacctggtggccgagtaccagcagtaccaggacgcgacagccgacgacgaggaagaggactacggcgacgaggaggaagacgaggttgctgcctaagccacctacctgcctgccattcctctcgctctcgtcatccatcgtagatgatgattgaggatgtgctcccttgtgttattattacctagtactgtattgcaatgtcgatctgggtcgtaagatgtttattttaggtgatttgatgctctagttactcttttttttccttgtgttgattaatggtgtgttgtcgatgcgaattgtgatactagctttaactgtggacttaaattactagatcctggaattgatactgtttgccagtaatatcgtgtgttgcgtgatcattattttttccactacgaatacactgcgatgtcatt

SEQ ID NO: 4233 - DNA, 535 bp, Oryza sativa
  ref <308>: DATABASE ACCESSION NUMBER: AK061660
  ref <309>: DATABASE ENTRY DATE: 2001-12-06
aaaaaaccagttccatcccttcctacacttcctcaatacctttacaaggagccaggcaacaatgtctcactctcataatcaggtcctctatttccaagcccaaagaaaggtcagatttcaggataaccaagccaatattatgaaggaagtaccaataggaacaaatgagaagttggtgcatgaccaaaggatgaaagatgacaagaacaaggatgtagattcagtagcttcagacttcatcaagctcaagcacagggcttgggcactgcagaagagcgcaagcatgtatcaaccttcttaaatgcggttccaatagtatggtattctccacttatgcgtcttcactacataggctctggtttgaataagacatgttgcttgaaagagccatggctatcgccaagttgtgctactatggtattgctatttgcaatatatgaataagaaagtattgtgtctgtactattatttgccgcacgcccgcacaaatgtatgtgataccttttatgttaacatgaccatattttaaattgtt

SEQ ID NO: 4234 - DNA, 648 bp, Oryza sativa
  ref <308>: DATABASE ACCESSION NUMBER: AK061661
  ref <309>: DATABASE ENTRY DATE: 2001-12-06
ggcagttcacaagactaccaccactgatgacaagaggcttcaaagcaccttgaaaagagtaggagtgaacaacattcctggtatcgaagaggtcaatatcttcaaggatgatgtggttatccaatttcagaatccaaaagtgcaagcatccattggtgcaaatacatgggtagtgagtggaacaccacagacgaagaagctgcaagatctgcttccaacaatcatcaaccagttgggacctgataacctggacaacctcaggaggcttgctgagcagttccagaagcaggtacccggtgctgaggctggtgccagcgcaggtaacgctcaggacgacgacgatgatgtccctgagcttgtccctggagagacgttcgaggaggctgcagaggagaaggagcctgaggagaagaaggaagcggaggtggaagagaagaaagagtcgtcctagttttgttcatcgccgtcgtctactattgttgtgaagggttgttggttcaatgttaccccctaccatgcctgggacgtgctctcctatggactccgacctgccttactcgtttccatgtgggccggttttgtcttgtacgaggatttggtccaatccaacggtggaattgagttttacgacagttaaattatgcttcc

SEQ ID NO: 4235 - DNA, 786 bp, Oryza sativa
  ref <308>: DATABASE ACCESSION NUMBER: AK061662
  ref <309>: DATABASE ENTRY DATE: 2001-12-06
aaaccttccagaagctccagattccaaaccagcaggagtcgcctcgcctcctccttcatcctcctcgtcgtcgccgcgggggtcgcctgagatcacattaacaatggtgaaggctgttgttgtgcttggtagcagtgagattgttaagggcactatccactttgtccaagagggagatggtcccaccactgtgactggaagtgtctctggcctcaagcctggtctccatgggttccatattcatgcacttggtgacaccaccaatggttgcatgtcaactgggccacactacaatcctgccggaaaggagcatggagcaccagaagatgagacccgccatgctggtgatcttggaaatgtcaccgctggagaagatggtgttgctaatatccatgttgttgacagtcagattccacttactggaccaaattcaatcattggcagagccgtcgttgtgcatgccgatcctgatgatcttggaaagggtgggcacgagctgagcaagaccaccggaaacgctggtggccgtgttgcttgcgggatcatcggacttcaaggctgaaacctggaggtgtgaactcaccttccatctcccagcaccagaagcctgaaactctacgagctcttagccgtttcgtctttacctgagtggctactctagattctacaataagcacctgatctctgcgcatggtttttggtgtaccattctgtcgcccgcatcgttggcgcccaatgaactatgtgttttgtgttaaaccttaagctgaagggtaccatttgtag

SEQ ID NO: 4236 - DNA, 1600 bp, Oryza sativa
  ref <308>: DATABASE ACCESSION NUMBER: AK104687
  ref <309>: DATABASE ENTRY DATE: 2002-08-28
agtgttgatgcaaagctgattcgccatcgtttagctttttataagagatgggttcagtaggggttgcgccgtctgggttaaagaacagcagtagcaccagcatgggtgccgagaagttgcctgatcagatgcatgatctgaagataagggacgataaggaagttgaagcgactattattaacggcaagggaacagaaaccggccacataattgtcacaactactggtggcagaaatggtcagccgaaacagacagttagctacatggctgagcgtattgtagggcaaggttcatttgggattgtcttccaggcaaaatgtctggagacaggtgagacagttgctatcaagaaggttcttcaggataagcgctacaagaaccgtgagcttcagaccatgcgccttcttgaccacccaaatgttgtagctctgaagcactgtttcttctctacaactgagaaggatgaactgtatctaaacttggttcttgagtatgtgcttgaaactgttcatcgtgttgtgaagcattacaacaagatgaaccagcgtatgccacttatctatgtgaagctgtatatgtaccagatttgtagggcattagcttacatccataatagcatcggagtttgccacagagatatcaagccacagaatcttctggtaaacccacatacccatcaactcaagctatgtgactttgggagtgcaaaagttctggtcaagggagaaccgaacatatcgtacatttgctcccgatactatagggctccggagctcatatttggtgccaccgaatacactacagctattgacacctggtctgctggatgtgttcttgctgaacttatgttagggcagcctctgtttcctggtgaaagtggtgtagaccaacttgtggaaatcatcaaggtccttggaacacctacaagggaggaaattaaatgcatgaatccaaactataccgagttcaagtttccacagattaaagcacacccatggcacaaggtattccataaaaggttgcctccagaagctgttgatcttgtctctaggctgctccagtactcacccaacctaagatgcactgctgtggaagcacttgttcacccattctttgatgagcttcgagaccctaatgctcgccttccgaatggccgctttttgcctcctctcttcaacttcaagcctcatgaactgaaaggaatcccatcagatattatggcgaaattgatcccagaacatgtgaagaagcaatgctcctatgcaggagtatgagacagcttccgcacgacccccctggaaatttccatgacaagtgcccatttcctcccccctggacgacgatggatcgtcagcatatgcgtgcatgatggttggtgaagatgtgaagttacgttgttgttgtatgaccaccttgttgaccagtgtagttgagtagcagtatgttgcgatggcgaaactttgacatgtaaccggtgcacccacaccatccctcccctactaaccctcacccacctgagaattgagaattcccatagctgatgatctgtaatatgttctagagcagtttaagaatgtatttattatggtgtagttgatcc

SEQ ID NO: 4237 - DNA, 1367 bp, Oryza sativa
  ref <308>: DATABASE ACCESSION NUMBER: AK061663
  ref <309>: DATABASE ENTRY DATE: 2001-12-06
cggaatgagaaagcaaggaggtacttgagcagtatgaggaaaaagcagccagtacctttttctgagagattcccaaaagcagatcctgctgcactcaaacttctgcagaggcttttagcattcgacccgaaggatagaccaactgccgaagaggcgttggctgatccatattttaaaggccttgcgaaagcagagagagaaccatcatgccagccaataacaaagatggagtttgagtttgagcggaggaaggtgactaaagaggatgtgaaggaacttatattccgtgaaatactggagtatcatcctcaacttcttaaggattacatgaatggaaccgaaaaaacaaacttcctatatcctagtgcccttgacaactttcggagacaatttgctaacctggaagaaaatggagggaagaatggagatgctgttccatcagacaggaaacatgtttcgctcccaaggactactacagttcattctgctccaattcctcccaaagatcatcaaaatataacttcccaagtaccccaaaggattccaggtagaacaggacgaggggcttgccctgtaataccatttgagaatttgagtgcaatgggcccatacaatcaacgaagggtggtaaggaatccagtgcttcctccagccaccaccaacctatcagcatatgcctaccaccgtaaatcggatagctcagaaagagagctccagcaggagcttgagaaggatcgcatgcggtaccagccatcagagcatttcatggatgctaaggtggtgtcacatatgtcccatgatttgagagcttcctcttactacgtttcaaaggcgaaatctgatgtagcagacagagctgccttacaatccaacatgatgcagggaattggcccttttaatggcattgctgcagttggaggtaactacaataaagtcagtactgttcagtatggggtctcgaggatgtattagggtgcaatggccacttcaaaaatgctccgctgagctgattaataacatgaaagaatccaagtacccaagtgccttatcagccaaagattcagacaaagaatacaggaccaacaatctgatcgaggaagcgtcgaggcggtgaaaatgaaattacagaatgtggaaaagacaaacatcttgctagccattgatctagcctgccaagaaaggcatgccatattgccgtgccgtcagttatttgctgctaagaagaaaaagaaatgggagaaaagggaaaaagatgagcgagtgatctactttgaatgaaagagaacttatgggaataaaaatagcgagcttatgtatatacaataacttgattctatatattactgccagagacagccatttctttt

SEQ ID NO: 4238 - DNA, 765 bp, Oryza sativa
  ref <308>: DATABASE ACCESSION NUMBER: AK061664
  ref <309>: DATABASE ENTRY DATE: 2001-12-06
agggcgctcttctgccgggactgcgacgagcccatccacgtcccggggacgctctccggcaaccaccagcgctacctcaccaccggcatccgcgtcgggttcagctccgtctgtagcgccaacgccgaccacctcccgccgccagcgcccaaggggaactccaagccgccggcaagcggcatcgctgctgctgctgctcccaagccggccgtgtccgcggcggcgcaggaggtgccgtcgtcaccgttcttgccgccgtcgggctgggccgtcgaggatctcctgcagctctccgactacgagtccagcgacaagaagggctctcctattgggttcaaggatctggagtggctcgatgacatcgacctgttccatgtccagtcgccggccaagggaggcagcacggcggcggaggtgcctgagctcttcgcctcgccgcagccagcgagcaacatggggctctacaaggcgagcggtgcacgccaaagcaagaagccacgggtggagatacccgatgacgacgaggacttcttcatcgttcctgatcttggatgagatgttgttatgtaacagtaatgctatgcaagtgatgtaattttgtatgtatgcaaagaacactgccatctcggttgtactaagtgtgctaagtacatcttactgtgggcgtatgtaattgtaagacaatttgggcccaatacttatcagcatggtgttgggcatgaactatgatgtactatgacatgacgaaagtttgcttgcagcgtg

SEQ ID NO: 4239 - DNA, 1259 bp, Oryza sativa
  ref <308>: DATABASE ACCESSION NUMBER: AK061665
  ref <309>: DATABASE ENTRY DATE: 2001-12-06
aacaatcaatattttctgaccttgagaaagtatgcccaccccactgcatacttgcaacaaacacatctaccatcgatttgaatgttgtgggcgagaagacaaattctcaagatagaattataggggcacatttctttagccctgcccatattatgcctttgcttgaaattgtccggacggagaagacatcaccgcaagctattcttgatctcatcacagttgggaaaatgataaagaaagtccctgttgtggttgggaactgcacaggcttcgcagtcaatcgtacatttttcccttacacacagggttctcatcttctagttagtattgggatcgacgttttcagaattgatcgagtaataagcagctttggcatgccaatgggaccttttcaactgcaagatctggctggatatggagtggcattggcagtaaaggatatctatgcggctgcctttggaacaaggaatctggactctaatctggtggatttgatggtacagaatggacggcagggaaagagcaatggtaaaggttattacctttatgagaagggtgggaagccgaagcctgacccaagtgttcaggttgtgattgacgagtacagaagatgtgcaaagacaatgcctggtggaaagcctgttactttatctgatcaagatatattggagatgattttcttcccagttgttaatgaggcatgcagggtcatggatgaaaatgttgtgatccgagcttctgatcttgatattgcttctatccttgggatgggttttcccaagttcaggggtggtcttgtcttttgggctgacactattggagcaccttatatacattcaaagcttagcaagtggactgaaatttatggcgatttcttcaaaccatcatcctatttggaagatagagctaaaagaagcctaccattgagcgcaccaaacgcaacccagcaggcttcgtcgaggtcacgcatgtgagatgctatttcagctgatggcagaataattgcttgatgtgcatcggcaccctagttgaccctcatatctgggacctgaaaaaggaggtcagagcagtgttcaccatgtaatctcttttggatattttggcctttccggttttccgaactgggttgctatggcaatcggagtaataaatgttggcttcggatgccacaaaactgtaactttatggccgatagccttttactccagtgttacattaaaatgtatatggtacagtgtttttttaacttgtagtaaaat

SEQ ID NO: 4240 - DNA, 362 bp, Oryza sativa
  ref <308>: DATABASE ACCESSION NUMBER: AK061666
  ref <309>: DATABASE ENTRY DATE: 2001-12-06
agcgaagcaattctgtctggtcagttcaagcctggtgacaccataatggtggacactgatgccacggggaaaccttgcttgagccgactgaatgatcagaccgtccaattatccgatccgacaccaacactttgaaggttcaaacaccctatgtatattcgtgatttactcatttattcttccacaccgataagcaagcttcttgtgcatgcataggttccatagttcatgtacatagcctccacatgctggaatttctccatgcatataatgtaaatttgaatctaacatcaactgtacatatcattgaatttcaaaaggtacttgaaccatttacatgattagatggtccaatacgcatc

SEQ ID NO: 4241 - DNA, 1458 bp, Oryza sativa
  ref <308>: DATABASE ACCESSION NUMBER: AK061667
  ref <309>: DATABASE ENTRY DATE: 2001-12-06
accctccaaagctggagtcctagctaggcagacggcagcaagcctgtcccgcgcgccctcgagctgtgatcctcacgcaacacgcgcacggcgtaggtagcgcggctagccctgcacgcgtgggcatggacgtggaggcgaccaaggacgtggtccacgagcaggcggcggcgccggggcgcggcagggcggcgcgatggctcctcgtggcgctcaactgcgggatgctggtggtgggcaccacgggcgggccgatccctagccggctctacttcagcaagggcggccacaggaagtggctctcggcgtggctcgagaccgccgggtggccgctgctgctggtgcccgtgtcggcgtcctaccacagccgccgcgcgcgcgaccgcggcgcgccgctgttcctcacgccgcggcgcgtgctgctggcgggcgcggtgctcggcgtcctcaccggcgccgacgacttcgtctacgcctacggcctcgcctacctgccggtgtccacctccgccatcctcatctccacgcagctcgcgttcaccgtcttcttcgcgtgcctcatcgtgcggcagcggctcaccgcggcgacgctgaacgccgtggcgctgctcactatcggcgccgtcgtgctgggcctccacgcgtccaaggaccgacccgccggggtgaccaccgggaagtactggatgggcttcttcctcaccctcggcgccgccgcgctgtacgggctcatcctgccgctcgtcgagctcgcgtacaagcacgccgcgggcggcggccgcgccgtcacgtacgcgctggtgatggagatgcagctggtcatgggcttcttcgccaccgcgttctgtaccgtcggtgtgatcgtcaacaaggacttccaggcgatcccgagggaggcgaagcagtacgagctgggtgaagcgcggtactacgtggtgctggtgttcaacgccgtcctgtgggagttcttcttcgtgggcgccgtcggcgtcatcttctgcgtgcacacgctgctcgccgggatcatcatcgccgtgttcatcccgatcacggaggtgctgggcgtcatcttcctccacgagaagttcagcagcgagaagggcgtggcgctcgtgctctcgctctggggcctcgcctcctactcctacggcgagtacgccgacgccaaggccaagaagaaagcggctttggaagctgaagaagcctcatgaatccgtgtgtatatattgcttactttgcttttgttgtgccagtggccacggatttattagtttttataggccataaagtgagctgcatctgcagcagttcaactgctcgtggagcaaaatagcagactgtgtgcacattgcactatttgtgtactgtatgtgatcgaggctgtttttgtgggtcggcgaaaacaagctacttcactgtatctgtaatgactgagtacggtgcaatgtttgttcttgt

SEQ ID NO: 4242 - DNA, 1971 bp, Oryza sativa
  ref <308>: DATABASE ACCESSION NUMBER: AK061668
  ref <309>: DATABASE ENTRY DATE: 2001-12-06
gctgcctcgattgattgattgattccttggagaagaagaaggaggaggaggagatcgagcagccgctgacgctcgtcgtctacctcccgatctgatccgaggagcgaagcgaacaggggcaagatgcattcgacgaatctgctgctggaggagcccatcaggatggcatccatcctggagccatccaagccgagctttttcccggcgatgaccaagatcgtggggacgctgggtcccaagtcgcgcgccgtcgacaccatctcctcctgcctcaaggccggcatgtcggttgccaggttcgatttctcgtggggagacgctgagtaccaccaggaaaccctcgaaaacctcaagctcgccatcaagtccaccaagaagctctgtgctgtcatgctcgacactgtcggcccggagttgcaggtggtgaacaagagtgaggctgcaatctcccttgaagcgaatggcactgttgttctcacccctgaccaggggcaggaggcctcctccgaattgctgcccatcaacttctccgggcttgctaaggctctgaaaccaggtgctacaatttttgtggggcaatacttgttcactggcagtgagactacttcagtttggttagaggtttctgaagttaaaggagatgatgtggtttgtgtgataaaaaattcggctactctggctggttcactgttcaccctgcattgttctcagattcatatcgacttacctacactgtctgatgaggacaaggaggttatcagaagatggggagctccaaacaagattgacttcctctctctgtcttatacaagacacgcggaagatgtgcgacaggcacgtgagttcctctcaaagttaggcgaccttagccaaactcagatttttgccaaaattgagaatgttgagggtttgaatcattttgatgaaatcctgcaagaggcggatggtatcattctgtcaagaggaaaccttggaattgatcttccacctgaaaaggtgtttttgtttcaaaagtctgctctgcacaagtgcaacatggctggaaagcctgctgttgttactcgtgttgtggacagtatgactgacaacctcaggcctactcgtgcggaggctactgatgtggcaaatgctgtacttgacgggagtgatgccattctccttggtgctgagactctccgtggtctgtacccagttgagactatctcaattgtgggcaaaatttgcgctgaggcagagaaggtattcaaccaagatttatacttcaagcggactgtgaaatatgttggggagcccatgacccacttggagtctatcgcttcttctgcggtgcgagctgctatcaaagtgaaggcttctgtcattatttgcttcacatcatctggacgcgctgcaagactaattgccaagtacaggcccaccatgcctgttctatctgttgtcattcctcgtctgaaaacaaaccaactgaggtggagtttcactggcgcatttgaagcaagacaatcactcatagttagaggtctctttccgatgcttgctgatcctcgccatccagctgaatcgaccagcgctaccaatgagtcagttttgaaggttgctcttgaccatggcaaagcttccggtgtgatcaagtcgcatgatcgcgttgttgtctgccagaaagtgggtgattcctcggttgtgaagatcattgagctggacgattagacgaccagcttgtgcttgttgatgatactacggcaagtcatggtttgccagattttgactaggccaaaaacgatgcctcttggctatatgtataattcctatataggctttccaatgagcagtttttcctatggtgtaatcataggatttgccttactatttgaaacaactacgttttagttatgtaagttatcagatttcaatgcatcatatcacttcgatgggcaaatggaataatgaaatcggtactgtaccctttggtct

SEQ ID NO: 4243 - DNA, 1242 bp, Oryza sativa
  ref <308>: DATABASE ACCESSION NUMBER: AK104688
  ref <309>: DATABASE ENTRY DATE: 2002-08-28
gtgtttatggggttcttaattacttgaaagcactggtggagaagtcaatgattggagagatcctggagagggagaaggtagggcttgaacagttcacggcaactgatgggtatgactatgagggcgggagcaatgtgttgaagatgctggggtactacagcatgattgggctgctcagggtgcattgccttcttggggattaccatactgggctcaagtgcttggctccaatagatataagccagcagggtgtctacaccactgtgattggaagccacatttccactatttatcactatgggtttgccagcctcatgatgcgcaggtatattgatggtatacgtgaattcaacaaaattctgttgtatatcctgaagtgtaagcaataccaccagaattccccccagtatgaccagctacttaagaagaatgagcagatgtatgcactattggcgatctgcctctcattgtgtccacaggacaagctcatagatgaaaacgttggcactcagctgaaggaaaagtatggggacaaaatgacaaagatgcataggtatgatgatgaggcatatgctatttatgatgaactcttttcctatgcctgccccaagttcattactgcgtcgcctccagttctacgagagccatacacaaactacaaccaggatgcttatcgtcttcagttgaaactatttctttatgaagtgaaacaacaacagttgctctctggtattcgaagctatctcaagttgtattcaacgataacaattggtaaacttgccaaatacatggatgtggatgaggttacactaaggacaattcttatgacatacaagcacaaaatgcattcaatcgacagtgacggaaaggtcatatccagtgcagactttgacttctatattgatgaggacattattcatgttgttgaatccaagttaaccaagaaccatggtgattactttttgagacagattttgaagtttgaggagatgattacgcagctggataaagtacaatttgactgaacctgctatcatcagggctgaagctctcctttgagttacagtgggacgcgctgttggtgatggatagtaatgataaatttttgtgccatccttttttgatacattgttgacatgagttaaatcctcgctaaaaagtactctaggtgctaactatcgcatccacttgtcatggcatgttctggtttgaagaatgccaactttaaattgttcttgtctt

SEQ ID NO: 4244 - DNA, 1415 bp, Oryza sativa
  ref <308>: DATABASE ACCESSION NUMBER: AK104689
  ref <309>: DATABASE ENTRY DATE: 2002-08-28
ccctttctatcctccacctcggcttatctcctcccccctccccaccaccaccaccaccaccatggccacagccgcttccctctccgccaccgcctcctccctcctcgcccccgcccccgccaccaccggcgccgcggcggcgcagtgctgctcctcctcgtccaccgcgctgttccccacccccgtcccgtcgctgcgcgcctactacccgcgcctgctcctcgcgttccgccgccccgccgtcgccgccgtcgcagacccgcagggcgccgtgctcgaggaggagcagggggagcagcaggacgaggggcaggagcagtacgacgacgacgactacgacgacgggtacgagggcggacgcggccccgcgttcacgccccccacccgcccgcgcaccggcaaggccgcccttccgctcaagcgcgaccgcacgaggtcgaagcgattcctggagatacagaagctgagggagagcaagaaggagcacgacgtgcccacggccatctcgctggtgaagcagatggccagcgcccgattcgtcgagtccgctgaggcgcacttccgcatgaacctcgaccccaagtacaacgaccagcagctccgcgccacggttaatttgcccaaggggacgggccagtcggtgaagattgcggtcctcacacaaggtgagaagatagatcaagcaagagctgcaggagctgatattgtcggtggagatgacctgattgaccaaataaaaggaggatttatggaatttgacaagctgattgcatcacctgatatgatgcctaaggtcgccggattgggaaagattctaggaccgagaggacttatgcctaaccccaaagctgggactgtttctccaaacataactcaggctatcgaagagttcaagaaaggtaaagttgaatacagagttgacaagacagggattgttcacattccctttgggaaggttgattttcctgaagaagaccttattgcaaacttcatggctgttgttcgctctgtcgaaaggaacaaaccatctggtgcaaagggggtatactggaaaacggcatacttatgctcatcaatggggccttcaatcaagttaaacatcaaagaaatgcttgactatggctcagaatcatcagactaaatgccacgaaaagcaccagttaagaaatctggtgtttgctaccaccttcacaaaattaaccatccacccttagcgataaatgaaccgggaaacatggtgggggaaggcaagggaggtgcttaggtacagttttttttcagtctcacctgcatccatccagcagttacacgatgcccaagtcgacgaaggggtgatattgttggccatttgtacttacgagcaaattatttacggacttatagatgtgttttctgagatgtttgttgtaatgatc

SEQ ID NO: 4245 - DNA, 1037 bp, Oryza sativa
  ref <308>: DATABASE ACCESSION NUMBER: AK061669
  ref <309>: DATABASE ENTRY DATE: 2001-12-06
gttggagatttgcattggagcagcaaggggacttcactaccttcataccggttctgcgaaggctattatccaccgtgatgtcaagtctgcaaacatcttgcttgatgagaatctcctagcaaaggttgctgactttgggctatcaaagactgggcctgagttggaccaaactcatgtcagtactgcagtgaagggtagctttgggtatcttgaccctgaatatttccgaaggcagcaactgactgagaagtcagatgtctactccttcggtgttgttttgctcgaggtgctttgcgcaaggccagtgattgaccctacgctcccaagggagatggtgaatttggcagagtgggggatgaaatggcagaagagaggagagctgcatcagatcgtcgatcagcgagtttctggttcaatcaggccggattctctgaggaagtttggcgaaacagtggagaaatgcctggcggactacggtgtggagcggccatccatgggagatgtcctgtggaacttggagtacgtcctgcagctccaggatgcagattcatcgacagtatcagatgtaaacagcatgaacaggattgtcgaactcccgtcgccagtccagaacatcggcgccctcgagagcatcagcgtgacaatggcggaagctggagcttcacatgagcctgatcatgacctctccgacgtttccatgagcagggtgttctctcagctaatcaaagctgagggaaggtgaaagacaaactgggtaatctgtagtgtactttgtagaagtgaggaagccctgaaagttgtttcttatttacttcagagatcatatgtaattgttctttctttttttctttctttccttctttctcatgctccatgttctactgaacgatgttttcaaatttgttatggccttattagccatcgtgagcagatagagcttttcttgttttgaatctattctgctctagaacagcgtgtactgctgccctggcaaaatgctggatctggatgtgtgatgttgttgagtagtttccaat

SEQ ID NO: 4246 - DNA, 1299 bp, Oryza sativa
  ref <308>: DATABASE ACCESSION NUMBER: AK061670
  ref <309>: DATABASE ENTRY DATE: 2001-12-06
gagatacacgcgagaagctggtgtacgtaatcttgagcggaacctagctgcattggcccgtgcagctgcagtcaaggttgcggagcaagatagtgcgcttagacttggcaaggaaatacaaccaattactacaactctactggattctaggcttgctgatggtggtgaagttgaaatggaagttattcctatgggccaggacatatcaaatacttatgagaatccatcacccatgattgttgatgaggctatgctagaaaaagtgcttgggcctccaagatttgatgatagcgaagctgcagatcgtgtggcgagcccaggagtgtcagttgggcttgtttggacttcatttggtggggaggtacaatttgtcgaggctacagcgatggtgggtaagggtgatttgcatctgacagggcaacttggtgacgtaattaaggagtcagcacagttagctctgacatgggtgagagcaagagctgctgaccttaatctgtcacctacttctgatattaacttattggagagtcgtgatattcacatacattttcctgctggcgcggtgccaaaggatggtccttctgctggagtgacattggtaacatcattagtgtcactatttagccaccgaaaagtcagagctgacactgctatgacgggagagatgactcttaggggccttgtgttgccagttggcggtgttaaggataaggtacttgcagcacatagatatggcatcaagagagtaatattgccagaaagaaacatgaaggacttggctgaggttccagcacccattctctctggcttggagattctgcttgtgaagcgcatcgaggaagtacttgaccatgcttttgaaggtggatgccctctgagaccacactccaagctatagcatcaaccaatctgaagatggcgtttgatctggtatactttcctgctggttatgtacctattttggagattcatccataaaacaaggttcagatttccatgaaagagcaactattccacgaggtagaatctcacgccaaacgcaggcttgcagcgctgctgccaatccatctcggttgagcaacattcggaatctgtatacgagttatacaaaacagatgtgagttctgcacttctgtttgtgcctgcgttcccaactgcatatatttatagagggatactgtctgatgtacacgcatctgttgttgatttggctgtatatgtaatctatttagggaaaaatcaatatgtcatatcataccacaagaaggaatcatcaaagagccctcgaggctgttcctc

SEQ ID NO: 4247 - DNA, 1540 bp, Oryza sativa
  ref <308>: DATABASE ACCESSION NUMBER: AK104690
  ref <309>: DATABASE ENTRY DATE: 2002-08-28
agcttgctgctgctgcattcttcttgatctgatcgtcggacatggcgtcgcccatgctctccgccgccaccgtgccactccagggaggcggcttgtcggagttctccggcctgaggagctcgtcgtcgctgccgctgcggcggaatgccacctccgacgacttcatgaacgcggtctccttcaggacccacgcggttggcacgagcggcggggcgcggcgggcgccgacggaggcgaagctgaaggtggcgatcaacgggttcggccgcatcgggcgcaacttcctgcggtgctggcacgggcgcggcgacagctcgcccctcgacgtcatcgccatcaacgacaccggaggcgtgaagcaggcgtcgcacctcctcaagtacgactccacgctcggcatcttcgacgccgacgtcaagcccgtgggcgacaacgccatctccgtcgacggcaaggtgatcaaggtcgtctccgaccgcaacccgtccaacctgccgtggggcgagctcggcatcgacctcgtcatcgagggcaccggtgtgttcgtcgaccgcgacggcgcgggcaagcacatccaggccggcgccaagaaggtgctcatcaccgcccccggcaagggtgacatccccacctacgtcgtcggcgtcaatgccgaccagtacagccccgacgagcccatcatcagcaacgcctcctgcaccaccaactgcctcgcccccttcgtgaagatcctcgaccagaagttcggcatcatcaaggggacgatgaccaccacccactcctacaccggcgaccagaggctgctcgacgcgagccaccgtgacctccggcgcgcgcgtgcggcggcgctgaacatcgtgccgacgtccaccggcgcggccaaggccgtggcgctggtgctcccgaacctcaaggggaagctcaacgggatcgcgctccgggtgccgacgccgaacgtgtccgtggtcgacctcgtggtgcaggtgtccaagaagaccctcgccgaggaggtgaaccaggcgttccgcgacagcgccgccaacgagctcaagggcatcctcgaggtccgcgacgtgccgctcgtgtccgtcgacttcaggtgctccgacgtgtcgtgcaccatcgacgcgccgctcagcatggtcatgggcgacgacatggtgaaggtcatcgcctggtacgacaacgagtggggatactcgcagagggtcgtcgacctcgccgacatcgtcgccaaccagtggaagtgagaacgtagaagctgctgctgctgctgcctttgtaactccacctcgctccaaaaattttccccagacttcttccttcttcctctcgatcctttgtaatgagaatttcgaagtttcgagcgcccaacacagtttcttgtttctttctttgcttttcttccgcacctcatctgacttttcactgtccggcacggattattatcgacttccggcaattggaaatcgcaatgctgtgtaatgttcatgtgtaataccgtatatactaccggacaccggttgccaggttctggtat

SEQ ID NO: 4248 - DNA, 501 bp, Oryza sativa
  ref <308>: DATABASE ACCESSION NUMBER: AK061671
  ref <309>: DATABASE ENTRY DATE: 2001-12-06
aatgctagtgtggacatggagctgcacacgacttacgatccaaatggttcattgtccatatatgatgtcgaccgaagagttgctgagcgaacacaggttcttgctcctcttccggaggataaattcctgtgcagctttagccatatatttgcaggaggctatgcagctggatactacagttacaagtgggctgaagtattgtcagctgatgcattctcagcatttgaagacgttggtttggacaatgagaaggcaattgaggaaactggcagacgattcagagaaacagtccttgcgcttggaggtggaaaatctccactcgaggtgtttgtgtctttccgcggacgggagccatcaccggaagctctgctcaggcacgacggcttgctacctgttgctgcattgtgataactcatgctcgattgtccccttcttttttcttttaacttgcgaaaacggcttgtaagatgttattgattgatggcatatcagcaacacgct

SEQ ID NO: 4249 - DNA, 1326 bp, Oryza sativa
  ref <308>: DATABASE ACCESSION NUMBER: AK104691
  ref <309>: DATABASE ENTRY DATE: 2002-08-28
gcaaaactcacccaaaagagcagcgtcgcctctcctcctcctccctaacccctacgcttccagaaccttctcgaagctcccgctccccccccccttccgctccaatggcgaaggaaccgatgcgcgtgctcgtcaccggcgccgcaggacaaattggatatgctcttgtccccatgattgctaggggtgtgatgttgggtgctgaccagcctgttattctacacatgcttgacattccaccagctactgaatctcttaatggccttaagatggagctggttgatgctgcatttcctcttttgaagggaattgtcgcaacaactgatgttgtggaggcctgcactggtgtgaatgttgcggttatggttggtgggttccccaggaaggagggaatggaaaggaaggatgttatgtcaaaaaatgtctccatctacaaatcccaagcttctgctcttgaggctcatgcagcccctaactgcaaggttctggtagttgccaatccagcaaacaccaacgctctcatcttaaaagaattcgctccatccatccctgagaagaacattacttgcctcacccgtcttgaccacaacagggcacttggccagatctctgaaaaacttaatgtccaagttactgatgtgaagaatgcgatcatctggggcaaccactcatccacccagtaccctgatgttaaccacgccactgtgaagactcccagtggagagaagcctgtcagggaactcgttgctgatgatgagtggttaaatacggaattcatctctaccgtccagcagcgtggtgccgccatcatcaaggcgaggaagcaatccagtgccctatctgctgccagctctgcatgcgatcacattcgtgactgggttcttggcactcctgagggaacatttgtctccatgggtgtgtactctgatggctcgtatggtgtgcctgctggtctgatctactcgttcccagtaacatgcagtggtggcgaatggacgattgttcagggtctcccgatcgacgagttctcaaggaagaagatggacgcgactgcccaggagctgtcggaggagaagacgctcgcttactcatgcctcaactaaaactaagcaatacccagagggacagatagtgagcgattgcccgctcccgtgtttttgaataaaagagacttttaagttccatcacatagaaactgtttatctcagaccgctgcacatcgcgagatgtggagcgcagatgccgttgctggttttactccagtgtgtattgaggctttgtactagctcccttttttttgcctggtgattcgcaggacatttgctg

SEQ ID NO: 4250 - DNA, 759 bp, Oryza sativa
  ref <308>: DATABASE ACCESSION NUMBER: AK061672
  ref <309>: DATABASE ENTRY DATE: 2001-12-06
agttggtaaatgatggaagtcaagagttatatccaggttgcaaaaacgctatttctgttgatggccaggcactaaatgattgtgttgacatccttgttaacactgtattcaatcagcacaccataatacctcgtgcatatggaatgatcagcaagttaggaagtgctcaagctcgatgcatcccatggccacgtgacaatctaatgcatccaagtggtcaagctctacattctaaggtgtcgactattgcgagacataactcagctaaccaaggaaattcggtggcactaactgaggtgttcaagcacaatagcattgataatgcactgcaaagtgttgttggacacaagagaaaggtgcatgatctaacaccaaaggagaatataggacgtgaagatacacattctagggcaaagaagattgggaaggccagacccgattctccatatgctaacttcaccaatagccaactgttaacaacttcccggttctagctcaagtccaaatgcatggacaggttttggtgtaatccattctcaggttgtgtttttcctcattgcaaatacatgcgagcctcacaggatgacaggggcaagccactcagtagatcaatgatgtttattgtcttgtaaatcataaatataccattgattgtgatagcatatcttacaaacttaattaccattgagatgatttgtgaaccacttaatgtgcgattgaattggaattgggaattattcttctatattgtttttggag

SEQ ID NO: 4251 - DNA, 1583 bp, Oryza sativa
  ref <308>: DATABASE ACCESSION NUMBER: AK061673
  ref <309>: DATABASE ENTRY DATE: 2001-12-06
aattgatggtgctaccttatctgctcaatctaagcaaattacttcaactggtcacagagaggtatcttcatcagatcgatctgcatctcttacacatgtgattgtgaaccaagcagtggccatggttccgtcgcaggaattgcaaccaaaggttgatggcttaaccgatacctcttccctgggcaatggcaatgcgatattgtctgagcgaaataaacaaacatcccagcatcaaaatccattttctatgccagcttcccatggaaaggacacaggggcagggcttgctgcacaaactttcccaactaaggatgctattgtttcaaatggtgttgtacctagtagcagggatccaatttccagtgagaaggtgtgtggcttgcaaaaatccatcaagcaagatgacaaaacggtgaaagaacttcctataagtgagaacaatatagtatcaggacttgaacgagtcaacgccagaaaacagactagctctgaagtttccatgaaggtagctgcagctgattcgtgcaatagcaacacacctaaaagggtggatttgaagtcaaagaaacttgtgagatatccagtcatgagcatgtggcttgggcccagacaagttatgctaggttcactaaaggtacaaaagaaaaagaaatgcaatagaactagaagacggtctgtagtttgtgaggacatggccaatgccacttgttcaggtaacaacacaagcgagcagcaggcatcaacatcaacaacaacgtcgtctgaaactgtgcaatgtactcccagagggcggaaacgtgcctatgatagtgacagtcctaaaaataataaccagaagcaaaacaagcaagacgttattggagccgatactggtagtggtgaacttaacatggataagagaaatgttattagtgaaaccgctgctagtgctgagcttccgaagctgggtccaggctcttctgcaaatcaggaacattcaaggaacaatgttcatgcaaaattgggagttccccggcattttactgttctgacaagggacttggctgaagttactgttccatgctgggatgatgttgctgtgtcaaatgctgaggcaagagagtcaaaacattcagaaagcaagagcattggatatgtgttagatgaatgggacgaggagtatgaccgtggaaagaccaagaaaatcagaaattcaaaggaagactacggtggaccaaaccccttccaggaggaggccaactacatctcacagagaaacatgaaacagaggacctatcaacccaaatcctggaagaaacatgcccatgttagaagatgacaatgacgattgacgatgcccatgttgtagtagcagtgtagcgcccatttttgaagaattcatttgttgttcgttttgccgtgttacatcttagcattccggacaaacagctgctgggactggacatgcattcaactgttgttttcgccatgtcgtatttaaacagctggaacctctgtattcaattgtattggattgttgtagcgagaacgagttggttaatactactgtcgttccaaataatcttgtactgtaattaaaaaac

SEQ ID NO: 4252 - DNA, 1375 bp, Oryza sativa
  ref <308>: DATABASE ACCESSION NUMBER: AK104692
  ref <309>: DATABASE ENTRY DATE: 2002-08-28
aaaacccttgcgccgccgccggcaaaccattgcgccgccgccgccatggtccaccacctccggaggcatatgatttctctcctcctccggccagcgtatcctcatcccaccgccgcaatctctcccctctcctccctccgccgcctcctcctcttctccaccaccgccgcgcccgtctcccccgaacccttcgccgtcgaggactacctcgtcgccacctggggcctcaccggagcccaagcgcgcaaggcctcgaagaagctctcccacctcaggtccccctccaagcccgacgccgtcctcgccttcctctccgacctcggcctcccgccccgcaagatcgccgccgtcgccaccgcagacccgcgcttcctctgcgccgacgtggagagcaacctcgccaggcgcgtcgacgagctcggcggcctgggactctcccgctcccagatcgcgcgcctcgtcccgctcgccctcacctgcttccggtccagctccgtcggcacgaatctagggttctggctccagatcgtgggctcgttcgacaagatcctcaaggccctcaggatgaactcctcgctactcggctccgacctcgagaaggtggtgaagccgaacctggaattgctaaagcaatgtgggatgagtgattttgccactagtttccccttgtacaccagcaggctcttcaccgcgaaccctatctatctccgggacgccgtggcacgggtggaggagttaggcctggaccgcagctcgaggatgttccggcatgggctcatcgcggtggctttcacgagcaaggagtccgttgcgaggaagatacaggtgatggaggagcttgggttttcgcgggatgaattgttgatgatcatcaggaaggcaccgcagttggtggcctcatcggaggaaaagatacggcaagccgctgaattcttgaagagggatgttggtttggagggacggtacattgcgcataggccagtgttgtttttgtacagccttgagcggcgattgttgcctcagcatcacttgctcaaggttctcaggatgaagggattgctggattgtgagttggattactacaacacagccgcgatgagtgagaggaagtttgtgcggaagtttgtggatccttacaagtgccacattccaggcctcgctgatgcttatacgtccagttgtgccggggaaacagcaaatggagttgcttcactgcttggtgtgtagacagaaatggattatgcgctacagtttgtggagaattcggctcaattactgcggaagaatgcaagatattacggtttgtcccctgttacttcattttgtaatgtctaatgttgactcttctggtgaaaaagcatgtaggttgtttggt

SEQ ID NO: 4253 - DNA, 575 bp, Oryza sativa
  ref <308>: DATABASE ACCESSION NUMBER: AK061674
  ref <309>: DATABASE ENTRY DATE: 2001-12-06
tggattgtctgtctctatgctgttctttgtctcggcactttgaggaattttacctaatggccagctatcagacattatccttttatataaggtgtgttccgtacccttggtataaattattttaaaagctaatcttgtttagcgtatgtgtttctgtgctttagatgacacgccaaagggtggatgttggagttgaaaagggatctatgtttggttagttcatgggaagtccgtgttatttatcaatagtggttccctcattggatttgctgtcattcaatatctacaagttaaggtttggagttgaagctcgactggaccaaagatcatgcattggaaaaaattaaccttttgtttggatttcttcatgtgcacacttcatctgtccaacaatacttatctgcttcttctccaacaattagaagtatatatatggcttgtggagtagctaatttcggaaccatgcttggagttccttccctgacttcttttgttagtctttgttagttaatgcttttcagacattggttttatatatgtcccttgttgattcaatgcagacatggcatttgaag

SEQ ID NO: 4254 - DNA, 772 bp, Oryza sativa
  ref <308>: DATABASE ACCESSION NUMBER: AK061675
  ref <309>: DATABASE ENTRY DATE: 2001-12-06
atcaagtcattatcttcagggatggggtcagtgagagccagtttacccaggtgctgaacattgagctggatcaaataattgaggcatgcaagtttcttgacgaaaactggtctccaaagtttacactgattgttgcacagaagaatcatcataccaaattttttgtgcctggatctcaaaataacgttcctcctggtactgttgtggacaacgcagtctgtcatccaaggaacaatgacttctacatgtgtgcgcacgctggaatgattggaactacaaggcctacacattatcatatccttcatgatgagataggcttctctgctgacgatcttcaggagttggtccactccctttcctatgtctaccagaggagcactacagccatatcagtcgttgcacccatttgctacgcgcatctcgctgctgctcaggtcagccagttcatcaagttcgacgagatgtcggagacgtcgtcgagccatggtggccatacctcggcgggcagcgctccggtgcccgagctgcctcgcctgcataacaaagtcaggagctccatgttcttctgctgagcagccgcttggctgctatgttatggcctgaacttgtggatgttttggtagtcttgtttatgtcgtgtttgtttaagtaccagctggggggtggatgttattaggctggatgccgcacttctgaacctgttaggataactactgaacctgtccatcttaatcgcagcttgttccatgctctgctttgctgcccttaaaac

SEQ ID NO: 4255 - DNA, 1021 bp, Oryza sativa
  ref <308>: DATABASE ACCESSION NUMBER: AK061676
  ref <309>: DATABASE ENTRY DATE: 2001-12-06
ccaaggacgtaccaccagggctgccaccggtgcgtgaaattgagcatcagatcaacttgttggcaacaaagatagaaaggaattgaattttgaacctggagatttggtttggttgcgtttgcgaaaagaatggtttcctaatttgagaaaatctaaatggatgcctagagctgatggaccttttaaagtattagcaaagattaatgagaatgcatataagcttgatttgcctgtagattttggggttagtcccacatttcacattgcaaatttgaaaccgtatttgggagaagaagatgagcttaagtcgaggacgactccaatgcaagaaggggaggatgatgaggacatcaacaccatcgatacatccacgtccccacaagtacaacttcatgatcctattacccgcgctcgtgcacgtcaactcaactatcaggtgagttcattcttggattcatgttcttcttgtttataccccggagatgcgtgcactcttgttttactcaggaacgatggggaggatccaaacggggagaggattcgcgcggggtggattcggactgcaggatagcgccaacatctgacggccggcacgacttcatgcgaactccgatttgggcgtgcaagtacttcatggaaagcttatcaagtctactttcaaatggatccattcccatgtccatatctgatctggagcagctgcaatcatcattttactgtcgagtacttttctgtccacgatgttgcgtcacctcatttgggcccaatgtgctgtatatcaagttgggcccattaggggtgcgtcctagggttagagcacgacaccaacacccctgtggtcgttctccccctcttcttatacctttagccgccgccaagaacacttgggctttgtttagatcaaagtatagcgtcgctacttggccgagttaatcccatgaccagttagatccccggatttcttgttgctgaactccacttgtgctacttctgttgatctgatccatcatctttgattcgc

SEQ ID NO: 4256 - DNA, 1219 bp, Oryza sativa
  ref <308>: DATABASE ACCESSION NUMBER: AK104693
  ref <309>: DATABASE ENTRY DATE: 2002-08-28
aactattccttctcccacctctcccctctcctcgctcctccacgcgccgccgccgccgcagcggagcagccacagcaggcgagcgacatgggagggtttgtcaagacccagaagaccaatgcctaccacaagcgtttccaagtcaagttcaagagacggaggcagggcaagactgactacagggccaggattaggctcaccaaccaagataagaacaagtacaacacaccgaagtaccgcttcgttgtgagatttacaaacaaagatatcacagctcaaattgtctatgctaccattgctggtgatatcgtgatggctgctgcctactcccatgagctgcctcgctatggtcttgaagttggtctcaccaactatgcggcagcttattgcactggcttgcttttggctcgccgtgtgctcaagctccgtggtttggaccaggagtacgagggcaatattgaggccactggggaggactactatgttgaaccagctgatgaaaggcggcctttccgtgctctcttggatgttggcctcattaggacaaccactggaaaccgtgtctttggtgccctcaagggagctttggatggtggtcttgacattcctcacagtgacaagaggtttgctgggttcaagaaggacgagaagcagcttgattctgatattcaccgcaagtacatctacggtgggcacgtggctgactacatgaggtctatggcggaggaggaacctgagaaattccaagcccacttcagtgagtacctcaagaagggaattgatgctgatggcatggaagcactgtacaagaaggtccatgctgccatccgtgctgatcctaccatggccaaatcaaccaagaaggaaccggcgacccacaagagatacaacctcaagaagctaacctacgaacagaggaaggccagtcttgtcgaaagattgaatgctctcaactcctctgctggtgctgatgatgatgacgaggaagaggatgatgagtgaaagagtttagccttatcacagtagttccatctttatgctgccaaacaaactccatatggcatttaagttcacctgtatagtcttgcaagttgcaacaggcatttttgtttatgttctgaactccgctcaaagaacctatttctttcggtttttggttctcaacctggagctatcggttatcttatttatgtgagaagctgccgtttggatattgatc

SEQ ID NO: 4257 - DNA, 1184 bp, Oryza sativa
  ref <308>: DATABASE ACCESSION NUMBER: AK061677
  ref <309>: DATABASE ENTRY DATE: 2001-12-06
ttcagggacatctggccttccactgaagagattgctgaggttgttaaatcaagtgtgctacctgacatgtttaagagcacatacgaggcaataaccaaaggaaatcctatgtggaatgagctgtctgtatcagcaagcactctctacccatgggacccgacatctacttacatccatgagcctccttatttcaaggatatgacaatgtcccctcctggcccacggcctgtgaaggatgcttactgtctcctgaactttggtgacagtatcacaactgatcacatctcacctgccggaagtattcaccctgacagccctgctgctagatatctgaaggagcgtggtgttgaaaggaaggacttcaactcatatggcagtcggcgaggaaatgatgagatcatggctaggggaacttttgccaacattcgccttgtgaacaagttcttgaagggtgaggttggcccaaaaaccatccatattccatcaggggagaagctctctgttttcgacgctgctacgaaatacaagaatgaaggacatgacactattatcctggctggtgctgagtacggtagtggaagctctcgggattgggctgcgaagggtccaatgctacagggagtcaaggctgtgattgctaagagctttgaaaggattcaccgcagcaaccttgctggtatgggtatcattcctctatgcttcaagtcaggggaggacgccgacacccttggattgactggccatgagcgtttcacggttcacctcccggccaatgtaagtgagatcaagcctgggcaagatgttactgtgacgactgataatgggaagtccttcacttgcacacttcgatttgacactgaggtggagcttgcatactacgacaatggtggcattttaccgtatgtcatcagaaagatcgccgagcagtaggatgaacgctcaagaagattgcgatgaggcgaatcgtaattgttgtaaacagcttgattagcgcaacccctttttaggaatacctttcaaataaccttctgagatatccgcgaagaactcagaaattttgtgagctactacacttgcagttgtacgctgccacgggaaatgcggcgctaaatgacgctatgtgaacattaacattttcacttaaacacacgttgctaataattttccggcatttgcaactgacg

SEQ ID NO: 4258 - DNA, 945 bp, Oryza sativa
  ref <308>: DATABASE ACCESSION NUMBER: AK061678
  ref <309>: DATABASE ENTRY DATE: 2001-12-06
acaaaaaattttctcctcctctttctcttctctctgtgtcactgcgtgtgaggagcgtagcttagagtgagaaaataatggcgttggagacgtgcttcagagcctgggcgactctgcacgccccacagccaccgtcctccggcggcagtagggacagactcctcctctccggcgccggcagcagccagtccaagccaaggttgtccgtcgcctcgccgtcaccgctccgacctgcctcccgcttcgcctgccagtgcagcaacgtcgtcgacgaagtggtagtggcggacgagaagaactgggacagcatggtgctggggagcgaggcgccggtgctggtggagttctgggcaccgtggtgcggaccgtgcaggatgatcgcgccggtgatcgacgagctggccaaggagtacgtcggcaagatcaagtgctgcaaggtgaacacggacgactcaccaaacatcgccaccaactacggcatccggagcatccccaccgtcctcatgttcaagaacggcgagaagaaggagagcgtcatcggcgccgtccccaagaccaccctcgccaccatcatcgacaagtacgtcagcagctgattgcatcatcatcgtcgtcttcttcctcttcttcttcagctgcatcaatcaaatcagacttgatcgatcagagcttcgtttgtaagttgtaactaagctaccccctgctttgcctctctatgtgtatcgccagccacccctttctcttcatcgtccttaattgttgtaatcctactactccatggaatcaatactgtaactattattgattgatgataccatcttttgactagcaaagaggaatcaaactgtgctacatatacatatatgatggccacatctgtttgaactttgattgtatatgcttcaaggcatcaagcggtaatcagggcaattcaattccgtttct

SEQ ID NO: 4259 - DNA, 978 bp, Oryza sativa
  ref <308>: DATABASE ACCESSION NUMBER: AK061679
  ref <309>: DATABASE ENTRY DATE: 2001-12-06
ctcgcctcggcatcttctactgctcgccatcgcactccacctcgggtgaaagccggcgccttttggatcacccctctcctccgatcgaccgggtctctgctgaggtctccacgccgccgacaggtagcgcgagctagagagatggccgagacagtgttcactccctcgttggagggtatgaagcatgttaagtcagagagcagtgtcatactcaccaagccctttcttgatgtctgcaagcaaatcttgcctgttttggataaatttggagctgctatggcacttgtgaagagtgacattggtggtaatatcacgaggctggaaaataaatattcttcagacccatcaaaatatgagcaattgtacagcatggttcaggaagaggctcaaaacaagactgcaaaaggttcgtcaagctgcacaaatggacttctgtggctcacgagggctatggacttccttgttgaattattccgtaacctgcttgagcatcaagactggactatgagtcaagcttgtactgattcatataccaaaactctgaagaaatggcatggttggcttgccagttctagttttacagtggcaatgaagcttgctcctaatagagagaaatttatggaggtcattagtggaacgggtgacataaaagctgatatcgagaaattctgcacgaccttttacccttttctcaaagagaatcatgattttctggccagtgttggacttgatgatctgaaggcttcttaatgcattcctatgcaacaattacccacagaataaacctgtcttacctgtctaatgaaatttagtgctgccgagggtatgctgttttccacctatctttggaaaactatagggcaataatgaatgtcgtgagctcagaacgattgggcaagcccatgggcagctatacacaatgtatgtgttgctttatgcaaaaaggtcaactgttgaaaagcattcccgtgctagagg

SEQ ID NO: 4260 - DNA, 1575 bp, Oryza sativa
  ref <308>: DATABASE ACCESSION NUMBER: AK104694
  ref <309>: DATABASE ENTRY DATE: 2002-08-28
aaagaacccggaaagggaggaaagcatggccggagcagcagccgcctccgccgccgccgccgccgtggcgtccgggatctcggcccggccggtggccccgaggccctctccctcgcgcgcgcgcgccccacggtccgtcgtgcgggcggccatctccgtcgagaagggggagaaggcgtacacggtggagaagtccgaggagatcttcaacgccgccaaggagttgatgcctgggggtgttaattcaccagttcgtgccttcaaatcagttggtgggcagcccattgtgtttgattctgtgaagggttctcgtatgtgggatgtggatggaaatgaatatatcgattatgttggttcctggggtcctgcgatcatcggtcatgcagatgatacggtgaatgcagcattgattgaaactctaaagaaaggaactagctttggcgctccatgtgtgttggagaatgtgttggctgagatggtcatctctgctgtaccaagtatcgaaatggtccgttttgtcaattcagggacagaagcctgcatgggagcgctgcgccttgtgcgtgcattcactgggagagagaagattctcaagtttgaaggttgttaccatggccatgcagattccttccttgttaaagctggcagtggtgttgccacccttggcctcccagactcccctggagtccccaagggagccacatctgagactctaacggcaccatacaatgatgtcgaggcagtgaaaaaactgtttgaggagaacaaagggcagattgctgctgtcttccttgagcccgttgttggcaatgctggcttcattcctccacagcccggttttctgaatgctctccgtgacttgacgaaacaagacggtgcacttttggtctttgatgaagtgatgacgggtttccgtttagcttatggtggggctcaagaatacttcgggatcacccctgatgtgtcaacattggggaaaatcatcggtggcggtcttccagttggcgcttatggtggacgtaaggacatcatggagatggttgctccagcagggccaatgtaccaggcaggaaccctcagtggaaaccctctagctatgactgctggaatccacacactcaagcgtctgatggagcctggaacctacgattacttggacaagatcactggtgatcttgttcgcggggtattggacgcgggtgcgaaaactggacatgagatgtgtggaggacacatcagggggatgttcgggttcttcttcaccgctggcccagttcacaactttggtgacgcgaagaagagtgacaccgccaagtttgggaggttctaccggggcatgcttgaagaaggtgtgtacctagctccatcccagtttgaggcaggtttcaccagcttggcacacacctcccaggacatcgaaaaaaccgtggaggcagctgcgaaagttcttcgccggatatagagtcttcgacagttgagcttagctacggcttgtgaatcacttgctatttttcatttgtgttgtacactgttagttctacatcactcaaaatctgtattgtgcagcagcggtac

SEQ ID NO: 4261 - DNA, 1600 bp, Oryza sativa
  ref <308>: DATABASE ACCESSION NUMBER: AK104695
  ref <309>: DATABASE ENTRY DATE: 2002-08-28
ctctctctctctcttcccacgcgcggccaaaattagccaaatcgactcctcgaatcatccgaatcgaatcgcccacttctcctctcgatccgtcctccaaaccctagaagcgaagcagcgagacgccgccattagggttagggtttgctcctcctcctcttccctctacacgaggcggcgctggcgtccatggcgcacggcggcggcgggagggcgaaggtgacgccgaacctggcgatggacgaggaggggacgcgggtgctcaacatcaccgtgctccagcgcctcgaccccgccgtcgaggacatcctcatcaccgccggccacgtcacgctctacgacttcgacaccaacctcaaccagtggagccggaaggatgtggaggggtcgctcttcgttgtcaagaggaatgcgcagcccagattccagtttgttgtcatgaatcgtcgtaatacagataatttagttgaagatctcctgggagattttgaatatcagcttcaggttccctatataatgtatcgcaatgctgcacaagaagttattggcatttggttttataattcccaggaatgcgaagaagttgcaaatctttttagcaggatattgaatgcattctccaaagcaactccgaagccaaaggctccctctattaaaagtgaatttgaagagctggaagcagcacctactttggttgaaggtccactagagcctcaaacatcgaatatcataccagctactacccatgtccaggaggatccgttatctgcattcttcagtggagctataaatgttggcagtgcctctggtttatcagttgcaggacagttaaatcaatcttttggatctactcctttatcttcacatgcaccaacaagtatcagtatatctcagcctccagctgtgcaccatttgctcccttctcaaacttcatcagtaatatcccctgatgttcatggtggaactggtgctgtggtcaacaggtcagcaagccttctaaatccatcacttttttcaccattgacatcttctcagacaacaatggcccgcaccaatcctgtggcacctactgctccacctcaacatcctcgcatcactcagcaaccacacagtgctcccttgcttcaaccctttccgttacctacagcatcgccttctccaccatatgggactccgttacttcaaccatttccgccaccaaatccatccccatctcttgcatcagcaccggtgtacagcccagtactgtccagagaaaaagtcagggatgcattacttaggcttgttgagaatgatgatttcatcgatttagtctaccgggagattgtgaaaggatagaattaacatttcaagacagccttccttccaacaggcttggtttatgtttgactagggacttctatcatctttcgtcagctattcaagttgcaggacatgctactgtatatttgttggtgtaagtccataggtgcaccatcctccattggcggagtttgtatttaagtaccattttcatatctgtaaagacgaactgaatctatctgcacgttggaatattatgtgttgtatatccttggtgcagaaaagttttgctccatac

SEQ ID NO: 4262 - DNA, 594 bp, Oryza sativa
  ref <308>: DATABASE ACCESSION NUMBER: AK061680
  ref <309>: DATABASE ENTRY DATE: 2001-12-06
atgctgcgcagggttgagccatatgttgcatatgggtacccaaacctgaagagtgtcagggaattgatctacaagaggggttacggaaagctcaacaagcagaggattcctcttcagaacaacaaagtcattgaggagggcttggggaagcatgacatcatctgcattgaggatcttgtccacgagatcatgactgtcggtccacacttcaaggaggccaacaacttcctgtggcccttcaagttgaaggcaccactcggtggcctcaagaagaagaggaaccactatgtcgagggtggtgatgccggcaaccgtgaggactacatcaacgagctcatccggaggatgaactaggcttttcttctgttactggggagaatgtctccttatctatgtatgcaacatggttatttttatctttaggctgtcttgagctggatactggatatgcaattttggcgttccaacaggaggtagacttggcctgtgtttacagtgagacttccggtgggaaatctgtacccgttggccctggggtttgttcctgtctggatgcttttgtttcttgatatgttcgctagttgtgcttgcttt

SEQ ID NO: 4263 - DNA, 1973 bp, Oryza sativa
  ref <308>: DATABASE ACCESSION NUMBER: AK061681
  ref <309>: DATABASE ENTRY DATE: 2001-12-06
aaaagtctaaccctagatccaggccccgcgtctccggcgatctcccggccatggcgactcgccgggccctctcctccctcgtccgcgccgcctccaggctccgcggggcctcgcccgccccgcgcccgcgcgggccgctccaccgaccgtcgccatcggggtacctcttcaaccgcgccgccgcgtacgccacggccgccgcggcgaaggaggcggcgcctcccgcgcccgcgacggggaaggccacgggtggaggtaagatcaccgacgagttcaccggcgccggcgccgtcgggcaggtgtgccaggtcatcggcgccgtcgtcgacgtgcggtttgacgaggggctgcctcccatcctcacggcgctcgaggtgctcgaccacaacatccgcctcgtgctcgaggtggcgcagcaccttggcgagaacatggtgcgcaccatcgctatggacgggactgaggggcttgtccgcggtcagcgcgtcctcaacaccggctccccaatcactgttcctgttggcagggccacgcttggacgtatcatgaatgttattggtgagccaattgatgagaagggtgacataacaacgaaccacttccttcccatccatcgtgaggcgcctgcttttgttgagcaagccacagaacagcaaattcttgttactggaattaaggttgtggatctgcttgcgccctaccaaagaggtggaaagatcggtctttttggtggtgcaggagtcggcaaaactgtccttattatggagttgatcaacaatgttgctaaggcccatggtggtttctctgtgtttgctggtgttggtgaacgtacccgtgaaggtaatgatctttacagggaaatgattgaaagtggtgtcatcaagctaggtgacaaacagagtgaaagcaagtgtgctcttgtctacgggcaaatgaatgagcccccgggtgctcgtgctcgtgttgggttgaccggtttgactgttgcggaacatttccgtgatgccgaaggacaagatgtgcttttgttcattgacaacattttccgtttcactcaggcgaactctgaggtgtctgctcttcttggacgtattccatctgctgtgggatatcaaccaactcttgctactgatcttggaggacttcaagagcgaattacaactacaaagaagggttccattacatctgtccaagctatttatgtgcctgctgatgacttgacggatcctgctcctgctactacttttgcacatcttgatgctactactgtgttgtcacgacagatctctgagcttggtatttaccctgctgtcgatcctctggactccacgtccagaatgctctccccccatgttttgggtgaggatcactacaacactgctcgtggtgtccaaaaggttcttcagaactacaagaatcttcaggatattattgcaattttgggtatggacgagctcagtgaagatgacaagttgaccgtcgctcgcgcaaggaagatccagcgtttcttgagccagcccttccatgtggctgaagttttcacgggtgctcctgggaagtacgtggagctgaaggagagcgtcaacagtttccagggtgttttggatgggaaatatgatgaccttcccgagcagtcattctatatggtgggaggcattgaggaagtcattgctaaagctgagaagatcgccaaggagtcggcttcataagatctcttcattgttaagttctgtacaagttaaatttttggattctggtttctatatgcccgttctgtagccaggacgtgattacaagcaggggtgacatcttctgatgagcgatgtttttttgtcttccttttctccttttacccctaataaggaaccgcagtgacattgtattgtgctgcacaagagtactcggaacttcgaaagcatgtgtcctttataatgcagatccatgaagcataggatcattgagttcttgttttt

SEQ ID NO: 4264 - DNA, 1324 bp, Oryza sativa
  ref <308>: DATABASE ACCESSION NUMBER: AK061682
  ref <309>: DATABASE ENTRY DATE: 2001-12-06
gactccggactcctccgccgccgcgtcccccgtctctctcgacgacgcctcgactgacgagaggaggagacctctccctcccataaaagggggaggacgggggcgaggaagaggaggaggcttgtgctgcttcgtcttttcccgccgccgcgcaccgacgcctgaaccaactgtctcgccgtgaaccctcgccggagttggtagaggaggagatggccaaggacggaggagggcccgactggaacggcctgctcaagtggagcctcgcccatggcgacggcaccgccaagccgcgctcgctcagtgaggaggacaagaaatggtttatggaggcaatgcaagctaatacaatggatgttgttaagaggatgaaggagatcacccaagtgatgaaaactccagatgatgtactacagtctcaaggtgtgactccagagaacatcgaagatatgttggatgagttacaggagcatgttgaatccattgacatggcaaatgctctaattcgtcataaccagccaggagttgctgcattccgcctgggaaatggctactctgcactgagagacgctcttggttctgatgatgctagacttcagaggaaagctctccatctcctacagtacctactgcacgacaacaaggctgataggagtgttgctacagagcttggtcttccaaagctgatgatgcacctggcatcgagtgatgattctggagtccgggaggctgccttaggtggtcttctcgagctggcgcgggacaatacatccggtgctggaaacgtgctacctgaccaagacaagctgaaagatgtccttaagagccgaatcgaaggcatcagcacaatggatgccgacgatctctccgcacatcgtgaggagcgacagcttgtggactccctctggaaggagtgttacaacgagccgtcgtctctcagggagaagggtcttgttgtgcttcctggagaggatgcacctcaacagccaccaccggatgtcgttggcagcatgtttgagccgccgcttcgcgcttgggcagcatcaaggccacctcccaaagaagattcagagtctgagagcgccaagaaggatccaccattgctgctaggccctggaccgtcttcctagacttgttgggattgcttagtttttcgcttatgcaattctctagacttaaccttaaaaagatcctacatatttgcaatctgctgaaattctctgcattttaatcctgtcctgagctcttggatgtattgaggtttttggatatctgtaatctgtgatgctattaaaatacgaagatgaaagatacttatctcttc

SEQ ID NO: 4265 - DNA, 1704 bp, Oryza sativa
  ref <308>: DATABASE ACCESSION NUMBER: AK061683
  ref <309>: DATABASE ENTRY DATE: 2001-12-06
ccacatacctgggaataggatcataccgtgagtggtccgaggaacgccgtcaggactggctcttgtctgaactcaatgggaagcgcccattgtttggcccagaccttcccaagaccgatgagattgctgacgttctagacacgttccgcgtgatagctgagcttcccgctgacaattttggggcctatatcatttccatggcgacagctccgtcagacgtgcttgctgttgagctcctccaacgtgaatgccatgtgaagacaccacttagagttgtcccactgtttgagaagttggctgatcttgaatctgccccagcagcagtggccagactgttctccatagattggtacagagaaaggataaatggcaaacaggaggtcatgattggctattcggactcgggtaaggacgccggtcgtctctcggcagcttggcagctgtacaagtctcaggaggagctcatcaacgttgccaaggagtttggggtgaagttgacaatgttccatgggcgcggtgggactgtcggaagaggcggaggtcccactcatcttgccatcttgtctcagccaccagacacaatccatggatctctccgggtcactgtccagggtgaagtcattgagcagtcctttggtgaggagcacctttgcttcaggacactgcagcgtttcacggctgccactctggagcatggcatgcatccaccaattgcgccgaaaccagaatggcgtgctctgcttgatgagatggctgtggtggctacaaaggaataccggtccatcgtcttccaggaaccacgctttgtcgagtatttccgccttgcaacaccagagatggagtatggaaggatgaatataggaagcaggccatccaagagaaagccgagtggtggcatcgagtcactccgtgccatcccatggatcttcgcgtggacgcaaactcgcttccaccttcctgtctggcttggcttcggttctgccttcaagcacatcctggagaaggacatcaggaacctccacatgctccaggagatgtacaatgagtggccgttcttcagagtcacgatcgatctggttgagatggttttcgccaagggtgaccctggcatcgccgcattgtacgacaagctccttgtctccgaggagctatggcctctgggagagaaactgagggccaactgtgaagaaaccaaacagcttctccttcaggttgctggacaaggatcttctcgaaggtgatctctacctgaagcagcgccttcgcctccgcaatgcctacatcaccaccctgaatgtctgccaggcttacacgatgaagcgaatccgcgacccggactaccttgtcacgctgcgcccccacatgtccaaggagatcatggactggtctaagccggctgcggagctggtgaagctgaacccgaccagtgagtatgcgccggggctggaggacaccctcatcctgaccatgaagggaattgctgctggaatgcagaacaccggctaagcgaactatcaactatgaagtgcctgaattcacaccgttttatatggactcttatcttgatttcggtcatttgctctcggccatttaattttgccgatgcagaggctcgtgcagtttctaatttctttcggaagatattttcaataatggagttgtacaagaacatcaattaatcaaaataaagtggatattatgttc

SEQ ID NO: 4266 - DNA, 1615 bp, Oryza sativa
  ref <308>: DATABASE ACCESSION NUMBER: AK061684
  ref <309>: DATABASE ENTRY DATE: 2001-12-06
tttgaactttctgattcagccaggaaacttaacatttcgtgcttccaagatagtaaaaaagcaaacactggtatgctcgattcttttgagccacaagcctggacaaattctagatgctccaatggtagtccagaatgggatgccaataagattaattctaatttattcactgatggtcctttacttgggagcaaggagtccttagcttatcttgatcatctagctgctagtgcaaaattagcacattctccactctccttgtccccgcttagccctaaatttatgaacagaactaaggctacaggagctcaatgccgtacaatgagagatattgaacatcattttctagattcaagggaaaaagggggacccgatggaattagaatgctgagtgtgctagaagaaactaacatattacatgatgaatacaatgtcatgacccctaaaagaagttcatgcagaagatatcaaatctggggtcctgaatccacccctacttctccccgggttggttatggtcggagtttgagtctcccagtacgacggtcactagttggctcctttgaggagtcccttctatctggccggctttcttatggaaaagacaatcagataattgatggattcttagctgttctaaatattactggtggaaacttctctcctccaactcagaagctgccgttcgcagtaacaagcattgacgaggatagctccttattgtactattcttctattgatcttgctgggaggtcgtcagcaactaactgtagaagcccaaaactcgaaagaagcttaagcaataatgattcacgatcagccaaaagtcgcttacggatccctgttaagggcaggatacagctggtcgtgagcaaccctgagaagactccacttcatactttcttctgcagctatgacttgacagacatgccttcagggaccaaggctcatctgatggatcagaggagaaagacgcaaatgcaaaacgttgttcgttggacagtaacatgatggaatcaaataaacataactctcctgtgaataagaaaaataacaccgattctgatgattgttgctgtcagatggacaatttaggtggcaagaattattgctgtgcatcttctaggattaatgatagctcgggtggaggtgtgattcgctatgctctgcacctgcgctttctatgcccttcctccaagaaatcctcaaaatcgatgctacgatgcaaatccgatccatcatcggtgccatatgatagtaatgccgcgaaagaggacgatcgcagattctacctttataatgatcttagagttgtatttcctcaaaggcactcagatgcagatgaaggcgagctgcgtgtggaacatgacttccctgctgatcccaagtacttcgacataagcaattgacacctctgcttctcctccttgtgcatgcagctaagctctcatgtcatttgtgtacatagcatgcgctttcttgcgcacaaaaaaaaaatgtaaatatctttttaatccttcttaacttgtcatcactcatcagcccccgatgtatttatcagtcgcaaccaactgtacagtttcagtcttcaaataaaatgcaacttttagttccc

SEQ ID NO: 4267 - DNA, 1821 bp, Oryza sativa
  ref <308>: DATABASE ACCESSION NUMBER: AK104696
  ref <309>: DATABASE ENTRY DATE: 2002-08-28
cacatctttccatatccatatccacccatatcacatctctgatcaatccttctgcgtgttcgtgaattgggaaattaatttggttttgagacaaatggaggcgacgtcgtcgtcgtcgtcgttgttgaacgggctgaactccggcgtggtgctgagcctgatcgcggtgctgtggacggtggtgtggcagaatctgcagcggctgcagctgcagacgctggtggggcggcacatgaaccggcacgcgcggcggctggcggcgctcgtcgacccgtacctgtcggtcaccatccacgagtacgagggcggcaggatgaagcggagcgcggcgtacgaggaggtcaaggcctacctcagcgcgtcgtcggcgcgcgacgtgcgccacctccgcgccgagggcgccaaggacgccgacaagctcgtcctcagcatggtcgacggcgaggaggtctccgacgtcgtcgccgccgacgacagcaccgacgtcaccgtctggtggtgcgcgtactccacgccgccgccgcgcaccgatggaggcgggtactacggctggggcggcggcggccgcgcgcaggagaatcgccggtactaccgcctcttcttcctcgaccgccaccgcgagctcgtcatcaacacctacctcccgagcatccgccgccagggccgcgccgtcatggtgcagaaccggcagcggaagctcttcaccaacatctccacgcacaactggagcgacgtcgacggcctcgtccggtcggcgtggagccacgtcgtgttcgagcaccccaagacgttcgacacgctcgccatggacccggccaagaagaaggagatcatggacgacctcgacatgttcaagaacggcaaggactactacgcccgcgtcgggaaggcgtggaagcgcggctacctcctgcacggcccgccgggcaccggcaaatccgccatgatcgccgccatggccaactacctcgactacgacatctacgacatcgagctcacctccgtccactccaacaccgacctccgcaagctcttcatcgagacgacgagcaagtccatcatcgtcatcgaggacatcgactgctcgctcgacctcaccggcgcgcgcaagaagaagaaggaggcggccgacgacgacgacggcggcagcaaggacggcggcgcgccgcccaagccggacatgaagaaggacgcaagcagcaaggtcaccctctccggcctcctcaacttcatcgacggcctctggtcggcgtgcggcggcgagcggctcatcgtgttcaccaccaaccacgtcaagaagctggacccggcgctgatccggcgaggccggatggacaagcacatcgagatgtcctactgctgcttcgaggccttcaagttcttggccaagacatacctcgacgtcgactcccaccgcctgttcgccgccgtcgacgagctcctgtcggaggtggacatgacgccggcggacgtcgccgagaacctgacgcccaagagcttggacgacaatgccgacacgtgcctcgcagcattagtgaaggagctcgagaaggccaaggagaataaatcaaaaggaaaaaatgctcatggcgaagacaaagacgaagacgaagacgaagaagatgacgatgtagaagtggtcgggaaggataagtagctagccgccattggcgccttgctggagtggttgctagcttctcgttttttctagtccacgtagcttatgatcacagtaatagactaagtttttttaagaaaattattttcattgtggaataatttgaccacatgttgtgctaaataatttgactcgattttctt

SEQ ID NO: 4268 - DNA, 1359 bp, Oryza sativa
  ref <308>: DATABASE ACCESSION NUMBER: AK061685
  ref <309>: DATABASE ENTRY DATE: 2001-12-06
actcactcacacacactcaagccagctccagccacacgagcctagttcaggtagatacaatggcgtccaccgcctctttcatgctcgccgtcttgctggcggtggccgtcgcggcggcgccggcgagggcggtgcgatgcccgccgagcgacaagcaggcgctgatgagagtgaagcagtcgctgggaaacccggcgacgctgtcgacgtggtccctggcgtcggcggactgctgcgagtgggaccacgtccggtgcgacgaggccgggcgcgtgaacaacgtcttcatcgacggcgccaacgacgtccgcggccagatcccgtccgccgtggcggggctgacggcgctcatgtcgctgtcgctgttccgcctcccgggcctctccggccccatcccggcgtgcctcaccgcgctctccaacctccagttcctcaccatctcccacaccaacgtctccggcgtcatcccggactcgctcgcgcggatccgcagcctcgactccgtcgacctctcccacaacagcctgaccggccccatcccgaactccttctccgacctcccgaacctccggtcgcttgacctccgcagcaacaagctgacgggttgcatcccggcggggctcgtgcaggggcagttcaggtcgctgatcctctcctacaaccagctcaccggcccgatcccgcgcgacgacgcgcaggacgagatcaacaccgtcgacctctcgcacaaccgcctcaccggcgacgcctccttcctcttcgccgccggccggcccatcggcaaggtggacctctcgtggaacgacctcgacttcgacctcagcaagctcgtcttcccgccggagctcacctacctggacctcagccacaaccgcatcaggggcaccgtgccacgctccctcgccgcgctctccacgctgcagacgctggacctcagctacaaccgcctctgcggcccgctcccgaggctgcacggcgtcatccgccacggctgcaagccgtacgagcacaaccagtgcgccggcggcgccccgctcggcgggtgccaccaatcgtgagcatccatccatccatcaccgccggcgagctgatgctgccacgtaaggtggagcccggggtgcgtaacggtatacgtgtttggtgttttttcgcgtacggggacgtggccgtgtagtacacggtacgacgggtgcagccgtgcagggtactgggcgggtttacgttagtacaaattgtaaccaaggtagagtgcctgcacgcgtgcgtggtcgactctccttcagattgtacgaaacgagggagccgtgtgtacgtgtgcgtacgtgtaccgtgtatggagtacgatgatgatgatgatgc

SEQ ID NO: 4269 - DNA, 1366 bp, Oryza sativa
  ref <308>: DATABASE ACCESSION NUMBER: AK061686
  ref <309>: DATABASE ENTRY DATE: 2001-12-06
aaaagagaaatcgatcgatccgattccggccggccatggcagctgctgctccggcgacggcggcggtgcggcgcatgaagctgggctcgcagggtctggaggtctcggcgcaggggctgggatgcatgggcatgtccgccttctacggcccgcccaagccggagcccgacatggtggcgctcatccaccacgccgtcgccgccggcgtcaccctcctcgacacctccgacatctacggcccccacaccaacgagctcctcctcggcaaggcgctgcagggcggcgtgcgtgataaggttgagctggccaccaagttcggcatcgcgttcgaagacggcaagcgggacgtccgcggggacccggcgtacgtgcgcgcggcgtgcgagggcagcctccggcggctcggcgtcgacagcatcgacctttactaccagcaccgtgtcgacaagaaggtgcccatcgaggtcacgattggcgaactcaagaaactagttgaagaaggaaagataaaatatattgggttatctgaagcatctgcatcaactatcagaagggctcatgctgtacaccctatcactgctgttcagcttgagtggtcattatggtctagagacgtggaagaagatataattccaacttgcagagaacttggaattggaatagtagcttatagcccacttggtagagggttcttttctgctggagctaaactagtggagtctctatcagatcaggattttcgcaagcatattcctagatttcaacaagagaatcttgagaagaatgctgaaatatttgagcgtgttaacgcaatggcagccagaaaaggatgcacaccgtcacagctcgcattggcctgggtccatcatcagggaagcgatgtatgccccatacctgggacaacaaaaatcgagaatttaaaccaaaacattggagcactatctgtgaagctcacacctgaggaaatggctgaactcgagtcttacgcaagcacagatgatgttcgaggcgaccggtatcctcaggcgatggccaacactacttggcaaaattctgagacccctcccttgtcatcttggaaagctcagtaattgttttcatctgttcaaatacaaagtcctggtccaaaatagctgaatggcagagcgcacacaagattttgtagaacgtattcatcagtcgctggacgctgcttgctcctgttatacatcacgtatatttggaatgagatgtcctgtctgtctgtattgtgttatgttctatgctttcgtcatgtttgtgcctacaacctacttgtgtgaagtgcggttctataagcctgtgcactgcacgcagtacgtgtgctaataataaaataatgttttgc

SEQ ID NO: 4270 - DNA, 1323 bp, Oryza sativa
  ref <308>: DATABASE ACCESSION NUMBER: AK061687
  ref <309>: DATABASE ENTRY DATE: 2001-12-06
caccgccacctggaccggccatgacatctgcggcaacacgacctacctcggtttctactgtgcagcattgcctgggcgtactaagaagcccacggtcactgtggtgatctttaacggttatggcctgcgtgcaccgaagctggaaggatttattgaccatctccccgatcttgcacttttccatgctgcctccaacgacttcggtggtgacatcccctacctcacaggcctcgcctacaactacaagatcaatgtcgacagcaatctccaaatacaggatgattttagtcgtgacatggtcgggtcgcatgtaacaattaaagttcatggttattgcgttaatttagatctagatatcacatttcacctccggcccggaaaagacgacaagaaaggacgaagcatccccggtgccacagattctaaggcgctcctcctcaactacaatcacctgtccgggccattaccggtgaacatcggtttctccaagttaagctacctggccctcgccaacaacaggctcaccggcgcaatcccgccatcaatcttgcatttgcaagactccctcctcgaggtgctcctcctgaacaaccagctctccggctgcctcccccacgagctcggcatgctcaccaaggccgcagtgttcgacgccggcatgaaccagctcaccgggccgatcccctcctctttctcatgcctcaccagcgtcgagcagctcaacctgggcggcaaccgcctctacggagagatccccgacgcgctctgcaagctcgccgccgtcccagccggccgcctcgccaacctcacgctgtcgagcaactacttcacgtcggtcggaccggcgtgcttgtcgctgatcaaggacggcgtcctcaacgtcaggaacaactgcattccgggcttcgccaaccagcggcggccggcggagtgcgcgtcgttccacagccagccgaaggcgtgcccggcggcgagcgccacccacgtggcgtgccccgccggagctgccaacgctgcggcggcgccggcggacagggtggtcaaggactactccagctacgtgacgtacgccaccctgcacgagtgagcccggcgccacggcacgggcgcacgacgtgcgtgcatgcatgcagtaggggacagctagaagctagcgtctcggggtggtatttgctcttgtattcttgtgttcgtttgttgtgctcgtgagtcgtcattgtggtttgttttctctgcacgtgtggctagctatggctgtcacgtctagatctcacctcctgtactcttgtgtactgtactatgtgaaaatcattggtgattact

SEQ ID NO: 4271 - DNA, 1582 bp, Oryza sativa
  ref <308>: DATABASE ACCESSION NUMBER: AK061688
  ref <309>: DATABASE ENTRY DATE: 2001-12-06
gatatagaggaagggattgaaggttctggatttgatgatgagaaatcactactgatgtctcaaatgagcttagagaaaagatttggtcaatctagtgtttttgtagcctccactctgatggaatatggtggtgttcctcaatccgcaactccagaatctcttctgaaagaggccatacatgttatcagctgtggctatgaagacaaaagtgactggggaactgagattggatggatctatggttctgttacagaagatattctcactggattcaagatgcatgcacgtggctggcggtcaatctactgcatgcctaagcgaccagcattcaaggggtctgccccaattaatctttcggatcgtctgaaccaggtgcttcggtgggctcttggttctgtggaaattctttttagcaggcattgtcccatatggtatgggtacggaggacggcttaagttcctggagagatttgcttacatcaacaccactatttatccactcacatcgattccactcctcttgtactgcatattgccagctatctgtcttctcactgggaagttcatcataccagagattagcaactttgcgagtatttggtttatctctctctttctgtcaatctttgctactggtatccttgagatgaggtggagtggtgttggcatcgatgaatggtggaggaatgagcagttttgggttattggaggtatttccgctcatctatttgcggtcttccagggtctgctgaaggtgcttgctggaattgataccagcttcactgtcacctcaaaggcctctgatgaagaaggcgatttcgctgagctctacatgttcaagtggacaacccttctgatcccaccgaccactattttgatcatcaacctggtcggtgttgttgctggtatctcctacgctatcaacagtggctaccagtcatggggtccgctctttgggaagctcttctttgccttctgggtgattgtccacctgtaccccttccttaagggtctcatgggtcggcagaaccgtacaccgaccattgttgttgtttgggccatcctccttgcatcgatcttctccttgctgtgggttcgtatcgatccattcaccacccgtgtcacaggccctgatacccaaaaatgtggtatcaactgctaggagtgagcaagatagtaggcaaagaatcgccagtttgctatccattctgttgtgtaagttattagtggatgactctatatagtctactgtaagatcttagctgccggaatgcttgttatgtattaaggagtagtaagtggtaccttgctgttcatctgttgataattaagttagtagaactactttgctgaaaaatgcctgacaacattctgctgcacttaatgggaatatgaaatcaatgttgctctgtatgaaagaatttacatgtatataacttgaatcaatttaacaaatacactctgtagccttgtaggcacactgcattgcaggttcctggtagaaaccccaatgagtgtatgcacaatgtatgcataaatatgactgattccttctgaatttttttatacacactttatacagt

SEQ ID NO: 4272 - DNA, 1525 bp, Oryza sativa
  ref <308>: DATABASE ACCESSION NUMBER: AK061689
  ref <309>: DATABASE ENTRY DATE: 2001-12-06
aagtgttcgtcagagttcatcaggaaaggaagtcatgcctaggggaaatttcagtaatgaagttgcttatgctgagataacgtctagagaaggaatcagtcatattggacgagatattttagaacctgcagcaaacaatgctgagactgacacagtttgcattccagaagttggtggccccgtttctgaatctggtttctcctcctcacagagggcatctgaaaggatcatggctgacttggaggctggagagattgctcatgggacttcatccacaactattatgtcaagtgaaagatcagatacttctcaatctagcttaacatctgtgttgcctgctacttcaactgcaccatctacaattggagaatcacttccagatacagtccctagcagagaagatgtccccatatttagtgggacacaaggtgagattggtggaaatacattacatgatgacatgatgagcattttctcaaacgatggtccagcgcgtgttagagattcaagcagcaatgaaatgaggaggagccatagaagggttctgtgggacacattttccagacgtagttcaagaggatatttagattctgataccgatgatctgggattttacagcagatggctagaccttggtgatgaactttttgcggatgagattgaggaggcacggttctttcatcggagacgccatggttcaatcagagtaagccagtattcaagatctcggattagggagcatcggcgtgctgtttttgatagcggtactgaccaaagtaccgttgcttgtcctttggggatccaccaaattggcagatgcacctgtgattccttcttgattgctgaagaatctagtgcccgtgcaagtatatcaagaattgtcatgttaaccgaggcattatttgaggtattggatgaaattcaccggcaacctgcatcactttcgctttccatggtctctgcccaggctccagaatctgtggttaattcattaccatgtaagagctacaaaaagcagacagcccaatgcagtgatgacatggaacagtgtcacatctgcttaactgaatatgaggatggagatcagataagaagcctcccgtgcaaacacgagtttcacttgctgtgtgttgacaagtggctcaaagaagtacacagggtctgcccgttgtgccgtggggacgtgtgcgaaggtgccgcctgaagacctttcaacagcaagcattgtcttcgtctctgctccacgggcccacggcacgcgcgaagcagctgtgttcatccaggcaatcgccgattgccttgcccttgccgaagccgaagaagagagccatacgattctgtttctgcctgctccacgcggtcgattccttgcatttaatttaacgacctgaacgatactataccgagacatgtatataccttttgtagtcgtcgagtgagcctgcctcgctcctctgtatttcagccagcttgtacatatatgtagatccccagttaatcctctgctacctgaagaaatttctcc

SEQ ID NO: 4273 - DNA, 744 bp, Oryza sativa
  ref <308>: DATABASE ACCESSION NUMBER: AK061690
  ref <309>: DATABASE ENTRY DATE: 2001-12-06
atcttctctttctcttctcctcgcgactccgccgctgctcgagagcgcaatggcgtccatggcgttcacactggtgggagcattcaaggggatgtccctctcctccccgtgccattcctcctcctccgcctccttcctccgcgctgaccgtgtctcgctctccgtcggcggcggggtcgggatgggggtgccgatgacgatgccggtgcggcggctgacgatccagatggcgcacaagaagggggccgggagcaccaagaacgggagggactcccccgggcagcgcctcggtgtcaagatttacggcgaccaggtcgccaagcccggcgccatcatcatccgccagcgcggcaccagggtctatcctggaaataatgttggaatgggcaaggatcacaccctcttttctttgatcgatggcctcgtaaagttcgagaaatatggaccagacaagaaaaaggtaagtgtttacccatacgagaaacaacctgagaacccaaacagttacagagcaagaaagagagagtacttccgcatgcagcgtgaacgcaaaaaggcaagagcagagggaattgttgaggtgcaattggtgttggcagctgcagatgaaagtcctgaggtcaatgcagactgctgataagttctctgccccgtttttctccattttcgcaatccatgtttgataacaatgtttggaatgtaaatcatcaactatgagatgaatacaaggcccatcttcaactc

SEQ ID NO: 4274 - DNA, 1012 bp, Oryza sativa
  ref <308>: DATABASE ACCESSION NUMBER: AK104697
  ref <309>: DATABASE ENTRY DATE: 2002-08-28
aaaaggccacttctctcgcgccgtccacacaatgagtccggcagcaactatggccgtccttctccgaccatccacgctcctcccctcctcccaatccacgacgacctcccgactcagattccccgtcgctaccccgcttcctcgctgccgccatggcggcgccggcaagaagagccgcctcctggtcgcaagaagaagggggaggagagaccgggtcgcctgccttcccacgaaggaggaggaggaggaggaggtcggcgtggcgggagacggtggggaggaggatggggacgaggacgggtacctggcgagggagggcgagtggggggtgcggcggatggggcgggtcggcgaggagatgcggcgggtggcgctcgtccaggccgaggccttccacatccccgtcgccctcttcaacgacttcttcttcgattttttcaaagcggaggtgctgtcggcgctcatctacagggtgaggaattcgccgcctgacagatacgcgtgtttagtggcagaagaagtgggtgcaaccagccagatatctgaggcgccattcgagaaaattgttggtgtggtggactgcacagttcagaatgaagctgacatacttaagaacctccaaggcgtcgacgagtacctctatgtgtcaggaattgcggtgttgccatccttcaggaggaggaaggtagggactgcgctgctgaaagcctgcgaggcgctggcgctccagtggaggcacagattcatggcgctgagggcttacaaggacgacgatggagctcgaggcctttactccaaggcggggtacagggtggtggcaaaggatcctggatgggtcacctgggtgggaaggagacggcgtgttctgatgataaaggagctgcctatccatgaacatcatttagaacagcaatgatatgtttctttgctttagccatgcatcgatccctgtaaatgtatcacttttgctgtgagtatcactagtgcatatgtatgcttgtttctttgtggt

SEQ ID NO: 4275 - DNA, 1326 bp, Oryza sativa
  ref <308>: DATABASE ACCESSION NUMBER: AK104698
  ref <309>: DATABASE ENTRY DATE: 2002-08-28
gaaattgacttcgggaactcgtgttgttcttgacatgacaacactgacaatcatgcgcacacttccacgtgaggtggaccctgtggtttacaacatgcttcatgaagaccctggtaatgtcagttactctgctgttggtggtctgtctgatcagattagagagctcagggagtccatcgaattgcccttaatgaaccctgagctctttcttcgtgttgggatcaagccccccaagggtgttctactctatggtccaccaggaactggtaagacactattggcgagggctattgccagtaacatcgatgccaactttttgaagatcgtttcaagtgctataattgacaagtacattggagagagtgcccgcttgattagggaaatgtttggctatgcacgtgatcatcaaccatgcataatcttcatggacgaaatcgatgccattggtgggcggcggttcagtgaaggaactagtgctgatcgcgagatccagcgcacactgatggaactgctaaatcagttagatggatttgatgaacttggaaaggtgaaaatgatcatggctaccaatagacctgatgttctggaccctgcgctactgcgtcctggacgtctagacaggaagattgagattccgctaccaaatgagcaagcaagaatggaagttcttaaaatccatgctgctggtattgccaagcatggagaaattgattatgaggcagttgttaaactggctgagggcttcaatggggctgatcttcgcaacgtctgcactgaagcgggtatggctgcaattcgtgctgaacgggactacgttgtccatgaggacttcatgaaggctgtcaggaagctgaacgacgccaagaagctggaatccagcgcccactacagtgcagacttcggcaaagagtaaggtgcaagattctgatcctgtattcgatcttctaccatgccgggagttctccgccatggtgcaaaagcaacagagaaatcggtttttcaccgtcaggcttctattctgcactgcaagctgaagccatttgtcatgtgtgcaatcaaagagccatgaatggttgtcaagcttatctctgggactggagaaacataccgagaacttgcaaattttataactgatgcttttgcctctgtttcactccgttttttgagtctcaccttgtgtcagtactactgtgtagtcttagtcttgagcagttgcatgtacttttgacaccatgcttggtaaagaatagcaaaatggtatcttgattcagcttccagacccccatctggtgtgggaatgcatctcaattcctgtgaaattcgtgc

SEQ ID NO: 4276 - DNA, 1144 bp, Oryza sativa
  ref <308>: DATABASE ACCESSION NUMBER: AK061691
  ref <309>: DATABASE ENTRY DATE: 2001-12-06
aaagtaaagaaaactaatgttccagttgctgagttggtttatggtgccttggggactacagagttgcagaaggctgtggaaaaagagtatgaaatggctcttcaggacagggtgatggaagagacaaaagataagaagaatgccgtggagtcttatgtttatgacatgcgaaacgagctgtatgacaagtacaatgattttgtgactgctgaagacaaggaagcattcattgctaagcttcaagaggttgaggataggttgtacgaagatggtgaggatgagaccaaaggagtgtatgttgctaagcttgaagaacttaaaaaggtggggggtcccattgaggcaaggtacaaggaatggatggacagaggcccttccatcgaccaacttgcttactgtatcaacagtttcagagatgctgccttgtccaaagatccgaagtttgatcacattgagatggaggagaaacagaaggtgattaaccagtgttccgaagcagaagtctggctgagagagaaaatacagcagcaagatgctctgccgaagcatgctaaccctgtcctactctcttctgatttaaagaaaaaggccgaaacggttgacaggttctgcaaaccgataatgatgaagccgaaaccagctcctaagccacagacgcccccacaaacgccaccgaccgagaccccggctggcggagcccaaacaccagagcagcaacctcagggagctgaagcggctggcgaggccagcgagggcggcgccagcgaatctaccggcgagcaaatggagacggacaaaccggagggaactgaagctgcctaggctgcagctgcggaaacgtttttcagtttcctgcaagttgctgctgctcggtctgcattcgttatcagattccgacaccgaagttcagtagaggttcgctagggatggatttgtgattcaccatacttcgtgaggatcatctgcgtgaacgtacgtttaggtttatatcctactgtaccaatgtgttgttaaaatcggctttccctttttaatttttctgccaaggggttttctttcaattcgagatataagggcacgtttcagatttggtgtcctacggggtgggtgttatagcgggacttacaatggaactcaaattttt

SEQ ID NO: 4277 - DNA, 942 bp, Oryza sativa
  ref <308>: DATABASE ACCESSION NUMBER: AK104699
  ref <309>: DATABASE ENTRY DATE: 2002-08-28
agcgcatctccaaggggaagaagggatccaagaagaagaccgtcgatccctttgctaagaaggactggtatgatatcaaggccccgtcggtgttcaatgtgcggaacatcggcaagaccctcgtgtccaggacacagggtacaaagattgcttctgagggcctaaagcatagagtgtttgaggtctccttagctgatctccagaacgatgaggatcaggcgtacaggaagatcagacttcgtgctgaggatgtgcaagggaagaacgtgctcaccaacttttggggcatgtcgtttactaccgataagctcagatcacttgttaagaagtggcagacactgattgaggctcatgtggatgtcaaaaccacagacggctacatgctgcgtctgttctgtatcggcttcaccaagcggcggcctaaccaggtgaagaggacttgctatgctcaagcgagtcagatcagacagattcgtcgcaagatggttgaaatcatggccaaccaggcttcaagctgtgatttgaaagagctagtttcaaagttcattcctgaagttattgggaaggaaattgagaaggcgacatccagtattttcccccttcagaatgtgtttgtccgcaaagtgaagattctaaaggccccgaaatttgacctggggaagctcatggaggtgcatggtgactatgccaaggaggacatcggtacgaagcttgataggcctgcagaagatgaggccatggccgggcaggaggtcgctgctgccgagtagagattatcacttattttgctgcccgtttatttagacaacaagtaaacagctatctagttgtggatcgtgaacatcctagcctgtgtcaatggcagatattctgaatagtttgttgggattacttgccagctgcatatttgctttctgatgagaaatgaatgtttttgagtct

SEQ ID NO: 4278 - DNA, 1163 bp, Oryza sativa
  ref <308>: DATABASE ACCESSION NUMBER: AK061692
  ref <309>: DATABASE ENTRY DATE: 2001-12-06
aagccaccccaaattcgattcgattcgataagattaagaaggctagcccgatccaagaagagaaggaagaagcgatgtcgtcgtctcggaaccctaatcctcctcccggatcctcctcctcggggaccaattacttccctctccccctccatctgcagcagcaaccgccgcagccgccgccgatggcgatggcgagcacctaccagtaccagcagtaccagcagctgcagcaggcgcagcagctcttccaacgcgacgcgcagaccatcacccccgaggcgctcgagagcgtcaaggccgccctcgccaccagcgacgtcctcgaccccgccaatgccagagccaccgcaacctcctcctccgaccctgccgccaagaagaaagccatcccccgccgcgccgccggccaatcctgggaggatcccaccctcaccgactggcccgacaatgactatcgcttattttgtggagatctgggcaatgaagtcaatgacgacgtcctctcaaaagctttttcacggttcccctccttcaacatggcaagggttgttcgagataagagaactggcaaaacaaaaggatatggatttgtgagcttttcaaaccctactgaccttgctggagcaattaaagaaatgaatgggaagtatgttgggaaccgccctattaaattgcgtaaaagcaattggaaagagaggaccgatgttgatgctctagaaagacagaagaatcacatccagaagaaacctaaaatgcccaagaaaagtatccttcacaagtaaagctatattagccctactaagcgccatccatgtaaacatactttgttgggtgatggggctcaagaaaactactcttactgcaaaggttgtggaccagggagggtgtacatttgactgcagctgtctgttagcagagtggtgcgtcgcttctaagcaatttttcttcttacgacaagctgatgtttacatctgcaggaagtttgttaaagctgaagctagttttgctgatgtttactgagaatgactccctagaatggatggtttgcttaaggtggtaatgatgtgtatttagatatggcatttgcatttaaggatggcattgcaatgtaataaagatgttgttggtattgtagtttatcttataaagtggcatcgcagtac

SEQ ID NO: 4279 - DNA, 1357 bp, Oryza sativa
  ref <308>: DATABASE ACCESSION NUMBER: AK104700
  ref <309>: DATABASE ENTRY DATE: 2002-08-28
ctccagtccaatctcacccatcgccgacgacccacgcacgcagtccaccaacgcgccgccgccgccgaatccgcttcgctccctccgccgcgccgcgcgccacctccgtcgacgctggcccgacgcgcgcggttcgtgaaggaggaggaggaggaggagcttctgccgggtcggaccgtcggtttctctcgttgacctgcaggagggtgcgcagggtttcttcttcgacatgtcttgggctgcaatcgagaatgatcctggcatttttactgaactgttgcaacagatgcaactgaagggtcttcaagttgatgaactctattcactcgatctggatgccctcaatgatcttcagccagtttatgggctcattgtgctgtacaaatggcaacctccagaaaaagatgagcgtcctatcaaggacccaatcccaaaccttttctttgctaagcagataattaacaatgcatgtgccacccaagctatcgtttctgttctattaaactctccgggtatcacccttagtgaggagctcaaaaagctaaaggagtttgcaaaggacttgccaccagatctcaaaggattggctatagtcaattctgagagcatccgtttggccagtaattcatttgcaaggccggaagtccccgaggagcagaaatcatctgtcaaggatgatgatgtctaccatttcattagctatgttcctgtggacggtgtcctgtatgagcttgatgggctaaaggaagggccaataagcctggggaaatgcccaggtggcgttggcgacataggttggctgaggatggtgcagcctgtcattcaggaacgcatcgatcggttctctcagaatgagataaggttcagcgtcatggctatcctaaagaaccggagggagaagttcactttagaactcaaggagcttcagaggaagagggagaacctcctggcacagatgggtgatccttccgccaataggcacgcgccatctgttgagcactctcttgcggaggttgctgctcatattgaggctgtaacagagaagatcataatggaggaagagaagtggaagaagtggaagacagagaacatcaggaggaagcacaactatgtgccattcttgttcaatttcctcaagattcttgaggagaggcagcagttgaagcccctgatagagaaggcgaaacagaagtctcacagctctgctaatcctaggtgaaatcaactgttatttgtctcgattgccgtggtttttgtcaatgtagagatggctgactagccttttgttttcgcggtagtgtttgaaccatgtgatgattattatctttagttatagatattcggtcgaatttagatg

SEQ ID NO: 4280 - DNA, 1306 bp, Oryza sativa
  ref <308>: DATABASE ACCESSION NUMBER: AK061693
  ref <309>: DATABASE ENTRY DATE: 2001-12-06
tcgtaaagaacctgctacaaacgctgagaataatgctgttcctgtcgcagagaacaatgatttgcaagaagcggatgaggcaatcaaaaggctgaatgaattgggcttgggagagaatatcagctctgaggagttccttacatacattgaccggctgaatgaacaacctaaaatcgatacttccattgaactggacgatgcacaggtcactaccctctattttcagcatgcgcgctatcgcgtcagatactataagcacttgtcacaacaacctaatactgagttggtagaggattcttaccacatgaaacttgttggggaagatgaactctccgatgagtttattcgcgagatggaattttttatgcgtttcgaggaagatggcacatttgattggtatttctaccctgattactgctggcttgctgctctgaacgactaccaacgtctagtaccgataaactgtgttggtgaggagtacgcttattgggacgactaccgcggctattttaatagctatcatactgaattgcaatatctcgacttctgcaaggcattgtcgaaggaacttaagtggatggaagactatgtcctgaataaactgccatcttctaagtggggaagaatatgcagcagaggagcctaccaagcaattaagattgccacccgcttttccaagatcactgctgctttggcctataatgcctactatcacatgcgcttttatgttgcttattgcaaggacatggatagcttgtactttgagatttggcagcgggtcaacatgcaaaaaaagagtttcagagattctttggaggaagtctacaacctcaacaagttcccttcacggcaagataaaatgaaggatgcattggagaataactgttcccacatggaaactgtgtttcatgtttgcacggcaagtgttaccagtgaaattgcggaggataaagctctggagctgattgcaaaggcagttgaaagtcggatgaacaaagcaaaattctacgagcagtatatcgaaaagaagatagatattgcccaagctattggattgatttccacggatgggactgaagcaacatgatgtgcttaacttatagtgttttttttttgggagggcttagcttacctttctttttatatcagtatcagtagatgtcgatgccccgccagcgcctgcagaaataaagatcccgaaccaatgtttttttagctgttatgattaattcggtttccaggctccggcccgatcgaaagcattgtaattgataatgttatgtgcgatacatttagcgtacgttgc

SEQ ID NO: 4281 - DNA, 1252 bp, Oryza sativa
  ref <308>: DATABASE ACCESSION NUMBER: AK061694
  ref <309>: DATABASE ENTRY DATE: 2001-12-06
atcgatgtgttgagtggaaaagcaacaagaataagcccagaaaattcagagtactcatggagtgctcttgcagtagatggccacaatgttcttgctgtgtcaagcagtcccatcgacccacctcaaattaagtatggccatcaagtgtcattgaaggatcagacatgtacatgggtctgggacgaagttaataataatccattgatggcagctaacaataaggtaaaggctttgttgcacatcaccaattcagcatactaaaaattccagtcactaacccctctgatgacctctctgatggcagtaagcttccatttgaagctatctttgtgtcctgcaaggacagttcgcacaaaccaactattctagtccttcatggtggcccacactcagtatctgtatcaagctattcgaaaacatcggcgttcctcgcatcacttggatttaacctacttattgtaaattatcgagggacaccgggttttggagaggaggctttgcagtcacttcctggaaaggttggatctcaggatgtccaagactgccttacagctctagactatgtcattgagggaggacttatagacgcatctaaagtagctgtcatcggaatttcgcacggtggattcttgactacacatctgattggtcaggctccagatagatttatggtggcagctgctcgtaatccagtctgcaacctatcactgatgattggcaccactgacattccagattggtgttatgcagtggcctgtgggagtgaagggaggcaacatgcctctgaatctccttcacctgatcatcttcgcctcttctatcagaaatcaccaattgcccatatttcgaaggtgaaagcgcccctgcttatgcttcttggaggagcagatcttcgagtccccatttctaatggcctacagtacgcaagagctctgagagaaagaggcggcgagatcaggatcatgatgttcccagacgacatacatgaaatcaacataccacaatcggattttgagagcttcctcaacattggtgtctggttcaagaagcatcttagcatatcagcatcagatgcatctgcatgaagtcaacttgaagaaggggaggaagaaattacgtggtttaatctagtccaacaggtagatgccattgtaagccttgttcatggagctcgtccgtagacgagtgctccaaaatattagagacttccctattgaaaaaagtaaatggagactttaattggtttgagttc

SEQ ID NO: 4282 - DNA, 636 bp, Oryza sativa
  ref <308>: DATABASE ACCESSION NUMBER: AK061695
  ref <309>: DATABASE ENTRY DATE: 2001-12-06
agatcaagagagcaccaccactcgatcgcagcgagacccaccctcaagctccaagctccaagaaccatggccgccacctcgctgtcgccgccgaccgtggccgggctgcggctggcgccgtcgccgcgcgtgcggtcgccgtctgtggcgttcagggcggcgccggcgaggaggaggtcggtggcggcgagggcggagctgagcccgtcgctggtgatcagcctgagcaccggcgtctccctgttcctggggcggttcgtgttcttcaacttccagcgggagaacgtggcgaagcaggtgccggagcagaacggcaagacgcacttcgacgccggcgacgagcgcgccaaggagttcgccggcctgctccggtccaacgaccccgtcggcttcaacctcgtcgacgtcctcgcctggggctccctcggccacatcgtcgcctactacatcctcgccacctgcagcaacggatacaacccaaacttcttctgatcattctcatcttggatggatgcaatgtaatctgaatggatctctggtgtttctacgtgattatgtatgagatgggtaaaaaagaaaagaaaaaaggttgattaatttggaacagtagtgcaatcgcgtgtgtatattggccgc

SEQ ID NO: 4283 - DNA, 1361 bp, Oryza sativa
  ref <308>: DATABASE ACCESSION NUMBER: AK104701
  ref <309>: DATABASE ENTRY DATE: 2002-08-28
gaaagtagtctcgcctttttcacagcgaatttcccccacccgtccccatcgcagagaggcagagagaatccacactccaaaacccaccgttccccatggagaagggcgacgaaaccctcgcctaccccgccgccgccgccggcggccagaagaccgcgcccatcggatgcttcgccggcgacgacgttgccgccaccaccgacgggcaccccaccaagtcctacgccgccgtcgccgccgagaagaccttgcccaacggcagcgtcgaggaggacgaggtcaccgtcaccgccgccgagaaccccgccaagtcctacgccgccgtcgtcgctgagaagaccagccccaacggcagcgtcgcggaggacgaggtcaccgtcaccgccgccgagaaccgcgccaagtcctacgccgacgtcgccgccgagaagacctaccccaacggcaacgtcgaggaggacgaggtctccgtcaccgcggccgtgaaccccgccaagtcctacgccaccgtcgccgccgagaagaccgtgccggacggcagcgttgcggaggatgaggtcaccgtcaccgccccggtgaaccccgccaagtcctacgccgccgtcgccgccaacgccgagatcgaggacctccgcaccaccaatcacgacctggaggagaagctcgccgctgccgaccgtgagaagaaggggcgtgccacggagatcgacggcctgaaggacacctccgataaggccaagcagaactcggtcgtcttccagtacatcgcctcttcttccgacgcgaaggtgcttgcgctccgcgaggagctcgaggatctgcagaaactcctccaagcagagaaagatgaattcaaggcggacaagcgcgactccaatcagctcgccggcaaggtggggtccgaacgcgcggtgaagatgaggctcgaggaggaggtgattgccatgaaggagagggccagggccagggccgccgctgccgctgccgctgccgctgcggaggacgagagggtggctgctccgacacctgggaccctgcagggagcgcgggtcgcgtggccggtgatggctggagctgcggccgtcggcgccgccgcggcagctgttgccgtggtgatcttcctccgcctcaagaggtaaactggtgatctgatgcacaggaagttttgctctgctgcgacagcctatggaagatttgatgagtttttttgtggtgatgaactgatgatggtagagtgctggatgagaatagtatgactttatgagctagttgcttaatagcctacagaaacatagggatctgaacacttgttatgttccattcctgtttttccttttatcattctaccttcttcggtggtg

SEQ ID NO: 4284 - DNA, 1929 bp, Oryza sativa
  ref <308>: DATABASE ACCESSION NUMBER: AK104702
  ref <309>: DATABASE ENTRY DATE: 2002-08-28
aatctcatctttttcttctcggtgcttctctgctcaaacctgtactttgcttctgccactccatgtctcaatcttcccctttcttctccgttgcccgagcacatgctggagcaggagggcgagctgcggctgccgctctcctgctccgtcaccctgttgctcagctgccacctcggattcatggcctgaggtactacccttcagccattgtgtcacctgccaagacactgaactcacacctgagccttccccatgccacaatatcctcctttgccaatgctgataatggctccagcgggcaagcagatgccacagagtctgaggaggagcagaacggggaatctgaactgtcggagatggccaaggcattccatatatcgccccggatggcaatgtcaatctcagtggtgattgcatttgcagcgctcactgtgccactggcgatgcagtcagtggtcttccatgggacgaacaaaatgaaggcactggcatatctgacactgctttcagggttctacatggcatggaacattggggcaaatgatgtggccaatgccatggggacgtcagtagggtctggtgctttgacactccggcaagcagtgcttactgcggcggtgctagagttctctggtgcattccttatgggcacccatgtcaccagcaccatgcagaagggcatcctagtcgcatctgtcttccaaggaaaggactctctgctcttcgctggattgttgtcatccctcgctgctgctggaacatggttgcaggttgcttcctcctacggctggcctgtttcaactacacattgtattgtcggggccatggttggttttgggatagtatttggaggcgtaaatgcagtgtcctggagctccttggcaagagtatcttcatcatgggtcatttcaccattgatgggtgctgcagtctcatttattgtttacaagggtatacgaaggcttggtgacctactgtcctcagaagcagaaaagatagcatctgctgataaggcaaatgctcagcaagttggatttctttcggacatagctggaccaacaggagctcaattgcagattgtatatggtgtatttggatacatgcaggtcttgtcagcatgcttcatgtcatttgctcatggaggcaatgatgtctccaatgccataggccccctggcggcagctttgtccattcttcaaggtgtagcaagcagtgctgagatagtcatacctactgaagtccttgcttggggaggttttggaattgttgcagggcttacaatgtggggttacagggtcatagcaacaattggcaagaaaatcaccgaactaacaccaactagaggttttgcagcagagtttgcagcagcttctgtagtattgtttgcatcaaaacttggattgccaatatctgctacacatacacttgttggtgcagtgatgggagtgggatttgcaagagggctcaatagggtcagagcagagacagtgcgtgaaattgtggcctcctggttagtcacaattccagttggtgctgtgttatctatcttctacacattgctcttcacaaaggttctggcatactttatgtgagtgattgtgaaatgtaattagtgttttgagaggtgtacagcccattgcacttcataaaaatttccgcaatggcaaagagataggctgactccaaaaagtttcgaccataaaatttttcaggattggccagagtaaataatcatttctttggcaacaaaacacatgattaggtaaaaagcttttacagccagttacaatgttacatactccagcttgttcgtccgtttatctctaatgtactgccttgtatcttttgttttatatcacaaggtggaccataataatttcttgtagagatacaattatacataatagacaacaatggttcttctatcct

SEQ ID NO: 4285 - DNA, 1498 bp, Oryza sativa
  ref <308>: DATABASE ACCESSION NUMBER: AK061696
  ref <309>: DATABASE ENTRY DATE: 2001-12-06
agcactatgattctaaaatgcaggagcttctgaaccaaggtgaaaccgaggagttcttcacatcttatgatgaagttcatgagagttttgatgacatgggtctccaagagaaccttctcagaggcatctatgcctatggtttcgagaagccttcagccattcagcaaagcggtattgtccctttctgcaagggtcttgatgtgattcagcaagctcagtcaggaacaggaaagactgccaccttctgttctggaattttgcagcaacttgactatgctgtggttgagtgccaggccttggtccttgctcctactcgtgagcttgcacagcaaattgagaaagtcatgcgcgcacttggtgactatctgggtgtgaaggttcatgcttgtgttggaggtacttctgttcgtgaggaccaaaggattcttgcaagtggagtgcatgttgttgttggaacacctggtcgtgtgtttgacatgctgcgtaggcagtccctccgtcctgattacatcaagatgtttgtccttgatgaagctgatgaaatgctttctcgtggtttcaaggatcagatttatgatatcttccagctcctcccgtcaaagatccaagttggtgtgttctctgctacaatgccccctgaggcccttgagatcacccgtaaattcatgaacaagcctgtgcggatccttgtgaagagggatgagctcactcttgagggtatcaaacagttttatgtcaatgtggagaaggaagaatggaagcttgacacactctgtgacctgtatgagacactggccatcacgcagagtgtcatctttgtgaacacccgccgcaaggtggactggctcactgataagatgaggggcagggatcacacagtttctgctacccatggtgacatggaccagaacactagggacatcatcatgagggagttccgatctggttcttcccgtgtgctcattaccacggaccttcttgcccgtggtattgatgtccagcaggtgtcccttgtcatcaactatgatctgccgacccaacctgagaactacctgcatcgcattggtcgtagtggtcgttttggtaggaaaggtgttgccattaactttgtgacccgtgacgatgagaggatgctgtttgacatccagaggttctacaatgtggtgattgaggagctgccggccaacgtcgctgaccttctgtgatcaagttcagaagagttatgttaaggggcctgataaggattgtttttgtctgaagtatcactgtcttatctggggggggggggagtgataaaggtgggggttctgttttaaaagtcactgtggtcgtagacaatttccaaatttttatgccatgttatgggaatttttgtagttgctaggctgtgctatgtgctggtgaggagggaggagtcttttacttttattatatctattgttaaaactatgtatgaccgaatgatgttatttatttgtgtcatggttgactatttgcc

SEQ ID NO: 4286 - DNA, 1552 bp, Oryza sativa
  ref <308>: DATABASE ACCESSION NUMBER: AK061697
  ref <309>: DATABASE ENTRY DATE: 2001-12-06
gtatacaagcggtagcaccggattgcctaagggagtaatgatgacccatcggaacgtcctggctacactttcagcagttatgaccattgtgcctgaaattggtaaaaaggatgtatacctggcctacctgccacttgcacacattcttgagttggcagctgaggcactcatagctgctgttggggcttccataggatatggatcacccttgaccctgactgatacatcaaacaaaataaaaaagggaacactgggtgatgcttctgcactcaagccaacactgatgaccgctgtacctgctatacttgatcgtgttcgtgatggtgtgagaaagaaggtggatacaaagggtggtgtagcaaagcagttatttgatgttgcctataatcgtcgacttgccgcagtcaatggaagttggctgggtgcatggggattagagaaactcttgtgggatatgcttgtcttcaaaaaggtgcgagcagttttgggaggaaaaattcgctttgtactttcaggtggagcacctctatcaggagatacccagagatttatcaatatatgccttggggttccaatagggcaagggtatggtcttactgagacatgtgctggaggaacattttctgagtatgatgacccatctgttggtcgcgttggtgctccactaccttgttcgtacattaagctgattgactggtcagaaggtggatacttaacaagtgactccccaatgcctcgaggagagattgtcattggtggtcccaatgtaactaaaggctatttcaagaatgaagctaaaacaaatgaagtctataaggatgacgaaaaaggtatgcgatggttctattctggtgacatcgggcgcttccacccagatggctgccttgaaatcattgaccgtaaaaaggatattgtgaagcttcaacatggtgaatatgtgtctctcgggaaggtggaggctgctctgattgtgagcccatatgtggagaacatcatgatccatgctgatcctttccacagttactgtgttgcacttgtggtagctgcacacaatgagctggaaaactgggcttcgcagcagggagttacatacaccgatttcgtagatttgtgccagaagccagaggctgttaaagaagtgcttggatctctatcaaaggctgcgaagcaagcgcgactggagaagtttgagatcccggccaagatcaagctgatatctgagccatggaccccggagtctggccttgtcactgctgccctcaagctcaagagggaagtgctcaggaagacatatgaggatgatcttgctaaactatacgcctgatgatcaatgctgaattgctgattaagcctactcgacgttttgacacaaccagctaccgtaggacagagctcttgtgagcaaactgaagatgctgataccggcaggaggtagcctgaaattttggagctgtggttgtttgatcttttggagctagcacaattatgtgtagcctcatttcacacttacttctgtgtctctgccatattctcttgtgaatttacattgttc

SEQ ID NO: 4287 - DNA, 1061 bp, Oryza sativa
  ref <308>: DATABASE ACCESSION NUMBER: AK104703
  ref <309>: DATABASE ENTRY DATE: 2002-08-28
acccaagctcccaaacccctctcgcacccaatccaacccaatcccctcctcatccactccgctctgcggccatggccgcctgctgctcctccctcgccaccgccgtctcctcctcctccgccaagcccctcgccggcatcccccccgccgcgccgcactccctctccctcccccgcgctcccgccgccaggcccctccgcctctccgcctcctcatccagatccgcccgggccagcagcttcgtcgcccgcgccggcggtgtggacgatgcgccgctggtcgggaacaaggcgcccgacttcgatgcggaggcagtcttcgaccaggagttcatcaacgtgaagctgtccgactacatcgggaagaagtacgtcattctcttcttctacccgttggacttcaccttcgtctgcccgaccgagattaccgctttcagtgacagatacgatgagttcgagaagttgaacactgagatcctcggtgtttcaattgacagtgtgttctcccatcttgcatgggtgcagacagacaggaaatctggtgggcttggtgatctgaaatacccattgatttcagatgttactaaatcaatttcgaagtcctttggtgtcttgatccctgaccagggaattgctctgagaggacttttcatcattgacaaggagggagtgattcagcactctaccattaacaaccttgccattggacgcagtgtagatgagaccatgaggacccttcaggcgttgcagtacgtccaggacaacccggacgaggtgtgcccggccggatggaagcccggtgacaagtcgatgaagcctgaccccaagggaagcaaggagtacttcgcggccatctaagcacacatatgcatatgcctggtgatggatgtagggagtttttttgctttcgcgagagccattgcgtttcgtctccaaagtgtagtaccgtgtgctcgtctgatcggattttgttacttgttcgccaccagctgttactttgttccctaacaaataaggctttgttttggtcgtgttatacatgtatacatgttagtgcgtttc

SEQ ID NO: 4288 - DNA, 1555 bp, Oryza sativa
  ref <308>: DATABASE ACCESSION NUMBER: AK104704
  ref <309>: DATABASE ENTRY DATE: 2002-08-28
aactactcccctatccaacacctccgagtccgagcaacgcaagatggcgtcgtggtcgtcgcccgtcgccgccgccgccttacaggtccatttcgggtcctcctgcttcttctccgcccgatcgccacgacagaccctcctcctaccacctctcgcccgcaaccctacactgaccatccagccccggccccatcccttccggaacatcaactcctcctcctcctccagctggatgtgccacgccgtcgccgccgaggtcgagggcctcaacatcgccgacgacgtcacccagctcatcggcaagactccaatggtatatctcaacaacatcgtcaagggatgtgttgccaatgtcgctgctaagctcgagattatggagccctgttgcagtgtcaaggacaggataggatacagtatgatttctgatgcggaagagaaaggcttgataactcctggaaggagtgttttggtggaaccaacaagtggaaatacaggcattggtcttgccttcattgctgcttccagaggatataaattaatattgaccatgcctgcatcaatgagcatggagagaagagttctactcaaagcttttggcgctgaacttgtccttactgatgccgcaaaagggatgaagggggctgtagataaggctacagagattttaaataagacacctgatgcctatatgctgcagcagtttgacaaccctgccaacccaaaggtacattatgagactactgggccagaaatctgggaggattctaaagggaaggtggatgtattcattggtggaattggaacaggtggaacaatatctggtgctggccgtttcctgaaagagaaaaatcctggaattaaggttattggtattgagccttctgagagtaacatactctctggtggaaaacctggcccacataagattcaaggcattggggcaggatttgttccaaggaacttggatagtgaagttctcgatgaagtgattgagatatctagtgatgaggctgttgagacagcaaagcaattggctcttcaggaaggattactggttggaatttcatctggggcagcagcagcagctgccattaaagttgcaaaaagaccagaaaatgctggaaagttggtagtggttgtgtttccaagctttggtgagaggtacctttcatctatcctttttcagtcgataagagaagaatgtgagaagttgcaacctgaaccatgagcctaacttcagtgttcacaacatcataattgtttctgagatttctggccattagtttttttttctgagaagtatcataccactccatagctgtttgttcgataaataaaacagttacctttgcacttataatgaggcttgtgagggtactgtgaaatttctctgaacatcttctactcttctcttttatccttaaatcaatctgggagcagtttgtaatacatacgtaaatttaaagctgggtgtttggtaattgtaaacaaatgtttcgaagagccgtgaaacattatcaattagcatgaagcactttaaaagtgctttccggat

SEQ ID NO: 4289 - DNA, 604 bp, Oryza sativa
  ref <308>: DATABASE ACCESSION NUMBER: AK061698
  ref <309>: DATABASE ENTRY DATE: 2001-12-06
aaatgtatccaaacctagatgccgatacatcacccgaggcacttgtagataaggttccaaaacttattaagcagccgatgagaaacctctacattgcgaccaatgagccgttctataactactttgataagctcaggtcatactttcatgtgcacttgcttgatgattacaaggagctttggtcgaatacaagtgagtggtacaatgaaacgacaacgctaagtggtgggaggccagtgccgttcgatgcatatatgagggtgattgtggacacagaggtattctatagagcaaagactcaagttgaaactttcaacaacttgacgagggattgcaaggatggaatcaatacatgcaacttgtgacacatgagttcgtgttgtgataattagcgatgtccatatactcttccttggctggcgcattggaattcagaggaacttcatccagggtttgtcattaggcatatcatcttaatgtatttcctgccgtaccatgttcaattcattacacgttgatctggattatgtgccatccattctttttgtgtaatttatgtattactcttgagaagtttcttgtaacttgttactggccccttcgc

SEQ ID NO: 4290 - DNA, 1345 bp, Oryza sativa
  ref <308>: DATABASE ACCESSION NUMBER: AK061699
  ref <309>: DATABASE ENTRY DATE: 2001-12-06
cagaggaaaatgcccttatggagcttttaagctttatgtacagtggaaagttgacatcaactgaccctactcttctactggatattctgatggctgccgacaagtttgaggttatttcgtgcatgaggtactgcagtcagttgctcacaagcttgactatgactacagaatctgcactactctacctagatcttccatgctccatttcgatggctgctgcagttcaacctctgacagatgcagccaaggaatatctttccaacaaatacaaggatttgactaagttccaagatgaagtgatgaacatccctcttgctggaatcgaagccatcttgtcaagtaatgacctccaggtggcatctgaagatgctatctacgatttcttgatcaggtgggctcgcgcacaataccctaaatcagaggaaaggcgtgagatcttgagttctcgtttgcttccgctcgtgcgattcagtcacatgacctgtaggaagctgcggaaggtcctaatatgcaccgatctggaccatgagcaagcaaccaagtgtgtcactgaggcacttctatataaagctgatgctccacacaggcaacgtgctctcgcagcagacgtaacaacctgtcagaaatttgcagagcgggcttacaagtacagacctttgaaagttgttgagtttgaccgaccctacccacagtgtatagcatacttggatctaaagcgcgaagagtgctcccggctcttcccgtcaggtcggatgtactctcaagccttccatcttgcagggcagggcttcttcctctcagcacactgtaacatggaacagcagagtacgttctactgcttcggtctcttcttagggatgcaagagaagggctcaatgagcgtgacagtagattatgagtttgctgcaaggacaagaccgtcaggagagtttgtgagcaagtacaagggtaactacacgttcaccggtgggaaggcggttggttacaggaatctctttgcgataccatggtcgacgttcatggctgacgacagcctcttcttcctcgacggcgtgttgcatctgagagctgaattgacgataaagcaacccactgtctaatgtactgctgccaaactcaagttggctttgcgctcgagtgggtgatagtgcgaaacatcacatgctgcagatatcgtattgttttttttccccttcttctatgcttaaacccttttgttgatagaaactttgcaaatgacaagtggaaaaaaaaaggactaaaaccggtctcttttactggcattgtggaagaagcttatgctgctccagtcgattgtgaaaaggttaccataccagctgaagat

SEQ ID NO: 4291 - DNA, 528 bp, Oryza sativa
  ref <308>: DATABASE ACCESSION NUMBER: AK061700
  ref <309>: DATABASE ENTRY DATE: 2001-12-06
aaaactggcttcgctggtggtattaattactaccgatgttttgacctgaattgggagctgatggcaccatggacaggtgcaaaagttctagtgccaacaaagtttattgtcggggatggtgacctggcttaccatctcccaggagtcaaaagctacatacacaagggtaggttgaagaaagatgttcctatgcttgaggaagtagtggtaatcaaaggtgctgggcacttcatccagcaggagagagcacaggaaatcagtgatcacatctataactacatcaagaagttcaatacgggtgtttcttctccaaaatcatcgaggttgtgagataatttactgctgtaaagaataatttcaagagaataaaggatgtaatgctttaggctgatggtgtggttcttttgtcatgctgtgtttggctaatgctgcagagcttttgtaatgccaagtttggctatcttggcaaacaatgaaatttcaagggtctgaatgaatttaaaagagcttctaggatgcctataaact

SEQ ID NO: 4292 - DNA, 1753 bp, Oryza sativa
  ref <308>: DATABASE ACCESSION NUMBER: AK104705
  ref <309>: DATABASE ENTRY DATE: 2002-08-28
aatgtgggcaatatagtatatatcgaggtgccacaaataaatggaaggtatccatgcagggacggtgacgatggcctgcagctggcttgttctcacggccgccatggctgtgctagcctcttggttgatccgtttggtttcactaaaatggaacagcagccacccatgcaaagctggtgaaggcagcaggctgccgccagggtcgaggggccttcctcttctcggcgagtcgctcgagttcttcacttcgagcacctctcttgagctgcccgtcttctttaagcgccgtcttaataggtacggtccagttttcaggacgaacatggtcgggcaagacctgatcgtgtgtctcgatccggaggtgaacagcttcgtgttccagcaagaggaaaggctcttccagtgctggtaccctgattcgttcatgcggatcatcggcgccgacaacatcatcacgacgctcgggtcgtcgcacaagtacatcaggaatctgatccttcggttgttcggccctgaaaacctcaggcgtgcgatgctccaggacgtgcacagaacggctcaggccagcctgctctcctggctcgatcgaccgagcatcgaactcaaggatgcagtctcaagcatgatattcagcgtcacagccaagaagttaattagctatgactccttggcctcagatggaaagatgtggaaacaatttgatgctttcattcgaggtctactggcatttccaattggcattcctggcaccgcattctacaaatgtatgcaggggcgaaagaatatcatgaagatgctgaaagaattgattgatgagaggaaggaggcatcagggcgacggggaagcattgacttcattgatgtgctgctcgaggagctgaacgaggagaagcctttaatcagtgagaacgttgcgctggatttgatcttcttgctgctatttgccagcttcgagaccacggcatccgctataaccgcagtggtcagatttctaacggataatcccgaggcattgcaagaattagcagaggagcatgataacattcagaaaagaagggtcgacctgaactctgaaatcacatgggaggaatacaaatctatgaaatttacatctcatgttatacatgaagctttaaggcttgctaacattgctccagtgatgtttagaaaagccacagaggatgttcatataaaaggtttttttatcccaaaaggatctaaaattatgatttgtccttccacggttcacctaaaccctatgatttataaggatccaaatatattcaatccttggagatggaaggatactgctgaaccaaccggtggtgcctccaaggatttcatggcctttggagggggactgcgcttgtgtgttggtgcagatttcgctaagctgcagacggcgatcttcctccactgcttagtcaccaagtatagatggaaagcgatcaagggaggaacaatggtgcttggtccaggactacgattccctgaaggttttcacatccaacttttcccaaaaccttgaagtaccggggccagatacttctagcccctacacaatatatgtagctcagaagcaacgtttgagatctatattgttgatgattggtacttcgatgtaatttccattaattttctgctgttcccattagttcactgctgaatgagctatgcttattcttcactttgccataaatgttgtgtgatgtccaaatatcacaaataaatgtagatatgtttaagtcctctt

SEQ ID NO: 4293 - DNA, 1003 bp, Oryza sativa
  ref <308>: DATABASE ACCESSION NUMBER: AK104706
  ref <309>: DATABASE ENTRY DATE: 2002-08-28
atcctactccctggttagcaatagcaagggtaggaagatgagcacgttagatgccacgcgagcagagctcggccttgttgttctgtacttgaacaaagccgaggccagggacaagatatgcagggcgatccaatacggctcgaagtttatcagtaacgggcagcctggcacggcacaggatgtcgacaggtccaccacccttgctcgcaaagttttccggcttctcaagtgggtcaatgatctgcatggtcttatcagccctcctgctaaggggactcctcttacactggtcttgcttgggaagtccaaaaatgcgctgctctcgactttcttgttcctggaccaatttgtatggttgggaagaacagggatatacaagaacaaggagcgcacagaccggattgtaaggatatccctctactgctggatggcctcttcagtctgtgcagggctagttgagcttggagagcttaagaggctatcaaaatcaatgaggaagctggcgagagagctgagggatactgacaaatatgagaatgaccagtacaagagcaagatgaaacagtcggatgaacggctgctagcactggtgaaggcggccatggatgttgtggtggccgtagggcttcttcagctgtcacccaagaagatcactccaagggtaacaggggcatttggattcgtcacctcactcatttcctgctatcagcaacttccatctcgtgctcccgctatcaaagtgaaggcatgatggatatttgccgttgtagcccaaagggagtccatcactggaatctgcagacgtaattcttaagcatggattgtgagataatctgtctatgataatcagtatagaatactttcagttgtacgtatggtttatggcttcacacaataccctcctgaactgtaatgaacatggtttatgtgttcatgcatgtcttctactttgtactccaacatggctgccaaatttatactcattggagcatgtatgcccact

SEQ ID NO: 4294 - DNA, 1665 bp, Oryza sativa
  ref <308>: DATABASE ACCESSION NUMBER: AK104707
  ref <309>: DATABASE ENTRY DATE: 2002-08-28
catcttcggcacaggttcagcagcttatcagtatgagggcgcctacaaagaagggggcaaaggtcctagcgtctgggacaacttcactcacattccaggtaaaattttaaacaatgataacggcgatgtggcaaatgacttctatcaccgatacaaggaggatgtgagcctcctgaaggacatgaacatggatgctttccggttctccattgcgtggaccaggatcctgccaaatggatccttgagtggaggaataaacaaagaaggggttgctttctacaacagcttgatcaatgatgtcatagcaaaagggatgatcccatttgtcactatcttccactgggacacccccttggctctggaaagcaaatacggaggattcctcagtgaagacatagtgaaagaatacgtggacttcgcggaggtgtgctttcgcgagttcggcgaccgtgtcaagtactggaccacatttaatgagccattcacatatagcgcctacggctacggcaagggcgtgtttgcgccgggacgatgctcttcatatgtttccaagtcatgcggcgtcggtgactccagtcgcgagccctacctcgtggcacaccacatccacctctcccacgctgccgctgtccagctttaccgcaccaagtaccagccaacacagaagggacagatcggcatggtggtggtcacccactggttcgtgccgtacgacaactccgacgctgaccgtggcgctgtgcaacggagcctagacttcatctatgggtggttcatggaccctatcgtgcatggtgactacccaggcaccatgagaggttggctcggcaatcggctgccagagttcacgcctgaacagtcggcgatggtgaagggctcctacgacttcatcggagttaattactacaccacctactacgctaagagtataccgccgcctaactccaacgagctatcctacgacctcgacaaccgcgccaacaccaccggcttccgtaatggcaaacccatcggtccacaggaatttacaccgatcttcttcaactaccctccaggtctccgtgagctcctcctctacaccaagaggagatacaacaacccgaccatctatgttacagaaaacggcatcgatgagggtaacaacagcacactgccagaggcgctcaaggatggacacaggatcgagttccactcaaagcacctgcagttcgtcaaccacgccatcaagaatggggtgaacgtgaagggctacttcacgtggacattcatggactgctttgagtggggtgacggctaccttgacaggttcggcctcatctacgtcgaccgcaagacgctcaagcgctaccgcaagaagtccagctactggatcgaagacttcctcaagaggcactgatccagccccacaaaatttcggattgatcacgagatcgatcggctggccaccagatttgtgtttcgtcagtctagctttcagctggttaatttgtgatttgtgcatcagtggtgatgaccgatatgatggcgtgatgaattatgctgcattactattgaatgtgtacctcagtacctgtgcatcattgctggctgatcccattgagccggacaataataagaagaaacaataatgctccctgtcgagcagtgttgggctggttcaggctt

SEQ ID NO: 4295 - DNA, 759 bp, Oryza sativa
  ref <308>: DATABASE ACCESSION NUMBER: AK061701
  ref <309>: DATABASE ENTRY DATE: 2001-12-06
ggcagtataaactcacgtacctcagaggcctcatgccatggaagtcctgcaaaccagacatttgtttgcaagccaattgcatcgacgttcgctgaaccacaattaattccagaggcgtttactaaagagccctttcaagaaccagcactaccgctttccaggatgctcattgaggattctggaagttccaaagatttgaagaatctcttcacttcagcagttgatcaaccatttttagcacgttcaagcaatttggcgctgatgcaaaattcagggacggtgaccataaaggctagctttaaggaagacattgtcaggttccgcttcccatgttccggtagcgttactgcattgaaagatgaagtagccaaaaggctaaggatggatgttggcatgtttgatatcaagtatctcgacgatgatcatgagtgggtgaagttagcatgcaacgcggacttggaagaatgcatggagatctctggtagccatgtcatcaggctgttggttagcgatgttgcggcacaccttggtagttcctgtggaagctcaggttgataattcaggtcagcattttcgttccatgggtgcatacatgttctgcgaggtcagtctcacctgttgttaatctagttctcttgctagatagcagtagctacttcattgtgtttgattattgtatcaatttttggttcgaatacatgtacttgtgcaaaacggcacttgtagtcaatactgtacatattaagcccttggtgctgg

SEQ ID NO: 4296 - DNA, 1206 bp, Oryza sativa
  ref <308>: DATABASE ACCESSION NUMBER: AK061702
  ref <309>: DATABASE ENTRY DATE: 2001-12-06
ttctcatatgacaaagttttcgatcacggtgcttcacaagaagatgtgtttgtggaaatgtcacaactagttcaaagtgcacttgatgggtacaaggtttgcatatttgcttatggtcaaacagggtctggtaaaacttatacaatgatgggtccaccagggcgtgatcagaaaggcatcatacctcgttctttggagcaaatttttaagacaagtcagtctcttgaatctcaaggatggaagtacagtatgcaggcatcaatgttggaaatatacaatgagacaattcgtgatttgttagcacctggtcggtctaataactttgatctgtctaccagtaaacaatacaccataaagcatgatccacaagggaacacaaccgtcactgaccttactgttgctgatgtttttagtagcgccgacgtaacttctcttctagcgaaagcatcccaaagcaggtctgtgggtaggacccaaatgaatgaacaatcttcccggagccattttgttttcacactgaagatatctggatcaaatgagaacactgggcaacaagtccaaggtgtccttaacttgattgatttagctggcagtgaacgccttgctaaaagtggctccacgggtgatcgtttgaaggaaactcaggcaatcaataaaagcttgtcagctcttagcgatgttatctttgcaattgcgaaaggagacgatcatgtgcccttcaggaactcaaaacttacataccttttgcagccttgccttggaggtgattccaaaacgctgatgtttgtcaacatttctccggaggcatcatccgttggggagacgatttgttcactgaggttcgcttcaagggtaaatgcttgcgagatcggaataccaagacggcacacacaagcccggtccttcgattccaggctgagctatggctgaagttgctgtggccatcatgatgtgatgataatcgatcagcattggggatatcatttggctgaagctgatgaggccgcttgcttcttgtaacttgtacagtaggaaggagagtggcactgcgctagtgcgctgtgagcagaagagaacacgcatgcatcatgtgttttctttctgttgtagctgatttgagcaatattaactgcattgcaatgtattttctggagtaactttgtatgcaaccgtgggttccaaaatggtgtactacttttgcccggc

SEQ ID NO: 4297 - DNA, 1263 bp, Oryza sativa
  ref <308>: DATABASE ACCESSION NUMBER: AK061703
  ref <309>: DATABASE ENTRY DATE: 2001-12-06
caggcgaaaagaacaggagttctttgcttctagtcctgaatattctcatttatcaagcaggatgggttcagaatatcttgccaaacttctttcacagcacttagaggctgtgatcagggcacgtattccaagcattacatctctgatcaacaaaactattgatgaacttgaatctgagatggatcacattggtagacctattgcctctgatgctggggctcaactatacctcgtgttggagctttgccgtgcatttgagaaaatatttagagaacatcttgatggaggacggcctggaggtgatcgaatttatggtgtctttgataaccaactcccctctgctctgcggaagcttccatttgaccgctacctctctctgcaaaatgttaagcgtgttatctcagaagctgatggttatcaacctcatttaattgctcctgagcaagggtaccgccgactgattgaatctgctctcaattattttagagggccagctgaagcttctgtagatgctgtgcattatgttttgaaagagctggtaaggaaatccatcggtgagacccaggaattgaaaaggtttcccactcttcaagcggagcttgcggctgcatgctttcatgccctagagagattccgtgaagatggacgtaaaaccactgtacgactggttgatatggagtcagcatacttgacagtggagttcttccgcaagcttccacaggaagtggacaagactggaactgggaacccttccactccttctgttgatcgttatgctgacgcgcacttcaggaggattgcttccaatgtgtcctcatacattggcatggtatctgatacattgaagaatactatccccaaagctgttgttcattgtcaagtcagggaagctaagcgttccttgcttaactatttctatacccaagtgggcaggaaagatgctaagcagcttgcgcaactccttgatgaggatcctgctcttatggagcgaaggcagcagtgctttaagaggcttgagttatacaagtctgccagggatgagatcgatgctgtgtcatggtcacgttaaaggtaacattctgtttgctttgcaatttgacatgcagaattaatagccagttgatctgcacttctcgtgtcaaacatttgagattgattactaattgttgtgctatatatgagtcttgattgcaatgtgttttcataatatgtatgcagacttttaagcacaagcatgaatgaagtctgtctgtatatttgttt

SEQ ID NO: 4298 - DNA, 1627 bp, Oryza sativa
  ref <308>: DATABASE ACCESSION NUMBER: AK061704
  ref <309>: DATABASE ENTRY DATE: 2001-12-06
aaaactagtgggggtgtgcgaaggtaggctcaagcgttgattctgctcgtttagctagcccgcctctgacgctgcattatggagggagtaggttgtagctagcccgcctctgcacgctatatttcaaggaatcagagatccatacagacagagacgttcagccatcagacctgcagaggcaatccatccatggcatctatcgttcctgtactcctgcgcctgctgctcctgctgctcccgcttcccctgatccgagaccacctctggccgagccaccgccggccaacgccgcaggacgatgcgggtgagctccacccgatcttcctggtgcccggggcgagctgcagcgacctggaggcgcggctcaccgaggcgtaccggccgtcgacggcgcactgcggcgcgatgaaggggaagggatggtttgggctgtgggagaacaacacggagctgctggtccacgactacgcggactgctcactggagcagatgaccctggtctacgaccccgccgccaacgagtaccggaacctgcccggcgtcgagacccgggtgcccaacttcggctccgcatggtcgttcggctacaagaaccctgttaaccgtctacagagagcacaatgccttggaaagctcagagactggctggaagaattgggataccgtgatggggacaccatgttcggagctccctatgattttcgctacgccccgccggtacccggccaaacatccgaggtgtactctcgctacttcagcgagttcatggcgctcgtcgaggcagcgaccaagaagaagcagaagaaggccgtcatcctggggcacagctacggagggatggtcgcgctcgagttcgtcaggagcaccccgcgggcgtggcgggacgcgcacatcgagcgcctcgtcctggtcgcgcctacgctccaagatgggttcgtaggctcggtgatgaagttcatcacggggacgggcataattttcgtcccgacagccacgtccacgaggcccatgtggaggagcttcgagtccgccatggcgagcttcccgtccccggccgtgttcggccgcgagccgctcgtggtcaccaagaggagggactactccgcgtgcgacatggaggatctcctagccgccctcggcttcggcgagggcgtcgagcctttccggcgacgggccgtccccaggatgtacagcctcgaggcgccgatggtgcccatgacgtgcatcaacgcggtgggcaacaagacgccgctgcaactggtgttgtgggacgacgacgacgatgacttattagacgcgtcaccggaggtggcagcgtatggtgacggagacggcgagatcaacctgatcagcatgttggcgtttgacacggagatgggtcggcagccaggacaggagaagcgattcaaatccgtcaagatagctaatgttaaccattccacgattgccatttatgattttgcactaaagaggatcattcaagaaattattgaggtgaatcaggtacgttagtagacactccgtacgttgggtttcacgtatatatgttgggtttcactgtgcgcggtaatcatatatatcacgtgtggaattctgtgtaataaatgaatcccatgcagctttgtgt

SEQ ID NO: 4299 - DNA, 1204 bp, Oryza sativa
  ref <308>: DATABASE ACCESSION NUMBER: AK061705
  ref <309>: DATABASE ENTRY DATE: 2001-12-06
aggactcttcaggtgaaagcaatgttgcagtattcaagcctattgatgaggaaccaatggcaaagaataatcccaggggccttcctttgtcaactgatggtgaggggttgaaaaggggaacgcgagtaggggaaggtgcattaagggaggttgcagcatatattcttgaccatccagtttatggatgtaaatcgtgtgatgttcctggattttctggtgtaccacccacagcgttggtccgttgtttccatatggggaagggatctaataaggttggatcattgcagctgtttgtagataacaatggcagttgtgaggatatgggccctcgagctttcccagttaaagaggttcagaagattgccatactggatattaggttggcaaatgctgatcgtcatgctgggaacatattagtgtgccaagatggagaagatcacttgaagttgattccaattgatcatgggtactgcctgccagagaagtttgaagattgtacctttgagtggctctactggccccaagcccgcgaacccttcggtccagaaaccgcagcatacattggatcactagatgctgacaaagacattgcgcttctcaagttccacgggtgggcgctatctccccagtgtgcccgagttctgcgcatcagcacaatgcttttgaagaagggggcagagagaggcctaacgccttatgacatcggcagcatcttatgcaggcaaacagtcaaaaaagaatctgaaatcgaggccatcatagaggaagcagaggatgccatccttccaggaactagtgaggagacattcttggagaccatctcggagatcatggactttcaccttgataagcttgctgtgaagttaaagaagttctgaataactgatcgagttactcgaattgtgcccggttgtaagtatgtatcgtagtcactaaatggaataacgagtttggccgttgaactcattaccgtggaacattttgtgaatataacaaggatcatccacttttttacctgtacttgtaatgtagactgtagttgcatcgagtgttctttctgcttggtaatttcagcaaaacctagcacctgagaagcttgtttggatcattgtcaatgtaaacctgtttaaagtgttggcattgccaaatcctgagaacaatgtttggatcattgtcaatgtaaacctgatgaaaatgtttggtg

SEQ ID NO: 4300 - DNA, 1312 bp, Oryza sativa
  ref <308>: DATABASE ACCESSION NUMBER: AK104708
  ref <309>: DATABASE ENTRY DATE: 2002-08-28
ggaggcagccaatccttcgtcttgcttggctacctatcttgcagggagctcatgccgctcgcgggcatggctctcctccagctccgggagcactgctccctcctcccaaatcccctcagacccgcgaggaatcctcgcaagaaccggctcttgccgccaaattcggccaaggttcccggcttctcaagaatctcaatccacggtgcgccgcccgcgcccgaggccgcaatcttggaggaaagggtggaggtggatgtggatgtggaggccgcggttgtgccgtggaggggcgcgttcctcttccccgtcgccgccgccgtcgtcgcgtcctggccgctcccttcgctcgcggcggaggccggcgggaaggtcagcctcgagtccatcgtggtggccatcgacgacttcaacaaccgcaaccccttcttcgtggccggggcggtgttcgtctggctcgtggcgatcccgctggtgcaggagtacttcaagaagtacaaggcggtgagcgccatcgacgcgttccgcaagctccgcgacgagccgggggcgcagctgctggacatcaggagggggaagagcgtgcggttcatggcgtcgccgaacctgaggctcgtcgagaagagcgccgtgcaggtggagttcgacgaggaagacgaggagggattcgtcaaggaggtgctggctagattccctgacccggcgaacaccgtcgtctgcgttcttgacaactttgatggtaattctatgaaagtggccgagctgctgttcaacaatggtttcaaggaagcttatgcaatcaaaggtgggctgagaggcccagaagggtggcaggcaattcaagagaaatatcttcccccatctgttcatgttgttccaaggaagaagagcaaagaatcagaggactctgatgttagcgctgatggaacagatgaccagctggaagtgaatggaaaattattagctacccctaatagttctgtagtcaatacaggcaatggagctgaagatagtaccgagaagcccaatgggagtacttcagccataaagcgtgcaagccggagaccattatcaccatatccaaattaccctgacttgaagccaccatcatcgccgacaccatcaaagccagagaggtagtagaacaataaagggaaataagaaatcagacaaagagaagaaatcagaggacaagggactaatgttgcaagaacagtcagtcatttccggcataaccattttgatatacttgtaatcgtgaatatagaggcgatcaatgaggttcacaatgcagaagaccattgctgttactgac

SEQ ID NO: 4301 - DNA, 1185 bp, Oryza sativa
  ref <308>: DATABASE ACCESSION NUMBER: AK104709
  ref <309>: DATABASE ENTRY DATE: 2002-08-28
attctaacaaatgcataccactccacttattcagagaaaacagccaatgagatagttgagatgaaagggatgggtggaactccatttagaaggaaagagcaagccagcttcttgacaaagctccttgtgctaacaagaagatccttcctaaatatgcacagggacataggctactactggatgcgtttgggcatttatttgggcattggcatttgcctcggcaccatcttctaccaagttggttacagctacagttctatccagagtagatgtgaagtaataatgtatacaaccgcgcttgtaactttcatggcaattggaggattcccttctttcgtagaggacataaagttattcagaagggagagattgagcggccattacggagtcatggaatttgtaatctcaaacaccctctcagccaccccttaccttgccgtcatcgctgtgatccccggagcaatgatgtattacctcacagggctgacccgaggtgcggaacacttcgcatacttcgtcgccacactctgcatgtgcacgctgctggtagagagcatgatgatgatcatcgcagtcatcgtcccagacttcctcatgggaatcatcatcggtgccgggatacagggcatgatgatgctcaatggtggcttcttccgcctcccgaacgagctcccgaagccggtgtggaagtacccttgctactacatctccttccacaagtatgcggtgcaggggttttacaagaatgagttcatagggctgtcttttccaagtgatcagctcatcgaggccaatgccactatcagtggtcttcaggttctcaaggaaaggctgcaagtggagatgggctattcaaagtgggtaaaccttgctatcctgtttgggatgatggtgacatacaggatgatattcttcgttattgtcaagattgcagaggagctcaggctaaaactgagagggattagatttagacggcttaaatagtcgtcttctctcttggaaaacccggccaggaggaagggatcattaaacacaaataaaatttgaagtacagaatgtactacagtagtgtggacttatgtcatttgagcttgataattcctaacgggtattttctggcattttagtcctttgccaatggaacaaaattgtaaaggattttttaaggtaaaccaagttatcgtg

SEQ ID NO: 4302 - DNA, 1760 bp, Oryza sativa
  ref <308>: DATABASE ACCESSION NUMBER: AK061706
  ref <309>: DATABASE ENTRY DATE: 2001-12-06
ttagacggcctcggggaatgtattttagtgcagaagatcgtggggaaatgatgtccatggtgtacaactggccagctgaccaggttgacatgatagtagtgactgatggaagcaggatattgggcctgggtgatctcggggtgcatggtattggtattgccattggaaagttggatctatatgttgctgctgctggaataaatccccagagggttcttccggtcatgattgatgtgggaacaaacaatgagaagctcctcaaggatcctctgtatcttgggttacaagaacatcgtctggagggggaagaatatgtagcgattatcgatgaatttatggaagcggttttcgctcgctggccgaatgttattgtacagtttgaagatttccagagcaagtgggccttcaggttgttgcagcgttacaggaagacttatcggatgtttaatgatgacgttcagggaactgctggcgttgctatagctggtctcttaggagctgtaagagcacaaggaaggccaatgttagatttcccaaagcaaaagattgttgttgcaggggctggcagtgctgggattggtgttgtgaatgctgcaagccggactatggcaaggatgctgggaaacaatgaggttgcttttgagagtgccaggagtcaattctggatagtcgatgcccatggtctaataacagaggagcgcacaaacattgacccagatgcacggccttttgctaggagaaagagtgaactaggtcaccaaggcctaagtgaaggggcgagcttggttgaagtggttaaaaaggtgaagcctgatgtcatacttggattatctgctgttggtggtttgttctcaaaggaggttttagaagcattaaaagactcatcctcttcaagaccagcaattttcgcgatgtcaaatccaactaagaatgctgaatgtacacctgaagaagccttttcaattcttggtgaaaagatcatctttgccagtggaagcccatttagtgatgtggatcttggtaatggaaagattggccactcaaatcaagggaataacatgtatctctttcctggaatagggcttggaacccttctatctggagcacgggttatctcagacggaatgcttcaggctgcagctgaacgcttggcttcgtatatgaaagaagaggaagttctcgaagggatagtataccctccaatctccagaatacgtgatatcaccaaggaggtggcagcagcagttgtgaaggaagctgttgcagaggatctagctgagggatatcgtgacatggatgcacgtgaacttgcaagactcagtgaggaagaaacagttgagtatgtccagcagaacatgtggagtccagtttatccaacaatagtgtacaagaaagactagagctttaatgtccacgtattctattgctcatgcccaattctctgaaggctgcagtttgtatctttcaaaatactggcgcttctgttatgagaatccaatatattgttttcatgcaacgtcaagtgttagtacacaatattgtcttgattttaaaatggatctaatactgtttggaagtgtatagtaggctccctaggtcgaatgtcgactttgcattttatatccacaactattaggtgcgcaacaattgggacctgtgtgccaattctacacagatgactataacttgtatttatgtttgaacacatcaatcaatagaagcctcaggtttactggtggcagtctgttcttgctgccgtc

SEQ ID NO: 4303 - DNA, 1287 bp, Oryza sativa
  ref <308>: DATABASE ACCESSION NUMBER: AK104710
  ref <309>: DATABASE ENTRY DATE: 2002-08-28
aagccacaacggccaagcagaaagtgcaattagcctgcaggcagctaatcagtagtagcttgctagccatggcttctgcaactaattcttcacttagcttaatgctgctggtggctgcagctatggcgtcagtggcatcggcgcagctctcggcgacgttctatgacacgtcgtgccccaatgcgttgtccaccatcaagagcgtcataacagccgccgtgaacagcgaggctcgcatgggggcgtcgctgctcaggctgcacttccacgactgcttcgtccaagggtgcgacgcgtcagttctgctgtccgggcaggagcagaatgctggcccgaacgtggggtcgctgaggggattcagcgtcatcgacaacgccaaggcgcgggtggaggccatctgcaaccagaccgtctcctgcgccgacatcctcgccgtcgccgcccgtgactccgtcgtcgcgctgggagggccatcatggacggttctgttggggagaagggactccaccactgcaagcgaggccttggcaaataccgacctccctgccccttcctctagcctcgcagaacttatcggcaatttctccagaaagggactcgacgcaaccgacatggttgctctctcaggagcacacacgatcgggcaggcgcagtgccagaatttcagggacaggatctacaacgagaccaacatcgattccgccttcgcgacgcaacgccaggccaactgcccacggccgacgggcagcggcgacagcaacctggcgccgctggacacgacgacgcccaacgccttcgacaacgcctactacagcaacctgctgtccaacaaggggctcctgcactccgaccaggtgctcttcaacggcggcagcgcggacaacacggtcaggaacttcgcgtccaacgcggcggcgttcagcagcgcctttacgacggccatggtgaagatggggaacatctcgccgctgaccgggacgcaggggcagatcaggctcagctgctccaaggtgaactcctaattaaggagtagtatgacgggatgcgttcgttgctggaagcaaatcgtgtcgacgaagacataaacgggccacaccacatatacccatatatgtagtataaccacaagtataggtacggtggtgttgtactagtacacgtaaagtatatggcagccagctcgctctagcaatccatcaagtgtatggagcagagcagccatggcattagcacctagtataccaaaataaaagctcctcatgcgaaggcatgcatggaggattaatg

SEQ ID NO: 4304 - DNA, 559 bp, Oryza sativa
  ref <308>: DATABASE ACCESSION NUMBER: AK061707
  ref <309>: DATABASE ENTRY DATE: 2001-12-06
aaaccaactgcttcagttgcgactgtccccacaattaaagggggccaagctccaggtttggtcgtcaagaaaccactgaatccgatgagaactgtaaagggtgctccatccgccattgctgttaacaagagaaaaagagaggacggcaagcccaaagtgatctcaaaggaggaggaagccgcccttaaagcgcgtgaagcagcaagaaaaagaatggaggatagggagaagcccttaatgggactatacagatcgtactaaggggcctccccataagaaatgctaatggatggattgttctgtaaaagaagatttgcgagattattagcgttgggtgtcttcaagagcgtcttctgcatcagggaagcatgtctgtagtgtacaatatctctggtaccaacaatatcctgaattggataaattccctttcctgaaactgttatctgtgaaacatgtaaagtactatacattcgtcagcatttcttttgctctttcacactggatacactgtagaaatgacgacctttgcgatcaactttacaggaaaaagaatatcttt

SEQ ID NO: 4305 - DNA, 1259 bp, Oryza sativa
  ref <308>: DATABASE ACCESSION NUMBER: AK104711
  ref <309>: DATABASE ENTRY DATE: 2002-08-28
aacggtgtaccgaggaaagcttcctgacggacaactgatagccatcaagaggtctaagcaagggtccatgcagggtgggcttgagttcaagacagaaatcgagctcctttctagagtccatcacaagaacttggttggtcctgttggtttctgctttgagaagggagaaaggatgcttgtttacgagttcataccgaatggaacgctaagtgaggccttgtatggtataaaaggagtacaattggactggagtaggagacttaagatagctctggattcagctagagggctagcgtacctccatgaccatgccgatcctccaatcattcacagagatgtgaagtccaccaacatcctcttggatgagaggatgaccgcgaaggtcgcagatttcggtctctccttgttggtatcagacagtgaggaaggccagttctgcaccaacgtcaagggaacactgggatacctggacccggagtactacatgacacagcagctcacagcgaagagcgatgtgtacagcttcggggtggttcttctagagctcatagtggcgcagccacccatacacaagcagaagtacatcgtccgggaggtgaagacggcactggacatgggagaccaaacgtactgtggcctgaaggatgtgatggacccggttcttcagaaaacaggggatctccgtggtttcgcaaggttcctgaagctggcattgcagtgtgtcgaagatctaggaaccgaccggccatcgatgaacaccatagtgagggagatcgaggtgataatgcaggacaacgggatcagaaccggcatgtcatcgacgagctcttcgttcagcatcgactcgagaacgatgatggccgcgccaaagtacccatactccaacgcatcgacatcgtcgacggcgtttgatatggatagcagggcctttgagtacagtgggaagttcccttctgaaggcagcctgaagaacaggggcacgtaggggggtatggtcagtcaggtcagaggtgtacagcggatgaaaggcctgttcagaatagcagattttacgaagtgtgaaaagaggatggggctgcatatttataggatatttaaggatcaaactacactgtacagaggtcatgaactttacaattcttttgtcttgtgagaaaagaaagagcaattctttttcttcgaaatagcgtataaaagttaaccatgtaattatgtaacttacctttgctcaatgataaaatcatcagagttgtttgtat

SEQ ID NO: 4306 - DNA, 767 bp, Oryza sativa
  ref <308>: DATABASE ACCESSION NUMBER: AK061708
  ref <309>: DATABASE ENTRY DATE: 2001-12-06
aatcccgttctccaaaggaaggttcctatttcaagcagctgcccaagtccagtgctattaaggtgattgattttggcagcacaacatatgaccagcaggatcagacctatgtggtgtctactaggcattatcgagctccagaagttatcttgggacttggatggagttacccctgtgatatatggagtgttggttgtatactggttgagctatgcacgggagaagcattgtttcagacccatgaaaacttggagcatcttgctatgatggagagggtatttggtcctttgccatgtcacatgctcaaaagggcagaccggcattccgagaaatatgtcagaaaaggccgtttaaactggcctgaaggttgtgcgtcacgggatagcatgaaagctgttatgaagctgccacgtcttcagaatctggtgatgcaaaatgtagatcattctgggggcgagttcattgaccttttgcaaggtctgttaaggtatgatccagctagccgcctaacagcacaagaggcgcttaggcatccattcttgagggagcagtccgagcgaagaagatgacgaaaatcgtatgtcgattttcatctgacacctctaacttgtattgtctgagctcgaaaagtctattcacaaatcgtgaagtttgtatttctgtttgtaacctcagcaagcatttgtatatagaagacctgtatttacaagttgatctgtatcagtctgaatcataaattaagtgttttgaagatgttttgcttggct

SEQ ID NO: 4307 - DNA, 1824 bp, Oryza sativa
  ref <308>: DATABASE ACCESSION NUMBER: AK061709
  ref <309>: DATABASE ENTRY DATE: 2001-12-06
ttcaagcattgtgttggaagaagggtacagcttgccctttgcaaagaacttgatgagagaatgcatgatctgaaaagtgaactggagggttacaatactggagattcggatgatattaataagaagaaagctcttgatgcattgaataggatggaaaagtggaacttatttaaagatgttccagaggaacatcatagttacactgtggctcgcgattcattcctcgcacaccttggttccgtgttatggggttctatgagtcatgtaattgctccttctgtttctcatagggctcaccattactatgataagttgtcgtttcaactgtactttgtgacacaagagaaagtcaggaacatgaagcagtttcctgttaatgtaaaatcagtaacagagggccttagttctgtgttactacaattccagaagccaatgttcagtcaacgcatgttgtcattatcagaggatcctgccttgatgatggcattttcaatggcacgtcgtgcagctgcagtcccacttctgttggttaatggtacctataagtcaactgtccatacatatcttgattctgccattctccaacatcagctacagaggttaagcgagcacaactcgctcaaaggaggacactcaaatcacaggtcaacattggagattccaatattctggttcatacatagtgaacccctattattggataaacattaccaagccaaatctctttcaaacatggttgtagtagttcaatcagaagttgattcttgggaaagccacttgcagtgcaatgggaggtcaatcttatgggatttgaggagaccagtaaaagctgccattgctgcaactgccgagtatgtatctggtttacttccttcacatctggcttatagcccagctcatgaaactgcaacagaggactggacttggtctgtgggctgtaatcccttatctattacttcaaaaggctggcaactttcggagtttcaacgtgatgttattgctcgtaactacatcattactgcagtggaggaatctatacaaatcatcaattcagcaattcaacaattgattacagaaaggacaagtgaacgaggctttaaacttttcaaggctcaggagagagtgctggttgaaaagtataattctgttgttagcttgtggagaagggtttctgctatgtccaaaggattacgatatggtgatgctgtaaagcttacttcaatgctcgaggaggcttctcatggatttgctaatgctgttaactcaaccatttcaagtctacaccctgtgcaatgtactcgtgaaagaaaagtcgacgtgcagctagacttgacaacgattcctgctttcttggctgtttttctgctgctctggtttcttctacgaccaaggcggccaaagcccaagatcaactaaaccagctaattttcagtgtggctgttgtatgctaataccgaggacgtgaatattgtgaatatgcacacatgtcatggggaacagctgctgctggagcgcagtaagtcctagattcaaaggggaaatgacaaggccgtaaacgacttgtgccaaacggtgtcactgtttagagaaaatagaactgaaattttgtttccgaaactggtgcaaggtttgaagttgccacatcctgagcagacttgtgtagtgcattgttggacttgttctggatggacgttgatatgaatctagttgagtaagcactgtagagttgtagactgagccgcttactgtgtagagaactcaatactgtttttgttttccagagaacagcgggagaacatccctaccaatcttgtcaattgactc

SEQ ID NO: 4308 - DNA, 412 bp, Oryza sativa
  ref <308>: DATABASE ACCESSION NUMBER: AK061710
  ref <309>: DATABASE ENTRY DATE: 2001-12-06
cattttagcaagagaaatatagctgcgtttgacggttgggacactgaaaacaatgaagagcaaactgaagagttgcaatggattagtctgtgaactgaaacttggagccagtgaattaccttacgctgcctgaaagcatctgcaccaagaagtgtcagtctttgcagtaagcttgtcgctgaacaagctcctgcccaacttgcttaacatcttcttttgttttgaaatattgatccactagtgaaccagctaccttgcttgctcgaggaaggagctagagctactgccaaactcgtgtattatgagagcattttgggagattaagcttttttttttgttaatttgtgatgctgctcctgttattttgcatatcctgcgggatcgtatcgcatgactatctatgcttgtgctg

SEQ ID NO: 4309 - DNA, 440 bp, Oryza sativa
  ref <308>: DATABASE ACCESSION NUMBER: AK061711
  ref <309>: DATABASE ENTRY DATE: 2001-12-06
ttgcaggttcacagccaggctaccctgggggtccactgtttaatccactaggactggccaaggatatagagaatgcagatgaagcgaaactgaaagaaatcaagaatgggaggttggctatggttgctatgcttgggtttattgtgcaagcatctgtgactcatgttggaccaatcgacaatcttttgacacatctttcagacccgttcaacaaaaatatcatccacaccctctcctcttcttgaaaatatcctggaccgtcaaactttttgttcctttcttcatcttaattaatctatcaatcaacacattcacaatgttcgtggacaacataagtaactcactacgcaattgccaagtccatgtgttatgaaaatggagattcaccggatgcataactacattaattgtttatggaaaaggaaatttccttccctagc

SEQ ID NO: 4310 - DNA, 1427 bp, Oryza sativa
  ref <308>: DATABASE ACCESSION NUMBER: AK061712
  ref <309>: DATABASE ENTRY DATE: 2001-12-06
ctcactccccctcgcttcaattctaatcccccccaaaccccctccaaaccctaaccctactacgacctccccttcctccgccgccgccgccaccgccaccgccaccgccacgtccagcctccggtcgcctgttcggatcgaagcgatgtcgtcggacgatgaggtcagagaggagaaggagctcgacctctcctcctccgacgtcgtcaccaagtacaaggacgccgccgatatcatcaacaatgctcttaagttggtagtgtctttgtgcaagccgaaagccaagattgttgacatctgtgagaagggcgattcttacataagagagcaaactggcaacatctacaagaatgtgaagaggaagattgaaagaggtgttgcttttccaacatgtgtatctgtgaacaacacagtctgccatttctctccgctagccactgatgaggcagtcctggaggaaaatgatatggtcaaaattgatatgggatgtcatattgatggttttattgccgtggtggctcatacacatgttatccatgatggagcagtcactgggaaagcagcagatgttcttgctgctgccaacacagcggcagaagttgctctgaggcttgttagacctgggaagaagaacaaggatgtcaccgaagcgattcagaaagttgctgctgcttatgactgcaaaattgtggaaggagttctcagccatcagctgaaacagtttgtcattgacggtaacaaagttgtacttagtgtgtccaatgctgatacgaaggtggatgatgctgaatttgaggaaaatgaagtgtatgcaattgatattgtcaccagcactggagaagggaagcccaagttattggatgagaagcagaccaccatctacaagagagctgtagacaagaattatcacttgaagatgaaagcatctaggttcattttcagtgagataagccagaagtttcctatcatgcccttcactgctagggcattggaagagaagcgtgcacgcttaggtttggtggaatgcatgaatcatgaattattgcagccgtaccctgtccttcacgagaagccaggcgaccttgttgcacacatcaagtttactgtgcttctgctgccatctggttcacagagggtaacatcgcattcacttcaggagttgcagcccactaaatccattgaagacaacgctgagatcaaggcatggcttgctttggggacaaaaacaaagaagaaaagtggtgcaaaaaagaagaaaggtaagaaaggagatgcagcagaagcagtgcctatggaggagggttcaaatgatgcaaacaaagaataactgattgttcttttgaattgcttccgttagttttgtacttgctccactgcatctgatgctattatatcacattcagttgtggaaaatcgagtactttttc

SEQ ID NO: 4311 - DNA, 1279 bp, Oryza sativa
  ref <308>: DATABASE ACCESSION NUMBER: AK061713
  ref <309>: DATABASE ENTRY DATE: 2001-12-06
ctcacatggcattcaccatgcctggtctgtaccgtgttgtccacggtattgatgtttttgacccgaagtttaacattgtctcgcctggtgcggacatgtccatctacttcccttactctgagtctcgtaagaggctcacctccctccacccagagattgaggagttgctctacagcgaagttgacaacaacgagcacaagtttatgctgaaggacaggaacaagccaatcatcttctccatggctcgtcttgaccgtgtcaagaacttgactggtctggttgagctgtatggtcgcaaccctcgcctgcaagagctggttaaccttgtggttgtctgtggtgaccatggcaacccatctaaggacaaggaggagcaggctgagttcaagaagatgtttgaccttattgagcaatacaacttgaatggccacatccgctggatctccgcgcagatgaaccgtgtccgcaacggtgagctctaccgttacatctgcgacaccaagggtgcttttgtgcagcccgctttctacgaggcattcggtctcactgttgttgagtccatgacctgtggtctcccgacattcgcaaccgcctatggtggtccagctgagatcatcgtgaacggagtgtctggcttccacattgacccataccagggtgacaaggcctcggcgctgctcgttgagttctttgagaagtgccgggaagaccccagccactggaccaagatctcgcagggcggtcttcagcgtatcgaggagaaatacacctggaagctctactctgagaggctgatgaccctcaccggcgtctacggattctggaagtacgtctcgaacctggagaggcgtgaaacccgccgctaccttgagatgctgtatgccctcaagtaccgcaccatggctagcaccgtcccgttggccgtcgagggcgagccgtcgaacaagtgagctggccaacatctcaggctgagactctgaaagaggagagcattggagtttctttgctttgtttccattctctggtttcagagatgaaaagagaagagagatatttcaggatgctttgcattcctaggcactgctctttttccttaagaaagtaaggtcgattgaatttgggagttttctagtttgatttagttgggggtgagttcagtggaatgtggtgtgtggttggtgctctgtctcctcttgttattgggatgttacctatgaataatagaaacggccttggtgccgtttctgcaataatatattgtagcatccttgtttccaag

SEQ ID NO: 4312 - DNA, 1271 bp, Oryza sativa; identical to SEQ ID NO: 3834
  ref <308>: DATABASE ACCESSION NUMBER: AK104712
  ref <309>: DATABASE ENTRY DATE: 2002-08-28

SEQ ID NO: 4313 - DNA, 1019 bp, Oryza sativa
  ref <308>: DATABASE ACCESSION NUMBER: AK061714
  ref <309>: DATABASE ENTRY DATE: 2001-12-06
attccatttcgaattctagggttttgttggcccccattcctcccccaccccggtgtcctcccctccgccgctcgcgtcgccgcctttttcccctatggcgctgccgaatcaggggaccgtggattaccccagcttcaagctggtcatcgtcggcgatggcgggactggtaaaactacatttgtgaagaggcatctcactggagagtttgaaaagaaatatgagccaaccattggtgtcgaagttcaccctctagattttaccaccaactgtggtaagatccgcttctactgctgggacactgctggacaagagaagtttggtggacttagggatggatactatatccatggtcaatgtgcgataattatgtttgatgtcacttcaaggctgacttacaagaatgttccaacatggcatagggacttgtgcagggtgtgtgaaaacatccccattgtcctgtgtggtaacaaggttgatgtgaagaacaggcaggttaaagccaagcaggtcacattccacaggaagaagaatctccagtactatgaaatttctgccaagagcaactacaactttgagaagcccttcctttatcttgcaaggaagcttgctggtgacccgaacctgcatttcgttgaagctgttgctcttaaacctccggaagttcccattgacctggcaatgcagcaacagcatgaggctgagcttgcggctgcagcagcacaacctctcccagatgacgatgacgatctgatcgagtagagaggatcatgagtctatcatgcttcagcctgagtctcttcataagagtctgaattaggccaatgcatgctagtgttagcttgtctgtggaatgtggacgtttcctgcgtgcctgatgggttgaaaacttttgatgtgtggtgttacatgttgctgccatgaatttgttggctcttttttaacactgctgtgttacttctatggttatgcttaaactatttgtatcatcgagctggtatttatttatccggtgttgcac

SEQ ID NO: 4314 - DNA, 1110 bp, Oryza sativa
  ref <308>: DATABASE ACCESSION NUMBER: AK061715
  ref <309>: DATABASE ENTRY DATE: 2001-12-06
ccttggtgaggtgaggtgagttgagttggggattgattgattgattcggattgggaagaagaagaagcaggggagcatgggcagcaagtcgtacccgacggtgagcgatgagtacctggcggccgtgggcaaggcgaagcgcaagctccgcggcctcatcgccgagaagaactgcgccccactcatgctccgcctcgcgtggcactctgctggcaccttcgatgtgtcgtcgaggaccggcgggcccttcggcaccatgaagaaccccggcgagcagtcccacgccgccaacgccggcctcgacatcgccgtcaggcttctcgaccccatcaaggaccaacttcccatcctctcctacgccgacttctaccagcttgctggcgttgtggccgtcgaggtcaccggcggacctgaggtccccttccatccgggcaggcaggacaagcctgagcctcctcctgaaggccgtcttcctgatgccacacaaggttctgaccacctaaggcaggtcttttctgcgcagatgggtttgagtgacaaggacatagttgctctttctggtggtcacaccctgggaagatgccacaaggagagatctggctttgagggagcctggacgtccaaccctttgatctttgacaactcttacttcaccgagcttgtgagtggcgagaaggaaggccttcttcagctgccaagtgacaaagccctcatggctgacccagccttccgtccactggtggagaaatatgctgcggatgaggacgccttctttgcggattacgccgaggcccacctcaagctctctgaactgggatttgctgaggaataagaagcctttagagagcgggatatccgcaaaagattaatgccgatttgtattttgcgccttagagtcagtacgatcaagactgtcgtggcggttgtaataaaaattagtgtgctttgggccatctttttatgtgattccaattgtctttctcttcattcttgctttgatgctctttgtctggacctctagaccgccgtattgtactgtggagtttcaaagttaccaagctatttgctgtcaagataactatggattgaattccccttgatggatgaacc

SEQ ID NO: 4315 - DNA, 1668 bp, Oryza sativa
  ref <308>: DATABASE ACCESSION NUMBER: AK061716
  ref <309>: DATABASE ENTRY DATE: 2001-12-06
gtttgctcttctactgctcatcctcctcctctactactcgtcctctttgctctattcacagctagcaacaagaaggaggcttacacatgcatgtgcacggtctctgccggacgcatatgaatcaggcatgaatagggggcacatcagcagctcggagctcatcgacgccaagctcgaggaacgccggatctccacggccaagcactgccccagctgcggcaacaagctcgactgcaaaccggattgggtggggctaccggcaggagtcaagttcgatccgacggaccaggagttgatcgagcacctcgaggccaaagtgagggaagaaggctcaagatctcatcctctcatcgatgagttcatacccacgatagaaggggaggacggcatatgctacacccaccctgagaaacttccaggtgtgacaagggacggcctgagcaagcacttcttccaccggccgtcgaaggcgtacacgacggggacgaggaagcggcggaagatccagacggagtgcgacgtgcagaagggggagacgaggtggcacaagaccggcaagacccggccggtgatggtgagcggccggcagaaggggtgcaagaagatactggtcctctacaccaacttcggcaagcaccgcaagccggagaagaccaactgggtgatgcaccagtaccacctcggcgacctcgaggaggagaaggaaggggagctcgtcgtctgcaagatcttctaccagacgcagcctcggcagtgcagctggtcctccgaccgcggcggcggcgccgccgccaccgcatccgccgtgacgacggcggcggtgcagcaggatcagcagcgcaggagggacagcggcagcggcagctgctcgtcgacgagggaccacgaggtgtcggcgacgtcctactcgacggccgggtacgccgtcgccgccgccgtcgagatgcagcatttgaagcatgccgccgaccatttcagcttcgcgcctttcaggaagagtttcgaggaggttggtataagtggtgatcaggtacactccaatcagcttgggaggtcggagcagcagcatgctggccaggaacaacagccgcaccggccgttgcttgcaaccacgacggcggtgcctgccacggccttcctgatcagccggccgacgaaccctgtatcaaatatagtgccaccagcaatgcagcatgcatctgtcgttcttgatcatgatcagttccacgtgccagcaatccttctccaccacgacaaatttcagcagcagcaacaaaagcttgacaggaggtctgccggcttggaggaactgataatgggctgcacgtcttcgagcacaaaaggagaagcttcaattcctcactcccaagagacagaatggccttaccagccatactggactcctgacaaccaggatcatcatggatagtagcaacaaggctggtaaatagtgaagatcaataccaaaagaaaactaaccacattctctttcaccttgtgtggtctctgtcttcttgaatatacaacattgctttcttgaagaatgtatgtactacggttgggagaagaaatagattaaagagatctgtatagatctgcctccatgaaaaaagggagatcaaattaactgtgcaaggacactccaagatagaagagacaaagttgttg

SEQ ID NO: 4316 - DNA, 1197 bp, Oryza sativa
  ref <308>: DATABASE ACCESSION NUMBER: AK061717
  ref <309>: DATABASE ENTRY DATE: 2001-12-06
agctatagctatttcaccgcttcgctccatccatccgttccgtttagtttgcttcaagcgcaagcgcaagcggcggagaggaagccatagccacctcccaccacgccttggcctttccattacctacgccttcccttcccttcccttcgcgcgctacttggaattggattagccatagccatggacgccacgctgctccgctccgccgatgccgccgtcgccgtccgctccaccaccactgcgcctccgcctcgccctcgcctccaccgccccagtaccctccccctcccgtcctcctgcgcctgcgggcccctccgcgcctacgccgctcccgctgcccccgcgcccgccgcgcacaacaacggagtctacacagttggtgacttcatgaccaaaaggcctaatctccatgtcgttacacctgcaacctcggttgatgaagctctcgagacgctggtgcaacacaagatctctggtttccctgttgttgatgacaccggaaagttggtgggtgttgtctcagattatgatctgttagcacttgactcaatatcaggaagtggactgactggcacaaacacaagcatgtttcctgaggtggatagtacttggaagacatttcgcgagatacagagactcttgagcaaaaccaatggcaaagtcatcgctgatgtgatgacttattcgcctcttgcggttcgtgaaagtaccaaccttgatgctgctacaaggttgctacttgaaaccaaatatcgcagattgcctgttgttgatagcactggtaaattggttgggatgatcacaagggggactgttgtcagagctgccctcaaaataaagaagacagctgaagaaactgcttaaattagacagtgtagatgattctttataagtcatttctgggactgcagtcacttggaaatttagtccactgaaacattatttggtgaaatgaactacatcagccttacagatactgcgaattcgacagtcaattcttcttggaacatagatggatataggtattgtattgttgcagatatttggaatatagccgcaatctgtttggggccaccagatttggtcgcctctccttattaggtagcataacatggagaatgttattatttttatttttacttttatcattgacttgtattcaagaacatcagtgtattgaaatgtaacacttctgat

SEQ ID NO: 4317 - DNA, 1089 bp, Oryza sativa; identical to SEQ ID NO: 3829
  ref <308>: DATABASE ACCESSION NUMBER: AK104713
  ref <309>: DATABASE ENTRY DATE: 2002-08-28

SEQ ID NO: 4318 - DNA, 1892 bp, Oryza sativa
  ref <308>: DATABASE ACCESSION NUMBER: AK104714
  ref <309>: DATABASE ENTRY DATE: 2002-08-28
accatcaccaacacaccactgcaaacccatccgcctccgcaccgcatcgcacctacaaattgtgcacgctgcaccgctcaaaaaaaagaagaaactaaagtcgtacgtaggacgcggcgtgcgagcgttggtgcggtgcgcggcggcgcgcggggaagtagtgagagcatcgatcatgccgggggcggcggggtactccgggtcggtgaagctgaagtacgtgaagctggggtaccagtatctggtgaaccacttcctgacgctgctgctggtgccggtgatggcggcgacggcgctggagctggcgcggatggggcccggtgagctgctgtcgctgtggcggtcgctgcagctcgacctcgtccacatcctctgctcggtgttcctcgtcgtgttcgtcggcacggtgtacttcatgtcgcggccaaggccggtgtacctcgtcgactactcctgctacaagccgccgcccagctgccgggtgccgttcgccacgttcatggagcacacgcgcctcatcaccgacgacgagaagagcgtgcggttccagaccaggatcctcgagcggtcggggctcggggaggagacctgcctcccgccggccaaccactacatcccgcctaacccgtccatggaggcgtcgcgcgccgaggcccagctcgtaatcttctccgccatcgacgacctcgtccgccgcaccggactcaagcccaaggacatcgacatcctcgtcgtcaactgcagtctcttctccccgacaccgtcgctctccgccatgatcatcaacaagtacaagctccgcagcaacatccgcagcttcaacctgtccggcatgggctgcagcgccggcctcatctccctcgacctcgcccgcgacatgctccaggtgcatcccaactcgaacgcgctggtggtgtcgacggagatcatcacaccaaacttctactggggaacccggcgggacatgatgctgcccaactgcctgttccggatgggcgcggcggcgatcctgctgtcgaacaggaggagggaggcgaggagggccaagtacaggctgatgcacgtggtccgcacgcacaagggcgccgacgaccgcgcgtaccggtgcgtgtacgaggaggaggacgagcaggggcactcggggatctcgctgtccaaggagctgatggccatcgccggcgacgcgctcaagtcgaacatcaccaccatcggcccgctggtgctgcccatgtcggagcagctgctcttcttcttccgcctcgtcggccgcaagctcatcaacaagaagtggaagccgtacatcccggacttcaagctggcgttcgagcacttctgcatccacgccgggggacgcgccgtgatcgacgagctgcagaagaacctggacctgtccgcgcagcacgtggaggcgtcccgcatgacgctgcaccggttcggcaacacgtcgagcagctcgctctggtacgagctcgcctacatcgaggccaaggggcgcatgcgccgcggcgaccgcgtctggcagatcggcttcggcagcggattcaagtgcaacagcgccgtctggaagtgcctccgcacagtcaagacgcccgccgacgggccgtgggacgactgcatccaccgctaccccgtcgacatcccggaggtcgtcaagctgtgatcgaatccatggtagcctcagcctcgccctcgccggcggccgtcgcgccgccgccgcattacctcccctacacctgtacgtcacccgcgaagcgtgcgtcctcaaactttggagcttcttaatttgtggtgttttcttctttcctcctttcccctccctcgcttcttaattttttttcttgtcttccttttatttttatttttttcgctataaacacggattaaatcgatat

SEQ ID NO: 4319 - DNA, 1457 bp, Oryza sativa
  ref <308>: DATABASE ACCESSION NUMBER: AK061718
  ref <309>: DATABASE ENTRY DATE: 2001-12-06
aaagagagagagatggagggagtcatcttcttcctcctgcggtggcggtgctgcagctgagcctgctgcactcctcaccggctgctgattgtgactgtgagtcatgttggcctccacttgcttctccgccccgccgccctcctcctcctccccgtcaatcccgacccacctcgccactctctgctgctgcttcaggcctcccgctcgcccaccttggcctcgctctcttcttcttcttggtgccttcccaccgccgacccgccccctcccccgcgcctccgtctcgtcatcgaccgccccagcgaaagactacgagtttactgatggtggcggagaggtggagctgaggctggacataggaaagctcggcattgagaattcaagagatgtatttgttgacgtcgatgatacgtctctgttggtcagagccaagtcggatgggacactgcggactttgatcaatgttaaacaactctttgataggattaagtcttctgagactatatggttcattgatgaggatcaattggtagtgaatctaaagaaagttgagcaagagctgaaatggcccgacattgatgaatcttgggaatcccttacttctggaatcactcagcttttgacagggattagtgttcatattgttggtgattccacagatataaacgaggcagttgctaaagaaatagctgagggaattggttaccttccagtctgcacaagtgagctgctagaaagtgccaccgaaaagtctattgacaaatggttggcttcggaaggagtggattcggtagcagaagctgaatgtgttgtgctggaaagccttagcagccatgttcgtacagtcgtagcaactctggggggaaagcaaggagcagctagcagatttgataaatggcagtatcttcatgctggatttacggtttggttgtcggtctccgatgccagcgatgaagcttctgccaaagaagaggcccgtagaagtgtgagctcgggaaatgttgcgtacgcgaaagctgatgtagtagtgaagcttggtggatgggatccggagtacacacgagctgttgcccagggttgccttgtggccttgaagcagctaacattggcagacaagaagctagcaggtaagaagagcctatacatgaggctgggatgccgaggggattggcccaacatcgagcctcccggctgggatcctgactccgacgcaccacccaccaacatatgattttcatactcagtactcactagtagtagtatatatacagtacatgattctcattctagcctcttcgtcgtcgcttttcttctctctggaggcgcttcagttccatggaatccacattcacggggcatttcccagattcagctttagctgtgtcatggcatcttttctttgcagccagctactacacgagattcttactgctagtaaaatactcttgtgttactac

SEQ ID NO: 4320 - DNA, 1586 bp, Oryza sativa
  ref <308>: DATABASE ACCESSION NUMBER: AK061719
  ref <309>: DATABASE ENTRY DATE: 2001-12-06
gtgcagaaactcaaagatctctctccctcacctatattacctgcaccaacaccactgaccactccctcctcctgttcttgctccttcctcccagtgtctctcaagagcggtgcagggttcacaaggcaggagaaaatgggggagatcaccaatgtcatggagtaccaggccatcgcgaagcagaagcttccgaagatgatctacgactactacgcctctggagctgaggatgagtggactctcaaggagaacagggaggcattctccaggatcttgtttcgtccccgcatcctgatcgatgtctcaaagatcgacatgtccgcaactgttcttgggttcaagatatcaatgcccataatgattgctcccagtgccatgcagaagatggctcaccctgacggagagtatgcaacagccagggcagcttcagcagcaggaactataatgacactgtcatcttgggctacttcaagtgttgaggaggtcgcctcaactggaccaggaatccgtttcttccagctatacgtgtacaaggacaggaatgtggttgagcagcttgtcagaagagccgagagagctgggttcaaggcgatcgcactgaccgtggacactccgcgactgggacgcagggaagctgacatcaagaacaggttcgttctgccaccatacttgacactgaagaatttcgaaggcctggacctcgcagagatggacaagagcaacgattccgggctggcctcctacgtcgccgggcagatcgatcgcacgctcagctggaaggatgtgaagtggctgcagagcatcacgtcgctgccgatcctcgtcaagggcgtcatcaccgcggaggatgcgaggctggccgtgcactccggcgcggcggggatcatcgtgtcgaaccacggcgcgcggcagctggactacgtcccggcgaccatcagcgccctgggggaggtggtcacggcggcggcggggcgcatcccggtgtacctcgacggcggcgtccgccgcggcaccgacgtcttcaaggcgctcgccctcggcgccgccggcgtcttcatcgggaggccggtggtgttcgcgctggcggcggagggggaggccggggtgaggaacgtgctgcggatgatgcgggaggagttcgagctcaccatggcgctcagcggatgcacctcgctcgccgacatcacccgcgcccacatctacaccgacgccgaccgcctcgcccgccccttccccaggttgtgaggacctcgccgccgccgccgccggcgaactctagccaaacaataaacaatatcgacgacgccagagagcacgccgattaattaattaggtaatttttgcaaaagaatctcgtcgatccacacgcgcgcaagcaacacacgtactccgtgcacccctcgtaactgggtcgttcatgctcttaatcccaacgattaattatactggtataatctttgtaatttcgagtactgtacacctatttggcatctgtatatctcgccttaagatatttacggaaccggtttatatactcctttaatttttaattaacggagttcaacatatatataagttacttcatg

SEQ ID NO: 4321 - DNA, 1599 bp, Oryza sativa
  ref <308>: DATABASE ACCESSION NUMBER: AK061720
  ref <309>: DATABASE ENTRY DATE: 2001-12-06
atctcccccagatctcgccgcgatggccaccgccgcggccgccgcgcgcgccctcctcctcctcatcgccgtcgccggagcgctcctccgtcccgcggcggcggagatcaagcaggagtccttcaaggacgactcccgcgcgtccatcctcttcgagaagttcgggttctcccgccgtgggttcgtgtccatcgccatcaccggcgcgaggacctcctcgaagctcgccaaggcggagccggatcagttcgggttcttcctcctctccgacgaggcgctcttcgaggccatctacgagcagccgccgcccacggatctgaaccccaaccccgagcccaacccgggatgcgtcctctccagcccctacgtcaagccgctcttcagcttcgccgacctcgacggcaacggcaactacaaaaagaccttcccggtcacccaacccgacgagtacagcctcttcttcgccaactgcgcgccggagacggccgtcaccatggaggtccgcaccgacatgtacaacaccaacctggatggctccaaggactacctctccgtcggccaggcccccgtcccggcgatctacgccttcttcacggtctgctacctcgtgttcttggccgtctggctctacgtcaccctctaccgcaaccgcctctcggcgcaccgcatccaccacctcatgtccggcctgctcgcggcgcgcatgctctactgtatctccgcggccgaggaccagcactacatccgcatcgcagggacaccacacgggtgggatgtgatgttctacctgttccagctggtgaagggtgtgatcttgtttgctgtgattgctctgattgggaccggttggtcattcctgaagcccttccttcaggacaaggagaagaaggtcctcatggttgtgatcccattgcaggttgcagctaacattgctgcagctgtggtcggtgagactggtccattcttgcagggatgggtaacatggaaccagatcttcttgtttgttgatgtcgcctgctgctgtgctgtgctcttcccggttgtgtggtcgatgcggtcgctgcgggagtcatccaagacagacggcaaggcggcccgaacccttgccaagctcacccttttccgccagttctatgttgttgtgattggatacctatacttcactaggatcattgtgtatgctctgaagacaatcaccaactacaagtacagatgggtgagtgttgccgcagaggaggtggccactgtggcattctacctgttcatgttctacatgttcaggccagcagagaggaaccaatatttcgctcttgatgaggatgaggaggaagctgcagagctggcactccgggaggaggagtttgagctctagagtgttgtgatccagtgagaggatacatgatgggaaatacagcctgacctgttcaatttctcctccattgatgtcggtcatactatacagatgcaggatttagcctatatttatctatgtgttatggatatattcactcttttcacttctttcttctagcatcaaatgttgttgagaagtccaaagataattgggctgcttgtgttgcaaattaggggcatttattc

SEQ ID NO: 4322 - DNA, 1327 bp, Oryza sativa
  ref <308>: DATABASE ACCESSION NUMBER: AK061721
  ref <309>: DATABASE ENTRY DATE: 2001-12-06
aaaaaagctcctccactgcagcaaaaagcaagcaacctcaccgaggaggggaatggaatggagctgagccttctccccgccccacgcgtgtagccgccgccgccggcgagcaggtttggagtgggagcgacgcggccgtggagagcaggtctcgtgtccggatcgaatcgaagggcgtttctagtgtcaaaaagagaggagggatggcgatgacggggtacaagtaccaagctcaggagttgatgagagactacttgctggctgatccactggttccgtacacctcggtgctcgtaggcattgccctgtgcaagatggcatatgatctcacaagggtactgagctcattttacttcaagggatattcttcactgacaaagatacaacgtgttgaatggaacaacaggggtatgtccagtgcacatgcgatctttatcacagctatatcattatatcttgtcatgtctacagatcttttctctgatcgccttaaggggcctatcacattccgcaattcaatcatctccacttttgcattaggggtttctgtgggctacttcatcgctgaccttgcaatgatcttctggttgtatccttcccttggtggaatggaatacatcgtccatcatactctttctctagttgcaatagcttacacaatgttgtcaggggagggtcagttctacacatacatggttcttatttcagaaacaaccacccctgaaattaacttgagatggtttcttgacacagctggactgaaaaagtcaagtgcttacttggttaatggtattctgatgttcgttgcatggctggttgcaaggatacttctgttcatttacgtattctatcacatctatttgcactacagtcaggtaatgcagatgcatgcttttgggtactacttgacatttattgtgccatcggtgctctttgtcatgaacacaatgtggtttatgaagatcttgaaaggcgtgaagaaaacattggggaagtggtcatgatcgatccaggaatgcagatcctagaaccgccaacaagagttggtattccagcgatcatccgtatgatcttgatgtgtaaagttatggacatatatcaggttaactaggtaaagcgaatatgtaaagtgctagtagcaaaaacaagtttagattaggccaaattgccgctattttcagcaagctggaatttcctagcctgtttggcacggtactgaagttcccagcacgctgtttctcccctcccgcatcgtgtgtatatctgaagaaatttctgtggatcagttgcccaacagtacaacctcaaatgctatagtatttgtgac

SEQ ID NO: 4323 - DNA, 1249 bp, Oryza sativa
  ref <308>: DATABASE ACCESSION NUMBER: AK061722
  ref <309>: DATABASE ENTRY DATE: 2001-12-06
ggagttggaggggagcacgcgccgaagcgacagcgcgaggtcgagcaggtgaagcgagtggggagggagggagatggcggggggcgggggcgcggggagtaaggtgtcggtcgccgccgtgcagttcgcctgcaccgacgtcgagtccgagaacgtcgacaccgcggagaggttgataagagaagctcataagaaaggagcaaacattgtccttgttcaggaactgtttgaggggcagtacttctgtcaagctcaaaggttggacttctttcaacgtgctaagccttataaagggaacccaactataatcaggtttcaaaaacttgcaaaggagctggaagttgtaatacctgtcagcttttttgaggaggcgaacaatgcacattacaattcagtagccattattgatgctgatggcactgatcttggcctgtaccgcaaatcacatattccagatggaccaggttatcaagagaaattttatttcaatcctggtgacaccggcttcaaggctttcaaaacgaagtatgctacaattggtgttggaatttgttgggatcagtggttcccagagtgtgcaagggccatggtgcttcagggggctgaaattttgttctatccaactgcaattggttctgagccccaggataataacctagattcccgagaacactggaagcgcgtcatgcaaggacatgctggtgctaacctggttccccttgttgcttctaacaggataggaagggaaaccgttgagactgagcatggtgaaagcactataacattcttcgggaattcattcatagcagggccaaccggtgaaattgtgaagcttgcaaatgacaaagatgaagacgttcttgtagcagagttcgacttggacgagatcaagtctaccaggcatggttgggggatatttagggaccggcgtcctgatctatataaagtgcttctaacattggatggcgagaaatcatgataaggtccacctttgtggagtcatctatccttgaaaaggtacatgagctccacaacattgggaggacatacacagggtccataaatgctgccactacaatcatggtagatcacccctcttcccttctcaggaatctctgttgtacacggcttctctgtgtttgctgcttagtgatttttcaccaatttccgattccacaataaaatgctcgtggtgtgtcgttctggcagacaattgagaatataacatattaaaacctctatgttatgc

SEQ ID NO: 4324 - DNA, 982 bp, Oryza sativa
  ref <308>: DATABASE ACCESSION NUMBER: AK104715
  ref <309>: DATABASE ENTRY DATE: 2002-08-28
ctcgcctcgccacctcgctcactacctacctctccaccaatggcgaccaccaccaccaccaccatctcctcctccctcataacccctccggccgcggccctccaccaccgcagcagctcctgccggtgcccctcccgcctcaccgtcggggccgcgcggtggtgggcgaggcgccggcagccggcggtggtggtgcgggtggtcgcctcctcgtcggtgctcgaggcgcccgaggaggtggcggcgcggaagctctacgtcgggaacatccccaggaccgtcaccaacgacgagctcgccgccatgttcgccgaccacggcaccgtcgagcgcgccgaggttatgtttgacaaatacactggccggagtaggcgcttcgggtttgtcacgatgagcacaccggaggaggctaatgctgcaattgagagcctgaatgaaactgaggtcggtggtagaaaaattaaggttaatgtgacggagagcttcttgcctaacattgatcggtctgcaccagaaccagagcctgtatttgtggacagtcagtacaaggtttacgttggtaatcttgcaaagagcgtgaccacagagatgcttaaaaacttcttctctgaaaagggagaggttctcagtgccaccgtgtcccggattccaggaactgcaaagtccaagggatatggttttgtcaccttttcttcagaggaagaagttcaggctgcagtttctactttcaacaatgcggaattggaaggacaacccatccgtgtgaataaagcataggcatctagcagatatttccagactggttgatggcaaagtgggtacctctgaggctgaagtaactttgtgaacacctgtagactgagggaaactttaaggctagatatttgcaacaaagtggaaagaccttccaatgcaatttcactttgcaactaaacaaattttgtacgataacagcatatgtgaagaaattttattggtgttc

SEQ ID NO: 4325 - DNA, 1212 bp, Oryza sativa
  ref <308>: DATABASE ACCESSION NUMBER: AK061723
  ref <309>: DATABASE ENTRY DATE: 2001-12-06
atctacacttgtacacaacactagcaaaccgccatggcgccgccgccgccgtgttgtgtgctagtggtacgctgctgttccggatccctcccttcgccgccgccgccgccgccgcccagaccctctccctccaacaacctcagaatcgccagaagagagtttgtgctgaggagcagtgagctcgccacgctcgctgccatcttccacttgagcggcacgaagccaaggtacctgggcgtgcagaagagtcctccatcgctggctctgtgccctgccaccaacaattgcgtttccacttgtgaggacatcactgactccattcactacgctcccccatggaactataaccccaaggacggacgcagggctaaacccatcaccaaacatgaagccatcaaccagctcattcaagtcgtcacacaaacaaagcctgacaacttcactcctcgcctagtagagaaaacagatgactatgttcgagttgaatacgagagtcctatattcgggtttgtagatgatgtggagttctggttccctcctggtaacaaatccattgttcagtaccgatcagcatctcgatcaggattcattgacttcaacgccaacaagaaaagagtcaaggcgctcaggttggcactggaaaacaaaggctgggcttcagaaagcaccatctgaacctaacctcaaggaagccaacccctcgagtctgtactggagtgtggattctaatccctcgagggatatcccctcgtatatctttttcttccaaattcgatgcaaatagttgtgaaaaattctaaaaaaaattgataatgtagagtataatgatacctactagtccaccaaaattcatgttcaaattcgatctacacatcgagaaacaaaaaagacaaatttagatataaacagtacgctattattcatacgctgaatttgtcttttttatatctcgacttgtgagttgagtttgaacttaagattttgtggagttgtatatatgtgttgtatgaatgttgtcaaatttttccagaatttttcataaccgtttagatggtttttgagcaaacaaggaaacatcccctcgagggattaaaatagttttcctctgtgctgtacagactgaccgaccgattggctggtacaggcactcttccttcctggcgcttttaattgcacatttctcctatccttaatggattagtagaccttgat

SEQ ID NO: 4326 - DNA, 902 bp, Oryza sativa; identical to SEQ ID NO: 2157
  ref <308>: DATABASE ACCESSION NUMBER: AK104716
  ref <309>: DATABASE ENTRY DATE: 2002-08-28

SEQ ID NO: 4327 - DNA, 1152 bp, Oryza sativa
  ref <308>: DATABASE ACCESSION NUMBER: AK104717
  ref <309>: DATABASE ENTRY DATE: 2002-08-28
aaagccagccaggcgagggaggaaggaaggaagaagagcaggaggagcccaacgcccgcgaaaccctagccctcgcgctcgcccaccgccttcctctccccccctaccctaccccgagctcgccacccgatccgatcgaagatgcataagctggggagaggaagccgcgacaaggtgcagcagttcatgaccataactggtgcgagtgagaaggtcgcccttcaggccctgaaagctagtgattggcacttggaaggagcttttgatttttttctacagccaaccacaaatttctctgacgaactctcggcatcttgaagatctgtacaacagatacaaagaacctgatgttgatatgatcatggtggaaggtgtatctcagttttgcactgatcttcaggtggatccccaggatattgttatgcttgtcatatcatggcacatgaaagctgccacaatgtgtgaatttactcgccaggaattcattggtggactgcagtcaattggggtggattcaattgaaaagctccgtgagaaattgccatctttacgggctgagataaaagatgaccataaattccgtgagatatacaactttgcttttgcttgggctagggaaaagggtcaaaaatctctcgcactggagactgctcttggaatgtggcagttgctctttgctgaaaggcactggccccttatcgaccattggtgccagtttttacaggtgaggcataataaagccatttctagggacacatggtctcaactgttggaatttgtcaagacgatcgatccacagttatccaactacgacgaagaaggtgcttggccctacctaatagatgaatttgtggagtacctaaccgagaatggattcgttcagcttaggaagtgaacaatgggaggcccacattctcactacttcaaatacaatcatgattgggctgtacaaacgtgtgagattcatctcggtctatacagtgttcagggcttggccttggcgttcttgcgcaactgatcgcaaacagtggacatgtatccttacgtgatgacatttgctcgcgcaaggggacgatttgatttgggaagtggtgactgccattgtggaattatcacttacggtttatttaatatatattgtggtcggcgcag

SEQ ID NO: 4328 - DNA, 1260 bp, Oryza sativa; identical to SEQ ID NO: 2184
  ref <308>: DATABASE ACCESSION NUMBER: AK104718
  ref <309>: DATABASE ENTRY DATE: 2002-08-28

SEQ ID NO: 4329 - DNA, 1399 bp, Oryza sativa
  ref <308>: DATABASE ACCESSION NUMBER: AK104719
  ref <309>: DATABASE ENTRY DATE: 2002-08-28
acagtcgcctcctcccctgccaaaccagtctcccccaaatctcctttgcgtcctctcgattcctcagcgaccatgtcggcctactgcggcaagtacaaggacgagctcatcaagaatgctgcctacattggcactcctggcaagggtatccttgctgcagatgagtccactggcaccattggcaagcgctttgccagcatcaatgtcgagaacgttgaggagaaccgccgctctctccgcgagctgctcttcaccacccctggtgccctccagcacctaagtggtgtgatcctcttcgaggagaccctgtaccagaagaccaaggacggcaagcccttcgtcgatgtcctcaaggagggtggtgtcctccctggcatcaaggttgacaagggtaccgttgaggttgccggcaccaacaaagagaccaccacccagggccacgatgatcttggcaagcgttgcgccaagtactacgaggccggtgcccgcttcgccaagtggcgtgctgtcctcaagattggccccaacgagccatcgcagctttccattgacctgaatgctcagggtcttgctcgctatgccatcatctgccaggagaacgggctggtgccgattgtcgagcctgagatccttgtcgatggctctcatgacattgagcgctgtgcctatgtcaccgagaaggtcctcgctgcctgctacaaggccctcaacgaacaccatgtcctcctggagggttccctcctgaagcccaacatggtcaccccaggatctgaatccaagaaggtttcccctcagctcatcgccgagtacaccgtccgcgccctccagaggactgtccctgctgccgtgcctgccattgtcttcctctctggtggacagagcgaggaggaggcgaccgtgaacctcaacgccatgaacaagctcagcaccaagaagccgtgggctctgtccttctccttcggccgtgctctccagcagagcacgctcaaggcctggggcggcaagacggagaacgtggtgaaggcgcagaaggccttcatcaccaggtgcaaggccaactctgaggctacccttggtacataccagggtgatgctgtgctcggcgagggtgcctctgagagccttcacgtcaaggactacaagtactgatctgcttctggtggtggctgaagatccgattggacatcctccgtatgcatatttagggttctgagtgtggtttggctatcaagcgtccaatcttacgggtatcaaaaacttttgtcgcaataatctgaacctgtgctttttaataattaatacctgtcatcggtagtagttttttggtattcctgtaatcaaatgctgcgtatggtaaattggagcagcggctttaattccatgctatctttttattgtt

SEQ ID NO: 4330 - DNA, 1059 bp, Oryza sativa
  ref <308>: DATABASE ACCESSION NUMBER: AK104720
  ref <309>: DATABASE ENTRY DATE: 2002-08-28
acatcttctttctcttcgtcttcgtcttcgtcttcctctttcccttttccagcttttcttctcctcctcctccgcaaccagatcaaaccctagatcagatctcatccccccaccttcgtcatcccatacgaggaggttattatggattcttcgtcttcatcgtcgtccacccaggcgcagagccagccggattttgattacctctttaagctgctcctcatcggcgactcgggcgtcggcaagagcagtctcctcctccgcttcacctccgactctttcgaggatctctcgcccaccataggtgtcgacttcaaggtcaagatggttaacaccggtggcaaaaaaactcaagcttgccatctgggacacagctggacaggagcgatttagaaccttgaccagctcatactacagaggtgcacagggtattattatggtgtacgatgtcactcgacgggaaacattcaccaatctttctgacatatgggctaaggaaattgacctctattctacaaaccaggattgtattaagatgcttgtcggaaacaaagttgacaaggaaagtgagagagctgtgacaaaaaaagagggcattgaatttgccagggaatacgggtgtttatttctagaatgcagtgctaaaaccaaagtgaatgttgaacaatgctttgaggaactcgtcctgaagatattggacacaccaagcctcttggctgatgcttcctcaggtgcgaagaagaacatcttcaagcagaagccgccagaagccgatgctgccgctagcagctgctgttaacatgctggtgatgctaatctgggctctttgttgatgaaatattggttgctgaaagtgataagcttggtttgtgtcgatttgtttttgctttctgtatatttccatgttgaaccgcccaccccaatgatgcatacaaaaaaaacatataatctccattacgtcagcagctatataatgtattaagttcaatttactgaatatctacgaaaggatgtttcctcttttattgttagtgttgttcaatgaaaatatgtttcactttc

SEQ ID NO: 4331 - DNA, 1043 bp, Oryza sativa
  ref <308>: DATABASE ACCESSION NUMBER: AK104721
  ref <309>: DATABASE ENTRY DATE: 2002-08-28
ttcgcttcgccaccgcgttcgccatggccttcgtctccgccgccgccgccgccaccgccgccgccgccttcctccccggcgtctcgtccgcgtcccgcgcaggaacacccttgctctcgctgcaacggcagccgctcgcgggttccctgcgcgcggcggcgcaggggtcgagcgcctcttcggggcaggtggtgatggagagcaaggtcaaggcgaagaagaagaaggggtccggcgccgggaacctccccggagccatcgacgcggagatcagggaggcgcaggactacctcgccatcgacgagcaggaacctgttccggaaaacttcccttttgaaatccttgacgaagaagggatgagtgtggttattctgaaaagggactacaaagatgagaagattgaggtcattgtcagcatgccaaatttagaagggggccctgagtttgacgacgaagaagccgagggtgagggcaagaatgctagcaaggatgatgaagatgaagaggaagacgagagcgctggagatagcagcgtgtctctaaaggtgacagtctccaagggctctgggcccaaacttgagttcacctgcacagcctttcgtgaggagatcaccatcgacgacatgttaatagtggagaatgcagccacagaaggagatgagaaattcccttacgagggccctgaattcaccgagctaccggtgaatgtgcagaagggcctattcaagtacctggagcaaagagggatcactctgccgaccaccaactacatgcacgattacatggtgaccaagcaaaccaaggagtacgtcgggtggatgaccaagctgaaggacttcgtccggcaatgagaaattgccgagcaatttggcaggatttttggtagcttagccttttagcatacctgcatatgtaacaaggattactagaattatgcgaagcaatgcaacaaccggggaaactgccttccctgcaatgtgcgatttctgatgcccagtagtcaatctgaggctattggcacttatgatatcagtgcttatttt

SEQ ID NO: 4332 - DNA, 1156 bp, Oryza sativa
  ref <308>: DATABASE ACCESSION NUMBER: AK061724
  ref <309>: DATABASE ENTRY DATE: 2001-12-06
aactgtatgatttctctgcaaatgctacaactcaaaattaatatgccttgtcaattacagatgatgcttcccaagctgaaggcattaaggttgagagatccatagaattctcatatgaagagatttttaatgcaacacagggattttctatggaacataaaattgggcaaggtggttttggttcagtgtattatgctgagcttagaggcgagaaaactgccataaagaaaatgggcatgcaagcaactcaagaattccttgctgaactgaaggtcttgacacatgttcaccacttgaatctggtgcgcctgattggttattgtgttgagaattgcttatttcttgtctatgaatttattgacaatggaaacctaagtcagcatctccaaaggactggttatgcgcctctctcatgggctaccagagtgcaaattgccctagactcagcacgtggtcttgagtaccttcatgaacatgttgttccagtatatgttcatagggatatcaagtctgcaaatatcctattagacaaggacttccgggcaaagattgctgattttggactagcaaaacttacagaagttggaagtatgtcgcagtcactgtcaacacgagttgctggtacatttggttacatgcctccagaagctcgatatggtgaggtttctcctaaggtggatgtctatgcttttggtgtcgtcctttatgaacttctttcagccaaacaagctattgtgagatcaagtgaatctgttagcgaatcaaaaggactggttttcctgtttgaggaggccctcagcgctccaaaccccacggaagctcttgacgaactgattgatccgagcctgcaaggggactaccccgtcgactcggctctcaagattgcgtcccttgcaaagtcctgcacgcatgaggagcccgggatgaggcctaccatgagatccgtcgtcgttgccctgatggcgctcacagccaacaccgatcttcgcgacatggactaccaccctttctgaggacaggttaactggaccaagtgtaaaaatgtaaagtgatgtgtaaaaatgtgcagttagtcacttgatggatgcatatcccatttaattgtaggcaaaatttgggtacctgaggaaagcaaaacagaagaatagtttcctgt

SEQ ID NO: 4333 - DNA, 1078 bp, Oryza sativa
  ref <308>: DATABASE ACCESSION NUMBER: AK104722
  ref <309>: DATABASE ENTRY DATE: 2002-08-28
acactacaccccgctccactctcaggcaggcaatcagcggcgaggcaccagcccaccggccggcaatggcgtccacctcctgcttcctccaccagtccacggcccgcgtcgccgcgcgcgtcgcctccccgtccccggcgacacggacccacctcctcgtctgccgcgcccagaagcaggacgacgccgacgtctcccgccgcgcggcgctcgcgctgctggccggagcgacggcggcggtgggggtgaaggtggcgcccgccgccgcggcctacggcgaggcggcgaacgtgttcgggaagcccaagacgaacacggagttcatcgcctacagcggcgaggggttcaagctgctgatcccgtccaagtggaaccccagcaaggagcgcgagttccccggacaggtcctccgctacgaggacaacttcgacgccaacagcaacgtctccgtcataatcaaccccaccaccaagaagaccatcaccgagttcggctcccccgaggagttcctcgcccaggtcgacttcttgcttggcaagcaggcctactccggcaagacagattccgagggtgggtttgagtcggacgcggtggcgacggcgaacatcctggagagctcggcgccggtggtgggagggaagcagtactacagcgtaacggtgctgacgaggacggcggacggcgacgagggcggcaagcaccagctgatcacggccaccgtcaacgacggcaagctgtacatctgcaaggcgcaggccggcgacaagaggtggttcaagggcgccaggaagttcgtcgagagcgcagccagctccttcagcgtcgcatgatcgtcgaaatctctatctcagcttctctttaatccctagcgaatcaaaatcaaatcaatcgagttcgttgctcagagagatgcagtgcacgcatgtgtgtgtgcgtgtgtgtttctttgattgtacatgagaattaagaacaagttaaggagagaggtcgatccatcgatttcccctgcatgcaaggattgattttctgtgatccgtgtgttaagtaatcctagtaattaatcatgtttcatttttgt

SEQ ID NO: 4334 - DNA, 1055 bp, Oryza sativa
  ref <308>: DATABASE ACCESSION NUMBER: AK061725
  ref <309>: DATABASE ENTRY DATE: 2001-12-06
agtcgccgccttcttcctcctcctccgccgccgcccgcctcgccgcctcccgagagctccaccctcgcctccggcgaaatggcaccgaagcgaggcggcagggcgccggtgccggcgaagaagaagacggagaaggtgaccaacccgctgttcgagaagaggccgaagcagttcggcatcggcggcgcgctgccacccaagaaggatctgcacaggttcgtgaagtggcccaaggtggtgcgcatccagcgccagcgccgcatcctcaagcagcgcctcaaggttcccccggcgctcaaccagttcacccgcaccctcgacaagaacctcgcaaccaacctgtttaagatgcttctcaagtaccgccctgaggacaaggctgccaagaaggagaggcttttgaagagggcccaggctgaggctgaagggaaaaccgttgaggccaagaagccaattgttgtgaagtatggtcttaaccacgtgacttacctcattgagcagagcaaggcccagctggttgtcatcgctcatgatgttgatccaattgagctggttgtgtggcttccagccctgtgtaggaagatggaggtcccttactgcatcgttaagggcaaagctcgccttggatcgattgttcacaagaagactgcatctgttctgtgcttgaccactgtcaagaacgaggacaagcttgagttcagcaagatcttggaggccatcaaggcgaacttcaacgacaagttcgacgaggtcaggaagaagtggggaggcggcgtcatgggctccaagtcgcaggcgaagaccaaggccagggaaaagcttctcgctaaggaggccgcccagcggatgacctaaattatattcgccccccgccgttgagctcgccctgtagtttcatttttcagtgtaatgattttgacgaggaactcagttagcaccatgcgacagtgctgtggttttctgaagtctagtttcatatattttctgttcaccggaccatgttgggaaactatgcaagatatcagagctttacaatgtttggtttctacgcagtt

SEQ ID NO: 4335 - DNA, 1477 bp, Oryza sativa
  ref <308>: DATABASE ACCESSION NUMBER: AK061726
  ref <309>: DATABASE ENTRY DATE: 2001-12-06
gtcccaatcggaatagatcgatatcatctcctctcatctcatcttaattatctctcccatgtgtccctagacatatagtccatgcactaatcgatcgatatatctatatagttttcgagagatattttgctggttgcaattagtctcgagcttacagcgaccttccaggtcagaggtagccggattaaatccttggtttatttatagtgcttgatcgatcatgtcgtcttcctccaatagcgactccggcaagaagggcggcaaccctctggaagccatgggcgccttcttctcgtcgcaggtgaaccgccggaagctggtcaccagcgagaagcaggcgctggccacgcggctgtccgccggcggcgaggcgttccccggcagcgagcaccggccggccgaccggaagacgtggatggcggagctcgggccggagcggctgcgcgtgcaccagctggtgtggccggggacgcacgactcggcgacgaacaagatcggcatcccgttcgtgacgcgccccttcgcgcagtgccagtcgctgtcggtgtacgagcagctcgccgcgggcgcccgcgtcatcgacgtgcgcgtccaggaggagcggcgcgtctgccacggcgtgctcgcaacctactccgtcgacgtcgtgctcgacgacgtgaggaggttcctcggcgagacggcgtcggaggtggtgatcctcgaggtgcgcaccgagttcggccacgacgacccgccggagttcggcaggtacctggtggagcagctcggcgagcacctgatcccgcaggacgaggcggtgttccacaagaccatcgccgagctcctcccgcggcggctcatctgcgtgtggaagccgcgcaagtcgccggcgcccaagcccggcgagccgctgtggagcgccggctacctcagggacaactggatcgacaccgacctgccggagaccaagttcgagagcaacgtcaagttcctcggcgagcagccgccggtggccgaccggaggttcttctaccgggtggagaacacggtgacgccgcaggccgacaacccggtgctctgcgtccggccggtcacgcggcggatccacggctacgcccgcctcttcatcgccgaggtcttcgccaagggcctcggcgacaagctgcaggtgttctccaccgacttcatcgacggcgacttcgtcgacgcctgcgccggcgtcaccaaggcccgcgtcgacggcgccgcgtgagattgcatggccgggccctgtagtaattagaggggtcgccgcgtttagaggatttgcttcgtttcgccggtgtcgcagcgtacgtacagattagtttgtgttgttcgtgttagacacgtgatttatgaatgatttattatcatgcatgtgttgggcgttcgtgtgtgatttaattgttgaaatgtatatagtggtgaaattgctcgtgtacaaaggaataatcgcaaagtgctcgttttgttg

SEQ ID NO: 4336 - DNA, 1596 bp, Oryza sativa; identical to SEQ ID NO: 3896
  ref <308>: DATABASE ACCESSION NUMBER: AK104723
  ref <309>: DATABASE ENTRY DATE: 2002-08-28

SEQ ID NO: 4337 - DNA, 987 bp, Oryza sativa
  ref <308>: DATABASE ACCESSION NUMBER: AK104724
  ref <309>: DATABASE ENTRY DATE: 2002-08-28
aaaatcgctctcctctcctctcctctccaccgccgccgatctcctcctcctccggcgccgtcgccgcgtcgcctcccggagctccggtgctgccaccagcctacgcagcgccgcctcctcctcctcctccggcatccgccaatcgccgccgcctggttcgtcggggagccccgcgccctaacgttttctagaggcgccgcggatccagcgcgaatcgatcgagaggtaaaggggaagttgatttgagtcggcggccgaagaaggaagccatgaactcgagaagcaccagaacttctctttttgatggcattgaggagggcagaatccgtgcaacatcctattcttcacatgagatagatgagaatgagaatgatcaagctattgatggattgcaggatcgagtcagcattctcaagcggttgtctggtgatatccatgaagaggtggaaactcataaccgtatgctagaccgaatgggcaatgatatggattcgtcaaggggttttctgtctggaacagtggacaagttcaagatggtttttgagaccaaatcaagtcggaggatgggaaccctcgtagcatcattcgttgcgctttttctgctggtatactacttgaccaggtagaagaggaccatgcatcacttgcctactgttgtgaagcgatgtgaactgggttgggtactcaagaacacgctgaaaatgtctgtgtcaatttaccgtggtgtcgtatatacctccaatatctcgctgtcataaagcaaaatatgttgaccagaatgtttctaactctgcactgtgtgaggattacaacatgttcgtcgtttgctctggtgctgtaattacctttacagaaaatgtttcctgctgtgttctgtaacatctgtttctgtatgcggtcatgctatctgtattatattataacttcacaagagattgtactttggagtcttaattgccatatataagacgctattagtatgtggtt

SEQ ID NO: 4338 - DNA, 1136 bp, Oryza sativa
  ref <308>: DATABASE ACCESSION NUMBER: AK061727
  ref <309>: DATABASE ENTRY DATE: 2001-12-06
ttgtattgggttggatcggatcggattagccgcgctatagcgtcaggggatcagctcggctcactgtggtttttgaggtgttagggtttgagtgctaggttgtttgcttgatggatggtcattcctgtggtgatctcgggagagtgtcggaagtgatatccgacggcacctcatcgggtagcgcagacggcggcaagagcctgcctgagaagcattctgcgctggctgatgctacttctggagtggcggcggagaatgccgataatttgtcacaagctgggaagtacatggatttctccagtaccaccagcttgggggtgaagaaaggcttccagaagtgcatgacgtttccgccctctagcggcgaggcacaacagcagcagggttcatgctgtgatgcagataagaatcccaaggatgtgccaacctatgagcgctccgtgtcactgcccccaattttgaagatcatatctgctatgaaaggaagccgccaaaagaatgggatggcttcatcaactgaaagtcgccacgtcaaatgggcccctgacgtgtatgaccccccagtgacatctgtatgtcattcagtgaataacagctaccagcgtcggtccaaatcccggaagaaggacaagaataagcagaagcagaaacaaaagcaaaagggtaggtccaagaaaaaccaccagaatgctatccagagttcagcagtgctccaagctcctggcgaatttgataggctcaaggatgctgaaaccacaagtagtaattcagcaccagacgatctcaacaaacatgagaccgatatattggattatggcatcagcagtcaagacgccaaatgtggaagcagctttttgcgtgaatcggctgctaaaatgcatttctccactgctgaggcttcctgaaagaaaggaaaatgagtcctgcggattctcccttggtatgtaaatatgatggatgtgtagataaataaaatccagtttgttgttgtgtttcctgctgtgtgaggcgttaagagaacttctggcgtgctttgatttggagcagttaccatgactgttggactggtttttgtatgtattgatggacaaagctagtaagcattaatctatgagctgcagttgttttccttgatc

SEQ ID NO: 4339 - DNA, 1286 bp, Oryza sativa; identical to SEQ ID NO: 3857
  ref <308>: DATABASE ACCESSION NUMBER: AK104725
  ref <309>: DATABASE ENTRY DATE: 2002-08-28

SEQ ID NO: 4340 - DNA, 1036 bp, Oryza sativa; identical to SEQ ID NO: 2200
  ref <308>: DATABASE ACCESSION NUMBER: AK104726
  ref <309>: DATABASE ENTRY DATE: 2002-08-28

SEQ ID NO: 4341 - DNA, 1200 bp, Oryza sativa; identical to SEQ ID NO: 3888
  ref <308>: DATABASE ACCESSION NUMBER: AK104727
  ref <309>: DATABASE ENTRY DATE: 2002-08-28

SEQ ID NO: 4342 - DNA, 1393 bp, Oryza sativa
  ref <308>: DATABASE ACCESSION NUMBER: AK061728
  ref <309>: DATABASE ENTRY DATE: 2001-12-06
atggaaaaataccatgaaatacaaatggaaaaaatagggtagagcccagagcattggatgtgcagattaaagctatactactagcattcaagtttttttcaactctgctgcgtaggaggcgtgtgtgtgccatgtgttgctggtgctgctgcctggactgcatccataacatacctccactcaatctcctcttcctccatttctccccccattctctctcctcctcagctgcttctgcaggtggaggagaagcagcagcagcagcagctgttgctcccatggcttccatctctgtcccaaacccagctccttcccctacagaggatgcagagagcataagaaaggcagtgcaaggatggggaacggacgagaatgcgctgatcgagatcctcggccaccggacggcggcgcagcgggcggagatcgccgtcgcctacgagggcctctacgacgagaccctcctcgacaggctccactccgagctctccggcgacttccgtagcgcgttgatgctgtggacgatggacccggcggcgcgggacgccaagctggccaacgaggccctgaagaagaagaagaagggcgagctccgccacatctgggtgctcgtcgaggtcgcctgcgcgtcgtcgccggaccacctcgtcgccgtcaggaaggcctaccgcgccgcctacgcctcgtcgctggaggaggacgtggcgtcgtgctcgctgttcggggacccgctcaggcggttcctggtgcgcctcgtgagctcctaccggtacggcggcggtggcgtcgacggcgagctggcgatcgccgaggcggcggagctgcacgacgcggtggtgggcagggggcaggcgctgcacggcgacgacgtcgtccgcatcgtcggcacgaggagcaaggcgcagctcgcggtgacgctggagcggtacaggcaggagcacggcaagggcatcgacgaggtcctcgacggccgccgcggcgaccagctcgcggcggtgctcaaggccgcgctctggtgcctcacctcgccggagaagcatttcgctgaggtgatccggacatcgattctagggcttggcaccgacgaggagatgctgacgagagggatcgtgtcgcgggcggaggtggacatggagaaggtgaaggaggagtacaaggtcaggtacaacaccacggtcaccgccgacgtccgcggcgacacgtcggggtactacatgaacacgcttctcaccctcgtcggccctgagaagtagccatgtagcagcttggacattttattgcttgctcatttgatttgaacaaaatacaccgtgtgatgttgcagttattagtaaaatgcgagtaggatcgatgttgttttcgttgggtggattaataatggagcatgttttatcgc

SEQ ID NO: 4343 - DNA, 976 bp, Oryza sativa
  ref <308>: DATABASE ACCESSION NUMBER: AK061729
  ref <309>: DATABASE ENTRY DATE: 2001-12-06
caaacagtgagacgagtctgcagaaggcggtagcaaaccagcccgtcagtgttgcaattgaagccggtggcagagcattccagctctactcatcgggtatcttcacgggtaaatgtggaacagcactagaccacggcgtcgctgctgttgggtacggcacagagaatggcaaggactactggatcgtgaggaactcgtggggcaagagctggggtgagtccggctacgtccgtatggagcgcaacatcaaggcgagcagtggcaagtgcggcattgccgttgagccatcctaccctctgaagaagggcgagaaccccccgaaccccggccctactccgccgtccccaaccccgcctcccaccgtctgcgacaactactacacttgccccgatagcaccacctgctgctgcatctacgagtatggcaaatactgctacgcctggggctgctgcccactcgagggcgccacctgctgcgatgatcactacagctgctgccctcacgagtaccccatctgcaatgttcagcagggaacctgcctcatggctaaggacagtccactggcagtgaaggctctgaagcgtaccctggcaaagccaaacttgtctttcttgtttggcaacggcaagaagagcagcgcttgagcaatttcagaaccgtatcagaccgtccagagccagcgtggttgcatcatcaaatgatcagctggtaactgacgaagacgattgcgcagctcggcggcgaaccctgcgcactaagtatatctgcttttataatagatttctcgtgtacataaaatctaaaaaaacgggttcagttggttacagaactgccaaatttgcttctgaatgtatatgtaaaattcagctaggtttgctcctaagctcctagatgccagttcgacggaactgcaaattgatattggaacaagataaggtcattgccatattaatccatcattcatgtattccatacc

SEQ ID NO: 4344 - DNA, 1142 bp, Oryza sativa; identical to SEQ ID NO: 2205
  ref <308>: DATABASE ACCESSION NUMBER: AK104728
  ref <309>: DATABASE ENTRY DATE: 2002-08-28

SEQ ID NO: 4345 - DNA, 938 bp, Oryza sativa
  ref <308>: DATABASE ACCESSION NUMBER: AK104729
  ref <309>: DATABASE ENTRY DATE: 2002-08-28
agctcaaacactgtgtactacgcaacacacacataggcacagttagtgcacgtacatcttgctgaatttgcttgagctcgtacgtgcgtagtgtggtagccatggccaaggcagtgatgatgctccccgtcctcctctccttcctcctgctgccattctcgtccatggcgctgacgcaggatttctgcgtcgccgacctgacctgcagcgacacgccggcggggtacccgtgcaaggccagcgtcggcgccggcgacttcgcctaccacggcctcgcggcggcgggcaacaccagcaacctcatcaaggccgccgtgacgccggccttcgtcggccagttccccggcgtgaacgggctcggtatctccgcggcgaggctggacatcgccgtcggcggcgtcgtgccgctccacacccacccggccgcctccgagctcctgttcgtcacccagggcaccgtcgccgccgggttcatcacctcctcctccaacaccgtctacaccaggacgctgtacgccggcgacatcatggtgttcccccagggcctcctgcactaccagtacaacgccggccagtcggcggcggtggcgctcgtcgccttcagcggccccaaccccggcctccagatcaccgactacgccctcttcgccaacaacctgccgtccgccatcgtcgagaaggtcaccttcttggacgacgcgcaggtgaagaagctcaagtccgtcctcggcggtagcggttaagttcgtcgtacgtctctctccggtcgagttggtcgccgccgccgccgtcgtcgtcgtcgtggtggtcactccgtgtgattgattaatttgcatgcatgcacttctgtcatgggaatgtgtctgatttcttttttcatgttatgcttaatttgttcatgtcaatttctttcagattaattaagtggtggttcaaat

SEQ ID NO: 4346 - DNA, 1085 bp, Oryza sativa
  ref <308>: DATABASE ACCESSION NUMBER: AK061730
  ref <309>: DATABASE ENTRY DATE: 2001-12-06
acaccggagccatagccggcgggagaggccagcccgactgccagagcctctacctacgactatccgcggccggatggcgccccgcgtgtccctgctcgccgccggcgccgtggccgtggccgtggtcctgcttctcgccgcgccggcgcgggcgtccaacgacgagggggacgcgctgtacgcgctgcggacgaggctgtcggatcccaacggcgtgctgcagagctgggacccgaccctcgtcaacccctgcacctggttccatgtcacctgcgaccacgccagccgcgtcgtccgcctggatttaggaaactccaacatctccggctcgattggccctgagctaggccgtcttgtgaacctccaatacctggagctctacaggaacaatcttaacggtgagatcccaaaagaattgggcaatctcaagaatttgatcagcttggatttgtatgccaacaagctcactggaacaatccccaagtcgctttccaagctcggctcgctgagattcatgcggttgaacaataacaagcttgctggatcaattccaagggagctggctaaactatccaacctgaaagtcattgacttgtctaacaatgacctctgtggaactattcctgttgacggtcccttctcaaccttccctcttcgaagctttgagaacaacaacaggctcaacggcccagagctgcaaggtttggttccttatgactttggatgttaagagctccatgttggtgaagtagcacagcaatgcatgtcgtccgttgataaatggaaaagaatatagtagtacaaataggaaagctagcatgtatgttgtgagttcacatatgcagcagagctgcagagctaaagagggaaggttaatgtacccaggcagcatgaacaaagaatgtattcagagaagttttacttatattcatgatacaggtactatgtatgtaaatttcaagctgctttactgcagtcgtgtttttaggtgatgcaaatcctagcgacacgaattaacgtacatattgtacattctcccagtcccaccaacggttgaaataccagcattgcatgttaaaagaatc

SEQ ID NO: 4347 - DNA, 1988 bp, Oryza sativa
  ref <308>: DATABASE ACCESSION NUMBER: AK061731
  ref <309>: DATABASE ENTRY DATE: 2001-12-06
aagcgtcctctggagaaaggaaaatccatatccaattgagaggaagcagagggggagagaggaaggaggcaggaggctgccataactccgcccgcaacctccgctctctgtctcgcggtgacctcgtacgtacccccgcgctagctgttaatggaaacgccgcgccctctcctcctcccttcccatcatcctcccgcggcctcgccctcctcttcttcttcttcctcctccttcccctacagatagcgaagcgagatggattgttgtagataggatacgcatactgtggctcttcccccctagcttcttccatctcctcgatcgtgttcagtttgattttggttttcgcttgtcactgtgtgggtggtggtgttgttggccatggcgaggagtggtggggagttggtggtggtggaggaagacgatgagtacgccaagctggtcaggaggatgaacccacccagtgttgtgatagacaatgactcgtgcgacagtgcaactgtcatccgggttgatagggtcaagaagcatggcattttactggaggctgttcaagtacttgtggacctcaacctcgtcatcaccaaggcttacatttcttcagacggcaactggttcatggacgtgttcaatgtgaccgatcaggacggcaacaaggtgcagaacaaggaggtcactgactgcattaagaaatgcttggagtcggaggattacctcgtgctgccggcgagctcgccggccggcggcgctgcgccgtcggaggagaccacctgcatcgagctcaccggcaccgaccggccggggctcctctccgaggtgtgcgccgtgctggcttcgctgaggtgcaacatcgtgaacgccgaggtgtggacgcacgaccgccgcgccgccgccgtcatccagatcaccgacgaggccaccggcctccccgtccgcgacggcgggcggctgtcccagctgcaggagctcctcggcaacgtcatgcagggagacggcgacggcggcggtgacagcaggaagggcagcacggccgtgtcgctgggcgccgcgaacgccgagcggcgcctgcacaggctcatgctcgacgacggcgacgccggccgatgcggcgaggagcggggcggcgtggcggcggcgaaggcgaaggcgaaggtggtggtgatggactgcacggagcggcggtacacggtggtgatcctccggtgcagggaccggccgcggctgctgttcgacacgctgtgcgcgctcaccgacctgcactacgtcgtcttccacggcaccgtcgacgccgagggcggcagcgccaaggaggcctaccaggagtactatgtccggcacgtcgacggccacccggtgcgctgcgacgccgagcgcctccgcctcgtccgctgcctcgaggccgccgtcgagcgccgcgcctccgacgggctggagctggaggtgaagacggaggacagggcggggctcctgtcggagatcacgcgtgtgttccgggagaacagcctgtcgatcatccgggcggtgatcaccaccaaggacggcgaggccgacgataccttctacgtctccgacgcctacggcaaccccgtcgacggcaaggccatggaggcgctcggcgagcagctcggccacgccgtgctgcgcgtcaagagcaacggccgcgccgccatcaaccgcgccgaggacagcggcggcggcggcgcggcggccatcattggcaacctgctcaagggctcgttccaggggttcaggctcatcagatcctactcctgaaaaaaaaaattgctcattttctcaccaagaagatcagaaacacgaccttgttcatacataagaatctgacgactttagcttaggaaataaatggagaatggggtgatgtaaatagtcttgtggatatctgaaaacgccattgcttcttcagcatcatacacttaggttaaggttaacttgcattgtacatataatttgtaaagtggttctcatct

SEQ ID NO: 4348 - DNA, 1338 bp, Oryza sativa; identical to SEQ ID NO: 3893
  ref <308>: DATABASE ACCESSION NUMBER: AK061732
  ref <309>: DATABASE ENTRY DATE: 2001-12-06

SEQ ID NO: 4349 - DNA, 1447 bp, Oryza sativa; identical to SEQ ID NO: 3942
  ref <308>: DATABASE ACCESSION NUMBER: AK104730
  ref <309>: DATABASE ENTRY DATE: 2002-08-28

SEQ ID NO: 4350 - DNA, 1696 bp, Oryza sativa
  ref <308>: DATABASE ACCESSION NUMBER: AK104731
  ref <309>: DATABASE ENTRY DATE: 2002-08-28
gtgcccctccgccgcacgcgttccccatccccaccaaagcttcttcccccgagaggcggcgaaatccccaaatccgaacaagccaaagccatcgtcgagctccttcacccaccgatcgattcgatctgaccgcgccgccgcaagggaggaggaggaggaggacgacgagcagcagccatgtgggcggcgtcttgcctggcgtcgtgctgcgccgcgtgcgcgtgcgaggcgtgccgtacggcggtcggcagcatcggccgccgctccgcccgcatcgcctactgcggcctcttcgcgctctccctcttcgcctcctgggcgctccgcgaggtcgccgcgcccctcctccaatccatcccatggattaaccacttccacaagacgcccgaccgcgagtggttcgagaccgatgccgtgcttagggttagcctcggcaacttcgtcttcttcaccatcctcgccatcatcatggctggcatcaaggaccagaaggacccccgcgacaagatacaccatggcggatggatggccaagatattctgctgggttgtcatcgtcttcctcatgttcttcgtgcccaacggcgtcgtaagcttctacgaatcaatatccaagtttggatctggactgttcctgcttgttcaggttgttcttttgttggactttgttcatggatggaacgagaattgggttgccaaggatgaacagttctggtacatggctctattggttgtctcagttgtctgttacattgtcacattctctttctcgggtctgctctttcactggttcactccatctggacatgactgcggaatcaatctgttcttcattgtcttcacactgattcttgtttttgtttttgctattgtcgccctgcacccaaagatcaatggtagcttgctgccagcatcagttatcgccctctactgcacctatttgtgctacagtggactttcaagtgagccgagggattatgaatgcaatggactgcacaaccattccaaagctgtgtcgactggtagcctttcgctgggattgctaaccaccatcctttctgtggtctattcggctgtccgtgctggctcatctgcaactgtgctctcagccccagactcaccacgtgctggtgccgacaagccactgcttcctttcagtaaggcagatgaggaagcggaaaagaaggatgtgccaaggccagtgacatactcctactcgttcttccacctcatcttctccttggcaagcatgtactccgcgatgctcttgactggctggtcaacctcagttggtgagagtggaaagcttgttgacgttgggtggccatccgtttgggtcaggattgcaacccagtgggcaacggcaggtctgtacatttggtcccttgtcgccccactcctcttccccgatagggaattctagatgaaccagcgtaagtactcaactgctgagatcgcatccttttggagcatcatctatcttgtcaagcttatttgcaaatagctaagccgtctctctatgtgtggtctgtaatattaaccgtgcgtaaaccagtggcaagaagtccctgtccgtgtcatggttatcgagtctgtctacttaataacgtgtgataccaggcattgtgcctgtattttaacagtaaaaattgggtacgttgtttgtgtttgtatatatattggagttggtttacctc

SEQ ID NO: 4351 - DNA, 1239 bp, Oryza sativa; identical to SEQ ID NO: 3928
  ref <308>: DATABASE ACCESSION NUMBER: AK104732
  ref <309>: DATABASE ENTRY DATE: 2002-08-28

SEQ ID NO: 4352 - DNA, 1330 bp, Oryza sativa; identical to SEQ ID NO: 3917
  ref <308>: DATABASE ACCESSION NUMBER: AK104733
  ref <309>: DATABASE ENTRY DATE: 2002-08-28

SEQ ID NO: 4353 - DNA, 1121 bp, Oryza sativa
  ref <308>: DATABASE ACCESSION NUMBER: AK104734
  ref <309>: DATABASE ENTRY DATE: 2002-08-28
cagctcaccactgctagcttgggaagaggaggaggagcttgagcttggagagagacaacaatggcggctcaggctcttctctctgggaggcagctgctggggaggccattgcaatcttcagtctccaggtcttcttcctccaggaaggcacccttcatggtcagggcagaggccactccccctgccaagcaaggtgctgacaggcagctgtggttcgcatccaagcagtccctgagctacctggatggcacgcttccgggagacttcgggttcgacccgctggggctatcggacccggaggggaccggtgggttcatcgagccacggtggctggcctacggcgaggtgttcaacggccggacggcgatgatgggcgtcgtcggcatggtcgccccggagctcctcggcaagctgggcctcgtccccgccgagacggcgatcccgtggttccagaccggcgtgatcccccccgcgggcacctacacctactgggccgacccttacactctcttcgtcttcgagctcgccctcgtcggcttcgccgagcaccgccgcttccaggactggtacacgccgggctccatggggaagcagtacttcctcggcctcgagaagtacctcgccggctccggcgagccggcctaccccggcggcccgctcttcaacccgctcggcttcgggaccaagagcgaggcggagatgaaggagctcaagctcaaggagatcaagaatggcaggctcgccatgctcgccttcctcggcttctccgtccaggcgctcttcaccggggttggccccgtgcagaacctgcttgatcacctcgctgatcccgtccacaacaacatcctcaccagcctcaagttccattagagatgccatcaactacgtatttaattaattacgagtttttaattatgtatgtatgtacgtgcgtatgcgtatatgtgtgtacgtatgtatgtacgcaactttgtacgatcgatggtgcgtgtgatcgagaggggtatgtatgtacgtacgtatatacgatgtattattatgcatgggtgtagggtgtgggtgtaacatgtaaatttgtgctccaactgatttgcacgcatggtcgcatggatcgatttgct

SEQ ID NO: 4354 - DNA, 1100 bp, Oryza sativa
  ref <308>: DATABASE ACCESSION NUMBER: AK061733
  ref <309>: DATABASE ENTRY DATE: 2001-12-06
gaatcaaatcaaacggaaccgaatcccatctccccaataataaaaatccccaattcgcgtctcgtctcctcgcaaatacgacgcgttcccaaatcccccaatccgatctgcctttcctcttcctcctcgtcaaaccctagccaaatccacgatcggggctagctcgtcggcggcggcgatggggaacccggagaagctgatgacccagatcttcgacctcaagttcacctccaagtcgctgcagcggcaggcgcgcaagtgcgagaaggaggagaaggagcagaagctcaaggtgaagaaggcgatcgagaaggggaacatggacggcgcgcggatctacgccgagaacgccatccgcaagcgcaccgagcacatgaactacctccgcctcgcctcccgcctcgacgccgtcgtcgcgcgcctcgacacccaggcgaagatgcaggtcatcggcaagtccatggccaacatcgtcaagtcgctcgactccgcgctcgccacggggaacctgcagaagatgtccgagaccatggacaacttcgagcgccagttcgtcaacatggaggtccaggccgagttcatggagggcgccatggccggctccacctcgctctccacgcccgagaccgaggtcaacagcctcatgcagcaagtcgccgacgactacggccttgaggtctccgttgggttgccgcaggccgccgctcacgccataccagctgccaaggagaaggagaaggctgttgatgaagacgacctctcccgccgcctggctgagcttaaggcccgcggctgagggatttcacttcagatatgattctcaagctgctatgagccattgtcacgtcaaaggctactcatatttgttagattcgtaaatactgttatgctaaaatgcgtgtgttgatatcccatatgggatctgtggacttcattaaaaccttgctgtgtgatacaaatccataatatgtgagcttgagaacgtctctgtgtcgctgtatcctaagcctgcccgtttgaacagaaatgttgaagttgtccatcttttcacgggatgttttccttgctttaatgccatgaacaaattcggtagccgcccc

SEQ ID NO: 4355 - DNA, 1260 bp, Oryza sativa; identical to SEQ ID NO: 2225
  ref <308>: DATABASE ACCESSION NUMBER: AK104735
  ref <309>: DATABASE ENTRY DATE: 2002-08-28

SEQ ID NO: 4356 - DNA, 1163 bp, Oryza sativa
  ref <308>: DATABASE ACCESSION NUMBER: AK104736
  ref <309>: DATABASE ENTRY DATE: 2002-08-28
acccagccagctcgagcgagcgaagccagcagcagaagcagtagagagaaagtagagagatggaggggaaggaggaggatgtccggctgggagccaacaagttctcggagaggcagccgatcggcacggcggcgcagggctccgacgacaaggactacaaggagccgccgccggcgccgctgttcgagccaggggagctcaagtcgtggtccttctaccgcgcagggatcgccgagttcatggccaccttcctcttcctttacatcaccgtcctcaccgtcatgggggtcaacaactccacctccaagtgcgccaccgtcggcatccagggcatcgcctggtccttcggcggcatgatcttcgccctcgtctactgcaccgccggcatctccggcggccacatcaacccggccgtcaccttcggcctcttcctcgccaggaagctgtccctcaccagggccctcttctacatggtgatgcagtgcctcggcgccatctgtggcgccggcgtcgtcaagggcttccagaagggcctgtacgagaccaccggcggcggcgccaacgtcgtcgcgcccggctacaccaagggcgacggcctcggcgccgagatcgtcggcaccttcatcctcgtctacaccgtcttctccgccaccgacgccaagaggaacgccagggactcccacgttccgatccttgccccactgccaatcgggtttgcggtgttcttggttcacctggccaccatccccatcaccggcaccggcatcaacccagcgaggagccttggcgctgccatcatctacaacaggggccatgcctgggatgaccattggatcttctgggttggccccttcattggcgctgcccttgctgccatctaccaccaggtggtcatcagggcaattccattcaagagcaggtcgtaacctgcatcagctattatcactgtcaagatgccaatccagagcaagctgtttctgatgggcgcggctgtttcccgctgcctgctttgttagtaattattgtggagtcgacgttcctcttcaagtttgttgtactactgtttttatctgaacacagacttgtaatttcagtactcagttgtgtatccctcttttactatgtgcaaattaagctatcctcctcctattggagttcggttc

SEQ ID NO: 4357 - DNA, 1297 bp, Oryza sativa; identical to SEQ ID NO: 3909
  ref <308>: DATABASE ACCESSION NUMBER: AK104737
  ref <309>: DATABASE ENTRY DATE: 2002-08-28

SEQ ID NO: 4358 - DNA, 1074 bp, Oryza sativa
  ref <308>: DATABASE ACCESSION NUMBER: AK104738
  ref <309>: DATABASE ENTRY DATE: 2002-08-28
aacgccgacgacgaccgccggagccgccgcatctagctcgccgccccgccatgcagccgctgctcaaggtgtacgccgaccgccggtcgcagcccagccgggccataatcatcttctgcagagtgaaccggatcgatttcgaggaggtcacggtggatctgttcaagcgcgagcacctgtcccctgaattcaagaagataaacccaatgggacaggtgccagcaatcgttgatgggcgattcagattgtttgagagccatgccattctgaggtatcttgcaacggtgttccctggagttgcagatcactggtatcctgcagacctgttcaccagagccaaacttgaggccatcttggattggcatcattcaaatttgcgtcgtggtgcagcaaccttcatactgaacaccgtgttggctccttctcttggacttccgtcaagccctcaggctgcaaaagaggcagagaaagtactgttccggtccctgggactgattgaatctatgtggctcaaaggcaacgcaaagttcttactgggcaatcctcagctatcaatcgcagatcttagccttgtttgtgaaataatgcaattggaggtcctcggtgatagtgaacgcgaccggattcttggacctcatgagaaaatccgcagttgggttcagaatgtgaagaaagccacaagccctcattttgatgaagtccatgagctcattttcaagatgaaggaacgtatggctgcaaagcgccaatctgagccgagcaaagacttgaagacagcatcaaagctctgagggtacccgtactactctcgtatatagcagcagtgtccatgatgaacaaaaggaaagcaataatcgaaggaaaagaaggaagaacaagaaagttatatatcttgtctttttttttaaaaaaaatgatttgtggtaaatttggaggagattatgcttgactattccaatttgtaacattgcataggaacaaaagtggtgtttaaagcattgacaattcaatttactgttctaatttgtaacattgcagagttttttcaataaaacaaactgtggtgtttgaagc

SEQ ID NO: 4359 - DNA, 1166 bp, Oryza sativa
  ref <308>: DATABASE ACCESSION NUMBER: AK061734
  ref <309>: DATABASE ENTRY DATE: 2001-12-06
caaaagcacaatgtatttaccattttattcgtcttcctgttgaagatggtttgttagagaatattgaggtgccagatgcatctgtgccatttagagcagaaaccaatggatacccacatttagattgcaatggcagtacttcaggaaatctacctcaaaaaattccacctgataaccagcttccgttcattaattcttctaatccggtgatgtcactggttgggtttttggcttctgctatgggaccaagagttgcagcatcatgtgcaagtgctgctttatcagttttgacagtagatgatgattccagggtgaattcagaaggcatttgctctgattctaggggccaaggtccgcatccgaattttcgtgatcataatggtggtgtatcttcatccatctctccagaaaaggtgaagcatgctgccatgtgtggtttgtcggcagcagctacgaaggctaaactttttgcagatcaagaggaacgtgaaatccaaagactaactgctactgtaataaaccatcagttaaaaaggttggaactgaagctgaagcagtttgccgaagtcgagaccttgcttttgaaagaatgcgagcaagtggagagaataaggcagaggattgcatctgaccgtgtccgaatcgtgtccacccgcttggcctcgcctggaaatagcctacctgggggtagtactagcaccatgtcatccaatccaatgagtatgagccccagaccgatgggcgtgccaggctcgatgcctcaatccagtatgccagcaccatttgccaataacatgcaggggcatggtcacccccagatggcattcttacaacagcagcagcggcagcagatgctgtcatttggacctcgtctgccgctgtcggccatccaaacccagccatccccacagacgtcaaacatcatgttcaacccaggcatgcccaattctgtaacccctaatcatcatcaactgttgaggtcgtcttctggaaacaattcaagtgtaggataggagaaagaaaaaagggagattcataagattccaaccagtgtagcttcctcagttgtagctttatatgattcataaacatctcattgttattcatttgtacaatatgttccattggtcgtataatttatgatcacttaggttctcattttatgt

SEQ ID NO: 4360 - DNA, 1058 bp, Oryza sativa; identical to SEQ ID NO: 3938
  ref <308>: DATABASE ACCESSION NUMBER: AK104739
  ref <309>: DATABASE ENTRY DATE: 2002-08-28

SEQ ID NO: 4361 - DNA, 1072 bp, Oryza sativa
  ref <308>: DATABASE ACCESSION NUMBER: AK061735
  ref <309>: DATABASE ENTRY DATE: 2001-12-06
gtgcgaatcattccggccgcagcctacctctgcctctctcctctcctcgcggcgtcggcagcgagttctcctcggatcgggagtggaggagaagcgggaggaggaggaggaggagggatgagtctcttcgggctcggccggaatcagaagacgttccgtcccaagaagagtgctccttcaggaagcaagggtgcacagcttcggaagcacatagatgccactcttggcagtggaaaccttagggaagctgtaaggttgccgcctggagaagatatcaatgaatggctggctgtgaatactgtggatttctttaaccaagttaacctgctgtacggcacactcgctgagttctgcacacctgagagctgcccaacaatgactgctggcccaaagtatgagtacagatgggctgatggtgtacagataaagaagccgatagaagtatcagcaccaaaatatgtggagtacctaatggactggattgaaggccaacttgatgatgaatctatatttccccaaaagcttggcacaccattcccgccaaacttcaaggaggttgtaaagacaattttcaagcgcttgtttcgtgtttatgcccacatatatcactcccattttcagaagattgtcagcctcaaggaggaggcccatcttaacacgtgcttcaagcacttcatcctgtttacaactgaatttggcctgattgacaagaaggagctggctccactccaggagctcatcgaatcgattattccatactgagaagaatacagggacggaacggagcgtggataacgagttctttacatggacgatcgaggaatcaggctacttgcaacactattttactggcatagagcttactgttccagatatcagacataaaaaaggacatttgacattgctaatgctatgttttttgtgtactgatgttcgttcgtcctgattcagtattaccttgtgtaagcgtgcttgtaatgtaataacaggattggtggattgggatatattgcaaagaacgatctattaatccaatcgtgagttgcaattgttgcttccttttcccagtacc

SEQ ID NO: 4362 - DNA, 1378 bp, Oryza sativa; identical to SEQ ID NO: 3940
  ref <308>: DATABASE ACCESSION NUMBER: AK061736
  ref <309>: DATABASE ENTRY DATE: 2001-12-06

SEQ ID NO: 4363 - DNA, 1356 bp, Oryza sativa; identical to SEQ ID NO: 2253
  ref <308>: DATABASE ACCESSION NUMBER: AK104740
  ref <309>: DATABASE ENTRY DATE: 2002-08-28

SEQ ID NO: 4364 - DNA, 1203 bp, Oryza sativa
  ref <308>: DATABASE ACCESSION NUMBER: AK061737
  ref <309>: DATABASE ENTRY DATE: 2001-12-06
atgacaacaattagtgacggtttttcttttgtgacacatatagtgtaggtttacttccagcttcgtcgattaccagacggcaccggcgtcgcgcgagcgagcttgatcttgcgccttgtgcctgctagctgcttcggcggcggcggttatcttcttccgatctgtaacagccccgatcaagaaaggatccaacccacctaggaggactaacctgaacgtgctaatgagttcaaagctagtaacatcacctctgaaatccatggagcagggccatctagagcaacctctgcgcgatccgcaggcgccggcggagcagcatgacatggggttatctcccctgacgctcctcggcttcgccttcctgaccttcaactcgggaatggcagtgtacagatcagatagagacttggcaaccatcttcttcgtggtcttctcctacgttgacctcgtatcgctcttctacttcctccgattatttgagaagacgccgccggagtcgcctcgccgccaccacatcaagacggcggtgtggctcctgacgacgatgctcaccgccgtgttttcatataaagtggcggccatcatgcctttcccggttcaggtgctggtttgggccatggccgcagcaactgtgcttggagggttctacgcattcttcctccactccgatgaaaaaaagcctattgagggataggcaaaatacttgatagggctttctggctgtttggcatttgtcagacgccctgtgtgtggtaacatctcgatcaaattggaggtcgaaattaaatatatccggtgagaagagatcacgagatcgatcgctacctatatatcacagatagaaatcagagtcctatcgatattttcgccgagcatatataagtagtgctgtcgatggcgagcccaattcgtgctttataaaaacagaacaaaaaaaaaagaatatgagtttgtgtgcgtatcattttttctgggttaattgtattttgatcaatcagcatgtacctgtaaaatgaggtcgtgtagatcatgtgctaccgtactgtgtcctgtttttagtttttcctttttttcttcttccactgtttacatttctacttgtctgcgtctagtcactgtgtgctgttcacccagcacaaagtgagcaagcatgacactgtacccctcttttttttcattcttgaaccctaataagcaccggac

SEQ ID NO: 4365 - DNA, 1233 bp, Oryza sativa; identical to SEQ ID NO: 2254
  ref <308>: DATABASE ACCESSION NUMBER: AK061738
  ref <309>: DATABASE ENTRY DATE: 2001-12-06

SEQ ID NO: 4366 - DNA, 1014 bp, Oryza sativa; identical to SEQ ID NO: 2240
  ref <308>: DATABASE ACCESSION NUMBER: AK104741
  ref <309>: DATABASE ENTRY DATE: 2002-08-28

SEQ ID NO: 4367 - DNA, 954 bp, Oryza sativa; identical to SEQ ID NO: 3962
  ref <308>: DATABASE ACCESSION NUMBER: AK104742
  ref <309>: DATABASE ENTRY DATE: 2002-08-28

SEQ ID NO: 4368 - DNA, 1122 bp, Oryza sativa
  ref <308>: DATABASE ACCESSION NUMBER: AK104743
  ref <309>: DATABASE ENTRY DATE: 2002-08-28
aagcagtccagcccaagtcgtcgcgcacctcgggcgatccgacctcgccgttgcttgctcagacgccggagacgacgacgacggcggcggcggcggcggggacgagatgacggtgttccacttcctcaactgcgccgccctcaccttcggcccccacgtcgtctactactcggccaccccgctgtcagagtatgacacaattggcacttgtgtaaaagcggctgttgtttatcttggaacagcactagtaaagcttgtttgcttagcgacattgctcaaagtacctgagaatgatagctttgatccttatcaggaattgatgaaaatctttattgggtttatagatgttgctggtctttattttgctttgacacagttgactcatagaaacatctcccagaatcacaagtttcaggcagttggtcttggttgggcttttgctgactcagttctgcaccgtctggcgcctctctggattggtgcaagaggacttgaatttacgtgggagtacatttttcaaggacttgaagcaaatgccaatcttgttatgacgctgtcccttgctgctttaggatccttgatgtggctgaggaaaaacaaacctaggactttggtgccaataatttatgcatgtgctttgcttctggcaacaatgccatctatcaccagttacttgaggagatcattagagtggcagactccaaaggtggttggcttcgagctgttctcctcactggtcatggctttcatcagctggcagctgttctcagcttgtcagagaccaatgtaaggaatgagtttgcaaattgccggagattcacgctcctgagatggctcctgttgtacttccacagaattaggatgcgccttttcagccttgacactatcttttctgggggttcgatcatagaacttattatttagaatcctttttctgtaagttttagtggagaaacacatgctccagtgagttgccattgttaacagctcttataggcattgaactaaaagtatattttgcccctgctgtgcttcttctgtcaaccgcatggcatcatctaaaatgaaagcctataacattcagttttgtcatcagtttatgggaaagtgagtacactaaac

SEQ ID NO: 4369 - DNA, 1027 bp, Oryza sativa; identical to SEQ ID NO: 2241
  ref <308>: DATABASE ACCESSION NUMBER: AK104744
  ref <309>: DATABASE ENTRY DATE: 2002-08-28

SEQ ID NO: 4370 - DNA, 1251 bp, Oryza sativa; identical to SEQ ID NO: 2269
  ref <308>: DATABASE ACCESSION NUMBER: AK104745
  ref <309>: DATABASE ENTRY DATE: 2002-08-28

SEQ ID NO: 4371 - DNA, 1720 bp, Oryza sativa; identical to SEQ ID NO: 3972
  ref <308>: DATABASE ACCESSION NUMBER: AK104746
  ref <309>: DATABASE ENTRY DATE: 2002-08-28

SEQ ID NO: 4372 - DNA, 1168 bp, Oryza sativa; identical to SEQ ID NO: 3968
  ref <308>: DATABASE ACCESSION NUMBER: AK104747
  ref <309>: DATABASE ENTRY DATE: 2002-08-28

SEQ ID NO: 4373 - DNA, 1772 bp, Oryza sativa
  ref <308>: DATABASE ACCESSION NUMBER: AK061739
  ref <309>: DATABASE ENTRY DATE: 2001-12-06
aacccgggccgagcctctcgctccgtactcacgcacacacgcagcggcgcagcgagagaggaaagagagagagagagaggcaaaaacgacaccaacgggcggatttttaagtgcggccacctccatcctccccgtgtccgctagccccctcctccctccgttggtctccgcccacccagaggaaaccacccgcccccggtccccggaggaaagcttcggccatggcggcggcggcggcggctcggaggggatgcctggtcgcgcttctggcggtgctcttcttggcctgcgccgctgaggggggtgcggcggcggcgtcggcggcgcagcagcagcagcagctacggcggcggaggcatctgctgcggcggcagcggcaggtgcacagccacctcaggcggctcaacaaggcgcccctcgccagcatcgagagtcctgatggagacatcatagactgtgtgcacatctccaaccagcctgcctttgatcaccctttcctcaagaaccacactatccagatgaggcctgattaccacccagaaggcctgtatgatgagtccaaggttgcatcacagcagaacacccagacaatcacccaaatgtggcacaagaacggcgtgtgcccggagaacaccataccaatcaggaggaccaagaaggaggatgtcctaagggccagctccatcaggagatatggcaagaagaagcacaagagcaccccaaaccccatgtctgtcgaccctgatatgctcaatgagagtggccaccagcatgcaatagcatatgtggaaggtgataagtactatggagctaaggctaccatcaatgtgtggcagccaagaattgagcaggccaatgagttcagcctgtcccagctctggatcttgggtggttcctttgggcaggaccttaacagcattgaagcaggatggcaggttagcccagatctgtatggggacaacaacactagactcttcacctactggactagcgatgcgtatcaggcaacaggatgctacaacctgctgtgctcggggttcatacagataaacaatcagatagccatgggcgctagcatctccccactctccaactatggtggttcccagtatgatatcaatattttggtctggaaggacccaaaggagggcaattggtggttgcagttcggtaatgactatgtgttaggctactggccatccttcctcttctcctacttggcagacagtgcctccatgatagagtggggtggtgaggtggtgaactcggagcctgatggcagccacacctccacacagatgggcagtggccacttccctgaggaaggatttggcaagtccagctacttcaagaacatacaagtggtggattcatcaaacaatcttagggcaccaagtggtattgggtcattcactgagcaatccaactgctatgatgtgcagaatggcaacaatggtgactggggcacatacttctactatggagggccagggaaaaacccaaactgtccatagtagaaatggaaaaattctatccatgcccctaacaaacccttgacacctctgtattatgcagtaaattagtttacacctcttctctttttctcctcttggtttttgttttggtttcaccattttcccaccaggttattaacttctaggtaagtgtttgacatgtgaaatttgttctcttcctcagagatgttggtctggctcttgggaggagtgcggtcaagtttctgaagagaaacaggcctgtttggttggttggtt

SEQ ID NO: 4374 - DNA, 1437 bp, Oryza sativa
  ref <308>: DATABASE ACCESSION NUMBER: AK061740
  ref <309>: DATABASE ENTRY DATE: 2001-12-06
ctctctctctctcctgcctccgcttctctcccccgcgccgccgccgcctccaccgaaagcagcagccgccggcgagccagccagcagcctagccatgtcggaatcgaaggccgccgcggcggtgaccctccgcacccgcaagttcatgacgaaccgcctcctctcccgcaagcagttcgtgctcgaggtgctccacccgggccgcgccaacgtctccaaggcggatctgaaggagaagctggcgaagctgtacgaggtgaaggactccaactgcatcttcgtgttcaagttccgcacccacttcggaggcggcaagtccaccggattcggcctcatctacgacaacctcgacgccgccaagaagtacgagcccaagtacaggctcatcaggaatggtcttgccactaaggtagagaagtcacgtaagcagatgaaggaacggaagaacagagcaaagaagatccgtggtgtgaagaagacaaaggctggagatgctgggaagaagaagtgagagatgatactcatcttgcagtcttgatgtgttcattatcaaaaccttgctttgtttagagctgtctccttgtggcaatattactgaatgcttaattataactagaaaaattttgccacttatgttcttgcaatgttgaggcatctgtagtgttcttggattttgaggaaatttgtcggactctagcatatatagtactttaatcaaaaaaaaaaaattatcaccggcgacgaggagacactcactgatataatcaagctagctagcttaatcacctagctatccgtcagtttagctagatatggctgcagttaactgcaaggtggtggtcgccgtgattgtggtggcgatggtggttgcggcgccgggggcgtcggcggcgataacgtgcgggcaggtgggatcggcgatcgcgccgtgcatctcgtacgtgacggggaggagcggcctcacgcagggatgctgcaacggagtgaaggggctgaacaacgccgcccgcaccaccgccgaccgccaggcggcctgccgctgcctcaagagcctcgccggcagcatcaagtcgctcaacctcggcaccgtcgccggcgtccccggcaagtgcggcgtcaacgtcggcttccccatcagcctctccaccgactgcaacaaggtcagctagatcaattaatcctgcttggatcgatcgatcgagcttaacacgctagctcgatcggagttgatcagctagtaattaagcacgtatttgctacagcatatatgaacaaagtaattaaaataacacctgcggcagacatgcagcgctccattctctctctgtatcagctgtatactttatgttgcacgctccctgtgtgcatgttctatcttaattttcttcagtatgtacacgatctgtgtgtactacgtgtaatcctatacgttttatg

SEQ ID NO: 4375 - DNA, 1481 bp, Oryza sativa
  ref <308>: DATABASE ACCESSION NUMBER: AK061741
  ref <309>: DATABASE ENTRY DATE: 2001-12-06
cgatgcatattcagcttcatctctgaagacaagctcatgttcacttcctgggttgcggcctatgagattttctgggagccagatcattatgccacttgctcacacggtggagaatgaggagattttagaagttgtccgtcttgaaggacaagcacttacacatgatgatggtcttatgtctagagatattcacctgcttcagctttgcactggaatagatgagaaatcaatgggatcctgcttccagcttgtctctgcaccaatcgatgagcttttccctgatgatgctccgttaatatcttcaggctttcgtgttataccgctggacatgaaaacagatggtacacctgctggtagaacattagatttggcatctagccttgaagttggttcaactgcacagcccacaggggatgcatctatggatgactgtaatctacgatcagtgctgacaattgcctttcagttcccttatgaaatgcatctccaagacagcgttgcaactatggcccggcaatatgtccgcagtattgtttcctctgttcagagagtatcaatggctatttctccttctcggtctggcttgaatgctgggcagaagataatttcaggcttccctgaagccccaacgctagctcgttggatttgccaaagctaccagttccatttgggggtggagttacttaggcaggcagatgatgctggggaagcactattgaaaatgctatgggattacgaagacgctattttgtgctgttctttcaaggaaaagcctgtgtttacttttgccaacgagatgggactaaacatgctagaaacatctctcgtcgctctccaagatctctcactggacaagatatttgatgaagccggtaggaaggccctatacaacgagatcccgaaattgatggaacaggtagagagccacttgcaaaatccccattttcttttccccatgtaataacagcaatgtcctaaccgctaaacacaaaccaagtagagatgcaagaactcaccgtagccacagagtaatctttcgatttcgattcaatctgttcttgttcagggttacgtgtacctgcctggtggagtgtgcttgtccgggatggggcgccatgtttctttcgagcaagctgtagcatggaaggtgctcggagaagacaacaatgtgcactgcctcgccttctgcttcgtcaactggtccttcgtgtgacccaaaatccaatccaccatgctcgcagtcatcgtcgttgtcgtcagatctccattttttgcaatctctgtagaagagaggacaccaaaccaaccacaaacctgtcagctgttagctaatgattctactagcttttctagatctttgaaggcaaaatgctgccggtgcctgtaaagagtgtgtgcgtgcgtgtgtaaatttgggcgcgttttgcactaatttgatctggggtaaggaggcgctggctgctgctgtgctgtagtttggt

SEQ ID NO: 4376 - DNA, 1067 bp, Oryza sativa
  ref <308>: DATABASE ACCESSION NUMBER: AK061742
  ref <309>: DATABASE ENTRY DATE: 2001-12-06
gcgccagagaggggaggtgtcactttaattagagctcatcaccacgcctctcgcctcacatcataccaagtgtcctccttcctcctcatcctccccaaccactgcatccgggtcggcgtcctcctcctcctcctcctcctcgcagaatgcaacgggcaattcaagctatcgggtcacatggcagtctcctcaagtctgctgttctgcgacacatcagtgctccaaaaccatctattttacctgctgtatattcacgctccatgtcagtttcatctgctcaaatagaggagagtggatttgagactgccactgtggcagatattttgaagtctaaggggaagagtgctgatggatcttggctctggtgcactactgatgactctgtctatgatgctgtcaaatctatgacgcaacacaatgttggagctctggtggttgttaaacctggacaggataaatcaattgctggtattgttactgagagagattacctcaggaaaatcatagtgcagggacgatcttccaagtcaactaaagttggagacatcatgactgaagagaaccagctgatcacggtgaagcctgataccagagtcctgcaagcaatgcagctgatgacagagaagcgcatcaggcacatcccggtgatcgacggcacgggcatggttgggatggtctccattggagacattgtccgcgccgtggtcagcgagcaccgggaagagctgaaccggctcaacgcctacatccagggtggctactaggacgccgacgtcgacgttggtcactcgctcctgccattgaggctgtgcctgtctgaaaaagactccctcttccaaataacgctcgctcgggatgatgacgaaataggccgcgattttcctggagaaattgttgccgaatgtttctgcttgttcgcgtgtattatatcaatctgatggtggaaacgaacacccaaataaaatgaaccgtgtacaccgtcttgtgcagcagcctgctgtttgtgaattgtggcaggttgttgttgagacgagtcttgatgtttaattagatggatttgccgctgt

SEQ ID NO: 4377 - DNA, 1756 bp, Oryza sativa
  ref <308>: DATABASE ACCESSION NUMBER: AK061743
  ref <309>: DATABASE ENTRY DATE: 2001-12-06
aatcagatcctccatcccgcggcggccgtgagcaccaacactcacgcattccttcctactccgcgagatctccggattcgtttcggtgttttgcgagtcgcgcccggagaagaggagaggaaatccggtcaatcgcggcgtcggcgtgccgtcgcttggggtggtgttggtggttctgaattttgattgcttcgtgcttttcgtttgggggagggcagtggtcgccatgggattggggaacgaggcgagctcgtcgtcgtcgcggctgctggatccggcgcctctgctgccgcaccacggtggagatggcgccgggaagctgtcgtcgcagcccaagaccttcgcgaacgtcttcatcgcggtggtcggcgccggcgtgctggggctgccgtacacgttctcgcggaccgggtgggcggcggggtccatcctcctgctctccgtcgcggcgctcaccttctactgcatgatgctgctcgtcgcctgccgccgccgcctcgccgacgagcacccgaagatcgcctcctttggggacttgggggacgccgtgttccgcggtccggggcgcctcgccgtggacaccatgctggtgctcagccaggccagcttctgcgtcgggtacctcatcttcatctcgaacaccatggcgcacctttaccccgtcttcgcgccctcctccaacgcgctcctctccccaaaggcgctcttcatctgggccatgctgccgttccagctcgggctcaactccatcaagacgctgacgctcctcgcgccgctcagcatcttcgccgatgtggttgacctcggcgccatgggcgtcgttctcggggaggacgtgtccgtctggctcgccaaaccaccacccgtcttcgccttcggcggcctgagcgcgatcctgtacggcatcggcgtgtccgtgtacgccttcgagggaatcggcatggtccttccgcttgaggcggaggccgccaacaagaagaagttcgggaccacgctcgggctatccatggggttcatcgccgtcatgtacggcctgttcggcgccatggggtacatcgctttcggcgacgccacgcgcgacatcatcaccaccaacctcgggaccgggtggctctcggccgccgtgcagctcgggctgtgcatcaacctcttcttcaccatgccggtgatgatgcaccccgtgtacgaggtcgccgagcggctgctccacggcaaacgctactgctggtggctgcggtggctgctcgtcctggccgtcggcctctcggccatgtacgtgcccaacttcaccgacttcctggcgctcgtcgggagcagcgtctgcgtcctgctcggcttcgtgctgccggcctcgttccacctcaaggtgttcggcgccgagatgtcctggtccggggtgctcagcgacgtcctgctcgtcctgctcggcctctcgctcgccgtcttcggcacctacacgtccctgctgcagatcttccattcctccagcgcttaatctctggagaatctttacggatagctgcgccgatgattgatttgctcatttgcttcgcgcgcgggtgtcagcctgtcaggtacgctggttgcattcttcgtgtacagagaaggtgatcggtcgatcagaggggcaatgcccaattcagcttgctgttgatttgggcatggacagcgtgcatcggccgcattctttcgattacaagtcagatggtttgtacaagttagcgtggatggcatggagaaatctgtatggttttgc

SEQ ID NO: 4378 - DNA, 1058 bp, Oryza sativa
  ref <308>: DATABASE ACCESSION NUMBER: AK104748
  ref <309>: DATABASE ENTRY DATE: 2002-08-28
cacacgccgtcgagactcgagagattcaggaacagaaaccgccgagagagttcgtagcagtcaacgcgcgaggcagggccgagaagaaaccgccggcgacgcacgcgcgatggacgctcggcggaggcggttgtccccggcggtggccgtggcggcggctcttcttttcttccccatgttcttcgggagccatacgccggcggcggcggcggcgtacggagaggcttcaggcgacgccggcgtgacggcgctgcagaagcacgcggcgttcttcgacaaggacggcgacggcatcgtctccctctccgagacatacgacgggttacgagcactcggactcgggtctggcctctccagcttgagcgccgccttcatcaatggcgtcctttccccaaagaccagacctgacaatggaacagcaccacgcttatctatctacatagagaacatctacaaggggattcatggaagcgattcaagcgcctatgattctgaaggaaggttcgttgctgaaaagtttgaggagatattcgccaagcacgccaagaccgtgcctgatgctctgacatcggacgagatagacgagctgcttcaagcgaaccgcaagcccggtgactacactggatgggtcgcagcatcgtcagagtggaagattctgtacaagatcggcaaggacaaggacggccttcttcgcaaggaggccgtgcgagaagtctacgatggaagcctgtttaccaagctggcggcggcaaggataaacgacgaaaaccaagcatgattggtgacagctgatgggatcatctccattgattctcctgattaagcatctcaaatcatgtgccactgtgatatgagaacgattgagatgatgtctgaacacaaaaagatagtcatgcaagatagaagtatgaacaagtgtggacagaatctgcagatggggatggatcgtttagttctgtccttttttgttggtttcttggggatattgaatgtttatattattatacctgcaaatggttggcagtgcaaggctgcaagcaatggcacactatttatac

SEQ ID NO: 4379 - DNA, 1102 bp, Oryza sativa
  ref <308>: DATABASE ACCESSION NUMBER: AK104749
  ref <309>: DATABASE ENTRY DATE: 2002-08-28
aaatggtggcgctgcttcgctcgtgccgccgcctgatcccgcacctgtccgcctgcgccgccgccgcgccgtcgtcgtcatcgtcgtgcgctcctcgggctaggccgatctcgcggggactgcggctgctgccggtggtgctcgcaatggcggggtacagcagcggctccgccgcggaggggaggaggctgctgttcaggcagctgttcgagaaggagagctccacctacacctacctcctcgccgacgtcggggaccccgagaaacccgccgtgttgattgaccctgtggacagaacagttgatagagatctcaatcttatcaaggagttgggcttgaagctagtctatgctatgaatacccatgtgcatgctgatcatgtcactggaacaggattaataaagactaagttacctggagtaaagtccgtgattgcaaaagtaagcaaagcaaaagcagaccattttattgagcatggggacaaaatatacttcggtaacctcttccttgaggtacgatctactcctggccatactgctggctgtgtgacttatgtaacaggtgaaggcgatgatcaaccttcaccaagaatggcttttactggtgatgccttgcttatacgtgcatgtggaaggacagactttcagggaggaagttctgatgagctgtatgagtcggtgcattcgcagattttcacattgccaaaggataccctgctttatcctggccatgactacaaaggtttcacagtaagtactgttgaagaggaggttgcgtataatgctcgactaacaaaggataaggaaacattcaagaaaattatggacaacttgaacttggcctatccaaagatgatcgatgtagccgtgcccgcgaatttgctctgcggtattcaggatcctccaccatccaaggtctgagctgttccggctgaagctttcaagctgttgtgaactcacggtcaactcgagaagctcgcagctatgttgtacattaaataatctgttgttaatttgtaaggcactacttgggaacatttccgcttcatgagatcaacggtaataataataaacagaggctagcttgcctcttgtcttgtgct

SEQ ID NO: 4380 - DNA, 1089 bp, Oryza sativa; identical to SEQ ID NO: 2281
  ref <308>: DATABASE ACCESSION NUMBER: AK104750
  ref <309>: DATABASE ENTRY DATE: 2002-08-28

SEQ ID NO: 4381 - DNA, 1187 bp, Oryza sativa; identical to SEQ ID NO: 4019
  ref <308>: DATABASE ACCESSION NUMBER: AK104751
  ref <309>: DATABASE ENTRY DATE: 2002-08-28

SEQ ID NO: 4382 - DNA, 1127 bp, Oryza sativa; identical to SEQ ID NO: 4031
  ref <308>: DATABASE ACCESSION NUMBER: AK104752
  ref <309>: DATABASE ENTRY DATE: 2002-08-28

SEQ ID NO: 4383 - DNA, 1183 bp, Oryza sativa
  ref <308>: DATABASE ACCESSION NUMBER: AK104753
  ref <309>: DATABASE ENTRY DATE: 2002-08-28
gaacgactcggcgctccattctgcccaccggcggtgatctccacccccgcggagatgggaacggaggccgcagctccggcgagggccatgggccccaccaagctcgcgtacttcgatgacatgtgggccctcagctccaccgccaccgtcgtctccctcctccaggaggaggggggccggcgagcggtgttggtggactccaccgtcttctacccgcagggcggcggccagccggccgacaccggcgtcatctccgctggcggcggcaccaggttcatcgtcgatgatgtgcggatgaaggatggagtggttttccactatgggagatttgaggatgctggagatggatgcaattccgggttcagtgaagggcagagcgttagcttggaagtcgatgcggaacgccgcaacttaaattccaggcttcattctgcagggcatttgatagacatctgcatgagcaatattggcttatcacatttcgaccctgggaaaggacatcatttccctgatggacctttcgttgagtataaaggagtcattccaccagatcagttgcaggataagaaaaacgagttggaaaaagaagcaaatgagttaattactaaaggagcaaaagtattagcttatattttaccttatgaggaggcagctcaattgtgtggaggtgctctgcctagctacatttcaaaagatagcacccctcgcattgtgaaatttggtgattatcctggtggcccttgtggtggtacacatgttgccgatatctctatcatcaacaacataaaggtcacaaacataagagtcaagaaaggcctcaccaaagtctcctacagtgtcagtctatgattctttttacccatgcatttggcacctggaatttgtcagaggagtgaagaggcaaacattcagtgaaatcagaaggctgataccaaatgattttttttaaaaaatctatgtttagacaaagagtaattacatgtaatattttggaaagcactgttagttctatgctaaatttcgtgtcacatcactatatgtaacttcctgtaccaccatggactatatgtgtctttttcctgaattatatccaggaaattgtactagattagatttgctggtttaatcttcagattgttgttctgaattgatcagtcttcgatgacagatttttttttgtgtg

SEQ ID NO: 4384 - DNA, 1318 bp, Oryza sativa
  ref <308>: DATABASE ACCESSION NUMBER: AK061744
  ref <309>: DATABASE ENTRY DATE: 2001-12-06
acaagagcaaagactttatgcagtggactagagtagatcacccattgtattcttctaatgcatccaacatgtgggagtgcccggatttctttgcagtattgcctggcaagaacaatggactggacctctctgcagctatcccaaatggcgccaagcatgtcctcaaaatgagcttggattcctgtgacaagtacatgattggggtttatgatctgaaacatgacatgtttgtgccggatactgtcttggatgacagacgattgtggttgaggattgattatggcaattactatgcttcgaagtcattcttcgattcgaaaaagggaagaaggataatatggggctggactaatgagacagatagtacgtcagatgatgttgcaaaaggttgggctggcatccatgcaatccccaggacaatttggttagatggtgatggcaagcgattgctgcaatggccaatcgaagaggtcgaatcgcttcgaagaaacgaagtcagccatcaaggcttagaactcaagaagggtgatctgtttgagatcaagggaactgatactttacaggcagatgtggagatagattttgagctgacatccatagatgctgctgatccttttgacccttcctggcttttggacaccgagaagcattgccgagaagcagatgcatcagttcatggcggcttggggccatttggacttgttgttcttgcctctgataacatggacgagcacactactgtgcacttcagggtttacaaatcagagcagaagtacatggttctcctgtgctctgatctgagaagatcatcgttgagaccaggactgtacacaccagcatatggaggcttctttgaatatgaccttgaaaaggagaagaagatctccttgagaactctgatcgaccggtcggcggtggagagcttcggcggcggcggcagggcgtgcatcatggccagagtgtacccggcggcggtcgtcgacggcgccacccacatgtacgccttcaacaatggcagtagcacggtgaaggtgtcgcagctcaaggcatggagcatgacgagagcacaggtcaatgtcaggaagggatgaactgattgattaatcaaaatggaaacaagagagcaacatattacatgctaattgtccagtaagtagttaattgactacccattcatcagaactcctttggtaggaataagaaggaaatccagaatcaaaatttttagctgctcacagacttgttgatgacatctacttgctttgtagcaatatgtttttacttgtagaaaggagatggaaatcaaatcattgttaag

SEQ ID NO: 4385 - DNA, 1401 bp, Oryza sativa; identical to SEQ ID NO: 4033
  ref <308>: DATABASE ACCESSION NUMBER: AK061745
  ref <309>: DATABASE ENTRY DATE: 2001-12-06

SEQ ID NO: 4386 - DNA, 1523 bp, Oryza sativa
  ref <308>: DATABASE ACCESSION NUMBER: AK104754
  ref <309>: DATABASE ENTRY DATE: 2002-08-28
accgagctttagcgttggcaaggagagagagagaagagagagagagagagagagagagtaattaaggctgggaggataggcagcagcagcagcgagagggaaacgagcgagcgagcttagctggtgcttgcctataggtagctaagcaaaatggggcagaggaggaggtcggggccgcggcgtcagagccagagcgtggtggtggtggtggtcgccgtgttgctggcgacggcgtcctgcgcggcggcgcagctgagccagagctactacgcgtcgacgtgccccaacgtggagacgctcgtccgcggcgccgtcacgcagaagctcaaggagaccttcaacgccgcgcctgggacgctccgcctcttcttccacgactgcttcgtcagggggtgcgacgcgtcggtgctgatcgcggggccggacgacgagcacagcgcgggcgcggacacgacgctgtcgccggacgcgctggacctcatcacccgcgccaaggccgccgtcgacgccgacgcccagtgcgccaacaaggtctcctgcgccgacatcctcgccctcgccgcccgcgacgtcgtctcccaggcaggaggaccctactaccaggtggagctggggcggcttgacggcaaggtcgggacgcgcgccgtggtgaagcacagcctccccggcgccgccttcgacctcgaccagctcaacaagctcttcgccaccaacggcctcacccagaccgacatgatcgccctctcaggagggcacacgataggggtgacgcactgcgacaagttcgtgcggcggctgtaccagttcaagggggcggcgccgcagtacagcccgccgatgaacctggcgttcctgcggcagatgaggcagacgtgcccgctcagctacagcccgaccaccgtcgccatgctcgacgccgtctcgcccaacaagttcgacaatggctacttccagacgctgcagcagctcaagggcctcctcgcctccgaccaggtgctcttcgccgaccgccgctcgcgcgccaccgtcaactacttcgccgccaaccagaccgccttcttcgacgccttcgtcgccgccatcaccaagctcggccgcgtcggcgtcaagacggccgccggctccgacgccgagatccggcgagtctgcaccaaggtcaactaataacgtagagcagtatagctcacatttgggtggtagagagggtaaattggtgaattcttctctgtgtctctcttcttcttcttcctcttcttctccatgatgatcttcgattctcactgtccatgttcacaagtccaccgcgcacagttgttgtatttgttcccgccaattcttttcttgattcttataatcataaaaagtgtcatacattaattaggatatattttcagggcccctacccatgtgatatgatagaaggtacacttacaatgatgtaaactagcgtggtggcccacgcagattgcgcggctaacattattatattttctctcatataatagcatatatgttttctcatt

SEQ ID NO: 4387 - DNA, 1301 bp, Oryza sativa
  ref <308>: DATABASE ACCESSION NUMBER: AK061746
  ref <309>: DATABASE ENTRY DATE: 2001-12-06
agacgccagagcgctacaaaatggcccacgccgccgcggccacgggcgcactggcaccgctgcatccactgctccgctgcacgagccgtcatctctgcgcctcggcttcccctcgcgccggcctctgcctccaccaccaccgccgccgccgccgcagcagccggaggacgaaactcgccgtgcgcgcgatggcaccgacgttgtcctcgtcgtcgacggcggcggcagctcccccggggctgaaggagggcatcgcggggctctacgacgagtcgtccggcgtgtgggagagcatctggggcgagcacatgcaccacggcttctacgacgccggcgaggccgcctccatgtccgaccaccgccgcgcccagatccgcatgatcgaggaatccctcgccttcgccgccgtccccgatgatgcggagaagaaacccaaaagtgtagttgatgttggctgtggcattggtggtagctcaagatacttggcgaacaaatacggagcgcaatgctacggcatcacgttgagtccggtgcaggctgaaagaggaaatgccctcgcggcagagcaagggttatcagacaaggtctcctttcaagttggtgatgcattggagcagccttttcctgatgggcagtttgatcttgtctggtccatggagagtggcgagcacatgccagacaaacggcagtttgtaagcgagctggcacgcgtcgcagctcctggggcgagaataatcattgtgacctggtgccataggaacctcgagccatccgaagagtccctgaaacctgatgagctgaatctcctgaaaaggatatgcgatgcatattatctcccagactggtgctctccttctgattatgtcaaaattgccgagtcactgtctcttgaggatataaggacagctgattggtcagagaacgtcgccccattctggcctgcggttataaaatcagcattgacatggaaaggtttaacttctctgctaagaagtgggtggaagacgataagaggtgcaatggtgatgcctctgatgatcgaaggatacaagaaagggctcatcaaattcaccatcatcacctgtcgcaagcccgaaacaacgcagtagtaccctagtagtgaaattacgctcctgctatcttctccatcacgaataatgcaaattctgacgagttagcacctactgatggcgatttgttgatttggggaacagccagtgcactgttaccacgtcattgattttgtactcgtcagacttaaaaaaaaaatatccatgaatgtgcactccaaatacgtcaag

SEQ ID NO: 4388 - DNA, 1685 bp, Oryza sativa
  ref <308>: DATABASE ACCESSION NUMBER: AK061747
  ref <309>: DATABASE ENTRY DATE: 2001-12-06
atttcggcgagacgagcggaggcgcacgagagcacgatgaggatttgattttctttttctttcttttggtttcaagtctcatcgccaaatttcgttttcgattttttttatttttttgctcgtctcgtctcgtgtctaccctttattcatccctcttctcgcgttggtgctcctccgcccgatctctcgtctcgaagcttctggaagcttcggggggagggatcccgggccgggctcgcccgccatggcgctgtggcggtgtagctcctcgtggctctcgtcggtgtcgcgctcgtcggggggagtcggcggcggcgaatcgaaggtgtcgccggagatcgcgccggtgagcggcggggagggggagggagaggaggaggagggggaggaggagaggtggtcgcggctgctgccggagctgctcacggagatcatgcggcgcgtggacgccggcgccgagcggtggccgccgcggcgggacgtggtggcctgcgcctgcgtctgccgccggtggagggacgccgcggtgtccgtcgtgcggccgccgctggagtgcgggcggatcacgttcccttcctcgctgaagcagcctggaccaagggatgctccgatgcactgcttcatcaggaggaacaaaaagaactcgaccttctacctttatctcagcttaacacaggccctaacggataaaggaaagtttctgctggctgctcgaaggttcagaaacggggcacatacagaatatatcatttcctatgattgtgatgatctatttccaggaagcaattcgtatgttgggaaactgagatctgacttcctgggtacaaagttcatcatctatgatagccagccaccatacgatggtgcaaagccctcacggagccaatcgagtcgtcgctttgcaagcaaacagattaacccaaatgtttcaggcggtaattatgaagttggacaagtgtcatacaagttcaacttcctcaaatcaagaggaccaagaagaatgcagtgcaatatccagtgccccgtaggccagagcaccgcatcagatccattgaagaagctgattagcacctcaagccccttggctctaagaaacaaggcaccacgatggcatgagcatctgcagtgctggtgcttgaatttccatggccgggtgaccgtcgcctcggtgaagaacttccagctcgttgctccagctggcaccagcgatccatggggcattgcagatgaggagacagtgatcctgcagttcggtaagattgaggacgacgcgttcacgatggactaccggcagccgctgtcagccttccaggcgttcgccatctgcctcacaagctttggcacgaagctggcctgtgaataagtgtaacttttgggtttgatgatgatttacaccgtgcatatggatgggatctccgttgatagcgcggatagcctgaagccctgaactatagcgcccctgttgaaccaggagagtaaggtgtaaaagggcgacaggggcacactgcactgaacacaccgtgtccctaactctcgactctctcttctctttttctctcgtctaatgatgtggatggacttggtttatgttgatcttggagagatgatggtataactctttgttgtaaatggcactccttttcacttgctgatgtaccccgtgcataatgaatgtaccattctcc

SEQ ID NO: 4389 - DNA, 1718 bp, Oryza sativa; identical to SEQ ID NO: 3999
  ref <308>: DATABASE ACCESSION NUMBER: AK104755
  ref <309>: DATABASE ENTRY DATE: 2002-08-28

SEQ ID NO: 4390 - DNA, 948 bp, Oryza sativa
  ref <308>: DATABASE ACCESSION NUMBER: AK061748
  ref <309>: DATABASE ENTRY DATE: 2001-12-06
gtcaactcctctcctctcctcgcgagttcgcgcaccgcctccgccgatctccatctccgccgccgtcctgctgcttccgccgcatcacatcccggtgagcatccctatccgtcacgctcacgcgcatcctctctcttagcgcgtaaaagaagaagaaatctcccgtctcgttctcgttactgtctcctccgctcctctccttgcgccgctgccaagacgaacaggggggagggccgggcggcgatctccatctggcgagcagagcagagcagcggaggtgaggggatcctgcatcatgtcggatatgaaggacaccaatgctgctggacctgaaactgttggaaatcctgaccctatggaccaaactgaagataactccatgccctcagctcaagaacaggaattagcaatcaagaagaaatttggaggactaatgccaaaaaaaccaccactcatctcgaaggatcatgaacgggcctattttgattctgctgactgggctctgggaaagtctggacagcaaggcgctgcgaaacccaaaggacctcttgaggcacttaggccaaagttgcagccaacacgacaacagcagcagcgttccaggcgcttgattaacacctcatcagaaaacgaggatggagacggtgctggtgctgaggatatgaacatcaactgacctgctcagggagtgttctgttgggaacctcatgattcaaagcagctcattgttcgtggatcgcagggaaggatatgatgtctttgatgtttccatagatatgaaaagaaatgttgtatttttcaaagaccgatgttaattcatcgcacagcttacctatatctgtgccaaatttcagcatagactaaaccattgtttgcatacggcgttgcactccagtcgtgctacggcctatttgtcaatggatatttttaaacaagtttgtattgtac

SEQ ID NO: 4391 - DNA, 1324 bp, Oryza sativa; identical to SEQ ID NO: 4013
  ref <308>: DATABASE ACCESSION NUMBER: AK104756
  ref <309>: DATABASE ENTRY DATE: 2002-08-28

SEQ ID NO: 4392 - DNA, 1091 bp, Oryza sativa; identical to SEQ ID NO: 4014
  ref <308>: DATABASE ACCESSION NUMBER: AK061749
  ref <309>: DATABASE ENTRY DATE: 2001-12-06

SEQ ID NO: 4393 - DNA, 1014 bp, Oryza sativa; identical to SEQ ID NO: 2306
  ref <308>: DATABASE ACCESSION NUMBER: AK104757
  ref <309>: DATABASE ENTRY DATE: 2002-08-28

SEQ ID NO: 4394 - DNA, 1107 bp, Oryza sativa; identical to SEQ ID NO: 2312
  ref <308>: DATABASE ACCESSION NUMBER: AK104758
  ref <309>: DATABASE ENTRY DATE: 2002-08-28

SEQ ID NO: 4395 - DNA, 1154 bp, Oryza sativa
  ref <308>: DATABASE ACCESSION NUMBER: AK061750
  ref <309>: DATABASE ENTRY DATE: 2001-12-06
ctagccatccgaatccgcgagagcggaagccaccgaggcggaggcgaggaggagggcgcaatggcggggaaggaggagggccggatcttcgtgggcggcctgtcgttccacaccgacgagcgcaagctggccgacgcgttccgccgcttcggcaaggtcgtcgacgcccagatcatgctggagagacacacccaacgccatcgtggttttggcttcgtgacattttcagatccagaggcagttgatagcgctattaaagaaatgcactgtcaagaattagatggcaggactatatcagtgaacaaggctgagcctaagatgaatacagatgacacaaggtatgaaagtggtggtggacgaggagagtatcgtggtggtagaggtgatggaccacccccaggcaattgctttgagtgtggccgtgctggtcattgggctcgtgattgccctaatcctggtggtggtcgttctgcgcgatactcttcttctaagttcagcgctggtggcagaggagaccgtttttctggatcagataggtttggagaccgttacatggatgatcgttatgatggtgggtaccgtgaacctgttgatgtcagagacaggtatggtggaggccgtgaccgatatgctaatgatcgatacccatcaggtggtgaccgctatgttccagacagatatggaggtcccgatcgctatcagcctagtagttatggccgggaacgagaaagaagctacgagagggatggagtgcgtggcaatggcggctatgataggagtggcccaaggggtggtggaagctatgacagggatggcccaaggggtggtataagtggtggctatgacagggatggcccacgtggcggtggtgttgaccgttacggtggtggagggcctgctcgttatgatggaggaagctacagggacagatctgggccgtatgaccgccctagcagaggaggacgctttgatgatcgcttccagtgaagcctttcgcagaatcaagttatgtatttgcggtttaacgcttgcagtttcgcatggctgaatgtttagtgaatgctctggcacagttatatctattatgtattagaacctccagcactgttttgattctggcaaaaagtttatctatcagactgttttggattctg

SEQ ID NO: 4396 - DNA, 1763 bp, Oryza sativa
  ref <308>: DATABASE ACCESSION NUMBER: AK061751
  ref <309>: DATABASE ENTRY DATE: 2001-12-06
gtggcttcgtaccaagggaagaaatgggacggtgagatcaagaacctcaacaccaacatctacgtgatgagcttggagaacccgtctcaggatcgcgagcgggtgatcgagaacggcggctggccgtcgtggggcagcgaggacgtgatcttcttccacaggaaggacggcgacggggagaacagctgctggggcgtgttccggcacaccctgagcaccggcgagaccgtccgggtgacgccggcggcgttcgactcggtgactccggcggccatcgacgagaccagggtggcggtggcggccatccgccagaagtccgagttcagtgatgtccgcgtcgaggcacagtacaggcacatcgaggtgttcgacatgagatcgccggagcagccgatgcagatcacccggaacaccaggccaaaggccgaccatttcaaccccttcgtgatggacggtggcaagttcattggttaccaccgttgcaaaagcgagctcctccagcacggcgatgatctcccgagaaaatttcacaagctgcaatccccacacgaagatgtcggtgtgttcagggtgtccggtgtgttcccaacattttccaaagatggttctcagcttgccttcgttgacaacgagttcaaatccgtgtggctggccgatagccaagggatgcgtgtcgtcttcaagactgatggcccagacagcgtcttctcaccgctgtggaattccaagaaggatatactctatgtgtgcatgggaccttctttcaaagccagtgaaacgttggagatccattccatacacaatgtatccactggtgaccggaagtcgcggcagctcacgttcggaggattcaacaacgccttcccttccaccaatccagacggaacgaaatttgttttccggtcgacaagagatggaggggcaaagtacagcaagaacctgtacataatggaggacgccgacgccggagaaggcgaggatggcagccagtcgacggtgacgcggatgaccgccggcgagtggacggacacgcactgccagtggtctccgaacgggaagtggatcgtgttctcgtcgaaccgggacaggccggcggacgcgccggagcgcgaccacggcctcgacccgggctacttcgccgtctacctgatggacgtggcgtcccggtcggtggtgagggtgatcaggagcgggtacgacgtcgccgggcacgtgaaccacccggtgttcagcccggacgggcggagcatcgcggtgacgtccgacctcgccgcggtgaccgccgacccgatgtcgctgccgctcttcctgcactccgtcaggccctacggcgacatcttcaccgtggacatcgacccggacgacatggcgaggaacgaggacgtggaggggttcgtccgcgtcacgcacagccggtacgagaactccacgccggcgtggaccgtgttctccacgcacgacccgcacgcgcagtggaacctcctcgtcgtggaggacgagcacgtcccgtcgtgcccgtacgcgcatccggacggaggcgagagttggcacatgaccggccagatttgcatccccaaaaggcactgttaattctctcgccattgcattactacgtttcttgtttagaagcgttgttgtttgtttaacgtacgatatttattatctgaagacgttttcagcatttgcttggatgtacaacgtgtgtatgaactgtttgcgatgtaatatttgtttatttgcttgagatgtacttttttcttgtc

SEQ ID NO: 4397 - DNA, 1062 bp, Oryza sativa; identical to SEQ ID NO: 2307
  ref <308>: DATABASE ACCESSION NUMBER: AK104759
  ref <309>: DATABASE ENTRY DATE: 2002-08-28

SEQ ID NO: 4398 - DNA, 1292 bp, Oryza sativa
  ref <308>: DATABASE ACCESSION NUMBER: AK104760
  ref <309>: DATABASE ENTRY DATE: 2002-08-28
acgatacaacccacacggacacggccacaccacccaccaactgagagctgagcaggcgagcgagcggacatggcagcatcgctccaagccgcggccaccctgatgcagccggccaagctcggcggccgggcctcctccgccgcgctgccatcgcgcccgtcttcgcacgtcgccagggcgttcggcgtcgacaccggtgccgccggcaggatcacgtgctccctgcagtccgacatccgggaggtcgccaacaagtgcgccgatgccgccaagctcgccggcttcgccctcgccacctcagctctgctcgtctcgggcgccagcgcggagggcgtgccgaggaggcttaccttcgacgagattcagagtaagacgtacatggaggtgaagggaaccggcacggcgaaccagtgcccgacggtggagggcggcgtcgactccttcgccttcaaggccggcaagtacaacatgaagaagttctgcctggagccgacgtccttcaccgttaaggcggagggcgtggccaagaacgcgccacccgagttccagaagaccaagctcatgacccgcctgacctacaccctcgacgagatcgagggcccgctcgaggtcagctccgacggaaccatcaagttcgaggagaaggacggaatcgactacgccgccgtcaccgtgcagctgccgggaggcgagcgcgtgccgttcctcttcaccatcaagaatctggtcgccaccggcaagccggagagcttcggcgggcccttcctcgtgcccagctaccgtggttcgtccttcctcgacccaaagggccgcggtggctctaccggctacgacaacgctgtggcgctccccgccggaggcagaggagacgaggaggagctcgctaaggagaacgtcaagaacgcctcgtcgtcgacgggcaacatcacgttgagcgtcaccaagagcaagccagagaccggcgaggtgattggcgtcttcgagagcgtgcagccgtcggacacagacctcggcgccaaggtgcccaaggatgtcaagatccaaggggtgtggtacgcgcagctcgagtagggaatgaacaaatgttttgtgcgtggccgggttgatatatcgatacatggagagagggaaggaaggctgcaatgtgtgtatctagtaatgcaaactcgatcgggctgttgatggttttaatttttagcttttgtttcttcctctgttctcgtgaactgatgatcatatcccccgatgatgttatttgcatttcgacaagcggagaggacattgtacgatac

SEQ ID NO: 4399 - DNA, 884 bp, Oryza sativa; identical to SEQ ID NO: 2308
  ref <308>: DATABASE ACCESSION NUMBER: AK104761
  ref <309>: DATABASE ENTRY DATE: 2002-08-28

SEQ ID NO: 4400 - DNA, 1346 bp, Oryza sativa; identical to SEQ ID NO: 4075
  ref <308>: DATABASE ACCESSION NUMBER: AK104762
  ref <309>: DATABASE ENTRY DATE: 2002-08-28

SEQ ID NO: 4401 - DNA, 1186 bp, Oryza sativa; identical to SEQ ID NO: 4069
  ref <308>: DATABASE ACCESSION NUMBER: AK104763
  ref <309>: DATABASE ENTRY DATE: 2002-08-28

SEQ ID NO: 4402 - DNA, 1686 bp, Oryza sativa
  ref <308>: DATABASE ACCESSION NUMBER: AK061752
  ref <309>: DATABASE ENTRY DATE: 2001-12-06
acatcctcctccgccgccggctgcttcccaccggctcccgatctccgaggcaagcagcgccgcacccggccgctgccgccgccgccatggcgttcgagaagatcaaggtcgccaaccccatcgtcgagatggacggtgatgagatgaccaggatattctggcagtctatcaaggacaagcttatctttccatttttggatctggacattaagtactatgacttgggagttctccaccgtgatgcaactgatgacaaggtcaccgtggaggctgcagaggctactctcaagtacaatgtggctattaagtgtgcgacgattactccagatgaggctcgggttaaggagttcaacctaaagcaaatgtggaagagccccaatggcacaattaggaatattatcaatggcactgtattcagagagccaattatatgcaaaaatgtcccaaggcttgttccaggatggactaagcccatttgcattggaaggcatgcttttggtgatcagtaccgagcaactgatgcagttctgaaggggcctggcaagctcaagctggtttttgagggaaaggatgagcagattgatctggaggtgttcaacttcactggtgctggaggagttgctttgtctatgtacaacactgatgagtcaatccgagcttttgctgaagcttctatgacaactgcttatgagaagaaatggccgctttatcttagcaccaaaaacacaatcctgaagaaatatgatggaaggttcaaggatattttccaggaggtctatgaagctgggtggaaatccaagtttgaggctgccggaatatggtatgagcatcgtctcatcgatgacatggttgcttatgcacttaagagtgaagggggctatgtgtgggcttgcaagaattacgatggagatgtgcagagtgatttcttagctcaaggctttggttcattgggtttgatgacatcagtattggtgtgccctgatggaaaaacaattgaagctgaagctgcccatggcacggttacccgtcatttccgtgttcaccagaagggaggtgaaaccagcacaaacagcattgcttcaatctttgcttggaccagaggacttgcacacagggcaaagcttgacgacaatgctagacttcttgactttgcactaaaacttgaagctgcttgcgttggaaccgtggaatctgggaagatgaccaaagaccttgctcttcttattcacgggtcttcaaacgtcacaagaagccattacctgaacactgaagagttcattgatgcggttgctgcggagctccggtcaagactggcagccaactgagctttttacaagatactcttgccaacttcagtgcttcatttcccttcttttaaagtcattttggctgtatcaccattaccattcgagttctcattctggactgaatgaacatttacagcatcggtacaaattgttgtcgatccaagcagtccatagatgctgatatcacgtagacgggacctcccaaataaaggatatatagaacaatctgtcattgctgatagttgttttatccctatcagttagcgtccgactggaaaattatctatgttcctcatttggatggtttgataatttcttgattgataattcgtaccttggaatctgggctgaaggaagcatggtgcacaattcgaagttt

SEQ ID NO: 4403 - DNA, 1399 bp, Oryza sativa; identical to SEQ ID NO: 4089
  ref <308>: DATABASE ACCESSION NUMBER: AK104764
  ref <309>: DATABASE ENTRY DATE: 2002-08-28

SEQ ID NO: 4404 - DNA, 1080 bp, Oryza sativa; identical to SEQ ID NO: 4116
  ref <308>: DATABASE ACCESSION NUMBER: AK104765
  ref <309>: DATABASE ENTRY DATE: 2002-08-28

SEQ ID NO: 4405 - DNA, 1691 bp, Oryza sativa
  ref <308>: DATABASE ACCESSION NUMBER: AK061753
  ref <309>: DATABASE ENTRY DATE: 2001-12-06
aggcgtcataacgcaacacaaaaggaaccgcgcggcggcaccaaagcgagcagaagcagcagccgaaggcgatcggagctcgcgcaacaggagagctgtctccatgaggaagctgtgcccgaacctggagcgcgatgacgcgctggacacggtgctcgaggtgcccatcccggaggagatgttctcacgcggcagcggcggtggcggctcccgcggctccaggttcggctgcaccaacgtcaagtcgtgggtgcggccgaacgcgtccgaccgctccggcggcgccggagagccgtgctccatgagccgcggcgagctgcagctcatgctcggcgtcatcggcgcgccgctgataccgctccccgtcgaccacgccaagcagtcgccctgctccgtcctctgcgaacagctcaaggccgatcccattgagtcgtccacggccaagtacataatacagcagtacatcgcggcgtcgggcggggagtgggcgctgaacaaggtcacgaacatgtacgcgatggggaaggtgaggatgaccgccgcggagctcaacagcagcgacgccgacggcggcggcggcggcggcggagggcaccgcggcgggaagaagagcagcaagaacggcggcgaggttggcgggttcgtgctgtggcagaagaagccggagctgtggtccctggagctcgtggtgtccggctgcaagatcagcgccggcagcgacggcaaggtcgcctggcgccagacgccgtggcatcagtcgcacgcctcccgcggtccgccgcgccctctccgccgatcgctccagggacttgacccgatgctgacggcgagcctgttcgcggacgcggtgtgcatcggcgagaggagcgtggacggcgaggactgcttcgtgctcaaggtggaggcggaggcgtcgagcctgcgggcgcgcaacagcagcagcgtggagatcatccggcacacggtgtgggggtacttcagccagcggacgggcctgctggtgcagctggaggactcgcacctgctgcagatcaagtcgagcggacacggcagcgtcttctgggagaccaccatggagtcgcacctccacgactaccgcgccgtcgacggcgtcaacatcgcgcacgccggccgcaccgccgtctcgctcgtccgcttcggggacagcagcgacggcaacacgcggacgcgaatggaggaggtgtggaacatcgaggaggtcgacttcaacatctggggactctccatggactgcttcctgccgcccagcgacctcaaggatagcaaggaggacaaggacgtctccgccgccgtcaagcccgcgcggccgccgccgataaggataccggcggtggccgtccgcgtcgggccatcgcaggtcgccgccgtcaacatggacgattccgactcgctcattgcgaggtcatgacatacatagcgggcagtgttacaccgtatgagtcgtgtgtgtttacgtgccttatcgccataagttacttatggtaagatctgtaaatatattgcaggttgagatatttttgttttcggggagtggattttacctcagatagatgctcaggggtgagtagtaaagcgagtaatccgggatagatgttctaattagcggtattgtaatttgcttatgacgccccttcactgtaaagttgaaagaatctccagttctgctagtc

SEQ ID NO: 4406 - DNA, 1295 bp, Oryza sativa; identical to SEQ ID NO: 4078
  ref <308>: DATABASE ACCESSION NUMBER: AK104766
  ref <309>: DATABASE ENTRY DATE: 2002-08-28

SEQ ID NO: 4407 - DNA, 1026 bp, Oryza sativa
  ref <308>: DATABASE ACCESSION NUMBER: AK061754
  ref <309>: DATABASE ENTRY DATE: 2001-12-06
gcttgaaattgccgggagggaagcggatgggggccggcgatgcgccccggccgtatgcggaacggcttcggctggtccgccgatcggctcggggcgtggactgttgtcggccgcgccggcggccaaagcccgggggctccgccaaacccgcccgtctcctcttcggccgtctttgctcgaccggagcggagcgcagcgcaggccaacggcgtggacgacgcgcgccccctctggatcgccgctcccccgcgcgccacagcttccatccggcgactgcaaggccgcccaagccaagagggtttctttgcaagctttagccgctcgacgttcattgacagaacatgcctaaaataaagacaagccgtgtcaaatatcctggaggatgggagcttattgaaccaactatccgtgagttggatgccaaaatgagggaagctgaaaatgacacacatgatgggaagagaaagtgcgaagccctctggccaattttccgtatttcccatcaaagaagtcgctacatatatgatctttattacagaaggaaggagatatcaaaagagttgtatgagttttgcctggaccagggttatgcagaccgtaatctgattgcaaagtggaaaaagccgggttatgagcgcctttgctgtcttcgatgcatacagacacgagaccacaactttgcaactacatgcgtctgccgggtccccaagcatctcagagaggagaaggttatagaatgtgttcactgtggatgcagaggctgtgccagcggtgattgagatatcgtcattatcttgtttgaatctgtcaaactaagcagacataatgtttcttgagcgaaatttcggctaaaaacgtttacgaaaacgttttgtaaacccgcctaccgggtatgacgttatttaagtacctgagattgtggttacggtctgcattaatctgccgcatggtcattgcttgatcatcggcctcaacaccctgcatatgtgtattctaaagttttttaatggaaacatctgttactcg

SEQ ID NO: 4408 - DNA, 1287 bp, Oryza sativa
  ref <308>: DATABASE ACCESSION NUMBER: AK104767
  ref <309>: DATABASE ENTRY DATE: 2002-08-28
gatccttccccaactcggcgtcgcgccgcctcaaccgaagcaaggagcaaagcggggattcagaacgggaaggagaaggtccggttcgtccgctctcgagctcaagtgtcagttgaagtgttttgaaagtcatggcggagcatttggcttcaatatttgggactgagaaggatagggttaactgccccttttacttcaagattggggcttgccgtcatggggatcgttgctcccgtctgcacaacaggccaactgtgtcgccgacaattgtgcttgctaacatgtatcagcgccctgatatgatcacaccaggagtcgatgctcaaggccaacctattgatcctgaaaagatgcaggagcactttgaggatttctatgaggatatctatgaggagctgagcaagtttggtgaggttgagaccctcaatgtctgtgataaccttgctgaccacatgataggcaatgtgtatgtccagttcagggaggaagaacaggcagtcgctgcgcataatgcccttcaaggtcgcttctactcagggcgcccaataattgttgagtattcccctgtgactgatttccgtgaggcgacctgtaggcagtttgaggagaacagctgcaaccgtgggggctactgtaattttatgcatgtaaagcagattggcagggagctcaggaggaagctttatggggggcgatccaggaggagccatgggagaagccgcagcccaagcccacgccacaggaggggcaatcgtgaccgtgatgatttccgccgtgaacgtgatggttatcgtggtggtggtgatggttaccgtggcggcggcggtggcggtggtggtgacggttaccgcggcggtgatagttaccgtggtggtggtggtggtggacgcaggggtgggggcagcaggtatgacaggtatgatgatggaggaaggcgcaggcatggcagccccccaaggcgtgcaaggagcccagtcagggaaagcagcgaggaacgcagggcgaagattgaacagtggaaccgtgaacgggaggaaaagccttgaacgaaagcagtgatatctctatggatggccggttcatgccttcatggcaatcactatccgctggagtcgtggtgtgctgctatgttctaagtggatatttagtgtgtgtcgtttggtactcatgcttggctgagtaacccttttaaatgcaggattctggattctatttacattgtgtttcgtttgacgtgtaaaccgccgtttgtttttaaatatgcaatattggatcttttgtcagtct

SEQ ID NO: 4409 - DNA, 1250 bp, Oryza sativa
  ref <308>: DATABASE ACCESSION NUMBER: AK061755
  ref <309>: DATABASE ENTRY DATE: 2001-12-06
ctgaggagggaggagaggaggttcgtgatgatggagagccaggcgctgcaggaccccgtcgccgagccccatggagctgagcctgccgccgccggagctcctcccgccgtggttcccggcaaggagttcacccgcacctgcaagggcctcgtcgtcgtcctcgtcggcggatatgtgctgctccagctcctcccctcctccctcgactacctcgccatcatccccgccaagactattccatttgtatggactgtcttcacagctggctacatcgaacaagttcttccaggggctatcggcagttcccttggtcttctcttctgtgggaaggatatcgaaccagtgtggggccgcaaagaattcttgaagtttatcatcttggtcaactccatctgcggtgtccttgcattctgctttgctgttgcactctactatgtcactggaaaggagagcttccttgttacaccactttctggtttccatggtgcccttgctggctttcttgttggcctgaaacaacttttaccaaaccttgagctccccatgtgctttttctggaaaataaaggctaagtggatgccattcttcgtgctatgcttctcaactatcatggccttcattgtacctgattccattaacttccttccaactctgctatcggggatgtatgtcagctggatttacctgagatacttccagaggaacccactgacagggcttaagggtgattcaagtgatgacttctccttccccagcttgttcccggatgccatgcggccagtcacagaccctgttgctaacctctttgatcggatgctgtgtgcaaggtctagaccttctgaactggccctcccagtctcagatcctgcaaaggcatcgagaagaagggagcgtggcgaaagggttcttgaggaaaggttggctgcagaccatgcagcagacacggaagccccagctctgggccattccacagcagaagattaatatagctcgtccactgtcaacacaccatactgcgataggagccacggccacctgcctatgtgctttgtaacaccgaaaatttgtgttctggagaatgcaattcagtttacaatggaccaatgatatgatattttactctcttttcttattatttattggttaaattctgttgtagttgattacagtgaaaaaagaaagaaaaggatgacatccccatccagatgtaatgtagaaagaattgagactttgtgaggattgctgttgag

SEQ ID NO: 4410 - DNA, 1149 bp, Oryza sativa; identical to SEQ ID NO: 4118
  ref <308>: DATABASE ACCESSION NUMBER: AK104768
  ref <309>: DATABASE ENTRY DATE: 2002-08-28

SEQ ID NO: 4411 - DNA, 1019 bp, Oryza sativa; identical to SEQ ID NO: 2329
  ref <308>: DATABASE ACCESSION NUMBER: AK104769
  ref <309>: DATABASE ENTRY DATE: 2002-08-28

SEQ ID NO: 4412 - DNA, 1142 bp, Oryza sativa; identical to SEQ ID NO: 4104
  ref <308>: DATABASE ACCESSION NUMBER: AK061756
  ref <309>: DATABASE ENTRY DATE: 2001-12-06

SEQ ID NO: 4413 - DNA, 1149 bp, Oryza sativa
  ref <308>: DATABASE ACCESSION NUMBER: AK061757
  ref <309>: DATABASE ENTRY DATE: 2001-12-06
aatagcctccctctccatgctacctttgcttgtcctccgtcgctggtgaagctgtcaccgaggagcatatgtccatggcttgcacgaaggtgtggagaagcacgatgtacacacccaggcggctgaagcgaacgacaccggcgtcaagagtatcaagcacggccatggcggcggcgaacggcgatgccagccatggcgccaacggcggcattcagattcagtccaaggagatgaagacggccatccacagcaacgatagccccaagaccctcctcaagagtgaatccctccacgagtacatgctgaacacgatggtgtacccgcgggagaacgagttcatgcgcgagctccgcctcatcaccagcgagcacacctatgggttcatgtcgtcgccgccggaggaagggcagctgctgtcgctgctgctgaacctgacaggcgccaagaacaccatcgaggtgggcgtgttcaccggctgctccgtgctcgccaccgcgctcgccatcccggacgacggcaaggtcgtcgccatcgacgtcagccgggagtacttcgacctcggcctccccgtcatcaagaaggccggcgtcgcccacaaggtcgacttccgcgagggcgccgccatgcccatcctcgacaacctcctcgccaacgaggagaacgaggggaagttcgacttcgcgttcgtggacgccgacaaggggaactacggcgagtaccacgagcggctgctgcggctggtgcgcgccggcggcgtgctggcctacgacaacacgctctggggcgggtccgtggcgctggaggacgactccgtgctggaggagttcgaccaggacatccgccgctccatcgtggccttcaacgccaagatcgccggcgacccgcgcgtggaggccgtgcagctcccggtctccgacggcatcaccctctgccgccgcctcgtttgagatcggcgcaagccgtgtgcgaagcactgatctcggggagactgaagtggggctggatttgggctttgaatggaccccccaaatgggcctgaactgtagtataaataagcagctgcactgcaattatatcgtagcctttgtatgtttttcatgcaggtttgtgtctgagaacaaaaattaaattctagagtgatgttttatc

SEQ ID NO: 4414 - DNA, 1279 bp, Oryza sativa
  ref <308>: DATABASE ACCESSION NUMBER: AK104770
  ref <309>: DATABASE ENTRY DATE: 2002-08-28
ctccgcccttcgcctcctccaccgagtcagatctcgagcgccgcagaggagagcagcaatgaggccgtcgctgatgagatccgcctcgcaggtcctccgccgccgccgcggctactcctccgcctccggccagccggagcggaaggtcgccatcctcggcgcggccggcggcatcgggcagccgctctccctcctcatgaagctgaacccgctcgtctcctccctctccctctacgatatcgccggcacccccggcgtcgccgccgacgtctcccacatcaacgccccggcccaggtgaaggggttcatgggggatgaccagctcggggaggcgttggaggggtcggacatcgtgatcatcccggccggcgtgccgaggaagcccggcatgaccagggacgacctcttcaacatcaacgccggcatcgttaagaacctctgcaccgccattgccaagtactgcccgaatgctcttgtcaacatgatcagcaacccagtgaattcaacggtcccaattgctgccgaggttttcaagaaggctgggacttacgatgagaagaagttgtttggtgtgactactcttgatgttgttcgtgctaagactttctatgctggaaaggccaatgtaccagttactgatgtgaatgtcccagttgttggtggtcatgcgggtatcaccatcctgccactgttctcacaggcaactcctgcaactaatgcgttgtctgatgaagacatcaaggctcttaccaagagaacacaggatggtgggactgaagttgttgaagcaaaggctggaaagggctctgcaaccttgtccatggcgtatgctggtgctgttttcgcaaatgcttgcttaaagggtctgaatggagtgccggacgttgttgaatgctcttttgtgcaatcaactgtaacagagctgccattctttgcctccaaggtgaagcttgggaagaatggagttgaggaagttcttgggttgggccagctgtcagactttgagaaggaaggactggagaatcttaagggcgagctcaaggcttcaattgagaagggtatcaaatttgcaaatgcgtagttaggccattttgcagactagcaactcatacctgtagatgaggcttctcttgatttgatttatgcttttttctaccccttgtgttgggataccgaggatttgagctttacaataagaatccggcggcctaatgccaaacagaacaaaacttgtacgagaggaactatttgtgtcaagttttgagttgttacattggac

SEQ ID NO: 4415 - DNA, 990 bp, Oryza sativa; identical to SEQ ID NO: 2317
  ref <308>: DATABASE ACCESSION NUMBER: AK104771
  ref <309>: DATABASE ENTRY DATE: 2002-08-28

SEQ ID NO: 4416 - DNA, 1076 bp, Oryza sativa
  ref <308>: DATABASE ACCESSION NUMBER: AK104772
  ref <309>: DATABASE ENTRY DATE: 2002-08-28
aatcccaatccacctgagcgagagagagagaaagggtctcctcctcaacatcaacaatggcggtcgcaacctccttcgccacactcgccatcgcgcggccggcggcggagcgggccctcctcgcctccaaaaccccctcgccgctcctctccatccgcaccggcaccggcaccgcacgcctcccctcatcggccgtctttggaggtttcactcctgcgctttccgctgctcacagccgcgcgcgcttcgtctcctccgccaccgctgaccccaaggaagtggacctccagtccaaaatcacaaacaaggtgtactttgacacaagcatcggaaaccctgttgggaagaatgttgggagggtcgttattggcctatacggggatgatgttccccagaccgcagagaacttccgtgctctttgcactggagaaaaagggtttggttacaaggggtccagtttccaccgtgtcattaaggacttcatgattcagggaggagactttgacaagggcaacggtactggagggaaaagcatatatggccggaccttcaaagacgagaacttcaaattggttcatactggacctggagtggtcagcatggccaatgctgggccaaacaccaatggcagccagttcttcatctgcactgtcaagacaccttggttggatgggaggcacgtcgtgtttgggcaggttattgaaggcatggacatcgttaagatgatcgaatcgcaggagactgacagaggggaccgcccgaagaagaaggtggtcatcagtgagtgtggggagcttccagtggtctaataggtgccagagggctaatcttcttcccccggagactttgctgtttttggtttcatagtaagctgtgaacttatcgcatgttctccgcgcagtcagagatcatgctgagttgaggccaagatttctaagttgagaagaatcctctattgttcggctggaataaaacgttcttacctgtcgagggtcaggaaataatgttgtggttcatgaaagatcaaatgtctgtcttttcgtgcatacgcagactaaagttactcctttcccaat

SEQ ID NO: 4417 - DNA, 1843 bp, Oryza sativa
  ref <308>: DATABASE ACCESSION NUMBER: AK061758
  ref <309>: DATABASE ENTRY DATE: 2001-12-06
gtccaaagtttcgggagttcatcgtgaacggtgatcgatccaaagaacaacaactcggagcaaagctagctaacgaagttagttccaaacaaagctagcttatcgcgattagctagctagaagagagttagctaggcgccatggagctaggcgtgccactgccacgacggcccgtgcccggtagctacggcgtgccgttcgtctcggcggtgcgcgaccgcctcgatttctactacttgcaggggcaggacaagtacttcgagtcgcgcgccgagaggtacggctccaccgtcgtccgcatcaacgtcccgcctggcccattcatggcgcgcgacccccgcgtggtggcgctcctcgacgccaagagcttccccgtcctcttcgacgtcgccaaggtcgagaagcgggacgtgttcaccggcacgttcatgccgtccacctccctcaccggcggctaccgcgtctgcgcctacctcgacccgtccgagcccaaccacgccaagatcaagcagctgctcctctccctcctggtctctcgcaaggacgccttcgtcccggtcttccgctccaacttcggcgcgctcctcgacaccgtcgagtcgcagctcgcgagcggcggcggcaagtccgacttcaccgccctcaacgatgccacctccttcgagttcatcggcgaggcgtacttcggcgtgcgtccctccgcgtcgagctccctcggcaccggcgggccgaccaaggccgccctgtggctcctatggcagctcgccccgctcaccacgctcggcctgcccatgatcatcgaggatccgctcctccacacgctgccgctgccacccttcctcatcagctccgactacaaggcgctgtacgcgtacttcgccgccgcggcgtcgcaggcgctcgacgccgccgagggccttggcctgtcgcgggaggaggcctgccacaacctgctgttcgcgacggtgttcaacagctacggcggcttcaagctgctgctcccgcagatcctgtcgcgcgtcgcgcaggccggcgagaagctccacgagaggctcgccgcggagatacggagcgcggtggccgacgccggcggcaacgtgacgctggccgctctggagaagatggagctgaccaggtcggtggtgtgggaggcgctgcggctggacccgccggtcaggttccagtacgggcgcgccaaggccgacctggagatcgagagccacgacgcgtcgttcgcgatcaagaagggggagatgctgttcggctaccagccgtgcgccaccagggacccgcgggtgttcggcgccacggcgagggagttcgtcggcgaccggttcgtcggcgaggaggggaggaagctgctgcaatacgtgtactggtcgaatgggcgagagacggagaaccctagcgttgacaacaagcagtgccccggcaagaacctggtggtgctcgtcggaaggctgttgctcgtcgagctcttcctccggtacgacaccttcaccgccgaggccggcaaaaaggtggtcatcaccggggtcaccaaagcttcaacctccgccgtcaatcgtactgcttaagccggccatcacttcaggcgtgggtcgtcgatcatccactcaaccagctccgtcctacgcatatgcaataagaaatactcgtacctgaattcttgcatggctaaacactactaataagtgtatgtattctgtttatttgttcgattccatatttgtaattttgttgttattgtttgctgttgaattacgattgtgtattttacagggctgacagtgtctttaaacacctctaatatgtatcggatcaatctgccctagtcatgtct

SEQ ID NO: 4418 - DNA, 1642 bp, Oryza sativa
  ref <308>: DATABASE ACCESSION NUMBER: AK061759
  ref <309>: DATABASE ENTRY DATE: 2001-12-06
aatctcgattcgccactcccatccccgccggccgccgctggcccctttccccttctccgaccggaccgcgctcctcagatccatcgcagggcagggcaggacgcgcaatccactgcggtcgcatctgtttgctggagacccaaacttttaggcgtcgagactccatcccagtctgacttcctgctccgaccgcgcgcctcaaggaagctttatctcggctcggctggctacatcttctgtttgctgctgctgcttattggagctggaacttgggagttgctgatcgactctgaagatgggcctgtcgcgtcgggctaagaatctcatcgtcgacgtccccttccaaggcgccaaatggctacgctgcgtcgatctggcaggccagctgttcggtaacaccgctacaccaccaccaccaacaacaatcgcacatggatcagagtcagcagctgtgcaagaagactacacctctcagacactggtgtccgactcctgtaatcccaagaagaaggcagcaggcttaaagatggagaggattcggcttcccagacccatcctcaagttttgttctacacatggatccgaccagatttctctcgactgcttcccccttgtagatcgcaaggtggtaatagcggaccacaccaggcgtatgttcctttgtgacgccgacacgcgcgccgtggtgagtatcccaaacctccacaagcccaagtcacggcccatctctctattcatcccaagtactgctgatgccaatgaccatcccagcgttggcggtggcagcctctatgtcatggagagggttcctgagccagagaagggcgatgtgaagctgagtgatcagtttgaggcctttgtgtgcagcaacatctttgagggcccatggaactgccacttcctccggccaccgccattcgtctctgatcgtacctgctgcttcacctaccccaagatcacatcctatgcagtggtcggctctaacatctgcatatcccacaacagctgcaacgcaacctactgcttggacacagcgagaaacacatgggaagtcggtaatgggaatctacccttgtatggcaaggttgtgtatgtccctgagctcaagctctggtttggcttctcgactgaggccaggaccatgtcgccgttggctgctgctgatctctccaccatggactcccactcccagccacaacttattggcgattggaaggaatttgacccacctaagggttggctggaatcacatgatccgcagcttgtcaacctgggctcgggcaggttctgcattgcaagattcttccgcattgtgtctatggacgacggtgaaataattgacaggattgaagtcttcaccggtgtggaggtgttgccggttggacacgacggcgatggcagtggaaataccaaacttaagcttcgaatgaaaaagaacaagtcgctatgccacgtgtctaatggcaccgtcatcgctgatatcttctgaataatctttcaacaccctgttctacccatcataatgtatgatctgaataacttttggagttgacactatatattatctgttagttattgttattattggttagttcaaatggaaggagggagtattacgtattgtctcctgcaacgggactgc

SEQ ID NO: 4419 - DNA, 1567 bp, Oryza sativa
  ref <308>: DATABASE ACCESSION NUMBER: AK061760
  ref <309>: DATABASE ENTRY DATE: 2001-12-06
tttctccaatcaggaggtgcatctattgtacaatcacctgttggtgctccatctttttcgcctctctcgccaaattctccatcccccactgggccaccgtccatctttgctatcggaccatatgcacatgagacacagctagtctctcctcctgtcttctcagccttcacaactgaaccttcaacagctcctttcactcccccaccagagtctgtgcatctgacaaccccttcctcaccagaggtgccatatgcaaagctacttacctcaatcaacaacagcaaaaatgctgaaacaggtgagcttcagtcataccagatttaccctgagagcccaataggacgtctgatatctccaagctcagcttgttcagggacttgctctccatttcctgaccctgaggtgcagacttcctcacgttccacattcccctcattcccagttcgtgagcctccaaagatactggatggcgagggaattgcaacacagaagttgatacctcgccatatgcgcaatggcggttctctcttggatggacatatttctgctgctgtaccagtcgtagacttctctgcccgacttcaaaataatgatcatgctatggatcatcgggtttcatttgagttaacagtagaagatgtagctcgctgtcttgagaagaaaaccaacattaatggggagtctgctgcagcttcttttcgccttgtgcccaccggtaacggagatcacattcatcccagagaatcgaatgatacaagagcagggctatgtgttgatgaaacataccatgatctgcctgagaaagcacggcgctccttgtcccttcgtaaggctaaagaattcaagttcaacaatgttgatgctcctagtgtggagccgagcgttggatcagactggtgggcaaacgagaaagttgctgggatcacatcagagccaaggaaaagctggtccttcttcccagtggcacagccaggggtcagctaacagttgcactgaccataatcttacaagatgaagaaataagcttctgtcatttttgctcctgctgtttctcagttccccagataccatcatcataactgcaggagatgcaaacttatgcaaaatattccagttttagcggtaagttggagttagttagtaactcagtgtccagctaatatcatcataagatactaaaggtgatgcagattctggaacctgttgttataaaaccataatacttccatggtgtagcgtctgttgtatcctccttaactgactggctgttctgatactgatgctgtttatgtacataataaactagcgaaaagagtagaactcttcctagcagcagtgtattgtcagagtggagcaagcaaatgactctgatcccctcttcaattagttgtgctttggctttagcagaagaaacttgaaaatattgttctgtcgtgcttaccagttcggcaagaatttcaattctgtcttggcatatgtgatgtcacatctcttatcacaaattctgtaagcaacactattttgttgtgctctgtatattaaattgggccaagtgctgactgtttat

SEQ ID NO: 4420 - DNA, 1000 bp, Oryza sativa
  ref <308>: DATABASE ACCESSION NUMBER: AK061761
  ref <309>: DATABASE ENTRY DATE: 2001-12-06
ctctagggtttgggattttagccgccgccgccgccgccgccgctcacccgcgccttcgacgagctccagcccgtagacctcgccggatctccccgatggccgtgaccttcaccgacctccacaccgccgacgggctcaaagccctcgagcagcacctctccggcaagacctacgtctccggaaacgcgatcagcaaggacgacatcaaggtgttcgccgccgtgccatcaaagcctggagctgagttcccgaacgctgctcgctggtatgataccgtcgctgcggccctcgcttcaaggttccctggcaaggcagttggagtgaatctgcctggaggaggtgcggcatcgtctgctgcagcggctgcgccagctgctaaggatgctgatgaagatgatgatgacctggatctttttggtgatgagaccgaggaagacaagaaagcagcagatgagcgtgcagcttccaaggcctcttcaaagaagaaagaaagcggaaaatcatctgtcctgttggatgtcaaaccatgggacgacgagactgatatgaagaagttggaggaggctgtccgcagtgtgcagatggagggtctcacctggggagcatcaaagcttgtgcctgtgggttacgggatcaagaagttgcagatcatgttgaccattgttgatgacttggtgtctgtggatagccttatcgaagaacatctgactgaagagccgatcaacgaatttgtccagagctgcgacatcgttgcgttcaacaagatttaaaatatcaaaaggggatgttgctacttatccaaaaactgggactgggactggttgttctggaagcatttttcatcccatcttattatccttcacagaaatgctagtttgagtttatttttgagtgatgcctgtcattagtgcctcttatctttaagtagttgaactgcagagcggcttgtaatggcgaaacatatgctatgtcaaagtacatccgtccatttttactgtgc

SEQ ID NO: 4421 - DNA, 1327 bp, Oryza sativa
  ref <308>: DATABASE ACCESSION NUMBER: AK104773
  ref <309>: DATABASE ENTRY DATE: 2002-08-28
ctcgcttctcccgccatcttctcctcctccacggccatggccgccgtcgcgttccgctcgctgctacaccccgccgccgcggccctcaccgagcgtgtgccactgcctcccgctcacctacggctccagggccttcaccgccaccgcgtcggcgtcctcaacctcttcgtcgcctccggtcatcgccgccgcattctgcttcccctcgccgccgccggtggagagttctcttcggaagaggaggagtacgccaacgaggaggaagaagagggggaggagtacgtggaggaggaagaggaagatggggaggaggaggaggcggcggcggtggcggcgcctcgcggatactacccgccgagaagccggccggcgctcgggcaagagcccggccgcctcttcgtcggcaacctcccctacaccatgacctccggcgagatctcccagaccttctccgaggccggcagggtcgacaacgtccagataatctatgacaaggtcaccgaccggagccgcggcttcgccttcgtcaccatggccaccgccgaggaggctgccaccgccatccagatgttcaatggggccctgcttggagggaggactgcaagggtgaactacccggaggtgccgcggggaggggagagggcggtgggatcggcggcggccacaagggagaacaggcgcgatgacggcacattcaagatctatgccgggaacctggggtggggtgtgcgtgccgatgctctgagggcggcgttcgaggggcagcccggcttgcttgatgctagggtcatcttcgagcgcgactccggtcggtccaggggtttcggattcgtctccttcaggactgcagaggatgcacaggctgcattggaggcattggatggagtggaactggaaggaaggccactgaggctcagtatggcggaacagaacccaacagctggttctcctagcacagtgcagtcacaggaggaagaaactgcttcagaatcatctgatgcagagacagagcagagcattacctcagaaccttctgaagctgaaacggaagagagcaacttgcagacagctgccagttattagtatctaattgatggttgcactgatttacttattctgccattcggcattccaatctaaattgtacttgtccaattgaaaattttgacacaagagatgctaaaatgggatatgagccatagccaatagaatattattagacatagaggtgctccgagtttcagttattgctgtaatatattgtgcagaaatctaaagtgcaactgttttgcttcctatatttattcagttaatatgttctctgtgt

SEQ ID NO: 4422 - DNA, 1653 bp, Oryza sativa
  ref <308>: DATABASE ACCESSION NUMBER: AK061762
  ref <309>: DATABASE ENTRY DATE: 2001-12-06
aaaccccacccgagccaagccccacacacaaagcgagcgactcggcggcggcggcgatggccacggtggcgatggacatctccaagccccctcccgcggcgggcggcgacgaggctgcggcggcgaaggggaggggcggcgccggaggaggaggtggggaggggctgcggcagtactacctgcagcacatccacgacctgcagctccagatccggcagaagacgcacaacctcaaccgcctcgaggcccagcgcaacgacctcaactcccgagttagaatgctcagggaagagctgcagttgcttcaagaacctggctcgtatgttggtgaggtggtgaaggtcatgggtaaatcaaaggttctagtgaaggtacatccagaaggcaaatatgtggtggatattgataaaagcattgatattacaaagatcacaccttcaacaagagttgctcttcgaaatgatagctatatgcttcatttgatcctgccaagcaaagttgatccgttggtcaatcttatgaaagttgagaaggttcctgattctacttatgatatgattggaggtcttgatcagcaaatcaaagagatcaaagaggtcattgaacttcctatcaaacatccagagctatttgagagtcttggaattgcccaaccaaagggtgtccttctctatggccctccaggcacaggaaaaacattgttggcacgtgcagttgctcatcacactgactgcaccttcatcagggtgtctggttccgagttagttcagaagtacattggtgagggttctcggatggtccgtgaactctttgttatggccagggaacatgcaccatccattattttcatggatgaaatagactccattggatctgctaggatggagtctggaactggcaacggtgacagtgaagtccagcgaaccatgcttgagcttctgaaccaacttgatggttttgaagcatcaaacaaaataaaggttctgatggcaacaaataggatagacatcttggatcaggcccttctgaggcctggtcgcatagacaggaaaattgaatttcctaatcctaatgaggattcacgctttgatatcttgaagattcattcaagaaaaatgaacttgatgcgtggtattgatctgaaaaagatcgctgaaaagatgaatggggcttcaggagccgagctcaaggcggtctgcacagaagctggaatgtttgctcttcgtgagagaagggtgcatgtaacacaagaggactttgagatggcagtggcgaaggtgatgaagaaagacacggaaaagaacatgtccctacggaagctctggaagtgaagctcacgtcttaatagcctaagctttcactgcatcgctgaagcagcggaagcatgtaactgcatgttgtggacttcttccatgtgctttagaatatgttgttccatggttaactttcagattttaagatgcacctatgataatatgatgttgaaaagtttaatttattgaattggctagatacacgatatgacattgctttcttgcaatgtacccctacgctgcctacttgggttgtttgcttgcctgttttgtgatctctcaagtcagaacatttgatttttcacccgctgtttcgccatgtgggtggttttgctgtgtc

SEQ ID NO: 4423 - DNA, 1236 bp, Oryza sativa
  ref <308>: DATABASE ACCESSION NUMBER: AK061763
  ref <309>: DATABASE ENTRY DATE: 2001-12-06
agcttacctccacaatcacactgagctaacctccatttccaccatctccgagcttcttgttgttgttgttgttggtttggtttgcgagtctgcaaccaatggacgcgtctccgagctcctcgtcgtcgtctcctgtggcgccggaggtggtgcaatgggccggcggcgccgacggctttggctcggcggcgatcggcttcgcgtgcagggtgctctgcgccgtcgccacctgcgtcttcgccgcagtggggtcggtggtcggggcggtgaccgggagcgcgatcgggctggcgacggagagcggaatgctgcgcggcgccggcatcggcgccatctccggcgccgtcttctccatcgaggtcgccgagtcgtcgcgcgacctctggcactccagcgactccgccgtctggtgcctcgtctacatggtcgacatcatctccagcctcctgagtggaaggctggtgcgggagaaggtgggtcccgcggttcagagcgcggttcagagtcagataagcgccatcagctcgccgttcgccgagaccagcgacctgttcgagaccggcggcaccaagggtttaccggcggacacgctccgccggctgccggcgatcaagatcaccggcgacaacgccgtcgactccgccggcgagcccatctgctgctccgtgtgcctccaggatttccgcgtaggtgagatggcaagaaggctaccaagctgccggcacgtgtttcacgtgccgtgcatcgactgctggctggtgaggcacggctcctgcccgctgtgccggcgagacatctgatcgatcgtgatcaaaatctcgcatctgatgaacgatcagttcatgtcatcgtactccgaatcggacacggcgatgaatggtggatcgagttcgtggtacataggttgtgtgtagtagagtagaacgaactactgcatcctgatatccgtaaggggaatgggtgtgagcaagtgattgcaatctcgtgaagatggagagagaatgagaccttccaaaaaaaaatcttttttactgtccttgagtagttaccggaagggaatattgtaccgtggtatctctgttgcgttgaggtatcggaatgtattgtaaatttacagtaaaaatcgttgtaactttaggtatcttttcaagaatactggaggcgaaaaaatggcatgtgtgtagcaatcactttgatgagatgaatgaactggcagaaactgtggataaggaaaag

SEQ ID NO: 4424 - DNA, 1005 bp, Oryza sativa; identical to SEQ ID NO: 1720
  ref <308>: DATABASE ACCESSION NUMBER: AK061764
  ref <309>: DATABASE ENTRY DATE: 2001-12-06

SEQ ID NO: 4425 - DNA, 1066 bp, Oryza sativa; identical to SEQ ID NO: 3200
  ref <308>: DATABASE ACCESSION NUMBER: AK061765
  ref <309>: DATABASE ENTRY DATE: 2001-12-06

SEQ ID NO: 4426 - DNA, 886 bp, Oryza sativa; identical to SEQ ID NO: 3196
  ref <308>: DATABASE ACCESSION NUMBER: AK104774
  ref <309>: DATABASE ENTRY DATE: 2002-08-28

SEQ ID NO: 4427 - DNA, 1237 bp, Oryza sativa; identical to SEQ ID NO: 1705
  ref <308>: DATABASE ACCESSION NUMBER: AK104775
  ref <309>: DATABASE ENTRY DATE: 2002-08-28

SEQ ID NO: 4428 - DNA, 1387 bp, Oryza sativa
  ref <308>: DATABASE ACCESSION NUMBER: AK061766
  ref <309>: DATABASE ENTRY DATE: 2001-12-06
attcctcactcctcccccgcatctcacctcacctcacctcccgataaggcacgaggagactatctcctccccctcctcctcctctccccgccgacgaccccgccgagctacatctccgccgtgctgatcgcgtggagccgaggagaggagcggcggccaacgctacgaggagaggagagtgggggaggggaggggagcgagccttatcttacccgctccgccgaagcctatggactcggagcactggatctcgcgcctggccgccgccaagcggttctacgccgcgcagctcggccacgccgatcgagcggggatggaggaggtggacatggacgaggaggtgaggccggagttcgcgtgcccctactgctacgaggaccacgacgtcgtctccctctgcgcgcacctggaggaggagcaccccttcgagccccatgcggcgccttgccctatatgttctgataagattgcaaaagatatgcttaatcatatcactgtgcaacatgggtacttgttcaagaatcgtcgcaggttgcgcagattcgttattccaggcagtcaagccctatctttgctgagtcgagatctacgtgaagcccatttgcaggtgcttctgggaggtgggggacataggtcaaacaacagcagcaacacaacaaatatttcagctgaccctcttctgtcatcgtttggccttagctttccaacatcagacacagaggaaacatcaaaaccacctatttccattccagatgatgcatctgtgataaaagagacacctgctcagccatgggattcaagtattgactcatccctcacaagggaagaaagggaacagaaacggaagcaagcgagtgtcagagcaacatttgtgcaagacctgctgctcactactttatttggagattaataaatcaagatgagcctaagtagtcgatagatgcatgggtaaatcctggtgcatatttgcatagataagtgcccggtcaaattgctgaaggtaatatccatggcagataggcacgcttctgcggcaccaggcgtcgtttcctcccgtaaggtgcagagttgatgtgggcacgggggcatcttaagtgttattgtagccggtctgtaatctgtatctccagttccataacaatccgcgatcagcatacgatacacgtagcagatcgcggttgtgtttgtagcgcttctatgtttagaagcattggtttcttgtaccaacgtaataattatgttacgggacagcagaatggtatgcagtttgtctacttctgtgagagtataataaaccaagtttacaactggttggttttggaagattatgctgtaagatgaagcatctgtaacgtgttgtacgtgatggtatcacttgtaccgtgcc

SEQ ID NO: 4429 - DNA, 1161 bp, Oryza sativa
  ref <308>: DATABASE ACCESSION NUMBER: AK061767
  ref <309>: DATABASE ENTRY DATE: 2001-12-06
tgaaatgattagcatggcggtgcataggaacctgcttcggctccgtggattttgcatgacgcctacagaacggttacttgtctatccctacatggctaatgggagtgtcgcatcacgattgcgagagcggcagccaaatgatccgccgcttgaatggcaaacaagaactcggattgcgctgggatctgccagaggattgtcctacttgcacgaccattgtgatcccaagatcattcatcgtgatgtcaaagctgcaaatattctgttggatgaagattttgaggcagtcgtgggtgactttggactggccaaacttatggattacaaggacactcatgtaaccacagctgttcgtgggacgatcggacacattgctcctgagtacctctctactgggaagtcctctgagaagactgatgtttttggctatggaatcatgcttcttgagctcattacaggacaaagggcatttgatcttgctcgtcttgcaaacgatgatgatgtgatgttgctcgattgggtgaaagggctcctgaaagagaagaaggtggagatgctggtggacccggacctccagagcggcttcgtggagcatgaggtggagtcactcatccaggtggctctgctctgcacgcagggctccccgatggaccggcccaagatgtcggaggtggtgaggatgctggagggcgatggcctcgcggagcggtgggaggagtggcagaaggtggaggtggtccggcaggaggcggagctggccccccgccacaacgactggatcgtcgactcgacctacaatctccgggcaatggagctgtccggcccgaggtaaaagaaacgaaagacaaaatcacaaagcatccaacctttgctcgacggcttcctcgcccttgtttgtgtatatgacagacagatcgatagctggcaaatctggagggaaaaatggtttacttgtaaccctccctggtgcctcggtaattttcaagtaggctctgcacttggttgtcgttagaaatgcatggccgggcggaattgcaacacattgttgtggcggctctgcgtctgtaatggctgaacaactgatgcctctctctctgctgtattgtacgtacaactctctcttttgacggtgctaaacatcctaggcaatcttttttggtc

SEQ ID NO: 4430 - DNA, 1430 bp, Oryza sativa; identical to SEQ ID NO: 3239
  ref <308>: DATABASE ACCESSION NUMBER: AK104776
  ref <309>: DATABASE ENTRY DATE: 2002-08-28

SEQ ID NO: 4431 - DNA, 1868 bp, Oryza sativa
  ref <308>: DATABASE ACCESSION NUMBER: AK061768
  ref <309>: DATABASE ENTRY DATE: 2001-12-06
atacaaatatcaatcttcttccagtttttttttaaaaaaaatcaatatgtttgcgctcatcttcttcctcactcgatcagttccccaaatcccccaccctatccaaactcttcctcccccgatccaattcgactccactccatctccctcctccggatccctaatgcacaaggtgtagaattaaattccggggaaatcgacggagtcggaggtaggcgtagcagcatggctggaggagatgactggtcgaagaggacgatcatggaggaatccctgcagccgccggcccacggcgctgcggcgactacaccttgggtcctcctcgacatccgtgctttcatggccaaccaccgcaacgccaccaccgccatgtccgagaccaggagcggccaccccatcgaggtatcctcgtggacggcgcctccgccgcgcgtctcctacatatgcgtccactgccctggattggactccaagaagttcgccaccgagcccaccatcatcgccgcggaggccgacctcctcctcatccgcgtcgccatggggcgccggaacatccgcttcaagagcagcttccatgactacttcgtctaccaggccaccaccccaaccccgaaactcaccttgctcccgccccctcccatcgacaggttcatcgaccacgagcttggcctcctgcgctgttgcgcctctcctgattacattgttgctgcactctgtaacaccttcgaatcaggatactttgagtatgacctccacatctactgctccggcgctgatgcttggacctgccatccaatctccctccatggcctggtcgacacatcatttacccatatcaataccaaggcaatcaccattggagggaaggcgggcaccatgggctgggtcgacctctaccgtggtattctcttctgtgaccttctccgcgacaccactaagctccgctacttccccctgccgccgccgctcagtcccaacaactcgttaacaggctctccaaggcctcatcgtgacattgcccttgtccaaggtcggatcaagttcatcgagacgcggcttcatgtcaagccaggttccatcatcaacggcaccttcatctctcaaggttggactgctgccacctggactgcaccggacaccaatccctggaaccaaggttggcgccaggactgcaaactcactgcttccgatatctctgttgatgacagcaagatgaattttgagttgctgcctaagcttttcgatgaccaaggcacacctcagccaaccttggagagacttcatgtgggtcatccaacgctcagcttgcactctgatgacattgtttgcttcatggccaaggccgaccaatgggacgacgatgcttgggtgcttgctgttgatatgaagaacaagaggctaaaagttgtggctgagtttggtgcagaaagaacccttggcattggctatgcctacatgagcagtaacatatcagggtatcttcgtacagctccaggtatagagggtagcctaaagcgacaaggggtttgttgaccgcaccctcacacaagaagcagacccatatgatgcatatgtctcctccctcttggaaaggtggagatcaacagaattctgtgggaggtgaagttgattacatggattttggatgaggaggggcatggctaaggggagagcattttcatgtagtattgctgttgtgttagacttcttattgcttgattatctactgttttgtcagttctatttacgagggggtattgctggtactttgtaccgaggatgactatctaagcacaaaatcttaagagtgtagtttatgcctctgtttatttcttatcaatgtagcgaggttgtaaaccgtatggtcc

SEQ ID NO: 4432 - DNA, 895 bp, Oryza sativa; identical to SEQ ID NO: 3246
  ref <308>: DATABASE ACCESSION NUMBER: AK104777
  ref <309>: DATABASE ENTRY DATE: 2002-08-28

SEQ ID NO: 4433 - DNA, 1151 bp, Oryza sativa; identical to SEQ ID NO: 3219
  ref <308>: DATABASE ACCESSION NUMBER: AK104778
  ref <309>: DATABASE ENTRY DATE: 2002-08-28

SEQ ID NO: 4434 - DNA, 1085 bp, Oryza sativa; identical to SEQ ID NO: 3220
  ref <308>: DATABASE ACCESSION NUMBER: AK104779
  ref <309>: DATABASE ENTRY DATE: 2002-08-28

SEQ ID NO: 4435 - DNA, 1136 bp, Oryza sativa
  ref <308>: DATABASE ACCESSION NUMBER: AK061769
  ref <309>: DATABASE ENTRY DATE: 2001-12-06
accatctagctcactcacacagtctccactcacacgcattgcagaggagaggcgacaatggaggggaaggaggaggacgtgcggctgggggcgaacaggtactcggagaggcggccgatagggacggcggcgcagggcgccggggacgacaaggactacaaggagccgccgccggcgccgctgttcgagccaggggagctcaagtcgtggtctttctaccgggccgggatcgccgagttcgtcgccaccttcctcttcctctacatcaccatcctcaccgtcatgggggtctccaagtcctcctccaagtgcgccaccgtcggcatccagggcatcgcctggtccttcggaggcatgatcttcgcgctcgtctactgcaccgccggcatctccggaggacacatcaacccagcagttacttttgggctgttcttggccaggaagctgtccctgacccgggccatcttctacatagtgatgcaatgcctaggggccatctgcggagctggagttgtgaagggcttccagcagggtctgtacatgggcaatggcggtggtgccaatgtagttgccagtggctacaccaagggtgacggtcttggtgctgagattgttggcaccttcatcctggtctacaccgtcttctcagccactgatgccaagaggaatgccagggactcacatgttcctatccttgccccactgccaattggttttgcggtgttcctggtccacctggccaccatccccatcaccggtactggcatcaacccagccaggagccttggcgctgccatcatctacaacaaggaccatgcctggaatgaccattggatcttctgggttggtcccttcgttggcgctgccctggctgccatctaccaccaggtgatcatcagggcgatcccattcaagagcaggtcttaagccccgcgccgccgctgcgcagccgacgacatgcaacgcaatcgtgatgtcctgtttcccgcgcgctactgctgcgcatctgtcgattccctctatctctagtccccaagatgtttttcctatctgaaccctgaacaactcaatcgtgtaatccagtactcagtcactgtatgtttttatgtgatggagatcttaattcttaagttatc

SEQ ID NO: 4436 - DNA, 1138 bp, Oryza sativa
  ref <308>: DATABASE ACCESSION NUMBER: AK104780
  ref <309>: DATABASE ENTRY DATE: 2002-08-28
aacaagaatcccaccgccaccggtcgccatggctgcggtcgccaacaccgtcacaaccctccccctccttccctcccctcatgccttcgccgtgcccgcaatgggctcgctgcccttcctccggcgccgaatgcgctcccgtcgcctcgccgctgtccagcaggatgcggccgtctggacccccgcccccgtctcctccttcggcccagccaccgccgacggctcgctcgtccacttctccgtggacctctccgacgctaccgacctcgccgcatcctacaccacgccggggcagtatctcctaatccgcgtccccggcgaggatgagctcaaaccggcgttcatggccatcgcctcgccgcctgggggtgccgcgttcgagttcttggtcaagaccgtacctggtaccacggcggagaagctgtgtgggctccgcgacggggacgtgctggagcttggcgcgataatgggtaatgggttccccatcagcaggataaatccgcccgatgaggcgcaaactgtgctcctctttgctacagggaccgggatcagtccggttcggtcacttattgagtttggttttgctgcggatcaaagagctgatgtacgactttattacggtgccagaaatctccaaacaatggcatatcaggataggtttacaaactgggagtcaactgggcttaaaataataccggtattgtcacgagcagatgatagttggaaaggagaacggggatatgttcaggatgctttcttgaaagcccagaacatagcaaatcatttttctactggggcagtgctctgtggacaaaaacaaatgtctgaggagatcacatcagcccttgtagcagatggtgtatcaccagataaaatcttgaccaactattagcaaggattggcgagcctcctgtaaagctcagtgcttcctttggcctcaagatgttcttttttctgttgtattttagctgttctcgtcctatagttttttatatttctcagcacatagatatgtatacattataatcattcttcagagtatggccaccttttcaggccatgtaagcattgagctccaggcttatttgcagttatgcggtcccttgcggaacttgcaaatagcagagtaacatttggc

SEQ ID NO: 4437 - DNA, 1061 bp, Oryza sativa
  ref <308>: DATABASE ACCESSION NUMBER: AK061770
  ref <309>: DATABASE ENTRY DATE: 2001-12-06
cgctcggctcggttccaatttccaaacgtgtcgcccattctacaccgtctccatccatctcatctcgtcgtcttcccccccgcgagtccgcgaccccccgcgctataaaatccaaggccgcgatcgagatgcggaaatatcgagtcgccggattggtagccgccctgctcgtgctgcattcgctagccacgccgtccgctcaggccgaggcgcatcgcgcagggggagaaggggaggagaagatgtcgagcgacggagggccggtgcttggcggcgtcgagccggtggggaacgagaacgacctccacctcgtcgacctcgcccgcttcgccgtcaccgagcacaacaagaaggccaattctctgctggagttcgagaagcttgtgagtgtgaagcagcaagttgtcgctggcactttgtactatttcacaattgaggtgaaggaaggggatgccaagaagctctatgaagctaaggtctgggagaaaccatggatggacttcaaggagctccaggagttcaagcctgtcgatgccagtgcaaatgcctaaggcccatctcgtatcctatgtgtatcaagttatcaagaagatggggaataatatggtgtggatatagctattggacatgttaattatccacatgataatatggcttggatataaggatctcacacgataatatggcttggatatatagctattaaagattttacctatggcatatttcaatgtgtattagtactaagtaagaatgattgcaaggtgtattaactacaaatattgcaataaaagtccctgttactacaacttacaagtattttaagttagtcctctgactggatagaactctgtaatcattgttcacgttgccttgttttgaactggatagttttgaaatttgataacagaacgttatcatttgttcatgctacctcgttttaaattggctattattattttacctaaacgtgctgcaacattcaatggagtattcagaagttgtactttaaaggataagagattttgcaatattcaatggagtattcaactttgcttgat

SEQ ID NO: 4438 - DNA, 1331 bp, Oryza sativa; identical to SEQ ID NO: 3226
  ref <308>: DATABASE ACCESSION NUMBER: AK104781
  ref <309>: DATABASE ENTRY DATE: 2002-08-28

SEQ ID NO: 4439 - DNA, 1135 bp, Oryza sativa; identical to SEQ ID NO: 1729
  ref <308>: DATABASE ACCESSION NUMBER: AK104782
  ref <309>: DATABASE ENTRY DATE: 2002-08-28

SEQ ID NO: 4440 - DNA, 1325 bp, Oryza sativa
  ref <308>: DATABASE ACCESSION NUMBER: AK061771
  ref <309>: DATABASE ENTRY DATE: 2001-12-06
gagctgttcgtcggtgtcggtgcctccagggtcagggacctgttcgagaaggccaaggccaaggccccttgcatcgtcttcattgatgaaattgatgccgtcgggaggcagcgtggtgctgggctcggagggggaaatgatgagagggagcagaccattaaccagctcttgactgagatggatggatttgccggcaatagcggtgtcattgtgctcgccgcgacaaacaggcctgatgtgctcgacgcggctcttcttcgccctgggaggttcgatcggcaggtcaccgtagacaggccggatgtcgccgggcgtgtcaagattcttgaggttcactcgagaggaaaggctggcaaaagatgtcgactttgagaaaattgcccggagaacccctggtttcactggagctgatcttcaaaacttgatgaatgaggctgctattcttgctgctcgtcgtgatctgaaggagattagcaaggatgagatctctgatgctttggagaggatcattgctgggcctgagaagaaaaatgctgttgtttcagaagagaagaggagacttgtggcttaccatgaggctggtcatgcccttgttggtgccctcatgcctgaatatgaccctgttgctaagatttccatcattcctcgtggtcaagctggtggactcacattctttgctccaagcgaggagaggcttgagtctggattgtacagcaggagctacctagagaaccaaatggccgtagctcttggtggaagggttgccgaagaggtgatctttggccaagaaaatgtgacaactggggcctccaacgattttatgcaggtttcacgtgttgcaagacaaatggttgaaagatttggattcagcaagaagatcgggcaagttgcgattggtggacctggtggaaatcctttcttgggccagcagatgtcgagccagaaggactactcgatggccaccgcggatgttgtggatgctgaggtgagggagctcgtggagaaggcctactcaagagcaacgcagatcatcacgacacacatcgacatcctccacaagcttgctcagcttctgatggagaaggagacggtggacggggaagagttcatgagcctgttcatcgacggtcaggcagagttgtttgtcgcttaattgcgttgtatgttcatccccttgggtgaaatggagaaggcgaatttgtaggaagcacatcaatttaggcgagatgtttttgcatatacttgtatagttcattgtaaagaatggcaaatactgacattgatcaagtaaacagttggtgcttacgattatagcaccgctaact

SEQ ID NO: 4441 - DNA, 1113 bp, Oryza sativa
  ref <308>: DATABASE ACCESSION NUMBER: AK061772
  ref <309>: DATABASE ENTRY DATE: 2001-12-06
aaatcaaaagctctcgctgctcctcgagagggagttggtggagagagaaagagagagagagagagatggcgtcgccgtcgtcgtcgtcgtcgctgtgctcgaccttcgcctcgccgcgcgccgcctccctcggccgccgcctcgccttctcctcgcccaggaaagcattccgagtgagggcatcatccagggttgacaagttctcgaagaatgacatcatcgtgtccccttccattctttctgcaaacttttccaagcttggcgagcaggtaaaagctgtggaggtggcaggatgtgactggattcatgttgatgtcatggatggacgttttgtgccaaatatcacaatcggacctttggttgttgatgctctgcggccagtcactgatcttccgttggatgtgcatctgatgattgtggaacctgagcaacgagttccagattttatcaaggcaggtgctgatattgttagcgttcactgtgagcaatcgtcaaccatccatctacaccgaacagtcaatcagatcaaaagtcttggagcaaaggctggagttgttttgaatcctgcaacccctctcactgcgatagattatgtacttgatgttgttgatctagtattgattatgtcggtgaatcctgggtttggtgggcagagctttattgaaagccaagtgaagaagattgcagagttgagaagattatgtgcagagaagggagtaaacccttggattgaggttgatggtggagttggtcccaaaaacgcctacaaggtcattgaagctggggccaacgccattgttgctggttcagccgttttcggggctccagactatgcagaagctatcaagggaatcaagaccagccaaaaacctgtggctgtaccagcatgaggatcctaaagtagtatgctgtgtacgttgtttttgtttaccagtaccgcggtttgtacagatatgtgccaagctgtacgttatattggagaaattgaaggaagaagaaaacgtggagggcgaccgtttttctcactgtccgcgaagatatactacatattctcagtgtcatgtgatactaccgtgctcacgaaattgttcataataaatatcgttctttagc

SEQ ID NO: 4442 - DNA, 1368 bp, Oryza sativa
  ref <308>: DATABASE ACCESSION NUMBER: AK061773
  ref <309>: DATABASE ENTRY DATE: 2001-12-06
gatgcaacactgacgtggccatcaatttgatcccgtcacgtctccgccctcttctcctcgcttcttctcgccgccgcgcccgcgcgctgctgctcttcgcttcttctcggcttccctccgatctgagagagcaagcatagcaggagatcgggagacctgtgttgcgcgccatggcggcgatggtggtgggagcgttgaggaggggaacggccaccgccggggggagctcgcggtccttcgcccgatcgctccctagacctgtgagcacgctggtcgtagcggagcacgaaggtgggttcgtgaagccctcatctctgagcgcattggcggccgcagaagcaatcggcaaggatgataatagggtttctcttctgttgggcggatccgggccggggcttcacaaggctgccgagcatgctgcgtccagccatccattggtatccgaggttcttgttgctgattcagatgtctttgcgcatccattggctgagccttgggccgagctacttcgttctgttcagcacaaaggtggatactcacatgttatagcgtcatcaacctcgttcgggaagaatttgcttccacgtgctgctgcccttcttgatgtgtcccctgttacggatgtcacttcaatatctgagccacgagtctttgtgaggcccatttatgctggaaatgcgctttgtactgtgcgatatactggagaggatccatgtatgatgagcattaggtcaacatcattttccccaactgaggctatgtcagaagcaaaagttgcacctatcacccaggttgatctctctttcctcagtgaaggaagctctgggaaatctgcatgggtgaatctgaaatcccaagatacagaacggcccgatcttgcaaatgcacccgtagtagtaactggaggcagaggtttaaaaagtgctgagaatttcaaagtattggagcagcttgctgagaaacttggagcagcagtgggtgcgaccagagctgccgtagatgcaggatttgttcccaatgaacttcaggttggtcagactgggaaaatagttgcgcctgagctctatatggcatttggagtatccggagcaatacaacacttggcaggaatgagagattccaaggttatcgtggctgtcaacaaagatgcagatgctcccatatttcaggttgcggactatggcattgttgctgatctattcgaagttcttgacgaactgttaaagaagctacctgacaagaaatgagcgtgctaacatgatgatccgtgtccatgtcatatttgttctagtgttcttaataatatgaagcgcccttgtaatgtgattctgcaaaaataagtgtcatttcatatgatcacacaagcac

SEQ ID NO: 4443 - DNA, 1315 bp, Oryza sativa
  ref <308>: DATABASE ACCESSION NUMBER: AK061774
  ref <309>: DATABASE ENTRY DATE: 2001-12-06
tcctctccttcctttgtcgcgagtcacaggcacacagacatggccgccgtgaacacagtgtcgtcgctgccctgtagcaaagctggcgccgccgtagccgggggagctccgaggccgtcgacctgctccgtattctaccctcctcgttgctggtccaagcgaagcagcggtaatggcgtgcgggcgcaggcgtcgacgacggagacgaccgcagcgccggctgcggaggtgactactaaggtggagaaggtgtcgaagaagcaggtggatggcgtggtgacgaacaagtacaggcccaaggagccgtacacggggcggtgcctcctgaacacgaggatcaccggcgacgacgcccccggtgagacgtggcacatggtgttcagcaccgacggcgagatcccctaccgcgaggggcagtccatcggcgtcatccccgacggcatcgacaagaacggcaagccccacaagctccgcctctactccatcgccagcagcgccatcggggacttcgccgactccaagacggtatcgctgtgcgtgaagaggctggtgtacaccaacgatcagggagagatcgtcaaaggagtctgctccaacttcctctgtgacctgaagcctggttcggacgtgaagatcacggagccagtggggaaggagatgctgatgcccaaggaccccaacgccaccatcatcatgctgggcaccggcaccggcatcgcgcccttcaggtccttcctgtggaagatgttcttcgaggagcacgacgactacaagttcaacggcctggcgtggctcttcctcggggtgcccaccagcagcacgctgctgtacagggaggagttcgagcggatgaaggagatcgcgccggagaggttccggctggacttcgcggtgagccgggagcagacgaacgcggcgggggagaagatgtacatccagacgcggatggcggagtacaaggacgagctgtgggagctgctcaagaaggacaacacctacgtctacatgtgcggcctcaagggcatggagaaaggcatcgacgacatcatgatcgacctcgctgcaaaagacggcatcgactggcttgactacaagaagcagctgaagaagtcggagcaatggaatgtggaagtctactgatggatatatatatgttaataattaattaatccctttttatctcgattttcatgcatgcatgcgcaacctgcatacgccatcttgttgtactcgatctgatctcatctgatgagatgcatgtagatattatactgacgattcgtcgactataaagtggtttcccattttctgctgt

SEQ ID NO: 4444 - DNA, 1071 bp, Oryza sativa; identical to SEQ ID NO: 3229
  ref <308>: DATABASE ACCESSION NUMBER: AK104783
  ref <309>: DATABASE ENTRY DATE: 2002-08-28

SEQ ID NO: 4445 - DNA, 831 bp, Oryza sativa
  ref <308>: DATABASE ACCESSION NUMBER: AK061775
  ref <309>: DATABASE ENTRY DATE: 2001-12-06
gaatccaccacacggtaccctcctctctcctcctccgaccaccatggccatggccacgcaagcctccgccgccaagtgccacctcctcgccgcctgggcaccggcgaagccgcgctcatccaccctctccatgcccacctcgagggcacccacctccctcagagcggcggcggaggatcagcccgccgcggcggcgacggaggagaagaagccagcccccgcggggttcgtgccgccgcagctggaccccaacacgccgtccccgatcttcggcgggagcacggggggactcctccggaaggcgcaggtggaggagttctacgtcatcacatggacgtcgcccaaggagcaggtgttcgagatgcccacgggcggcgccgccatcatgcgcgagggccccaacctgctgaagctggccaggaaggagcagtgcctggccctgggcaccaggctccgctccaagtacaagatcaactaccagttctaccgcgtcttccccaatggcgaggtgcagtacctccaccccaaggacggcgtctacccggagaaggtcaacgccggcaggcagggcgtcggccagaacttccgcagcatcggcaagaacgtcagccccatcgaggtcaagttcaccggcaagaacgtcttcgacatctagacttcttcttcttcttcttcttctctcataatcgacctattaattacttgtgttttgggtggatggacatgtaattttaatcatctgtcaggctgctcttcagttattgatgatggtgtaatcgatcgatggtgggatataatctcttcttataatattgtagtatatgtttggtg

SEQ ID NO: 4446 - DNA, 1865 bp, Oryza sativa; identical to SEQ ID NO: 3231
  ref <308>: DATABASE ACCESSION NUMBER: AK104784
  ref <309>: DATABASE ENTRY DATE: 2002-08-28

SEQ ID NO: 4447 - DNA, 1079 bp, Oryza sativa
  ref <308>: DATABASE ACCESSION NUMBER: AK061776
  ref <309>: DATABASE ENTRY DATE: 2001-12-06
aaatctcggcggcggcgcggcgcggagcagaggaggacgaagcagcaggcggcggcggcagagcacggcgacctagcccgacctcgcaaccatggcaaggggtttgaagaagcatctgaagaggctcaatgcgcccaagcattggatgctcgacaagcttggtggagcttttgcccccaagccatcttctggtcctcacaagtccagggagtgcctgcctctgatcctcattatcaggaacaggctcaagtatgctctgacataccgtgaggttatttctatcctcatgcagcgccatgtcttggttgatggcaaggtcaggactgacaagacctacccagctggtttcatggatgtcatttccatccccaagactggtgagaactacaggcttctgtacgacaccaagggacgtttccgccttcagtctgtcaaggatgaggatgctaagttcaagctttgcaaggttcggtctgtgcagtttggccagaagggaatcccctacctgaacacctatgatggtcgcaccatccgctaccctgacccgatcatcaaggcaaacgacacaatcaagatcgatctggagaccaacaagattgtcgacttcatcaagtttgatgttggcaatgttgtcatggtgactggaggaaggaacacaggccgtgttggtgtgatcaagaacagggagaagcataaaggcagcttcgagaccatccacgttgaggatgccctgggccaccaattcgccacccgtctgggcaatttgttcaccattggcaagggcaacaagccttgggtgagcctgcccaagggcaagggcatcaagctcagcatcatcgaggagcaaaggaagcgggatgctgccgcccaggctgctgccaacgcttaaaatctgctgctgcgtctgcctggagttttgctatagcgagttgtttgcaaggatatagaactatctgccccagactatccttttttgagctcttttgcctaatgttatgttgatcaattcgcgaactcatgtttgctgctagctgtaatgcgactgtttaccttatttaaggcgccttttaagaacctcc

SEQ ID NO: 4448 - DNA, 1614 bp, Oryza sativa
  ref <308>: DATABASE ACCESSION NUMBER: AK104785
  ref <309>: DATABASE ENTRY DATE: 2002-08-28
ctctgcgcctccctcctccgcggcctccgccatggcctccctcgcctccgcctccgcatccacctccctggtcttctccacctcctcctccaagccgcgcctcggctcctccgtcggattctcctcgcccgcgcggttccggcgcacggcggcggcggcggcgtccaggggcacggggcggcgcgcggggctgctggtagtgcgcgcggcgagggggaagttcgagcggaccaagccgcacgtcaacatcggcaccatcggccacgtcgaccacgggaagactacgctgacggcggcgctcaccatggtgctcgcctccgtgggcgggagcgcccccaagaagtacgacgagatcgacgcggcgcccgaggagcgcgcccgcggcatcaccatcaacaccgccaccgtcgagtacgagaccgagacccgccactacgctcacgtcgactgccccggccacgccggctacgtcaagaacatgattaccggcgccgcgcagatggacggcgccatcctcgtcgtctccggcgccgacgggcccatgccgcagaccaaggagcacatcctgctcgccaagcaggtcggtgtccccaagattgttgtcttcctcaacaagaaggaccaggtcgacgacgaggagctgctccagctcgtcgagctcgaggtccgcgaattgctctcctcctacgagtacgatggcgacgaagtgcccatcgtcgctggctccgcgctcaaggcgctcgagaacctcatggccaaccctgccattaagcgcggcgatgatgagtggatggacgggatcttctcgttgattgattccgtggataactacatccctgtcccacagcgccagaccgacctcccgttcttgcttgctgttgaggatgtgttctccatcaccggtcgtggtaccgttgccactggccgtattgagcgtggcaccgtcaaggttggggacacggtcgatatcgtcggtatccgggagactcgcaactgcacggtgactggtgttgagatgttccagaagaccatggatgatgcgatggctggggacaatgtcggcctgcttctccgaggtatgcagaaggatgatatcgagagaggcatggtgcttgcgaagcctgcttccatcacgccacacaccaagtttgatgcggttgtgtatgtcctgaagaaggacgagggtggacggcactcaccgtttttccctggttaccgccctcagttctacatgcggactaccgatgtgacggggaatgtcacaaagattatgaacgacaaggacgaggaggcgaagatgtgcatgcctggtgaccgtgtcaagatggttgtggagctcatccagcccgtcgcttgtgagcagggaatgaggtttgccatccgtgagggtggaaagaccgtcggtgccggcgtcatcaatacgatcttgaagtaaactggatggagcatatccaccgtgagaattttccttgtttactctttgcgaaatgctctgtagttgttattacgcgttgagttttaggggttgctcatgtgaaattgtagtatggcacttttctcttcaagtgaatttgcatactttgtgatattcacgacaaagatacatctgtttgc

SEQ ID NO: 4449 - DNA, 1603 bp, Oryza sativa
  ref <308>: DATABASE ACCESSION NUMBER: AK061777
  ref <309>: DATABASE ENTRY DATE: 2001-12-06
ctcccggccgtagaccatttcgttccgacgcgagtaattcctccccacgggcggcgactagggcggctagggttcgtcgggcgccgccgtgccggagatcgcctctcgccgccgacacccggatctccgccgccgccggtcgccccaggttatcccgctcccgcagtcaccatcccgtcttctccgccagtcgcctcacgcccggcctggacgccccggaatccattgtcggtctcgccccgccgactgccgttgacgccactggctgaaggtgtgaatatgtcggacagtgcgttgaaagatctgaatctagctcagtcagcagagctggagaaaaccaaggacagttctgccaagtcttgcatcaccaagcctgtcttgaatggcaacaaatgcaacaatacggaagaaaatgctccacctgtactccctgatgctgtgactaatgggtgtgaagctggaaatgcagatgttgagtatattgattctgagagtctgacagatcttgaagatgctggtgcaacccttagtactttagttgcaaggttggattcaaaagactgggttatgacatgtgaagctctaaataatgttcgtcagttggcaatatttcacaaggatagattgcaggaacttctagagcctctagttcctcttattgtgaaatctgtcaagaatccaaggagtgctgtctgtaaaaccgcactcatgacctgcgctgatattttcaaggcatacggtgacctaatggttgactcaattgatccactgttagtgcagctatttctgaaatcttcacaagataagcgttttgtctgtgaagctgctgaggcagccctcatatcgatgacaagctggatcgccccttctgctctgttgccaaaaatgcaaccttaccttaagaacaggaatccacgaattcgagcaaaagcatcaatgtgcttcagcaagagcgtcccaagcttgggtgtggagggaattaaagaatatggaatggataagcttgttcagatcgcagcaactcagcttagtgaccagcttcctgaatccagggaggctgctcgcaagctggctttggagctacaagcattctatgagaaatcccaagcttcgagttctggtgaagttgacgacgcacctgctacctcacctgatgctgatgctgatgctggtgctgaatcatgggaagctttctgccaatcaaagctttccccattaagtgcacaggcaatccttcgtgtcacctctacgacgaaagagggtgtggctgtgggtgtcacctctacccctccgaaagaaggcgtcactgttggttgctagcatcaggaggtagtagatgcaatgaggttgtggtttttccatccgattcaccttttgctgtacatggttatggttgttctttctctacatccaatctgggattcgttcgttaagcatcggttcgagagttgaggtgtgacctgtgggtgttaatattggtgcgagatatacctgttatagttgaccgtatgatcttccttttctcccactgcttggtattgattggtcaggcgaattgtagaatttcttccactattcaatattactacacagtaatttttcc

SEQ ID NO: 4450 - DNA, 1021 bp, Oryza sativa; identical to SEQ ID NO: 1743
  ref <308>: DATABASE ACCESSION NUMBER: AK061778
  ref <309>: DATABASE ENTRY DATE: 2001-12-06

SEQ ID NO: 4451 - DNA, 1198 bp, Oryza sativa
  ref <308>: DATABASE ACCESSION NUMBER: AK061779
  ref <309>: DATABASE ENTRY DATE: 2001-12-06
aaagagggggccatctcgagtggctcgccggcggcggcggaggcggggagagatgctgccctacgcgacggcggcggaggcggaggcggcgctggggagggcgatgacggcggcggagtcgctgtggttcaggtactcggcggggatcccggactacgtcctcttctggcacaacatcctcttcctcttcgtcgtcttcacgctcgcgccgctccccgtcgcgctcctcgagctccgcgcgccggccgccgtggggccgttcaagctgcagcccaaggtgcggctctcccgggaggagttcttccgctgctacagggacgtcatgcgcctcttcttcctcgtcatcggcccgctccagctcgtgtcctaccctaccgtcaagatggtgggaatccacacagggctgccactgccgtcgctgggggagatggcggcgcagctgctggtgtacttcctggttgaggactacctcaactactggatccatcggttgctacatggggagtggggctatgagaagatccaccgtgtccaccatgagttcacggcacccattggattcgccgcgccatatgcacactgggctgaggtgctcatcctcggcatcccctcctttgtcgggccagcgcttgcacctggtcacatgatcaccttctggctctggattgtactccgccagatggaggccatagagacacacagcggctttgatttcccgttcaacctgacaaagtatattccattctatggaggcacagaataccatgattatcatcactatgttggacgccagagtcagagcaatttcgcttctgttttcacgtattgtgattatctatatggaaccgacaaaggttacagataccataaggcgtaccaagcaaagatgaaggctctggggcaaacggaaggcgagaaagcagatagcaatggattgagctacgcgaagttggattaaactgtcctatatatagccaaaatctggaatgcctccctggtcattttgttcgttacggcttgtgtagtgttttgattttgtttcgatttctgtagtagtgtcgtgctgctgtgccttttgtttttgtggctgtgacttgtgagcatccatggaacttgttacgctgaccaataacattgtgactcgggtagtctttatgtggtttgcgctcaacttgaaagagtcagaaccaattgctgt

SEQ ID NO: 4452 - DNA, 1249 bp, Oryza sativa
  ref <308>: DATABASE ACCESSION NUMBER: AK104786
  ref <309>: DATABASE ENTRY DATE: 2002-08-28
cttcgtggtgataaggagtaggagagaaggccatggcgtcgaaggaggaggtggccgtggagacggtggagggcggagcggcggcggcgaaggcgccgtactgggacccgccgccggcgccgctgctggacacgagcgagctgggtaagtggtcgctgtaccgtgccctcatcgcggagttcatggcgacgctcatcttcctctacgtgagcatcgccaccgtgatcgggtacaagaaccagagggccaccgtcgacgcgtgcaccggcgtcggctacctcggcgtggcgtggtcgttcggtgccaccatattcgtcctcgtctactgcaccggcggcgtctccggcgggcacatcaacccggcggtgacgctgggcctcttcttcgggcggaagctgtcgctcgtccgcaccgtgctgtacgtcgtggcgcagtgcctcggcgccatcgccggcgccggcatcgtcaaggggatcatgaagcgcccctacgacgcgctcggcggcggcgccaacaccgtcagcgacggctactccgccgccggcgccctcggcgccgagatcgtcggcacgttcatcctcgtctacaccgtcttctccgccaccgaccccaagcgcaccgcccgcgactccttcatccccgtactcgtgccgctgccgatcgggttcgcggtgttcgtcgtgcacctggcgacgattccgatcaccggcacgggcatcaacccggcgaggagcctcggcgccgccgtgctgtacaaccagcacgcagcttggaaagaccactggatcttctgggtggggccggtgatcggggcgttcttggcggcggcgtaccacaagctggtgctgcgcggcgaggccgccaaggcgctcagctcgttcaggagcaccagcgtgacggcgtgaggaagacgacgatgttcatttgatacgagagatcgatcagctgcttgattaattgttcttgatttcgttgttcaatttacaatctacgactatggacgatcatgcatatgatatgatcgatgcatgcgtctgttgtcagttttatttgggactttcagtgtgagagtgtgaatggttgtaaaataagtggagtgcctgtatgtatctgtatgcatgcacggcacggtacgcgtgtttatggatgatgctttgttacgtagcaggcttaattatgtcaatatgtgtgcgtatgttgtcgtggtaattattatactgggtatatatatatattgtgcagcttaatt

SEQ ID NO: 4453 - DNA, 1323 bp, Oryza sativa
  ref <308>: DATABASE ACCESSION NUMBER: AK061780
  ref <309>: DATABASE ENTRY DATE: 2001-12-06
ttagttgctagctacaaggaattgaagcaacaagttgtagcagattgagagagagttgggaagaattacacaagaaatttagagaaatagtactagctagctagcaagaatatagatatataatgtcgatcaagcactgcgagcaacacaaggattgcgagcggcagcgcctgtaccggcgttgctgcgcggccatcttcggcatccttctcctcctcctcctcatcgtcctcatcgtctggctcatcctccgccccaccaagcctcgcttctacctcaacgacctcaccgtcgtctgcctcaacgtcaccaccggtggttcctacgccggcgccaccgcctcctccggctacttctccttcctcaccgtcaccatgcagaccaccctcgccgcccgcaacggcaacgagcgcgtgggcatctactacgaccgcgccgacgtgtacgccgagtacaagggcctccgcatcaccgtgccgacgtcgctgccgccggtgtaccagggccacccggacctcaccgtctggtcccctttcctctccggcaacaacgtccagctcccgccctacctcgccgtctccatcacccaggacgagaccgccggctacctgctcgtcaccatccgcgtcgacggctggatccgctacaaggccggcgccttcatcaccggacactaccacctccgcgtcaggtgccccgccctgctcatcgtcaacgacggccggggaagctacggctccaactccggcggcggcaacggctacttcaggttccagcgagccgccgcctgcgtcgtcgacgtctgatccatccatccatctcctcatcctcctctcatgcatccaacaaatcatatcatccttaattaattctcctccttccatatataattgcttgcttaattgatcgatctacattctacaagcacagccctgatgaagaagctatataattaaaagctcagctcaactgatcgagtgaggatcggagtaatcttgcatatatgcctgccaccagtggttttatgtatttacagtacgaattaatttgacctttttcttacttaattttcatgcctgtgttttttttggtactacgtacagtgccatgcttgtggctagctgcatggttcaggtgtacagctacttgtagtaataattcgcatatagagaggggataattaagcaattgctacaatcttgtaattactactagaatatataataattgtacttatcttcacatgcatactacatagttgcaacattgtaatcaattaatgttctgttcatttttcaacaaagagtgttcgtcttcaccttc

SEQ ID NO: 4454 - DNA, 1226 bp, Oryza sativa
  ref <308>: DATABASE ACCESSION NUMBER: AK104787
  ref <309>: DATABASE ENTRY DATE: 2002-08-28
atcgcagcaatccaaaatccccaacccaacccaacccaacccaaccgcactatcacgccactcttcgcccgcccgcccgccgccggaatcgccatcgcccgaccgccgccgcgttcgtgtccccacaggcggcttctctccctgcatcaccatgggttctgacttcaaggcaatccccttgatcgacattagtccccttgtcggaaagattgatgatccgagcatggtcaatgacgaggatttgctgcaagttgtgcaaatgttggacgatgcctgcagggaggctggattcttttatgtgaaaggccatgggattgctgactcgctaatgaagcaagttagggatgtgacacagaagttctttcagcttccttatgaggaaaaactcaagattaaaatgacacctcagagtggatacagagggtaccaaagagttggtgaaaatattaccaagggtaaacctgacatgcatgaagcaattgattgctacacgcctattgaacctggtaaatatggagaccttgctaaaccaatggtaggatctaatttgtggcccaaatatccatcaaattttgatgtactgctggaaaactatatcagccttctaagagatctttcaagaaagatcatgcgaggtatagccttggcgttgggtgcgccagttgatgcttttgaaggtacaaccgcaggagatcctttttgggtttgcaggctgatcggttatcctgtatcaactgatattccagaagagcagcgcactgatactgggtgtggagctcacacagactatggtcttctgacattggttaatcaggatgatgacatatgcgcccttgaggtcagaaaccaatcaggtgaatggatatatgccaaaccaatcccaggaaccttcgtctgcaacatcggtgacatgctgaaggtttggtcaaacggaatatatcagccaacacttcatcgagttgttaacaactcccctcgctaccgtgtatctgttgcattcttctatgagtcaaacttcgatgctgccgtagagcctgttgagttctgccgggagagaacaggtggtgttgccaagtatgaaaaggttgtgtacggagaacacttggttcagaaagtcttgacaaacttcgtcatgtaaaatttgtggaaaagaacatgcattgtactccaatgtctgatcgcaacattcgtcactaaaataaaatcatttgtaaatttgtcatagc

SEQ ID NO: 4455 - DNA, 1249 bp, Oryza sativa
  ref <308>: DATABASE ACCESSION NUMBER: AK061781
  ref <309>: DATABASE ENTRY DATE: 2001-12-06
ctttttttcgctgtctagggtttgcggcggcggcgcccgctcacctcctcgccggccggacggcgcgaggaggaatctctccacccccacactcctcgcgccggtgcccctccctccccctccatcctcctcgcgtttcgcttcccctcttcgcactactccgactcccagccggaagcgccggtgtcgatggcggacgatgccggtgccggtcgcactcgcagtcgcagggatccttccgatcgccctacgcgttcaggccaatttctaatcagggctttgctacgaggcgaattggaggagcgcactgcagacgcaaggtttatcccacttacaccaataatggaggatctatttgtcagcggcattgaagagattcccgaagacacttctgtgcatcaccagcaaactgatgagccaccaccatcctacaacaccattaggaggggtgaaggcacattaatggctgaactgcgtgaggctacggagcaactacgtttgtctttctatgccaacacagatgaagaaactcgggcacaaatgaaacagttttgggatgaagaattcaatgcaatatctgaagaagcaactattgagagaggtttagagtggatgcgggcggaggttgttgaggcattcagtacacacagtggggctaatgtggttgaatatgagcttgaagatatttctcaccagtgtttgatttttgatgattgtgccaagtcttatcatcattacaatttcataatgaagtcgaagtgtcctgattctcatttggagggttcttgtctcttttttgctgaagttaaagttgtggatggagagaaacactatttttgctgtcccctacaacctgatgacgacggtcattgtcacggatgccaaaactctggaattgatcttaagcatccttcagacggtggctacgaggagggcaacgctgactctggattcccttttgatccaatttaatttgatggatgaaaattcagaaatatgtactaaattgagcagcgcctgaattgagttgtgtaatgaatgctcctacataaaccttgtgttcatgttcaaactggctattggtattgtgttttattcggtagcattagcaatctattagcaatatgttgcatgttcgtgtctggagtacgtgcgaaatgctcatgggcatgactattatttcttacgtgtgaaatgcttgtattgtaaggtcgccaggtttgtgattgagatgtccatccttgcaccc

SEQ ID NO: 4456 - DNA, 1214 bp, Oryza sativa
  ref <308>: DATABASE ACCESSION NUMBER: AK061782
  ref <309>: DATABASE ENTRY DATE: 2001-12-06
aaccgcagcaagctgcacagagctagcgttagcttggttagttgttcttagcattctagctagctcaatggcgaaagacattgaggcgtcggcgccggagggcggcgagttctcggcgaaggactacaccgacccgccgccggcgccgctgatcgacgtggaggagctgaccaagtggtcgctgtaccgcgcggtgatcgcggagttcatcgcgacgctcctcttcctgtacatcacggtggccaccgtgatcgggtacaagcaccagtcggacgccaccgtcaacaccaccgacgccgcctgcagcggcgtcggcatcctcggcatcgcctgggccttcggcggcatgatcttcatcctcgtctactgcaccgccggcatctcaggtgggcacatcaacccggcggtgacgttcgggctgttcctggcgaggaaggtgtcgctgatcagggcggtgctgtacatcatcgcgcagtgcctgggcgccatctgcggcgtggggctcgtcaaggggttccagagctcgtactacgcgcggtacggcggcggagccaacgagctcagcgacggctactccaagggcaccggcctcggcgcggagatcatcggcaccttcgtgctcgtctacaccgtcttctccgccaccgaccccaagcgcaacgcccgcgactcccacatcccggtgttggctcctctcccaattggattcgcggtgttcatggtccatctggccaccatccccatcaccggcaccggcattaacccggcgaggagcttgggaaccgcggttatctacaacaaggacaaggcctgggatgaccaatggatcttctgggtgggccccctgatcggcgccgccatcgccgccgcctaccaccagtacgtgctgagggccagcgccgccaagctcgggtcctaccggagcaacgcctgagatcggcggcggcggcgcgcgcgaggtggcgctgaagtgtagatacgcgtacaagatggccgcctctgtccagcactagatcaacgaattcagccttcgcatcctgcatttcgcctcgtggatagattctactgcactattatgtactatgtatccatgcatatggtctccattcctttgaactatgtccgccatatgttgcttcccgctggtgcttccaagtttggttaattttccttcacattctgcatgtatgtaatattcatatggagaatttgtg

SEQ ID NO: 4457 - DNA, 1637 bp, Oryza sativa
  ref <308>: DATABASE ACCESSION NUMBER: AK104788
  ref <309>: DATABASE ENTRY DATE: 2002-08-28
gatcgattccatcactctctctctctcgcctgctcgcggttgcctgtgcgttcgtctcgcgatttctcctcctcctcctgggatcatggcgatgtggagggcggcggcggggcatcttctcggccgcgcgctcggctccagggccgcgcacacatcagcaggcagcaagaagatcgtgggtgtgttctacaagggcggcgagtacgccgacaagaatcccaacttcgtcggctgcgtggagggcgctctcggcatccgcgaatggcttgagtccaaggggcatcactacattgtcaccgacgacaaggaggggctaaacagcgagctggagaagcacattgaggatatgcatgtcttgatcaccacccctttccacccagcctatgttagcgcagaaaggatcaagaaggcaaagaacctcgagctgcttctcacagctgggattgggtcagatcatattgatctgccagcagctgctgcagcaggtttaactgtggcagaggttaccggaagtaacactgtgtcgatggcagaagatgagctcatgcgcattttgattttgctcaggaacttcttgcccgggtatcagcaggttgttcatggtgaatggaatgttgctggcattgcctatagggcttatgatcttgaaggaaaaactgtggggactgttggggctggtcgtattggcaggctcttacttcagcgtcttaagccctttaactgcaacctgctgtaccatgacagacttaaaattgacccagaacttgagaaagaaattggggccaaatatgaagaggatctcgatgctatgcttccaaagtgtgatgtcattgtgatcaatacacctcttacagagaaaacaagaggtatgtttaataaagaaagaattgcaaagatgaagaaaggtgtaatcattgtgaataatgctcgaggagcaatcatggatacccaggcggttgcagacgcttgctctagtggtcaagttgcaggatatggtggtgatgtctggttcccccaaccagcaccaaaggatcacccatggcgatacatgcctaatcatgccatgacccctcatatctctgggactacaattgatgcacagctgagatacgcagcaggagtgaaggacatgctggacaggtacttcaaaggggaagacttcccggtgcagaactacatcgtcaaggaaggtcagctcgcgagccagtaccagtaataacccttccttgtgtgttgggtgtccatcctgtggccaccttcccgcagtgaagggaaacagagattcggataggaaccaaaacaccttgtgttgttgttgttgcctgagtgttccctgagaaactattggacaccggaaataatggatgcctgccatggcaaccatggctccgaagaataaaaagccctcggattaaacagttcagttcagttcgtctatgtatgatcttttatgtgctttctgctctctgtttttgatgtgaattttctggtccagtactccagttgcacataacaattgtacttgtacctgagtacctccatgccaggggccgggggcaccctttgccttactgcctcggcagtcggctggagggctgcagtctgttatctatggaatctttggttagttgttgcct

SEQ ID NO: 4458 - DNA, 1242 bp, Oryza sativa
  ref <308>: DATABASE ACCESSION NUMBER: AK061783
  ref <309>: DATABASE ENTRY DATE: 2001-12-06
ctctctttcttggtgttggaaggcgaaggcaacccagggggggaagcaccggaggagccgcagatcccgccatgcgggtgctcccggcgtcgtggtcctccgccgcctcctcctccgcctccgcctccgcggaccgcctcaactcccccaccccggcgccgccgccgccggcccctcctcctcctgctccaaaaagcagcagcagcagcagcgcggagctgtacctcaacatctacgacatctccccaatcaaccactacctctactggttcggcctcggcatcttccactccggcatcgaagtgcatggcatggagtatgggtttggagcccatgaatacccaaccagcggagtcttccaagtagagcccaaaagctgtcctggctttatcttcagacgctccgtgtgcgtgggttccactgatatgtctcgttcggaagtccgcagtttcatagaggatcttgcagaggattatcacggggacacttatcatttgattgcaaagaattgtaatcattttacagcagacatctgcaagcgtctgactggaaagccaattcctggatgggtcaatcgacttgccagattaggttctttctgcaactgtgtactgcctgaaagcatcaaggtttccgctgtcaaagatgtaaccgatccccccgagtttcctgatgatgatatggagtctaatgcatccattgttgacggaagtgatgcggatgatttagaccatcttctaataaccccaagtagcgatgttgtatcttcaaaagataagatattaactcctggcagggatagcttgtaattgcatgtattctccattgatatagttcaagtattacttgtggggttgttttctgaggatcaatctgatgatttcttgctgagtggcgatgtggctggaggaggggtatgctgtgggcagtcaaccttgaatagttgaatgtataatccatgaatggtaattctgtgtgtcttacactagaggtagtgaatgtgattgtctaactgtggcgaagggccatgtttccattataagtatatgctgttttgagagaggggaggggaggggaggagtgcgttgacagtgtggtatgtatatgctgtaactagttggagaatgattgacttcatttgagttacctaggtgggcttcctgttttgttttgttgtgtgtaactgatttgtttgtacaaatgaatgatttgcagttgtggaagttgaatagatgttcggtc

SEQ ID NO: 4459 - DNA, 1120 bp, Oryza sativa
  ref <308>: DATABASE ACCESSION NUMBER: AK061784
  ref <309>: DATABASE ENTRY DATE: 2001-12-06
cagtctgcacccggttgcctccccgccgctctcctctccggtctactcctccgccgtcgccgtcggcaccgccgccggagctcctccctgctccctctactgggttggcggggagtggatcggggatctgcacgcaggggccgatttcttctcttcgtaaggagtagataacacagaatagttgaagatgagcagcataggcacaggatacgatctgtccgttaccaccttctctccggatggtcgcgtcttccaggttgagtatgccacgaaggctgtcgacaacagcgggactgttgttggaatcaaatgcaaagatggaatcgtcctgggtgtggagaagctagtaacttcgaagatgatgctggagggatctaataggaggatccattcagtgcactggcactctggcttggctgttgctggtttagctgcagatggcaggcaaattgtttcaagagcaaaatcggaagcggccagttatgagaaggtctatggtgaacccatttctgtaaaagaattggctgatcgtgtggctagctacgttcatctttgtacactctactggtggctcaggccttttggttgtggagttattcttggaggttatgatagggatgggccacagctcttatgatcgaaccctcaggagtctcatacaaatactttggtgctgctctgggtaaaggaagacaggctgcaaaaactgaaatagagaagttgaagctttccgagcttacctgccgggaaggcattgtggaggttgcaaagatcatttatggagtacatgatgaagctaaggacaaagcttttgagttggaattaagctggatatgtgatgaatcaaatcgccagcatcagaaggttcctgctgatcttttggagcaggccaaggttgcagctcaggcagcgcttgaggagatggatgctgattaagaggagacccgactatgttctacgtttggccactgatgaaatctttgatgtcattactggcacacagggacatggccattctgtcggattttaaaacttcgcatgtacttatggtactaaattcatggaaagtttgatgctggacagtgaatggatatctgacttttgactgaacttgtccctt

SEQ ID NO: 4460 - DNA, 1732 bp, Oryza sativa
  ref <308>: DATABASE ACCESSION NUMBER: AK061785
  ref <309>: DATABASE ENTRY DATE: 2001-12-06
gcgtaaatatgaattagagatggcacacaaacagcagagaaaaatcaaaggctatggcagttgtgccaataatgaattagaaaagttggccagccaactaacactggagacgcctgcatctgatcaagcgggatgttgtggaaatcatggtatatgttcacatgaggttcttcaggatgaaagtcctggtcctaacccccgatctagtcacaagctggtgagtagaaaggcatcatttagactttcatggggatgcaatggggataaaaacggccagcacaagcatgattttgtatcatttgaaaagggagatataacaacagcagagcgcagcaacaagcagattttgctgaaatgggaatcctcgccacaaactgttcttttcataaccaaacctaattctaactccgtgcatgttctttgtgctgaaatggtcagatggcttaaggaacataaaaagataaatgttgttgtagagccacgtgttagcaaggaactcttaacagaagattcctactacaatttcatccaaacatgggatgatgatgaggagaaaaagatgttgcacacaaaggttgatctcattgtaactcttggtggtgatgggactgttttatgggctgcgtctttgttcaaagggccagttcctccggttgttgctttctccctaggatcactgggattcatgacacctttcccaagtgagcaatatcgtgattgtctggacaatgtgctgaatggaccatttagcatcacattgagaaaccgtctacagtgccatgtaatccgtgatgcagcaaaggatgaacttgagactgaggagccaattttagtgttaaacgaagtcacaattgaccgtggaatatcatcttaccttacctacttggaatgctactgtgatagttctttcgttacatgtgtacaaggggatggactgatcatatcaacaacatctggaagcacggcatattcattggcagctggaggatccatggttcatccacaggtcccaggaatcctattcacgccgatctgcccgcattccctgtcattcaggcctttgatactgcctgaatatgtgaccctgcgcgtacaagtgccacataacagcaggggccaagcttgggcatcattcgatggcaaagatcggaagctgctgtcacccggggatgctctcatctgcagcatttctccatggcctgtgcccacggcttgcctggtggattcaacaaccgatttcctacgcagcatccacgagggtctccactggaacctgaggaagtcccagtcattcgacggcccgcgtgattgatcccagctcctggatacagtccagtgtcagagttgagagtttcagctggccatcagaagagtttcccacgagtccagctaacaccgagcggataaatgtacctagcagagtttgttgcttgttaccattccatatacatatacatatacatatacatatactagaaggctgctgcgtgtagatttggggtaagtactggggactgaagaatgaatcgaaatagaaagtatcgagaatacactgtgccatgatgaatgtataacagtagatgtggcaggcaacatatactgatgtgcactagcatctgaagtagcatgggagagtagataccggtgacaagtcatcgaagtgtaaaaacacaacatgtatactggtatatatatgtacccccatgatctgaatgaaataatttgaccatgg

SEQ ID NO: 4461 - DNA, 1346 bp, Oryza sativa
  ref <308>: DATABASE ACCESSION NUMBER: AK104789
  ref <309>: DATABASE ENTRY DATE: 2002-08-28
atcgtcatcatctcgtcccccctcttcccggcgcggcggttgctctccagccatggccgccgccgccgccgccgccgtcgcctgcggcatgtctacgtccttcctcatccgcctctcgccttcgccgccggcgtcttcccacgtgcctctccctcggtctccggcttcgtcggcgcgcccgcggcgagcgtcttccgtctccctctccaccgcgcctaggccgagggcacgcgccgccggctccgactctccctccaactttggaggtcaaacatcactgatgccaccattcagccttatgcttgatgaaggctctagatctaaaaagccatatagatggcaaagggtgttgcttaaagtaagtggggaggctcttgctggagatcacacagaaaatattgatccaaagatcacgatggcaattgcaagagaggttgcttctgtcaccagactaggtgtagaggttgctattgttgttggtggcggcaatatcttccgcggggcctcttgggctggatgtagtggactcgaccgctcatcagcagattacattggcatgttggctactgtgatgaatgccatatttcttcaagcaacaatggagagcattggaataccaacccgtgtccaaactgcatttcgtatgtcagaagttgcagaaccatacatacgccgaagagctgtcaggcatttagagaaaggaagagttgttatatttgctgctggtacagggaacccattctttacaactgatacagctgctgctcttcgttgtgcagaaatcaatgcagaggtagtacttaaggcaacaaatgttgacggtgtgtacgacgcagaccccaagcgtaacccaaatgcccgccttcttgaggctgtgagctaccatgaggtgcaaacaagagacctctcagtaatggacatgactgccattacgctatgccaagaaaacaacattcctgttgtcgtgtttaatttgcaaaaacctggaaatattgcgaaagctattgttggtgagaaggttggcacgtttataggctgcacaaaagatcaggaccagattgtggggaatgcactggatcaagaaagaagattggtgaacgagttatgatttcactggagctctctgtcgctagctgtgtagctgcattgcctattgcttggtaacatgtggatctctagagtttttaggctagaatagcttatccaaatcctggttccttgtacaacctttgagcaaaaataaaaaaaccaatggtaacagagattttccagctgatatagctgctatgttgtcatactatgtacaatggaatctagagcaatctgataaatcacatttatatctt

SEQ ID NO: 4462 - DNA, 1085 bp, Oryza sativa
  ref <308>: DATABASE ACCESSION NUMBER: AK061786
  ref <309>: DATABASE ENTRY DATE: 2001-12-06
tgtagatgtggaagagctcactgttgaggagcgcaacctcttgtctgttgcttacaagaatgtgattggtgcccgccgtgcctcctggcgtattgtctcatccattgaacagaaggaggagggtcgtggcaatgaggaacatgttactctgatcaaggagtaccgtggcaagattgaagctgagctgagcaagatttgcgatggtatcctgaagttgcttgactcacaccttgtgccctcatctactgctgcagaatctaaggtgttttacctcaagatgaagggtgattaccacaggtaccttgcggaatttaagactggtgccgagagaaaggaagctgctgagagcacaatggtggcttacaaggctgctcaggatattgctctggcggatcttgctcccacccatcccataaggcttggactggcacttaacttctctgtgttctactacgagattctaaactctccagacaaggcttgcaaccttgctaagcaggcgtttgacgaagccatctccgagttggataccctcggggaggagtcttacaaggacagcactttgatcatgcagctcctgagggacaacttgaccctctggacctctgacctcacggaggacggtggtgatgaggtgaaagaagcctccaagggcgacgcctgcgagggccagtaaatgggaagatcgatcgatcgatggctccgcatgttattggagaccatcgatttagatgcctcatgctgctgtcaccatgatggatggattcttctcctgttctactagaatgtttttcttcctgtccccccttcctctctcttctctggtttttactagggtggtagcggtcgaattagttcttcccattgctttgcatttggtgctagtggtccgtctgggctgattgttttcctctggatatgactctcgtgtgtgttgtctccagatagtgttttattgagcaatatttaaagttgtcgtccacctcctcgatgttgtttgtctgcccttgtgcgttgttgaattgcgatgtcgtcgattgcctttcggtgggctcgaaaatattgttccaacttcgagtggtttg

SEQ ID NO: 4463 - DNA, 1292 bp, Oryza sativa
  ref <308>: DATABASE ACCESSION NUMBER: AK061787
  ref <309>: DATABASE ENTRY DATE: 2001-12-06
atcttcttctctcctcttatccccttcgccttcctcctccccgcctacacgaccagttcctggtttctgctgccttccctcggtctggatcaacaagaggaggtcgtccaatggcgagtggtgggagcagcaatgccgggagcctgacgcagtggctgagggagaaggggttcgacgaggaggccatcgggcggatgtcgagacggtgcaagaaccttcacggccttgacgccggcgaggcctccggggtgtgggactacctcctgaacgtcgtcaagatcgagcggcggaagctccggtacgtggtcaccaagtgccccaaggtgctcaccctgtccgtcgacgacaagctcgtccccacggtgcagtgcctcaccacgctgcaggctaagcccggcgaggttgcgcaggccattgtcaagttcccccagatactgttccacagcgtggaggagaagctctgccctctcctcgccttcttccagacgcttggcatctctgagaagcagctcgccaagttgctcatggtcaacccgcgcctcatcagctacagcattgaggccaagttctcgcagaccgtcaacttcctcgttggccttggcattgacaaggagggtatgatcggcaagatcatggcaaaggagccctacatcatgggttacagtgttgacaagcgccttcgtcctactgccgagttcctcaagtcggcggtcgggcttgaggggtcaaatcttcagagggtgatcatgagttttcctgatattttgtcgcgagatgtcgataagattctgcggcccaatttggcgttcttacagagctgcggtttcagcaaggatcaggtcatggcattggtggctggataccctcctgttctcatcaagagtgtcaagcattgcctggagcctaggatgaagttccttgttgaagaaatggggcgggacatgggtgaggtggtggattacccccagttctttcgccatggtctcaagaggagcctggagtaccgccacaaggtgctcaagcagatgaattcaaggtgcagcctcagtgagatgcttgactgtaatcagaagaagtttgccatgaaatttggtttgcttgcagcagtttaggcatgcatcctctcttcagttcccatgtagcatgtttatttttcaggtgaaagtttttccttttgtactagcattttggacatcgagaattcaaagcattttgctttactgggtgttttctggaatgtcaagtgcaaatttgcctctttcagtgtcatgattaatgtataaccttgcatc

SEQ ID NO: 4464 - DNA, 1244 bp, Oryza sativa
  ref <308>: DATABASE ACCESSION NUMBER: AK061788
  ref <309>: DATABASE ENTRY DATE: 2001-12-06
ggcacgtggcggtcgcagtcgcagtcgcagtggggatcagcggcgccgccgtgcgaagaagccggcggagatgccgatctgcccgccgtcgtcggaatcctcgccggcgccggggttgggggggcgcgcgttgatcttccacgggttggccctcggcgcggcggcggcggctgcggcggccgcggcctacttgtacaggcggccgggcgggttccgcggccgcgcggtgggcatcataccggcgcgcttcgcctcctcccgcttcgaggggaagccgctcgcccccatcctcggcaagcccatgatacagagaacatgggaaagagttatgttagcctcctctttggaccatgttgtcgtggcaacggacgatgaaagaatagctgaatgttgtagaggattcggagctgatgtaataatgacatcagaatcatgcagaaatggatctgagcgttgctgtgaggctcttcaaaagctaaacaagcattatgatattgttgtcaatattcaaggagacgagcctcttattgaaccagagataatagatggtgtagttatggcactacagcgagctcctgatgcagtctttagcacagctgtcactgcactgaaacctgaagatgcatctgatacaaatcgagtgaagtgtgttttagataaccagggttatgcaatatacttctcaagagggctgattccatttaataaatcagggaaagtcaatcctcagtttccatatcttcttcatctgggcattgcgggctttgattccaagtttttgaagatctatccagagcttccaccaactccattacagctagaagaggatctcgagcaacttaaagttcttgaaaatggatacaggatgaaggtaatcaaagttgatcatgatgcccatggtgtggatgcgcctgaagatgttgagaaaatagaagcattgatgcgtgcaaggaacatccagtagcatgaaaatgatcgattttgtacgttgtgtggttacatgtttgattcgactgttcgtgttctagtatagcctttctgaagagcacatgaggttaatttgagtttgtaaattagaagctgtttgaaagttgaattactgttttgagtgtgcatagcgttgcacttctttcttacaacgttgaaggaacatagcgcatctccatttactgaaatggcagtgcacctacttgtatttactgtaattaccaggccatacagttcgtttcgagtttgttcttgtt

SEQ ID NO: 4465 - DNA, 933 bp, Oryza sativa
  ref <308>: DATABASE ACCESSION NUMBER: AK061789
  ref <309>: DATABASE ENTRY DATE: 2001-12-06
caaagcacagggcccaaccggttaatgctccatccgctccagcaaggccactacaacctattaagttttcaaatgatacagaaaggctacaacacatcaattcagttaggaaatctcctattggagcacagatcaaacttgtcattgaattgctgtacaagacaagacaagcttttactgcggagcaaataaatgaaacaacttatgttgatatccatgggaataagtctgtctttgacagtctgaggaacaatcctaaagtacattatgatgggagacgtttctcttacaagtccaagcatgatttgaagggaaaagatcaactacttgttttggtaagaaagtatccggagggtcttgctgtggtggaagtcaaggatgcgtacccaactgtaatggaagatttgcaggcactgaaggcagcaggtgaagtttggctgttatcgaacatggattcccaggaggacattgtgtatcctaacgacccaaaggcaaagatcaaggtcgacgatgacctgaagcagctcttccgggagatggagttaccgcgggacatggtggatatcgagaaggagctccagaagaatggcatcaagcccatgaccaacacagctaaacggcgggctgcagcacagatcaatggggtgcagcccaaggctaagcctaagaagaagcagcgtgagatcacacgccggaccaagctcacgaacgcccatctgcctgagctgttccagaacctcaacacttgattgctctacgcttattcgacgtcaagtggagatatttatttctgtcctcactctacctactgcaatgctttatatacctgctacccttattgtgtatgttataaatgtaattccggcctccgggagcataatctgagacggtcagctttgtaaaacataaatcaattcaagagcttgagatggc

SEQ ID NO: 4466 - DNA, 1264 bp, Oryza sativa
  ref <308>: DATABASE ACCESSION NUMBER: AK061790
  ref <309>: DATABASE ENTRY DATE: 2001-12-06
atcctcttttgctttagcttcgatagctagcttagctgcttgaattggtgtttgtttcaactctctgaagctctctggaagaacgggcggcggcggcggggtatatcatgacgtggtgcaggtgatggtggggatgatggagacgagcccggacgacggcggtggcggcgaggcgatggcggcggcgcagcagacggaggaggacatggggccaccgtggctgcggccgctgctgtcgacgagcttctttgtggcgtgcgcgtcgcacccggagctgagcaagaacgagtgcaacctcttctgcctcggctgcaccggcgacgccctctgcgcctactgcctccccgcccaccgcgaccaccacgtcattcggaggtcgtcgtaccacaacgtgatcagggtgtcggaggtggggaagctgatcgacatatcgcacgtgcagacgtacgtgatcaacagcgccaagatcgtgttcctcaacggccgcccgcaggcgaggcccgggaagggcgtcaccaacacctgcgagatctgctgccgcagcctccccgactccttccgcttctgctccctcggctgcaagctgggaggaatgcggtgggacccaagcctgacattcgccatccggccgaagcgcgggcaggactccggcgacggcggctccggctccgactacgactccttcagccccaagaaggcgaggagggcggcggccggctacgatcagctcggccggttcgaccggggcatgatccggtggtccgacgacgagggcagcaagtccaacacggcgccgatcacgccgaccacgccgccgatcagccggtgccggccgtcgaggaggaagggcatcccccaccgtgcacccttctacggttagctcacacactacaccaaccaaaaaaaaaattatcacccatcaccagcatatactagtctgtccttaaaaaaagcaaactctagctacgattctagacatatcgtagctaggattgtaattttttttggacggaaggggtatatcactagctcttcagccaaagtgaccaaacctagctatcaccagttcactgctagtactagctagccacatatatgtacatgatcaagtgtcaggtctgaaatagtgaagtgatatccaatcagctactgttaggtcactagctagatatgatatgttgattagcagctagcctgatacatatagttgtataaaatatacaagtgtacacaataattaatctaggtcatgaagtaagtatat

SEQ ID NO: 4467 - DNA, 1344 bp, Oryza sativa
  ref <308>: DATABASE ACCESSION NUMBER: AK104790
  ref <309>: DATABASE ENTRY DATE: 2002-08-28
acccttatccattcactctctccttctcaccctcggcggtggcagtggcgggggctgtggcggcgaacctcaccctcggcggcgcggcgccctccaggtacggcggcgaggaggcagtgggtgtggtgcggcggtgtgtggcggcggcaatacagtggcgaggagggctcgacggagcgcggcggtgcggcggctcgacgcggcgatgaggagggctgaacggcgtgcggcagcgaggaggaggtgagcggcggcggtggcatatccatcccaacgcggcagcagtgaagaggggcagcggtgtgcggcggcaaggcggaggtggaggcagcaacgatggcccaatgccgaggtacacccctcctccccccatccatcctcttcttcttcttccctcctccacttaggaaaatttgctcatgtgtgtgatggatttgtcccttactgtcatgggtgacggatgtgtgaatgtgtgtgatggatttgtgaaatatgttttgttaatggagtagtatagatttaagcttcacataaatatatttgtaaaatgccattgtatcattgataataatgctctattggtaatcacagtaaagtatccacattgtgcttgtcatcataattcgtcactagcatgctaggatatatagaaaaatggcaagtctagcatggtaaaccaagtggcatctgtggacggctattaagtacaaaattctcgctgtcaatacctgcataaaaccataaaagtaaaacatccaatatagtggtaggatttatttctaaccatttccacgagtgttagtgtatatttgtatgcaggatgcaacccaccaaagttgagatgaaatgtacatgaaggatgagaatataacttccatatccaagccatagagttttgagcccacaaacccaataagatacatttatcttgagccaaacttcagtagaacatatagtgggacccacatgtcagaacaccagagaaggagctaggctggatgggccagccagggttcggctgaaccagcagctagcccaaccagcacaatattttaccaactgatagttatcctcatcctatgacggttaggagcgttaatactggtggaaaccgtcatcaagaggacacatggcaaaaggagaagttaagaagatgctcttaggattctatgttgaatatttcacagtatctccactctctcaactcacctccacactataaatacccctgtcctctccctcattcacacacacttgaagcatgagctgaattacaagaggctctagtgtactttattgtatattagaatagagagagagtaatgtagaagaagttgtcgatgc

SEQ ID NO: 4468 - DNA, 1331 bp, Oryza sativa
  ref <308>: DATABASE ACCESSION NUMBER: AK061791
  ref <309>: DATABASE ENTRY DATE: 2001-12-06
gagcacggcgacgcatccacgcgagcccgcctccctctccatcccctccaccgtcgtcgagttagaccaaaccgccaagcgaagccacgacggatcgagccgccgccgccgccgccgtgcacgcccatatctagggtttcgatggagcccgcctcctcctcgtcgccggcgccggcgccggaagccgcggctgcggggaggagggtgccggaggcggcagagctgaagctgcggcggaggacgctggagacggtgctggagcagtgccagcgcgcgctcgagatgatgcgggaggctgatctgggcatcgccgtgtctgaggaggaggaggaggaggagggcgccgacgccgtggcggcgaatccggaggtggggggcagcgacgggtgtgatgaggagggtgcgccgccgccgtctccgccgtcggaggccgactacgagacggacgagttgtgcgatcttctcaaatcgagggttgcatcgcctgaatttcttgaaaaactcgataatattcagaagtcggtatatcaaaatggtgcagtagatgaaactatatcatgggatatcataagtgcggcagacatatgggacgacattgacaagggtatgaacattagtgatgattcagaggatggatatgttctcattaaacaagaggacatagttgatggtattgcaagcttcatggctgcatacttgctgtcgctgaaacaaactaaggacttgacacctaatcaacttcaacaagctcttagcaagaccttttcagctaagaagaggaaaagcaagcttcagaaagcatgggatggaacaaaagttatttataatatagcatcatggagtgcaactgctattggcatctaccagaatccagcaattctaaaagcagcaactgctgccttctggacttcctgccgtgtagcatccaagtttctgtgaatagtccatggctggtcgttgtggtgctgtgtacattgtgtgactacggcaacgatgttgcttccccgtgccatctgtcaaggggaaaatacttttgccaaaacattgtagtacactcaattatatgatgatgtaattctatcgagatcctccaccacaggttcacaggttgattgacagttagttcatgtgtcaggaaagatttcagctcagaccacatttgttatgaacatgtgggcctggtctatagtatcttgcacctgatctaatggttggaggacacctccctccctgtgtttacctgtatcatttgtatcagaccacctccggtttgtgattcctttgtacatataagcccgttcattgtaaatatatcagccattcaacactcc

SEQ ID NO: 4469 - DNA, 993 bp, Oryza sativa
  ref <308>: DATABASE ACCESSION NUMBER: AK061792
  ref <309>: DATABASE ENTRY DATE: 2001-12-06
ccttatccctttcagtggggagctccaacttttgatgctggtgaagcctttgcaatgatgatgacttcatttattgctcttgtggagacaactggagctttcattgctgcttcaaggtatgcaagcgcaactatgatacctccatcaatcattagtcggggcatcggttggcagggaatcagcatcttgattgattctttttttgggacggccaatggaacctcagtttcagtggagaatgttggtttactcgctttgacacatgttggcagcaggagagtagtgcaaatatctgctggtttcatgatcttctttgctatccttggaaaatttggagcacttttcgcatccattccattgcctatatttgcgggcatgtactgtattttcttcgcttatgtcggtgcctgtggtttgagtttccttcagttttgcaacctaaacagcttcaggaccaaattcatcttgggttttgctttcttcatggggatctcagttcctcagtacttcaatgagtacacagctgttgcaggttatggaccagtgcacactggtgccagatggttcaatgatatgataaacgtgccgttctcgtcgaagccgtttgtcgcgggtcttgtggcctacttcctcgacaacacgatcgagacgcacaataacacggtgaggaaggatagaggctaccattggtgggacaaattcaggagcttcaagaaagacgcgaggagcgaagaattctactcgttaccgttcaatctgaacaagttcttccctgctgtctgaatgatctagcaaatgtcacccaagcaaaaatggttcatgtctgaacataattctgctggccttcttcagtgttgctgtgcgtcagttttgtgtacttataataggcgaatcttactaattggacaacggagatgtgccttagaatgggaatatcatgtctatttttttgtcctacaatgatttatgtgtcattacctaggtctttctctt

SEQ ID NO: 4470 - DNA, 1299 bp, Oryza sativa
  ref <308>: DATABASE ACCESSION NUMBER: AK061793
  ref <309>: DATABASE ENTRY DATE: 2001-12-06
aaaccaactcttcgtcgtcgcgccgcttccgttcttccggcggccatggaggacgcagcagcagcagcaaggcggatggagaggcttgcctcccacctccgcccgcccgcttctcagatggaggaatcacccctcctgaggggctccaattgccgggcaaaaggtgccgctccgggtttcaaggtcgccatcttgggagcgtctggtgggattggccagcctcttgcattgctcatgaagatgaaccctcttgtttctgtgctccatctgtacgatgttgtcaacactcccggtgtcacagctgacattagccacatgaacactggtgctgtggtgcgtggtttcttgggccagccacagttggaaaatgcccttactggaatggatcttgtgatcattcctgctggtgttcctcgtaagcctgggatgacaagggatgatttgttcaacatcaatgccggaatcgtccggactctttgtgaaggaatcgcaaaatgctgccccaatgcaattgtgaatgtgatcagcaaccctgtcaattctactgttccgattgctgctgaggtttttaagaaagctgggacatatgaccctaagcgccttttgggggtgacgacacttgatgtagtgagagccaatacttttgtggcagaagttcttgggcttgaccccagagatgtaaatgtccctgtcattggtgggcatgcaggagtaacaatattaccactcctttcacaggtgaatcctccctgctcattcacctcagaagaaattagttatcttaccactcgcatacagaatggtgggacagaagtagtcgaggctaaagctggagcggggtctgcaaccctttcaatggcgtatgcagcttctaaatttgcagatgcttgcttgagaggattgcgtggcgacgctgggatagtggagtgctcttttgtagcttctcaggtgacagagctgcctttctttgcatccaaagtgcggttaggtcgctgtggcatcgaggagatcttatcacttggtccattgaatgaattcgaaagagctggactggagaaggctaagaaggagctggccgagagtatccaaaagggggtcgctttcatcaacaagtgaggccatcttggaatgccccaatttagttcaacatggaaatacacaggctgtgtctttgcttcctggggagtgggaagaacacttgtatcatcttgtctcaaatgtaaaagctgcctacacgatgtttatacagctgtagcagatgcaaaaacacaagtctgctaataaaagttgcttctgaat

SEQ ID NO: 4471 - DNA, 834 bp, Oryza sativa
  ref <308>: DATABASE ACCESSION NUMBER: AK104791
  ref <309>: DATABASE ENTRY DATE: 2002-08-28
gttagttgctcacccgatcctgtatccatggcggccgtgtcggaggtggaggtcgacggcgtcgtgttcccgccggtggcccgcccgccgggctccggccacgcccacttcctcgccggcgcaggtgtgaggggagtggagatcgccggcaacttcatcaagttcacggccatcggcgtgtacctggaggagggcgcggccgtgccggcgctggccaagaagtgggccggcaagtccgccgacgagctcgccgccgacgccgccttcttccgcgacgtcgtcaccggcgatttcgagaagttcacgagggtgacgatgatcctgccgctcaccggcgagcagtactcggacaaggtgacggagaactgcgtcgcggcgtggaaggccgccggcgtgtacacggacgccgagggcgcggccgcggacaagttcaaggaggccttcaagccccacagcttccctccgggcgcgtccatcctcttcacccactccccgcccggcgtcctcaccgtcgcgttctccaaggactcgtcggtgccagagggcgccgtggcggcggcggcgatcgagaacagggcgctctgcgaggcggtgctggattccatcatcggcgagcacggggtctcgccggcggcgaagcggagcatagcggcccgcgtctcgcagctcctgaaggcggaatccaccggcgacgtggcggcggcggagcccgcgccggtgtccgcgtgaaaatcgagctgcgaattaaccgcgcatctaagagctcctcctacacttcttgtacacttctactgccctcgtgtttgacaatgaaataaaaggaaaggagaaatc

SEQ ID NO: 4472 - DNA, 1180 bp, Oryza sativa
  ref <308>: DATABASE ACCESSION NUMBER: AK104792
  ref <309>: DATABASE ENTRY DATE: 2002-08-28
tgatagcatcgatgacgatgagaaattaaaagaaatttttgctgattttggtactattacctcttgtaaggtcatgagagatttgaatggtgttagtaaaggatctggctttgttgcatttaagtctgctgaagatgcttcacgagctcttgtggctatgaatggtaagatgattggcagtaaacctctctatgtagcacttgcacaacgcaaggaagaaagaagggcaaggcttcaggcacagttctcacaaatgcgtcctatggtgatgcctccttcagttgctcctcgtatgcccatgtatccccctggtgtccctggtgtaggccaacagctgttttatggccagccacctccagcttttgttaaccctcagcctggatttggcttccagcaacatctcattcctggtatgaggcctagtgttggaccaattccaaattttgtcatgcctatggtccagcaaggtcaacaaccacaacgtccagctggaaggcgtgcaggcactggtggaattcagcaaccaatgccaatgggccaccagcaaatgcttccaaggggtagtcgtggtggttaccgttatgcttctggtcgtggcatgccagacaatgcattccgtggtgttggaggtttagtgccatccccatatgagatgggaagaatgcctctcagtgatgctggtgcaccaccgcaggttccaattggagcattggcctctgcactggccaattcacccccagatcagcaaagactgatgcttggtgaaagtttatacccgcttgttgatcagctggagcatgatcaggcagcgaaggtcactggcatgcttttggagatggaccagactgaagttctccatctcattgagtcacctgatgctcttaaggccaaggtcgctgaggctatggaagttctccgtaatgctcagcagcagcaggcaaataccccaactgatcagctagctgctctcaccctgagcgacggcgtcgtttcttaacttggttggcatcttatatctgagactgcaagtgatgtagtatgtacttggtgtgttttggaacttgaacctgtggggaagtctgtctttatctttgttaaacggcagttcagttacttcagcattgtgtggatctggatttcagttcctatttgtgttttcttaaaatattgggattgcaat

SEQ ID NO: 4473 - DNA, 1910 bp, Oryza sativa
  ref <308>: DATABASE ACCESSION NUMBER: AK104793
  ref <309>: DATABASE ENTRY DATE: 2002-08-28
gtagtcatctctcgctcgcacacaactaataaccaacgaaaccacgagcagcggctgatcggtaagcggtagtggtagtagtagtttcgtttgtacgttgacccaagcagcagatgccaattgcagcagccgcggtcacctcgccaccggccgccgcgcaggtgcacggtgtcgtgccaaggcatgcctcgccgacgccacagcagcgggcggcgccgcggcgggagcagtcgccgctgaacccgagctcgcagtcgatccggtcggcctcctccggcaccgagctcgcaggttccgcggcgacggaggcctcccgggcgcacatcgccaaccttgaccgggttctcgggaagccaccgcaggtgccgaggccggcgagccacgcggcggcgagcaagcaggagcggcagcagcaggacggggagctggagccgctcaacgtcaggcacggcctgctcaacgcgctcaacctgtccttcttcgtgcccatgcccgggatgcgggcccgcaccgccgccgacgagcacatgtcgcctcgcagcctcatgcacatgcagcagctcctctccgccgactccccgcgcgcctcgccgaggagcaccatcgcgccgcgctggcgcagcctccacggggaagacggctgggccggcctcctcgacccgctcgactccgacctccgccgcgagctcctccgctacggcgacttcgtccaggcggcgtaccaggcgttccactcgctgcccaccgcgtcggcgaggcaccgcgggctcatgctccccgaccgctcctaccgcccgacgcggagcctcttcgccacctcggcgctgtccatgccgccgtgggcgaagcgccccaacacccccgagtggctcacgcagcagtccaactggatcggatacgtcgccgtgtgcgagtccgagcgggaggtcgcccgcatgggccgccgcgacatcgccatcgtgctgcgcgggacggccacctgcctcgagtgggcggagaacctgcgcgcctcgctcgtgcctctcgacggcgagagcggcgaaggcggcgggcaggaggagcccaaggtggcacggggattccggagcctgtacaagacggcaggggagaaggtgaagagcctctcggaggaggtcatgggcgaggtgcggcggctcatggagaagtacaagggcgaggagctcagcatcacggtcgtcggccacagcctcggcggcgccctggcgctcctcgtggccgacgagatcgccaccaccgtccccgacgcgccgcccgtcgccgtggtctccttcggcgggcccaaggtcgggaacgccgcgttcgtggacaagctccagaagaacggcagggtgaacgtcctgcgcatcgtcaacgccggcgacatggtcaccaaggtgcccggcgtggcgccgcgcctgccgctcaccaaggagcagtaccagcacgtcggcgcggagctgcgcatcgacagcaagaactcgccgtgcctccgccccgacgccggcccggcgtgccgccacgacctggaggcgtacctgcacctcatcgacgggttcacggggacgggccgcccgttccggcacgacgcgcgccgcagcgtgatccggctgctgcagttgcagagggggaacgtgaagaaggagtacgtgaaccgcgcccgggagctcggcgtcgacccctcggcgccggtggacgtcggccggagcatggcgtacgggaactgcgccgtcgcgagcccctcctcgtgagacgacgagattgacgtcttcttccaagagcccttaattatgtaaatttttgtagaagcagaccaacaattctttcgttagtcaggggtgtcagcgggaaaaaagattttcccttgtcatttgacgtatgtatgtacagtacataaaaactattatacttgc

SEQ ID NO: 4474 - DNA, 1078 bp, Oryza sativa
  ref <308>: DATABASE ACCESSION NUMBER: AK061794
  ref <309>: DATABASE ENTRY DATE: 2001-12-06
cacatggatgtcgataagattgcattcactggatcgaccgatactggaaaagtcgtccttgagttggctgcaaggagcaaccttaagtcagtgacactggagctaggaggcaagtctcctttcatcatcatggatgatgctgatgttgaccatgctgttgagcttgcgcattttgcactgttctttaaccagggacaatgttgctgtgctgggtctcgtacatttgtgcatgagcgtatctatgatgagttcgtggagaaggccaaggctcgtgctctcaagcgtgtggttggtgatccattcaagaatggtgttgaacagggccctcagattgatgacgagcaattcaacaagatcttgcgctacatcaagtatggtgttgacagtggagccaaccttgtgactggtggcgacagattaggtgacaaaggttactacatccagccaacaattttctcggatgtacaggataacatgaggattgctcaagaagagatatttggccctgtgcagtccattctgaagttcaatgatctgaacgaggtcatcaagagggcaaatgcaagccagtacgggctggctgctggggtcttcaccaacaacctgaacacggccaacaccctgacccgcgcgctcagggtcgggaccgtgtgggtgaactgcttcgacgtcttcgacgccgcgatcccgttcggcggatacaagcagagcggcatcgggagggagaagggcatcgacagcctgaagaactacctgcaggtcaaggccgtcgtcacgccgatcaagaacgccgcgtggttgtaaacacatagatgtttggacatttcagaactggggaagaaataggtataatcttatggacggatgcgaaaatggcgataaattatggcgataagattatgatgatgatgatgaagaagaagaagaggaggaggaagaacagctgaaataagcttgtcctagcatggggctggcattgtctctaataaaccttgtggttggtgctcatgttactgatggagtatattgtagaagcagatttatgttcattatgaaatatatatcgcttgtttgggat

SEQ ID NO: 4475 - DNA, 1039 bp, Oryza sativa
  ref <308>: DATABASE ACCESSION NUMBER: AK104794
  ref <309>: DATABASE ENTRY DATE: 2002-08-28
ctttcctcctcccccacccaaagctcgagctcccgctagggtttcgccgccgccatgccgcagggagatcacatagagcttcaccagaagcgccatggccggcgcctggactacgaggagcgcaagcgcaagcgggcggcgcgcgaggtgcacaagcgatccagggatgcccggcagttgcttggtgctaagggtaagaggttcgccaagaagcggtatgccgagaaggcacagatgaagaagaccctgaaaatgcacgacgagtcaacttctcggcagaaggttgatgatgttcaagagggtgctcttcctccatatctgctggaccgtgatcagacacaacgtgccaaggttctcagcaacacaattaagcaaaagaggatggaaaaggctggcaaatgggaggttcctttgccaaaggtcagacctgtggctgaagaagaaatgttcaaagttttacgaactggcaagagaaaaaccaaacagtggaagagaatggtcactaaggccacctttgttggacctgggtttacaaggaaaccaccaaagtatgaacggtttattaggccaactggccttcgtttcacaaaggcccatgttactcaccctgagctgaaatgtactttcaaccttgacataatttctgtgaagaaaaacccaaatggtcaaatgtactctactcttggtgttttgacaaggggaactatcattgaggtgaacgttagtgaacttggtctggtaacccctgctggaaaagttgtttggggtaaatatgcacaagttacaaacaacccagagaatgatggctgtatcaatgctgtcttactcgtgtaaggacgcaatgctatacacttcattcttctcgttgcgactctcaccccagatgtacccgttcagtgggtctttttgaccgatcattcagagtagcgtgttttaaactgtgggcacaaggctcatctgttatatgcctttaacatatctggaatacattttacattgtatgtcgtggtgcagaaaagatctttactagttacatttt

SEQ ID NO: 4476 - DNA, 1239 bp, Oryza sativa
  ref <308>: DATABASE ACCESSION NUMBER: AK061795
  ref <309>: DATABASE ENTRY DATE: 2001-12-06
aactgtagaccccgtctcgccttctctctcctctcttccctctaccttccctttcccctctctccctccttcccccgacttcctccccgtcctcggccatggcgttcttctcccatcaccacctccagcagccgcatcctcaggctccgccgccgccgccgccgcagcagcagcagcaaccggtgcccccttccttcaggaacgcgctgccggtgccggtagatgggcagatcccggcgcctcttcccttcttcaacccgccgccggccttccaggaccagcccgcgcagccaccactggtggacgcgatggggcttacggccgcggcggggctagggtggaggcagcctagggagcaggagctgctaggagagaactcccagatgtcgtccatcgatttcctgcagacgggctccgcggtgtccactgggctggcgctctctctggaggacagacgccatggcggtggcagcggcgctggggctgggaactcctccggcgattcgccgttgctcctgctcccgatgttggatgatgacatctctcgcgaggttcagcggctcgatgcagatatggaccgcttcatcaaggcccagagtgagcggcttaggcagtccatattggagaaagttcaggcaaagcaatttgaggcgctggcctctgttgaggataagatacttagaaaaatacgggataaagaggcagaagtggagaacattaacaaaaggaactctgaacttgaggaccagattaaacagttggcagtggaagttggtgcgtggcagcaaagggccaagtacaatgagagcatgataaacgcactgaagtacaacttggaacaggtatgtgcccatcaaagcaaggatttcaaagaaggttgtggtgatagcgaggtggatgacacggcatcctgttgcaatggtggtgccgccaatttgcaactaatgccgaaggagaacagacactccaaagatttgaccgcatgtagagtctgcaagtcaagcgaggcttgcatgctattgttgccttgtcggcatctttgcctttgcaaggagtgcgaaagcaagctgagcttctgcccgctatgccagtcttcgaaaatacttggcatggagatatatatgtagaatagaatttatgtattactcgagtatcgtcccagatactgctgtgtttatacaacagtctattgttaaactgtaccactagtatggaccaacatgagatgccactggatcg

SEQ ID NO: 4477 - DNA, 1201 bp, Oryza sativa
  ref <308>: DATABASE ACCESSION NUMBER: AK061796
  ref <309>: DATABASE ENTRY DATE: 2001-12-06
ataatctcctccgccgccgcacctcgcagagagagagacgccgccgccgtcgccgccgccggcgaccggagagaaagagagagaagagcaacgcccacggcttcgccgccgctgccggcgaccatgtcggtggagacggagcggagctcgacggagtcatcggcggcgtccgggctcgacttcgaggacaccgccctcaccctccgcctcccgggctcctcctcctcctcctcctcctcctcgtcatcctcctcctcctcgtcgccgtcggagcccgaccgcaagcgcgcctccgccaccgacgacgaccccgacaaccgcctcggctccaccgccaccgagtcccccccttcccccaaggcgcgggtggtcgggtggccgccggtgcgcgcgttccggaagaacgcgctcgcggcgttggcagcggcgtcctccagcaaggccaagttcgtgaaggtggccgtcgacggcgcgccgtacctgcgcaaggtggacctcgaggcgtaccggggctacgaccagctgctcgccgccctccaggacaagttcttctcccacttcaccatccgcaagctcgggaacgaggagatgaagctcgtcgacgcggtgagcggcaacgagtacgtgccgacgtacgaggacaaggacggcgactggatgctcgtcggagacgtcccctggaaaatgtttgtggagacctgccaacgtcttcgtctcatgaaaagctctgaagcagtcaatttagcaccaagatctgcttgatgagtcgcaaatctctgctcctgtctttgagaagcatgagaggaagccatctttgcttgctgaggtttttccatgtctgtgagagaaatgtgtacagtcatcgacttcgacttttggttccatcgtgctattgagtttcagaaaagaaatggtttttagcttgtagctttgttaccagtcagtagtctctccatatagatgagcgaagcggtgatgctttaaaatacacccatagattgttttctcgataaataaaattggtctcactcactgagcccctgttcttcgacatgctttctaccactagtttgttcgataatgtgatgtgcatgtgaggcctgtgatggtgcaagaatcatataacttgtcatgttaataactattttgttgtaagattatgtttactgcatggtgttataagctatttaaagtttactct

SEQ ID NO: 4478 - DNA, 1285 bp, Oryza sativa
  ref <308>: DATABASE ACCESSION NUMBER: AK061797
  ref <309>: DATABASE ENTRY DATE: 2001-12-06
gaaggatcaggattcactccgccctcgccgacctcgtcgccggccgccgcatcaccaccgacacctccccccatcgccgccggcgagagttgggtggtggagcgagcgtggccgcgaggggacgcggaggggcggcggcggcggcgattgttcgcgggatgagcagcttcggcggcaccagctccgtcgcctccggtggtgggaagaggctcgagtacgggcggacgcatgtcgtgaggcccaagggcgcgcacaaggccaccatcgtctggctccacggcctcggggacaacggagccagctggtctcaactactggaaacccttccccttcccaatataaaatggatttgccccaccgcgcctacaaggccagtggcagtttttggtgggttcccatcaactgcatggtttgatgttgctgatctttcagaagacgctcctgatgatgttgaggggttggatgcctcagctgcacatgttgcaaacttattatcaactgagccagctgacatcaaacttggtgttggtggctttagcatgggcgcagctaccgccctttactctgcaacctgctatgctcatggaaaatacggaaatggcaatccatatcctgtgaacttaagtgtgtctgttggtctcagtggctggcttccttgtgccaggtctttgaagaacaaaattgaaagctcacaggaggctgcacaaaaggcttcatccatacctcttttgctttgtcatggaaaagctgatgatgtagttctctacaagcatggtgagaaatctgctgacgcactgaagacaactggattttcaaatgtggtgttcaagtcctacaacagacttggacactacactgttccggaggagatggatgaagtctgcaaatggctcaccgcgaacttgggggtcagcagctcatcgtcggcttgattgaagaattgagctgtccgaataatacctgtggttgttccaaacaaaattgagaggtaaatggttgaatgaatagcgaagaacttggggcttgggtatacggccatggggtagcctggcgtgtcatcatgcggacatgcctcacggcatcttaactagaactcttataatttccacagtttgggtctttgttttgtttgtttcccttccctcttaaagcaggggacggcatcgtggtgtattatttgttttggttagcacggatgtttttgtttggtacgccgtgtgttcttccgattgggtcagttgtatgtttcctttatgagttatgagatgcattgggattttgggtt

SEQ ID NO: 4479 - DNA, 1111 bp, Oryza sativa
  ref <308>: DATABASE ACCESSION NUMBER: AK061798
  ref <309>: DATABASE ENTRY DATE: 2001-12-06
gcagctcgatcaaagttgggaagcagaattaatacacacactccatctccatggcacccacgccgttgttcctcctcctgctgctcaccggcgttacggcggagtcggcgcacccgggctacgcggagggcgatggcagcagctgcgacgtggcggcggtagcggtggcagagaggcgagaggagttcgacggcgggcggatcgtggacatcagccactactaccgggaggagatgccggagtgggagtcggcggacggcaccggcggcgggttcctgcggctggtgcggtcgatgcgcaacggctccgacatcgccaacttctccgagctccgcctcacggcgcactccggcacgcacgtcgacgcgccgggccacgtcttcgaccactactaccacgctggcttcgacgtcgacacgctcgacctcgccatcctcaacggaccagcgttgttggtcgatgttcctagggatagcaacataacagctaacgttatggaatccttgcatattcccaaaggagttcggcgagttctctttcgaactttaaatacagacaggaagcttatgtggaagaaagaatttgatacaagctatgttggtttcatgaaagatggtgctcaatggttgattgataacacagacattagactagttggcgttgactacttgtcagtcggagcgtttgatgaatgcattcctgctcatttagtttttcttgagaaaagagaagtcatccttgtggaagccttacatttagagcatgttaccccaggaatatataccttgcattgcttgccactaaggttacgtggttctgaaggttccccggcaagatgtattctcatcaagtaacatatgcttataaggtttacatcgacatcttatatgtgttgaaatgttgaatggtgttgatggttgtcaagtcagatgcatccacctaggacatatgtatatgacaaactatgcatagtatttgacacatatatatgattgtaaaataagatcatgttgccttctaacaggttaatgtctgtgcatctatcagctataaacttatatatattactattgtaattgactaccaatgtaacagttggatatatgacacc

SEQ ID NO: 4480 - DNA, 1041 bp, Oryza sativa
  ref <308>: DATABASE ACCESSION NUMBER: AK104795
  ref <309>: DATABASE ENTRY DATE: 2002-08-28
aagaaggacactaaagcagtagtctagtctcccggccaagcaagaaccaaaaagcaattaagatcgaactcgagcaaacatgtcgtcgactaacaacagttcaggcgagccgccgccggcggtgcgcgtgctgggcggttgggcgagccccttcacgaaccgcgtggtggtggcgctgaagctgaagggcgtggagcacgagatgttgcaggagacggtggggaagaagagcgagctgctgctccggtccaacccggtgcacaagaagttccccgtgctgctccaccacagcaagcccctccccgagtctctcgtcatcgtcgagtacatcgacgaggtctggccggcctccaatggcggcgccccggccattctccctcgcgacccccacggccgcgccgtcgagcggttctgggcacggtacgtcgatgacaagattctaccagggcttcgggttttgagaggatcggtggccggagacaaggaccaaaccgcaggtgaaatgtccacgactctacagcgtctggaggaagcatttgtcaagtgcagccaagggaaggaatacttcggcggcgacagcatcggctacctggatatcgctctgggttcgttcctcggatggatcaaggcggtggagaagatcgccggcgtcgagctcctcaacgaaaccaagcttccgatcctggctgtttgggcggatcgcttctgcgcgcacccagccgtggtggacgtcgtgcctgacgctgataaattggttgagttcaccgttcaatatggttctgtgctgaatactgtgaatgttcttcccaagtgatggatggtatgctgctttgtgcctgacgataaattggtttgagttcaccgtgcaacgtgcttcgtgttgccatttagtatggtcactagtgaaagatgatggtcatttacgttgttttgtttcgtttcttcggaactgtagtttccctttccgtctgagtctgtaattttgcttgtaagacttctctctgagtcttttattactacttctctcagtcttttattact

SEQ ID NO: 4481 - DNA, 1173 bp, Oryza sativa
  ref <308>: DATABASE ACCESSION NUMBER: AK104796
  ref <309>: DATABASE ENTRY DATE: 2002-08-28
gacagaaagggaagagattttcccttatcctcttgatggagctcctcctgcgtccctcccctccgccgccgtgggcgattccacggcggagctctggcgagagaaccaaaccctgccgctcccgctcccgctcccgcacgggaacctctaagcaaacatttcctgtccctttactggttggcaaggttggaagacgtccgtttcctgtgcagtgttctatagttcgatgctgcttgtcatcaactgatgccatccattctacaagtgatgacatccatgaagataatggacacggccattttcttatgaagtctacatctgaccttcagaaagtgatatcttcctgttttgggaaagcatgtcttctcagttctgtcatgcttgttctaccacccagttgtttcgcagaaccgtgtgagccagagtactctctacctaacatgcctttgctttttgcaattgccatgattggagctaccgttggagggctccttgcaagacaacggagaggggagcttaaacgattgaatgatcagctacgtcagataaatgcagcactgagaagacaagccaagattgaatcttatgctccttctttgagctatgcaccggttggtagtaagatacctgaatcagaagtcattgttgatccccagaaggatcgcttaatttcatatctgagggctgggaagaactatctgagaaaccaagcccctgataaggcatttcctgagtttaaggctgcttttgatcttgcacaatccttgggtgatcacgtcgaagagaagaaggcggcacgtggattaggagcatctttgcagagacaaggcaagtacaaggaagctataaagtaccactccatggtgttgaacatctctaagctgaccggagaggacgcaggtgttacagaagcctacggtgcgatcgccgactgctacactgagcttggtgagctcgagaaagcaggcaagttctacgacaagtacatcgcaagactggagaatgactgaacagatttaaagaaccgtgtgtgcaacctttgagagctcaagtagggctgtgtcccatcttttgccttctttggcctgtcttgtagcaacgtttttgtagtggacgctcagttcatggctgtaactgaggcacatgccatctttcaagttatttctactaaat

SEQ ID NO: 4482 - DNA, 1070 bp, Oryza sativa
  ref <308>: DATABASE ACCESSION NUMBER: AK104797
  ref <309>: DATABASE ENTRY DATE: 2002-08-28
accacgcggcggcggcagcagcagcagctagggtttagagagcagcccccaatcccatggccccgccctccgactccgacgactcggccccgatccccgccggcgccatctccaagctcctcatcgtcatagcgatgcagacggaggcgctcccgctcgtcaacaagttccacctcgtcgaggcggaggaatccatatttcctaaaggtgccccatggattagataccatggcaactacaaaggccttcacgttgaccttgtatggcctggaaaagatcctgttctcggagttgactgtgttggcacggtatcagcagcacttgtgacttatgcttctattcagtcattgaagccagatctgatcatcaatgctggcactgctggtgggtttaaggccaaaggagcagacattggagatgtctacttagcatccgatgttgcattccacgataggagaatacctatccctgtcttcgacatgtatggaattggaacacgaaaaacatttgctacccctaatatattgaaggaactcaatttgaaggttgggaagctctcaactggcgattctctagatatgtctccccatgacgagtcagcaatattgaacaatgatgctacagtcaaggatatggagggagccgcggtggcatatgttgctgacatgttttcaacaccggcaatctttgtgaaagctgtgactgatattgttgatggggagaaaccaacagccgaggagtttctgcagaacctggttgctgtgacagcagctctggacaaggcagttacagaagtggttgatttcatcagtgggaaatgcatatcggatctttgaatgatgaagcttagaaacctgttcatcaaatccaagctctgctgcttcaatgcactatactatactacatcactgctgtatgatttttcatggggatgcgtatacaatttttaggttcccctgaggccctgatcccccgtatgtacaaaattcttggcaattacttggatcaatagcgtggaattttgtagaatattctgcaaaatgtgcagtgtaatgaaactaaataaggtg

SEQ ID NO: 4483 - DNA, 959 bp, Oryza sativa
  ref <308>: DATABASE ACCESSION NUMBER: AK104798
  ref <309>: DATABASE ENTRY DATE: 2002-08-28
atcttccattccccaaaaaacctcgcaaaaccctcggccctcacccgccgccgccgccgtcgcctccaccggtaaacggcagcatgagtcggcaccctgaagtgaagtgggctcagaggattgacaaggtttacataactgtacaattagctgatgctaaggatgctaaggtcaatctggaaccagaaggtgtattctctttctctgctacagctggaactgatgggaacttatacgaatcaaagctagagttgaacgacaaagtaaatgttgaggagagcaaaataagtgtaggtgttaggtccatattctgtattgtagaaaaagctgaggccaaatggtggaagaagcttgttcgagatgatcaaaaggcaccacactttgtgaaagttgactgggacaaatgggttgatgaagatgatgatggtgctgatgtcaacgtggatggaatggacttttcgaattttggtggcatgggtggaatgggtggaatgggcggaatgggtgatatgatgggtggcatgggtggtatgggtggcatgggtggcatggctgagatgatgggtggcatgggtggtatgggcggtatgggtggcatgggtggcatggatgagttcgaggacgagagtgacgatgaagaagaagtgtctaaacctcaagacgcagagaaggctgctgaagccggaaaatcccaggagtcggacgctaaagccgagacaagttagagcaatcgaaggcccctctacataattcctttctctgttgcatcccgtcttttatggatctggtgaactgaagaaaacattttacgttatgacggtagggatgggtgctcccttgtagaacgatgctatgaaactggagctccaactgagtacgcaaaccattcttggattgtttttcttaatgcgctttgatgcttcatcgctctgcaatcatatattaagctttggatgctt

SEQ ID NO: 4484 - DNA, 950 bp, Oryza sativa
  ref <308>: DATABASE ACCESSION NUMBER: AK061799
  ref <309>: DATABASE ENTRY DATE: 2001-12-06
tcctccgcccaccccaccggcgatggcacacggcggcggcgaggaagaggaggagcgggtgctgagccacggcgacgtggtgctgctccgctgcgacctcaccatcctccgtggcccccacttcctcaacgaccgcatcatcgccttctacctcgcccacctcgccgccgaccaccacgacgacgacctactcctgcttcccccctccgtcccctacctcctctccaacctccccgaccccgcctccgtcgccgccgtcgccgaccccctccgcctcgcctcccgccgcctcgtcctcctccccgtcaacgacaaccccgacgtctcccacgccgagggcggctcccactggaccctcctcgtcctcgacaactccaacgccgtctccggcccccgcttcgtccaccacgacagcctcccacccaccaacctgccctccgcgcgccgcctcgccgccgtgctccgcccgctgctccccgcctccgcgatcccgctcatcgagggccccacgcccaggcagacaaacggctacgactgcggcgtcttcgtgctagcggtggccagggccatctgcaactggtggcccacccgcgcccgccattccaattccgattccgattggttggaggccgtgaagagggaggtgaacgccgacagcgtcaaggccatgaggacccagctgctgcagctcatccataccctcatccaaaacaacaccaccaccaaccaacattcgtgctagctagctgttgctctttcacaacttatttgtagtcttcgtgttcttactgatattatatatatggttttctgtgagcacagcaagaacaacatgtacaaatagaacaggtcttgtgtagtaatctttttgcagaattttggggtccaaatactctttactgttggttatggttaatgaaacaatgctattgtgcctattatttgagtat

SEQ ID NO: 4485 - DNA, 1101 bp, Oryza sativa
  ref <308>: DATABASE ACCESSION NUMBER: AK061800
  ref <309>: DATABASE ENTRY DATE: 2001-12-06
agagacacttcttcgcagttcgcgtcgcgcacacactctccctttgcctcgcgcagaggcggccgcgccttctccgccgcgaggcatggccggcgccgccgccgccgtggaggacgccgggatggacgaggtccagaagcggctcatgttcgacgacgaatgcattttggtggatgaacaagacaatgttgttggccatgaatcaaaatataactgccatctgatggaaaaaatcgaatctgaaaatctacttcatagggctttcagtgtattcctgttcaactcaaaatatgaactcctactccagcaacgatctgcaacaaaggttacatttcctctagtttggaccaacacttgctgcagccatcctctgtaccgtgagtctgagcttatacaggaaaactaccttggtgttagaaatgctgctcagaggaagctcttggatgagctgggcatcccagctgaagatgtgccagttgaccaattcacccctcttggtcggatgctttacaaggccccatctgatggaaaatggggtgaacacgagcttgactacctgctgttcatcgtccgcgacgtgaaggtagtcccgaacccggacgaagtggccgatgtgaaatacgtgagccgtgagcagctgaaggagctcatccgcaaagcggacgccggagaggaaggcctgaagctgtctccctggttccggctggttgttgacaacttcctcatgggctggtgggatcacgtcgagaaaggcaccctcaacgaggccgtggacatggagaccatccacaagctgaagtaaggactgcgatgttgtggctggaaagaatgatcctgaagactctgttcttgtgctgctgcatattactcttaccagggaagttgcagaagtcagaagaagcttttgtatgtttctgggtttggagcttggaagtgttgggctctgctgactgagagattcccttatagagtgtctatgttaatttagcaaacttctatattatacatgattagttaattgttcggtgtctgaataaagaacaatagcatgttccatgtttatttgctacatatatgatgatgatgatgccattccctcgt

SEQ ID NO: 4486 - DNA, 1216 bp, Oryza sativa
  ref <308>: DATABASE ACCESSION NUMBER: AK061801
  ref <309>: DATABASE ENTRY DATE: 2001-12-06
acaaaccacgcaggaaacctcagaaaatcaccgtacgcgacgcgggcccaagaaaaccccgacagaaaccgcgcagcagcaacaccaccaccggcgtcggagatggcgttccggctgagcaacagcctgctcgggatcctgaacgcggtgacgttcctcctgtcggtgcccgtgctgggcggcggcatctggctggcgacgcgcgccgacggcacggagtgcgagcgctacttctcggcgccggtgatcgcgttcggggtgttcctcctcctcgtctccctcgcgggcctcgtcggcgcctgctgccgcgtcaactgcctcctctggttctacctcgtcgccatgttcgtcctcatcgtcgtcctcttctgcttcatcgtcttcgccttcgtcgtcaccaacaagggcgccggcgaggccgtctccggcagagggtacaaggagtacaggctcggcgactactccaactggctgcagaagcggatggagaacagcaagaactggaacaggatcaggagctgcctccaggactccaaggtctgcaagaaactgcaggacaagaactgggatcggacccagttcttcaaagccgacctctccccgctcgagtccggatgctgcaagccacccagcagctgcaacttcctctacgtcagcggcacgaactggacgaaggtgcccaccaactcgtcggacccggactgcaacacgtgggtcgacgacggcacgcagctgtgctacaactgccagtcgtgcaaggccggcgcggtggcgaccctgaagcgggactggaagcgcgtcgccgtcgtctgcatcgtcttcctcgtcttcatcgtcatcgtctactccctcggctgctgcgcgttcaggaacaaccggagggacaaccgcggcgcctatcgcggtgccgcgtggaagggcggatacgcctgatttcattcgatcgatcgatcgatttgcacggcgtaattgattggcatgttcatgcgatcatgtcagatatctgttcataggcttagctctgatattctagccctgtacaggcgagattattctgggttctgatcatctgcttgttactctttgatcaggagtagtaggtttctgtatgcagttctttgatgcaacttagttgcaccctacatcatatttgtactcgatcggatttatttcatatatgtaatatagtattcctttttatttgtttttcagtacc

SEQ ID NO: 4487 - DNA, 1321 bp, Oryza sativa
  ref <308>: DATABASE ACCESSION NUMBER: AK061802
  ref <309>: DATABASE ENTRY DATE: 2001-12-06
cgtgaatattaaattgttgcactaccaaatctcacatctctccagcagccagtagtagtggccggcggcatcattagtgtcgctggaggtgggcaacaagttaatggagcaaagagacgtgggcggtcaaggcatcagagcgtctgcagcctggccgagacccccacctctgagcggcctcaccatgagggtcagtgtgagcagtgtggctgggctgagagcattggctgtggatgcatacaaccaggctgaggactgcactgccaggtggcctcagatgttgacacaggtcctaggtggagcctaatgagatcaagatcataagaacatgcttttcctggtttcttgcttccctcttagcacggtagattgagcagccaagccaagtagtgtcacctccatgatgaagacagcaagcagtgggtattgcagtcattctgcgtggtaaaaaaaaggggtcaaaaccgaaataggaacaaagcatgacaggggatgtaatgttctgatgttatttattgggatcactgaaactctggtggtatagatgcagttttttcttaatagtagtactaaaagaagcaatattatccctggtacatggtcaatctcaatgattaatatatgttctgaattattcatgatgctttacctccagttactgaacttcaaaactgatgaaagggaaaatgctagcttgcttatctgcatacttcactgtcagatcttctcattgactgcttttttgtgcgaacgctattgacaacagagcgtaagatgcaatgccactcagacccaaagtgctcagcggaaatcttcaactgcaaccgtcaaacgatctgaccccaaaggaaaaactcaggggccaaaattggatgatgggagcggtggttttcctccattccgtttcggcaaaggtggtggtggcggcggaggtggtggaggtggcagcaactacttcggtggattccttctcttcacttgtgtgttgctcctagattacctgaaggagtttgagaaaaacctgattgctcgaaggcaacgcgctggatatgatgcaaacaatgatatgttccaacaataattgtttaacttgttagcactaccctatctgttgatctgtaaaactctacaagaattcctgccgtgcatgtttatttcgttcacattacccgtagtaaatcatggcttgacctcaccgagaggaagctcagatgcactggacacagctactggaaatgtgagttcagtgctgtggtacatccaaatggaccgtattattgcaggtgttgaaattggaatgctttttggaatgttgaatcgc

SEQ ID NO: 4488 - DNA, 1609 bp, Oryza sativa
  ref <308>: DATABASE ACCESSION NUMBER: AK061803
  ref <309>: DATABASE ENTRY DATE: 2001-12-06
ttttgtgtttctagaggcccctccctttcgacaccggcacaatgatatttatggaggagaaagatttgatgttttgaagcgtatgattttgttctgcaaagctgctgttgaggttccttggtttgctccatgtggtggttccatctacggtgatggcaatttagtcttcattgcaaatgattggcatactgcacttttacccgtatatttgaaggcatattaccgagataatggcttgatgcagtatactcgctctgttcttgtgatacacaacattgctcatcagggtcgtggccctgtagatgacttcgccacgatggacttgcccgagcactacatcgatcatttcagactgtacgaccccgtcggcggtgagcacagcaacgtgttcgccgctggcctgaagatggctgaccgcgcggtcaccgtcagccatggctatctgtgggagatcaagacaatggacggtggctggggcctccacgagataataaaccacaacgactggaagctgcagggcatcgtgaacggcatcgacatggccgaatggaaccccgaggtggacgagcacctgcagtccgacggctacgccaactacacgttcgagacgctggacaccggcaagaaacagtgcaaggaggcgctgcagcggcagctgggcctgcaggtccgcgacgacgtgccgctgatcgggttcatcgggcggctcgaccaccagaagggcgtggacatcatcggcgacgcgatgccgtggatcgccgggcaggacgtgcaggtggtgatgctgggcacggggcggccggacctggaggagatgctgcggcggttcgagtcggagcacaacgacaaggtgcgcgggtgggtggggttctcggtgcagctggcgcaccggatcacggcgggcgccgacgtcctcctgatgccgtcgcggttcgagccgtgcgggctgaaccagctgtacgccatggcgtacggcaccgtgcccgtggtgcacgccgtgggcgggctccgcgacacggtggcgccgttcgacccgttcgccgacacggggctcgggtggacgttcgaccgcgccgaggcgaaccggatgatcgacgcgctcgggcactgcctcaacacgtaccggaactacaaggagagctggagggggctccaggcgcgcggcatggcgcaggacctcagctgggaccacgccgccgagctctacgaggacgtcctcgtcaaggccaagtaccagtggtgagctggtggtatttttcgcgacgcctctggatcccgccgtggatgggcgcgctttttctctagggcggctctgcgtcggagacgctcagacgcatcgcgcgcgttcgcgcccacacgatgactggcacgctgctgctgagacggcggcacgcgatgccatcatgccaccggacggtaggagcaacggtggaagtgaactgtactactggtgctacactgctactacatgagatctgctcttattggtcacgtactcacgttcacgctgaattaccgaatgtgttgtgtcttgtgtgtgtgtgttaaaggcattgtcctggtaaatggtggagacgagatggccgggtcgcgggagttatatttgtat

SEQ ID NO: 4489 - DNA, 1205 bp, Oryza sativa
  ref <308>: DATABASE ACCESSION NUMBER: AK061804
  ref <309>: DATABASE ENTRY DATE: 2001-12-06
ctcctcctctctagagagagaaacagaaaaaaggaggagactagggctctgctcctccccctgcgccggttggtcggagctctgcctcctcctgattctgctgtcccctcccctccccgatccacctcctcctcccacgtcttccccgccgtcgatggcctcgccggaccccgacccaggaagaagggcggaggaggaggtggaggaggagggttcggtggccagggccacgccgggaagcgccggatgaacagccgcaccagcatggcgcagcgcgacgaggtcatccgccgcaccgtctacgtctccgacatcgatcaccaggtcactgaagagcaattggcagcactatttatcaactgtggacaggttgtggactgtcgtatgtgtggggatccgaattctgttcttcgttttgctttcatagagttcactgatgaggagagtgcaagggctgctctaaatttgtcgggaaccgtgcttggatattatcctgtcagggtgctgccatcaaaaactgcgattgcacctgttaacccaacatttctgcccaggtccgatgatgagcgtgagatgtgtgcaaggactatttactgcacaaacattgacaagaaggtctctcaggcagatgtgaaattgttcttcgagtcgatatgtggagaggtatatcggctgaggttgcttggtgactaccatcattctactcgcattgcctttgtggagtttgtgatggctgaaagtgccactgctgctctcaactgcagtggtgtcatactgggttccttgccaataagggtgagcccctcaaagactcccgtgcgtccccgtgcacctcgccagctgatgcactaggtgttgtaggtacaggaggtgctgatggcactgcttatatatagagatagacatatatgaaagagaagttacgatatatgtcttttgttttatctgctcggccttctttttactgtaccgttagtaagtatctacacttgcaacggaggggggaaaccgttaccgggtttggtctttttcttttttaccttgcacatagcgcttcttagaagcgggcctgacgcttttgtccttgatgcagcaaggcaaaactcctggacttttgtcgctgttcagttgtttgctgtgtcttgtttgctactgagaacctgatgaactcgttacctgaaaatggagacttatcgttatgctgt

SEQ ID NO: 4490 - DNA, 1078 bp, Oryza sativa
  ref <308>: DATABASE ACCESSION NUMBER: AK061805
  ref <309>: DATABASE ENTRY DATE: 2001-12-06
tgatgctgtttaggtacttgcaagaaaaagatttgtttgagaaatactacaagcaacacttggcgaagcgccttctttctgggaaggctgcttctgatgattctgagagaagtatgcttgtgaagctcaagacagaatgtggatatcagttcacttcaaaattggagggcatgttcaatgatttgaagacctctcatgataccacacagcgattttacgctggtactcctgatttgggggatgcccctactatatctgtccagatactcaccactgggtcttggcccacacaaccatgtaacacctgcaaccttcctcctgagattcttggcgtgtccgagatgtttcggggtttctaccttggtacccacaatggcaggagactgacatggcaaacaaacatgggtactgcagacatcaaagcagtgtttggaaatggcagcaagcacgagctaaacgtgtcgacctaccagatgtgtgttctcatgttgttcaactcggcggactgtttgtcttaccgtgatatcgagcagactacagcgataccatccgcggacctgaagcgctgccttcagtctctcgcgcttgtgaagggcaagaacgttctgcgcaaggaacctatgagcagggacatctccgacgatgacaacttctacgtcaacgataagttcaccagcaagctgttcaaggtgaagatcggcacggtggcgacacagaaggagtctgagccagagaagatggagacccggcagagagtcgaggaggacaggaagcctcagatcgaggcggccatcgtgaggatcatgaagtcgaggagagtgctggatcacaacagcatagtgacagaggtgacgaagcagctgcagcctcgtttcatgccgaaccctgtggtgatcaagaagagagtcgagtctctgattgagcgcgagttcttggagagggacaagacagacaggaaactgtaccggtatcttgcataattactcttttttttttcttctggattctttaacctgaccataagtaaaccgtggtctatgtatacctgttatattacgataatgcttttggttggatt

SEQ ID NO: 4491 - DNA, 1072 bp, Oryza sativa
  ref <308>: DATABASE ACCESSION NUMBER: AK061806
  ref <309>: DATABASE ENTRY DATE: 2001-12-06
gagcaacggctctccactactagcccacagctcccaagaatctctgccatttcttgagctggtcgatccatcggggagggagagaggtcgaggaggcggcggaaggggagaggatggggtctggatctttcctcaagctgctggccaacaacttcgacgtcctcgccgggccattagtttcacttgcttatccattatatgcctctgtgagagcaatagaaacaaaatctcctgttgatgatcagcaatggctcacttactgggtgctgtactcgtttatcactttgtttgagcttacttttgctccagtaattgaatggcttcctttttggtcctatgcaaagttgttcttcaactgctggttggtcttaccttgcttccatggtgctgcttatgtttatgatcactttgtgcggccaatgtttgtgaatcgtcaaatagtaaatgtctggtatgttccaagaaaagaaaacctgagtaaacctgatgatgtgctatcagctgcggagagatatattgaacagaatggaccagaagcatttgagaaactcatcagcaagtctacgaggccttcaacctccaaaagaagcacaaagcaatctatcttggaggaggtagaatctgaacacatggccagggctgaaagagaatcatggggcgaaaatccattctatgataaaaattatcgatgctagaacaatctgttgttcacgaccacatactcatcaggttgccggcttatctgggttgaggataaagctttccatgtatctgacttcaggatttgtactttgatgcatcatgcatccactgaatgtcattcagtcccagttcccagaaccaattgtgcattggctgaactattgtaaataggtgctagtgttgacaatatcccttagttcttaaatgatgttatgtaattctgttaatctgccttgcgtggtagtgacaacctctggacttggttggcagttatatttttcccttcttggagaagggccagaattcaaaaatagtcctgatatctatattctactgcttgcaaggcagaggagctgttgacatcccctgc

SEQ ID NO: 4492 - DNA, 1106 bp, Oryza sativa
  ref <308>: DATABASE ACCESSION NUMBER: AK061807
  ref <309>: DATABASE ENTRY DATE: 2001-12-06
caccaagttcggcaagttcttcgccggcggcaagccggggatccgcggcgacccggcgtacgtgcgcgcggcgtgcgagggcagcctccggcggctcggcgtcgattgcatcgacctttactaccagcaccgcgtcgacaagaaggtgcccatcgaggtcacgattggtgaactcaagaaactagttgaagaaggaaagataagatatattggcttatgtgaagcatcggcatcaacaatcagaagggctcatgctgtacatcctatcactgcagttcagcttgagtggtcattatggtctagagacgtcgaagaagatattgttccaacttgcagagaacttggaattggaatagtagcttacagtccacttggtaaagggtttttttctagtggagctaaactagtggattctctaccagaccatgattttcgcaagcttatccctagatttcaaccaggtaatatcgagaagaatgctgaaatatttgagcgtgttaacgaaatggcagccagaaaaggatgcacaccgtcacaactcgcattggcctggatccatcatcaggggcgtgatgtgtgccccatacccgggacaacaaaaatcgagaatttcaaccaaaatgttgcagcactatctgtgaaactcacccctgcagaaatggctgaactcgagtcttatgctagcaatgtccatggcgaccggtatcctctgatgatggctaacactacttggcaggactctgagacccctcccttgtcgtcttggaaatccgagtaaatcattttcgtctgttcaaatacagttcctggttcaaaatagctggttcaaaatggaagagcgttgcacaagatttcatcagaagtgtttcatcagacgcgttgcttgctcctgttcttctacatcgcgtgtatttggaatgagctgacctgtcgatctatgcgtagcgtgttgtgtcatatgctttcgtgatgtttaatttgcgcgtaaaacttacttgagtgaagcgccgtttcataagcttgtgcattgcacgcagaatgtgtggtaatattaaataaagtgttgccatcaccagttttaatttgtgttattaacatgtttgttc

SEQ ID NO: 4493 - DNA, 1916 bp, Oryza sativa
  ref <308>: DATABASE ACCESSION NUMBER: AK104799
  ref <309>: DATABASE ENTRY DATE: 2002-08-28
aaaaggagcacatctcactcaggctggccggccgaaatcgatcggcagcaaaggccaaccaaactaagccaagagcgagctagctaagctggttttctgcttgtgccatgggagaagatggcggcgtgaactcttcttccaactctccggcggccgccgttggtctcgtgctggtggtggcgatctgcacgtacctggccgtcgtcgccacccgcaagcagaagcggcggcggcggcggcggccgccggtggtcggcacggcattccaccagctgtaccacgtccggcgggtgcacgactaccacacggcgctgtcccgcgagcacatgaccttccggctgctggtgccggccggccgcgagcagatatacacgtgcgaccccgccgtcgtggagcacatcctccggaccaacttcgccaactacggcaaggggtcgtttaaccacgggaacatgagcgacctgttcggggatggcatcttcgccgtcgacggcgacaagtggaagcagcagaggaagatcgtcagctacgacttcaccaccagggccctccgcgacttcagcggcgacgtcttcaagaggaacgccgccaagctcgccggcgtcgtctccagccacgccgcgtcaaaccaatccatggacttccagggtttcttgatgagagcaacgatggactccatcttcaccatcgcgttcggccaagacctcaacacgctggacggctccggcgaggggcgccgcttcgccgcggcgttcgacgacgccagcgagttcaccatgctccgctacctcaacccgttctggaagctgtcgaggctcctcaacgtcggcgccgaggcgatgctcaaggagaggatcaaggtcgtcgacgggttcgtgtacaagctcatccgtgacaggtccgacgagctctccaacaccaaggcacacgacactgattcgaggcaggatatcctgacaagattcatccaggcaacgactagcgattctgggacggttgattacaagtacctgagagacatcatattgaacattgtcatagccggcaaggacaccacagccgggtcgcttgcttggttcctgtacatgatgtgcaaacacccggaagtacaggagaagatctgccacgaagccatggaggccaccaacgccggcgaggccgcttccatcgacgagttctcgcagagcctgaccgacgaggcactgaacaagatgcactatctgcacgctgcactgacggagacgctcaggctataccctgcagttccactggataacaagcagtgcttctcagacgatgtattgcccaacggattcaacgtcagcaagggggacatcgtgttctacatcccctacgcgatgggccggatggagagcttgtggggcaaagacgctgaatccttccggcctgaacgttggctcgatgagaacggcgtctttcagcaggagagcccgttcaaatttacagctttccaggccggcccaagaatctgcctcgggaaggatttcgcgtacaggcagatgaagatcttcgcggccgtgctgctccgtttcttcgtgctcaagctgcgggacgagaaggagatcatcagctaccggaccatgattacactctccgtcgatcagggtctccatctgacggctatggcgagatgagggcacacactacagtctgggcacgcacagcagctggctcctgtactcatgcaagtgatagctccttgtgcataccaaaacgaacgagatctgcaaaccttaattatgtctgatcgtgaataacccgcattgcaccctagaataataagtgcatctgaactgcagtcagggtcagagtaacttattggagtgaactggtgttgtagggaacttcaattgtacaacttggagggcgcaatacaaatgaatggattaaatagt

SEQ ID NO: 4494 - DNA, 1040 bp, Oryza sativa
  ref <308>: DATABASE ACCESSION NUMBER: AK061808
  ref <309>: DATABASE ENTRY DATE: 2001-12-06
gcaagaaagaaaaggcggagcaggagcagcaacgagaaaaggcggaggcggcggcgcaaccgacaaggaaaagcaaagcgagagcaggaaaacctcgccggcggcgacaccaccaccaccagcaggcagggatggcccggtacgaccgcgcgatcaccgtcttctcccccgacggccacctcttccaggtggagtacgccctcgaggccgtccgcaagggcaacgccgccgtcggcgtccgcggcaccgacaccgtcgtcctcggcgtcgagaagaaatccacccccaagctccaggactccaggtccatgcgcaagatcgccagcctcgacacccacatcgcgcttgcctgcgcggggctcaaggcggacgcccgcgtgctcatcaaccgggtgcgcgtcgagtgccagagccaccgcctcaccgtcgaggaccccgtcaccgtcgagtacatcacgcgctacatcgccggactgcagcagaagtacacccagagcggcggggtgcgccccttcggcctctccaccctcatcgtcggcttcgacccctacaccgagaagcccgccctctaccagaccgacccatccggcaccttctccgcctggaaggccaacgccaccggccgcaactccaactccatgcgcgagttcctcgagaagaattacaaggacacctccggcaaggagaccatcaagcttgccatccgagccctccttgaggttgtcgagagcggtggcaagaacatcgagattgcggtgatgacacacaaggatggcctccgcgagctggaggaggctgagatcgacgagtacgtggctgagattgaagcagagaaggctgccgccgaggccgcgaagaagggcgccccgaaagaaacctgacctgatcatcatgattcagcaaagcataatctctcttagcatgtgttgtttcttttctgttcttgtttgagaggaacgcagaactgtttggttcaactgaagtggatatggctatttgctgatcagcctacctggagtaaatcctcatgctatatgctt

SEQ ID NO: 4495 - DNA, 1144 bp, Oryza sativa
  ref <308>: DATABASE ACCESSION NUMBER: AK104800
  ref <309>: DATABASE ENTRY DATE: 2002-08-28
ggcacgcacgcactcgaattcaccttcaccttcagcgcgagccgcgagcgagagaggaaaagggaagcgacgatctctgcccttctagaagggtttgggatttcttgactggacgacctcgtgcgatttcgggaggcaggagccatgaacggcaataagcagtccctgatatacagcttcgtggccaagggctccgtcgtgctggccgagcacaccgccttctccggcaacttcagcaccatcgccgtccagtgcctccagaagcttccccccaacacctccaagtccacctactcctgcgatggccacaccttcaacttcctcgtcgaccgcggcttcgtgtttctcgtcgttgcggatgaggccgttggaaggagcgtgccgtttgtgttcctagatagggttaaggaagacttcatgcagcggtatggctccagtatcgacgaggagggtcaacacccgctcgccgatgatgcagatgatgatgacttcctcttggaggaccgatttagcatcgcctacaatcttgaccgggaattcggaccgaggctgaaggatcacatgctgtattgtattaatcatccagaggaaattagcaagctctccaaagtgaaagcacacctcacggaggtcaaagggattatgatggacaacattgagaagatattggaacgtggagagaagattgagcttttggtcggcaagactgaaaccttacaatcacaggctgacagcttccacaggcatggaagagagctcaggcgtaagatgtggcttcagaacctgaggtttaagttgatggtgggtggtgctgttgcggcgttgattctcttcctctggctgattatttgcgggggcttcaagtgctagaacattgaaagcctttttctttgttttgcattcgatgtgtttaccgtgtcgtgtgcatatataacgaccagcaaatcctgctttcgatatgcttcgtgcagagttaaatctccttatggacctttattccttgtagcctgttctcatgtttcatagtattacaataggggggctctggaaatggaatacttgtgtaaacaaaccttgtgaaaggagacaacttagctatctgtattatgtacattctgaaatgctaatagcttatttcaatctc

SEQ ID NO: 4496 - DNA, 1166 bp, Oryza sativa
  ref <308>: DATABASE ACCESSION NUMBER: AK061809
  ref <309>: DATABASE ENTRY DATE: 2001-12-06
acccccctctctgcttccctccacactgcctcgccaaccaaccaccgctacacacgaggcggcgcgtggccggagagcgagaaaaggcgacgtacccatcgatagcgagaaattaagttgccggagaggaggaggatgacgatgaggttggcggcggcggtggaggagcggtgcccgggcgtggtctcccgcgccgccgacgcccagcgcgacctcccggactccaccttcaccatctccgagctcatccgcaacttccgccgcaagaacttcaccatcgaggagctcgtcatcctctccggcgcccacgccgtcggcgtcggccactgctcctccctccgcgcccgcctcaccgcgccacccgagcagatcctcccgggataccgcagcctcctcgccggcaagtgcgccgccggcgaggacccgatcgtgcccaacaacgtccgcgacgaggaccccgccgccgtcgccgccaccatcccgtccttcctcccgaagctgaggaagttcgagttcttggacaacagctactaccacaacaacctcgcgaggatcgtcaccttcaactccgattggcagctgctcacggagaagaaggcgcgcggccatgtccacgagtacgccgacaatggcacgctctgggacgaggatttctccgacgcgctcgtcaagctcagcaagctgccattgccgcccaaggccaagggcgagatccgccgccattgccgccgcgtcaacacccaccactactgattcttcatcctcatcatcccaacatcaagccttccatcttgagctctcatctgcatcctcattttcaataattctttgtttcattattcgcatggttggttcatcatcgtcgtttaattttgtgtatcttgttcttttttttgatttgttggtgctcgtcgatctcgtgttgaattggtttaattttgtgttgaattctacgcgcatgtgtatgtgagaacaccagtacagcgagaattcatggtgtatagtagcttttgtgttgttgcattctctgtctattggtgtcaaaaagaaagaaagttaattagttgttgtttttttttttggtatggtttggattggatttgtattcatccatccaaaactttctccattttcatgtaataaggagggattacagaaagatcgat

SEQ ID NO: 4497 - DNA, 983 bp, Oryza sativa
  ref <308>: DATABASE ACCESSION NUMBER: AK061810
  ref <309>: DATABASE ENTRY DATE: 2001-12-06
cttgattgcagacatggtgggtccttttcaaagaaaccagtgaaatacgatgaaatggaacgtgtagctgcataccggaaggtcctcaagacatggtctagatgggtagaaaagcatgtagatccgaaaagaagtacagtcttcttcatgagtgtctcacctgtgcatatgcagagcgagggctggggaaaaccagatgccataaaatgcttctctgagacgcagccagctatcaattacacaaagaaattggaggtgggcacggactgggatctgttctcgacagctcatcacgtaacgaaggctatgaagagggtgccagtgcacttcatcaacataacggcgttgtcagagatccgcaaggacgcgcacacatcggtgaacaccctgcggcaggggaagctcctgacgaaggagcagaaggcgaacccccgcaagttcgcggactgcatccactggtgcctacctgggttgccagacacatggaacgagttcatttacggtcacatcgtctcgagccctcaaaggaggccggttgagccgattgagaatcaacctcagagataacagtgaagaatttgtctatttggaatccattagatcgtttagcgaggaagaagtggcggccgaggccataaattattttctaggtttaggaatctatgctgttgattcacctagggtttaaacagaatggtggccatggggtagagaaatgtagctgtaagcaaccaagatagccctagacgagagctctgatgctgtctgagagtttgaatgcggttgtttctgaggagaatgctttctctgcttcccgtccaaaaaaggtgagtgtatttccatggatgcatgtatataatcttactaaattcttttggggaattgttttcggtttgtcccgtggacaattttcttgaactgtcgcaaacgttccagtaaagctgcaacagtcaatatacaaattggctgttgccttgtgattc

SEQ ID NO: 4498 - DNA, 1123 bp, Oryza sativa
  ref <308>: DATABASE ACCESSION NUMBER: AK061811
  ref <309>: DATABASE ENTRY DATE: 2001-12-06
attcattcccggacagcgtagacagatcatagatgtacacgcgcactgttgcacacacacttgagacgtgaagctgaagctaccgcgctgtggtcgcgtgcaccgtgcagtgaacattcttaattgtccgccgtcgtgaaaacggagtaaaattcatggggaattcgctgtggatgacgcggtttttttctggtgtatctcatgggggttgcagggaaccgtgcttccggcaggacgccgctggactgggagacgaggtcggcgatcgcgctggcggcggcgcgcggcgtggcgcacatccactcgacggggccgacggcgtcgcacggcaacatcaagtcgtccaacgtgctgctcaccaagaactacgaggcgcgggtgtcggaccacggcctccccacgctggtcggcccgtcattctcgccgacgagggtgtccggctaccgtgccccggaggtgaccgacattcgccgggtctcgcagaaggccgacgtgtacagcttcggcgtgctgctcctcgagctgctcaccggcaaggcgccgacgcacgccgtcgtcaacgaggagggactcgacctgccgcgctgggtgcagtccgtcgtccgggaggagtggaccgccgaggtgttcgaccaggagctcctcaggtaccagaacgtcgaggaggagatggtgcagctcctccagctcgccatcgactgctcggcgcagcaccccgacaggcggccgtccatgtccgaggtggccgcgaggatcgacgagatccgccgctccagcctcggcgaccgtccggccaccgacagcgccggcgagggcgaggagccttcactataaccgaccagccgacattgccgtctggatcaccgtacatcgatctcagcctcagcgaacggaaattaagttggagaattgcttagttctttgcatggatcttgctcccccaggctacttttggttcatcagcaacttgtgcatgtttttttcattactttttctttcttcttcctttcttttttttcccttcttttttttgggcctttctctcacgggctttgattctattctatagcacatgtcactgtactctttgattcttggaaaggaacacttgataatgcgttgt

SEQ ID NO: 4499 - DNA, 975 bp, Oryza sativa
  ref <308>: DATABASE ACCESSION NUMBER: AK061812
  ref <309>: DATABASE ENTRY DATE: 2001-12-06
attctcatctctctctctctttcactgtttcttcctcctctgcacttggcgcagcacaaagtcgattcctttccgcctcagcggcgccgcttgtttcgatcgaagcatcgcgagaggcagcccgccgcctgggtttcgtgccgattttgatttcctttttcttggccgcctctgcctctctctctctctctctctctccctttcttggttcgattgttcctggttcttggcctgattggttgaacctgcttcttctggaatcaattaggggagaaatatttgcaggagaggggcggtggcgatggcggagttggttgggccgcgggtgtacagctgctgccattgccggaaccacgtctgcctccacgacgacatcatctccaaggcctttcaggggaggaacggccgtgcgtttcttttctctcatgctatgaacatatctatgggtccaaaggaggacaggcagcttatgacagggcttcacacagttgctgatatctactgccgtgattgccgtgaggtattgggttggaagtatgaaagagcatttgaagaatcccagaagtacaaggaaggaaaattcatatttgagaaggcaaagattgttaaagaaaattggtaatgactggaaagggttggcgtgccaaactttcctgtgaagctaaaattcatacctttgtacatagctgtcgtctgtaaattcgaatgtttagcctgcatgatgttgctcatgccatttgtaatgtgcacttgttttgctgttcatttctgtgaagaagacaggcctctgtttatttctttgtcaaccattttctcattgttcataaatggatagcttgtacataattattttcctgtctaaatgttgaatgtttgtcatcaaagtaattccttgtgagttacaatgacatctattattagctcatgacacttaatggatatgaaaagagcagtaaaaggtaaatatatttgccc

SEQ ID NO: 4500 - DNA, 1509 bp, Oryza sativa
  ref <308>: DATABASE ACCESSION NUMBER: AK061813
  ref <309>: DATABASE ENTRY DATE: 2001-12-06
acacacacctcacacctcaccaccatcacctcctcctcctcctcctcttcctccgcgcgcgcgagatccagggagagggagagggagagatcatggcggggacggtgacggtgccgtcggcgtcggtgccgtcgacgccgctgctcaaggacgagctggacatcgtgatcccgacgatccgcaacctggacttcctggagatgtggcggcccttcttccagccctaccacctcatcatcgtgcaggacggcgacccgaccaagaccatccgcgtccccgagggcttcgactacgagctctacaaccgcaacgacatcaaccggatcctcggccccaaggcctcctgcatctccttcaaggactccgcatgccgctgcttcggctacatggtctccaagaagaagtacgtcttcaccatcgacgacgactgcttcgttgccaaggacccatctggcaaggacatcaatgctcttgagcagcacatcaagaacctcctcagcccgtccaccccgttcttcttcaacaccttgtatgatccctaccgcgaaggcgctgactttgtccgtggttaccccttcagcctcagggagggagccaagactgctgtctctcacggcctgtggcttaacatccctgactatgatgctcctactcagatggtcaagcctcgtgagaggaactccaggtatgttgatgctgtcatgactgtgcccaagggaaccttgttccccatgtgtggcatgaaccttgcttttgaccgtgatctcatcggtcctgcaatgtactttggtctcatgggtgatggccagcctattggtcgctacgacgacatgtgggctggatggtgcatgaaggtcatctgtgaccacctgagcctgggagtgaagactggactgccgtacatctggcacagcaaggctagcaaccccttcgtgaacttgaagaaggaatacaagggcatcttctggcaggaggacatcatccccttcttccagaacgccaccatccccaaggagtgcgacaccgtccagaagtgctacctctccctcgccgagcaggtcagggagaagctcggcaagatcgacccctacttcgtcaagcttgccgatgccatggtcacctggatcgaggcctgggatgagctgaacccctcgactgctgctgtcgagaacggcaaggccaagtagattgatcctgggagcttgtgtgtcgcaggatggaaagtaccctttaagtgaaagtgttgctgtggcctaggccccctagatatagctctttttgagatgaagggagagattacttaagcaactttataattctttgttgttatgctggttcttttgtagctggaaaaggatttgttatcatcgtttacataattcaagacaataataattttatcatgtaattttgatagtcgtgctttggttgctaaatggtgttattgtatttaataacctttgcaaatcactatacctgttggttgttctgagaattgtatgcactacc

SEQ ID NO: 4501 - DNA, 989 bp, Oryza sativa
  ref <308>: DATABASE ACCESSION NUMBER: AK061814
  ref <309>: DATABASE ENTRY DATE: 2001-12-06
atccgcggagttcgtcgtcgtcttcgccttcgtcttctccatccaccaccgcgctcggcgaggcgatccaccggcggcgaggagaggcgcgcgggagcggccggagatggcggagaacccgcagctgttcgggaacgggatgctggtgcccttctacggcgagatgttcgtcctcgcccgcgacggcgtcgagttccacgtcgacaagatcccctcagctcctggtggtcatgcgaaaacaaagggcacaatttacctgtcaaacataaggatggtctttgtcgccagcaagcctgttgggaacttctttgcttttgatatgcccctgttgtatgtgcatggtgagaaattcaatcagccaatatttcactgcaacaacatatcgggtttcgttgagccggttgtaccagagaaccagaacagggccctgtactcgacccacactttcaagatcttgttcaaggagggtggctgtggtacctttgttcctctcttcctaaacctggttgcatctgtgcgacgctacaatcagtttgaggcccagtctgccgcaagtatggcgccacgtgtggacccgctacaagctgttcagactcctgttgatgatatgatgcgtcatgcgtatgttgatccgaacgatcctacaaagattttccttcagcagcctgcgccagagtcacagctgaggaggagaaactaccacggacgggctgacaatgcgtactagtgttcttacctgattgcaaagaacccatatgttcgagcctatgaacatatggatttcggcctctagtcgcgtatcatgctattacgtgggtgtgaaatgaaagcttcatgttgcccagaaacctattgtatatcttttatgccatattcagttgcatatctcaataatggtgtacatattccgtagtcctctggacttggtgcaaaaaatggtttatttgatcccatggtgtatggaattatcattgctcgtgccagcttgt

SEQ ID NO: 4502 - DNA, 1622 bp, Oryza sativa
  ref <308>: DATABASE ACCESSION NUMBER: AK061815
  ref <309>: DATABASE ENTRY DATE: 2001-12-06
agtatagtgagtctcgtcgcagtgagagagagagaggagtcgagtagatagatagatagatcggcgtgggagaagacgacatcgccggcgacgagaccagatcgatcgccgaggtatcgcctccctccccgaccgagcagggtcgccgccgttcgttcctcttgctgcttccgccgcatccatcctgcggggactaaaccttgaagcatctgggctgttgtttcaccattgtagtggattccacttcggaactgaacttttctagttgtttccgtgacaatgaaaactcacgagagagctgctaatttggcccttgcaggtttgagcttggcaccccttgtggttaaagtagagccaaatgtgaacgtcatattgacagcatgtcttgctgtctatgtgggctgttaccgttctgtcaagccgactccaccctctgagacaatgtccaaggagcatgctatgcggtttcctttggtgggaagtgctatgcttctctctctgttccttctattcaagtttctctcgaaagacttggtcaatgctgttctcactgcctactttttcatccttggcattgccgctctctgtgcaacattgctgccttccataaaacgattccttccaaaagaatggaatgataatgccatcgtttggtgtgctccatttttccactcgctctcagtggagtttaccaagtctcaagttgttgcatcaatcccaggatttttcttttgcatatggtatgctgcgaagaagcattggctagcaaacaatgttttggggatttctttctgcattcagggaattgagatgctatcacttggatcattcaaaactggtgctattctcttggctggcctctttttctatgatattttctgggttttcttcactcctgttatggtcagtgttgcaaaatcatttgatgcaccgataaagcttctatttccaacaggagatgctgcacgcccattctctatgcttgggcttggtgacattgtgatacctggtatatttgttgcgctagcactgcggtttgatgtctcaagaggaattaagaaccgctacttcaatagtgcatttttgggttatacggtgggtttgaccgtgacgataattgtgatgaactggtttcaagccgcacagcctgccctcttgtacattgttcctggtgtgattggttttgttgctgttcactgtttatggaatggagaagtcaagccactcctggagtacaacgagtcaaaggctgaagaggaagatgctgttgaagaagatactgatagcaaacagaacaaaaaggaggagtagcactctaacagcagggcaagaaaaggcagaaatttcatgtaaggtcgtcggcagctaagtaggctggatgacctctcggataccagctcacttaagaacttagaaatgattcgcatgatagaaacccttttttgatttaagaattgtttggtctggtgattagaagagaagagagtagattcttaagaggcctgccaatatggtccagtggcttgactttacccggtaccccttttgctttagtactgacttataatggtggtacaaaggatttacctgaatttttggtctggcaaatagcggtttgtgat

SEQ ID NO: 4503 - DNA, 1978 bp, Oryza sativa
  ref <308>: DATABASE ACCESSION NUMBER: AK061816
  ref <309>: DATABASE ENTRY DATE: 2001-12-06
atatatacaagttggccaagatcaccaataaggatttgcctatccttctctggcgctcctgaatcctcttagatggttataccttggtgttcgtccatgatgcggcttttgtggttcttgttcgcgcttcttcttgccagatcggtggcagatgctgcaactgcgaactacactttcactgtggaaagcatgcgagtcagtcggctatgcaacagcactgacattattgcggtgaacggcctactgccaggcccaatgatagaagtgaatgaaggtgacgcagttgctgtcgaggtcatcaacggatcaccatataacttaaccatacactggcatggcatactccagctactgacgccatgggcggacggcccgagcatggtcacgcagtgccctatccagccgaacagctcgtacacgtacaggttcaacgtcaccggacaagaaggcacgctgtggtggcacgcccactcctccttcctgcgcgccaccgtgtacggcgctctcatcatccggccaagaaacggctccgcctatcccttccccgcgccggaccaagaggtccccatcgtgcttggggaatggtggagccggaatgtcgtcgacatcgagagcgacgccgtctcatctggccagcttcccagagaatccgacgcgttcaccgttaatggtgttaccggcgagctctaccaatgcgcaacccaacacgacggtgctactccgggtcatcaacgctggactcaacacgcacctcttcttcaaggtggccggccacgcgttcaccgtcgtggccgtcgacgcgtgctacaccgccaactacaccacggacacgctcgtgctcgcgccggggcacaccgtggacgcgctcatggtcaccaacgcgtcggccggcagctactacatggcggtgcaggcgtacgacagcctgtctccgaccaccatggccgtaaccgacgacaccaccgccacggccatcgtgcactacaacaccacgtcgaccaagaaaaacgcgacgcccgtcatgcccaccatgccccagagctccgactccgcgacggccaacgccttctacttcgggctgaggggcccgccgtctcccagcgcgccggccgtgccgaccaaggtggacgtgaacatgaccatcgagctgggcctcggccagctgccgtgcgactccacacagagcagctgctcggggaaatccgtcgcggcggcgatgaacggcgtgtcgttccgcctcccgtcgcagatgtccctcctggaggcgcagttcaaccgcacgccgggggtgtacaccgccgacttcccggacgccccgcagccgagcggcacgccgatggtcgaggggaccaaggtgcggaggctcaagtacaactcgacggtggagatcgtgctgcagaacccgaccgccttcccgtcggagaaccacccgatccacctccacggcttcaacttcttcgtgctggcccagggcctcggcaacttcacgccgggcaacgtgagcggctacaacctcgtcgacccggtttcgcgcaacaccctcgccgtgccgaccggcggctgggccgtcatccgtttcgttgccaacaatccaggcatgtggttcttccattgccaccttgacgcgcacgttccgatggggctcggcatggtgttcgcggtggataacgggacgacgcctgactccttcctccctccgccgcctgccgatctgccgaagtgctagaacctgcaagattctggcgttggtgtcaaattgtaatgcactttcgtagccaaattttacttcatatttgttcttgtgtttgtgtaaatggagtacaggaggcacgaaacgaggtagtgccgttcgtttatttgttctgtgtatgtgtatcatgtgtaaactgtaaagaggtctgttttttttttcctctccgggggaacgtgtaaactgtaaagcaacaaatgtcaaacttcagattcctttgactgtgtt

SEQ ID NO: 4504 - DNA, 1450 bp, Oryza sativa
  ref <308>: DATABASE ACCESSION NUMBER: AK061817
  ref <309>: DATABASE ENTRY DATE: 2001-12-06
gtacatgttcatgtgatgcaaccaaaccatcatggtcacaccaagtttgtgaaatgttggcaggtaccagaggctgaccaagcattcgattgccattgatggatcccggctgtccccgttgggctggagtggcctatcatgggcgattggaatcctcattgcggctccgatcctcacccaggctgcacaccaccttgaccgtggccagtatcagtcgctcatcctcattgccgcgacatcgtttggctcattcttctgcctcctcactggcttcttcaagacagtctgggtgttcctcttctacatcctgttcattggtgcatccatcattgttgctgaggctgtgcatacacgcaatcttggactcatgatccgtggccttgcagcacatgactctggcaagcaccttgtccttcgccgtcgtgctgctgccagtcagctcacagcagctcatcgcccaccacagcatttgagcctaacttcttcaccaagctcagctacagcatgacccttgtgcgatacccacaggccatcggaagcttggttgcagtgttcctttcatctttcgccacaatgtgcatcttcaccagtggcacattgtatgctattggtggtgtttgcatcaagccagtccttgtgctcgtgctctggatactctacttcctgttcccgttgatctcacttccgctgctgcacccaatccagatcatcatccgtgctgatgctgttcgcatgcagctgcttgggttcatcatctgcctatttgtgtctggtgctggtttctacttcaagagccacaggtggagagccgctcacatcattgtgatcgctcttgtccagagcacagccaatggtgtgctgtactcatttggtcgcattctgctgctcgatgcctcgccaccagggaaggagggtgcttttgcggtgtggtatgcatttgtacgctgcattggtgctatgattggcttcgctgctgcatccgctgggcctgggcgtgctggaggatcgtttgctgctgcgttcctaggcagcttcctcggcatcattgttctgatctttggtaatgtgagcaacatcggggcgctgaaggctgctgggcatctgaagggaatggaagacgagaagaggctgggcatggagaaaggggaaggcatgagtgcggttgccgattccggcgagggaagggggagggtatgatgatgattaaatgggcttgtgggaaggaaagattggaaaattgctgtggaggttgtgtttgtgagagggatttgttcttctttcttgtttctttcttgttcatgtttcagtgacactgttaattcggtgctttgccccccttggatgcatgatgatgatgacatagtggtagaggaagtgtgctagttgttaatgtgttattctttgcttggaagacaattgtaactgatgatatggttctttgttcatcgcc

SEQ ID NO: 4505 - DNA, 1125 bp, Oryza sativa
  ref <308>: DATABASE ACCESSION NUMBER: AK061818
  ref <309>: DATABASE ENTRY DATE: 2001-12-06
agtgcagagatgggatcgccgatcagtgagcgattcggtgcaggcaactgataaggagggaggatctctccgccgactcagcaccgtccgtttcgggacgtggtgccgttttggccccgcgccgaagcttctcccctttgcagttatcaaattccccttgcagccacgcagatttacgccgcgcccccacgcaacccaaaagttcagcgtaaacttgcctatcaacaaaactacagctcaggcggccacgcgaaatcgcgaggtttcacgtaccaaaagcgcaaaaatccactcggattccacgcggccgagccactgcacgtgggcgcccacgacgcgcccccgtatcgatcggcaccgcgctttcctcctcctgatcttacccgctactatatcatcatctgcttgctttccccccgagagtccacggcctcctgctcctctcgatccaagataatttcactccagcgtgcgtcggccatgtcgagcttgatggacaaggcgaaagggttcgtggcggagaagatcgcgcacatcccaaagccggaggcgtcgctggacagcttgtcgttcaaggggatgagccgcgagtgcatcaccgtgcacagcaacgtcaacgtctccaacccctacgaccaccgcctccccatctgcgagctcacctacaccctcaagtgcgccggcaacgttgtggcgtccggcacgatgcccgatccggggtggatcgcggcgagcgacacgacgaagctggagataccggccaagatcccctacgacttcctcatctcgctggtgaaggacgtgggccgggactgggacatcgactaccagctcgacgtcggcctcaccatcgacctccccatcgtcggcaacttcaccatcccgctctccaccagcggcgagatgaagctccccacactcaaggacatgttctaattatcttatctctaatctcatcaaccaactccgatcgatcgaactctctgtatgtgtgatgtgtctcgcgaataatggcagctgctctgcacctgtgttcttcttgccctgcatagtatagcatggctgtatgagcggctgaaaaattacctctattcctaatggttgcaataataagctagagaactg

SEQ ID NO: 4506 - DNA, 1061 bp, Oryza sativa
  ref <308>: DATABASE ACCESSION NUMBER: AK061819
  ref <309>: DATABASE ENTRY DATE: 2001-12-06
ggcgcgccgccgtcgcccggccggcgaagagcctcctcgccatccccgtcggcataaagcagaaggccgtcgtcgacaagctcgtctccaagttccccggtgacaggttcacggtgatgttgttccactacgacggcgagatggacgggtggagggaactcgggtggtcggaccgggcgattcacgtggcggcgaaggaccagacgaaatggtggttcgggaagaggttcttacacccggacatggtggccgagtatgagtacatcttcctctgggacgaggacatcgaggtggacggcttcgaccccatccgctacctccgcgtcgtccgccgcgaacgcctcgagatctcccagcccgcgctcgaccaccgctcccagatccaccaccgcctcacactccgcgcccgcaaaggccaagttcacaggagattctacaagacgaggggaggggggagatgcgacgacaacagcacggggccgccatgcacggggtgggtggagatgatggtgccggtgttctcgcgggcggcatggcggtgcgcgtggcacatgatccagaacgacctcatctacgcgtggggcctcgacttcaagctcgggtactgcgccggcggcgaccggaggctcgccgtcggcatcgtcgacagcgagtacgtcctccaccgcggcatccccacgctcggcgacggcggcggcaagccggcggcgaagcggtcgtcgacggcgacgaaggcggcgaccgaccggctcgccgtgaggcagcggtcgtacaccgagctgcagatattcaaccggcggtggaaggccgcggcggagggggacgtgtgctggaccgacccctacccgtagcccgccggcgacggcgaccgagctcgtcgccggcgatggcggtgggaccgggcgtacggctagttacttgagtagctgagatatgatagatacagagcttctcttcttgatgtacagatttgtttctctcatcgtcagaataagcaaatgtcagaatcaaagacgatgtaattacaatagttttttaaaaaagaaatatatcgatcaatc

SEQ ID NO: 4507 - DNA, 1094 bp, Oryza sativa
  ref <308>: DATABASE ACCESSION NUMBER: AK061820
  ref <309>: DATABASE ENTRY DATE: 2001-12-06
attcgtctcgcccaaatcttcaaatccaaatccgcagcggaggcggccggggcgcggcggccagatcctggaagagaatccattccgggaggggaatccgcgcatgccaatgtcggatcccacggcggcggtcatccccaagccggggggcatcggcgtcggcggcggaggcggcgacgacgaggagccggtggagatccgggaggtgtgggcggacaacctcgaggaggagttcgcgctgatccgcgacgtcgtcgacgagttccccttcgtcgccatggacacggagttccctggcatcgtgtgccgccccgtcggcgccttccgctccccggccgactacaactacgccacgctcaaggccaacgtcgacatgctccacctcatccagctcggcctcaccttctccagcccgcgcggcgagctccccgcgctcggcccaggccgccgccgatgcgtatggcagtttaatttccgcgagttcgacgacgcccgcgacatcttcgcctctgactccattgagctcctgcgccgtagcggcatcgacttccgccgcaactccgagcgcggcgttgacgctcgccggttcgcggagctgctcatgtcctctggcgtcgtgcttaacgattctgtatattgggtcaccttccacgcgggctacgacttcgggtacctgcttaagatcctcacatgcagcagcctaccggacacgcaagccggcttctttaagctcatgaagatatatttccccaccgtgtatgacatcaagcacctaatgaagttctgcaatagcctgcacggtgggctgaacaagctcgccgagctccttgacgtggagcgcgtcggagagtcccaccaggccggttcagatagcttggtcacttcatgcgcgttctggaagctcaaggattcgttcttcgctggctctaccgagaaatatgctggagtgctgtatgggctcaatgcggagaatgttgtcagtgcgcattgatggatggtactcctctttgaattttagctttgtgaatggattgatttaggacagaaaatgtgacaaatgatcaagatgatgttatgtaggtcaagtttgtctc

SEQ ID NO: 4508 - DNA, 1298 bp, Oryza sativa
  ref <308>: DATABASE ACCESSION NUMBER: AK061821
  ref <309>: DATABASE ENTRY DATE: 2001-12-06
gttgcagattactaccaccacctccccaaaatcccaatcgaatcgaaatcgaatcgagtcgagtcgccgccggagccggagacggaggcggcagcggcgcagcggtaatggcgagcctcaccctgccgccggcgcccaccaaccctcgccaggacgccatcgacctccacaaggccttcaaagggtttggctgtgatagtacaacagttataaatatacttactcatcgtgactcgatgcaacgcgcgctcattcaacaggaatacaggactatgtattctgaggatctctctcgccgtatatcatctgaactcagtggacaccacaagaaagcaatgctgctatggattcttgatcctgctggacgagatgcaactgttttgagagaagctctgagtggtgatactattgacctgagagcagccactgagataatatgttccaggacaccatcgcagctgcaaataatgaaacagacttatcatgcaaaatttggtacttatcttgagcacgacattggtcagcgcacatcaggcgaccatcagaagctcttgcttgcttatgtggggattccacgctatgaaggtcctgaggttgatcctactatagtgacacacgatgcaaaggacctctataaagctggtgagaaaaggctgggcactgatgagaagaccttcatccgcattttcactgaacgcagctgggcacacatggcatctgttgcctctgcttaccatcatatgtatgatcggtcactggagaaggttgtgaagagcgaaacatctggaaactttgaacttgctctgctaactatcctcagatgcgctgagaatccagccaagtattttgcaaaggtcttgcggaagtccatgaaaggtatgggcactgatgatagtacacttataagggttgtagtaacaaggactgagatcgacatgcaatatatcaaggctgagtactacaagaaatacaaaaaatcattagctgaagctatccattccgagacctcaggaaattatcgaacattcctcctttctctagttggtagccattaggctacatttcgtcgaccctgtggcacttgacgttccatgactatcctaaatgcagtggttctacctggaaactgtaaaatttcgccatcattgtgctctctattcgtgtgtgcttgcttaaaaatgtgtgtatatatataacctgggcattaaatagttggtgcttaatatggtttggtggttccatctgacaagtcactcgttactcggtgcatttattcgaataagtgatggtatttggtc

SEQ ID NO: 4509 - DNA, 1233 bp, Oryza sativa
  ref <308>: DATABASE ACCESSION NUMBER: AK061822
  ref <309>: DATABASE ENTRY DATE: 2001-12-06
caggagaaagaacacacagaagagtgaaccaaagttggctcacactgatgatttcagattcttagacaaggctgccattatgtctgatctgagcttggaccaagacagttgcacaagtccatggaggatctgtactgtaactcaagtcgaggaattgaaaatactaatccgtttacttccaatatgggcaaccgggatattcttttgtgttgggatctctcaaatgcacaccaccttcattcagcaggggactgtgatgaacaccaagattggctcactctccattccagcagcttccctgtattcatttgaagtgatatgcgtgacattctgggttttcctggtgaacaaagtcatcataccagtgaccagagcatgctttgcaaacggggcggaaatgacgcagctgcagaggatcggcatcgggcgattcctgatgatattcgccatggcgatcgccgcatttctagagatgaagaggctagagagcgtccaggggggcgatcagcccctgagcatcgcgtggcagctcccgcagtacttcgtcatcgctggggcggagtgcttcaccatcatcactcagctggagttcttccacggtcaggcgccggactccatgaagagcatgctgacggcattcgcgctgctcaccaccgccctcggcaactacttcagctcggcgatcatcaccctcatcgcgagggtgaccgggacatggcatagccctggatggataccagatgatctgaacaaagggcaccttgactactactactggtgtctcgcagccatctcagctgtaaatttcgttgtttacatctattttgccagtaaatacaagttgaagaaggctgtcatccaagtctaaagtttttgtaaagttaccaattgccaccacgtgaagtgtttatagattgtatatgttaaattatactccagttaggttttagaaggaccattatatcccaaaatagcttcaggttgatctgaggaagctacccgtatcggcaaatgtacttaattcaatttgtcaaaagaattatgtatccctaatgttgtaatttcacaatgagtagtagaatgatagttttacttgtgcatggaagtgagtttgaaatggaaatgttgaacatttgttcttttggatctgttgtatttagattattcctatgtacatgacagcatatttgcattatgcattatgaatatttacatgacagtatatttaggagg

SEQ ID NO: 4510 - DNA, 1083 bp, Oryza sativa
  ref <308>: DATABASE ACCESSION NUMBER: AK061823
  ref <309>: DATABASE ENTRY DATE: 2001-12-06
atgatagtaactgacataaatataatgtatgcgtgcgatcaacgctggttgttggatcgtccgtcgtgtgtatgggtggtgtgtggctgatgcaggtttgcagcgcagcgggaagagctgccgtctccggtgggtgaactacctgcatccagggctgaagcgagggaggatgagccccgaggaggagaggatggtggtgcagctccacgccaagctcggcaacaggtggtctcgcatcgccaagagcattcctggccgcaccgacaacgagatcaagaactactggcgcacccacctgcgcaagctcaagctcaaacagcaaaagcagcagcagtccgacgaccaccacaacgacaacgacgacgacgacgaccgcaactcctcctcctcttcgtcctcctccaacagcaacagcaacctgcagcagcagccgcagccagaggatgagtcgtcggccagtggcagcctgcaggcccaacatcatgaggaccagcaccaactgttccttcatcctctctggaacgacgacatcatcgtcgacgtcgactgctggagcagcagcaccaacgtcgtcgctccgccgccgatgcccgcctcgccgctctgggatatcgatgacgccttcttctgctcggattattcgctacctctctggggatagtatatatcatccatcagccgccaagacgatgacgactacatcaactcgatcgatcgatgcctcctaatcatgtgggagtactcagctcatctcaattgttacatccttgctacagctgctaattactgtaattactagcttgcatatagggatcgacggaggaattaatatatacatgttagtaactcgttctatagcgcaacttgcagttgcatctcaatctctgatcagtactatataaatatatatatatgtaacagctgctagctatagctagctgcgtacacatccatatgaatgtgtgtgtgttcatgcttgtactgcctcttgtagtatatgcacatatacgtgcaagtgcaacagacggctgctggctgatatattttgatcagcgcgccacgtgcacgtgcatacgtttcttc

SEQ ID NO: 4511 - DNA, 1174 bp, Oryza sativa
  ref <308>: DATABASE ACCESSION NUMBER: AK061824
  ref <309>: DATABASE ENTRY DATE: 2001-12-06
gtgtttggtaagcctcgtctcgaaatggcgacttgctccgctgcttgcgctcgcccagccgtcgtcgtcttcgcgtcgccggccgccgcgcggcggcgcgccgcctcctccgtctacctccctggtcggcctctgcgcggcggcggcgtcgtgcgatgcagcgctgggcctgtaagcggtgggatgatctcgaagaaggtggcggagctgtgggcggcggcgaggagcgcgtcgccggtggcggtgatcgccgcggtggccggagcggcggtggtctacaaggtggggtccagtctcctcgcgccgcctcctccgccggcgaggccccgggaggagcccagcgaggaggccccgccgcctccggagccggtgcaggtgggggagatcacggcggaggagttgctgcagtacgacgggtccgaccccgagaagccgttgctcatggcgatcaaggggcagatctatgacgtctcccagagcagattgttctatggacctggtggaccatatgcattgtttgctggtaaagatgccagtagggcgttggcgaagatgtcctttgagccacaagatctgactgatgatatatctggcctaagtttacttgaactcagtgcccttcaggactgggagtacaagttcagcagcaagtacgtgaaggttggaaccataaaaaaggtgctcgtagaacagggtggcgatagcactgccgatgcaatagaggaggcagctgtcgatggtgaagacagcatcctgactgctaagatgtctaatcaattactatatgaggaagaaatggaagtcggtagtgatgatccatgaaggcttcaggagttgaaaactgaattgccttctagcagctaacttcacgcatcaagaattcaagacaaataatcgcagaatgatgtttcatgaattcatgtgtctataggtgtagattacaagaagatactgcattactgctgtcgatttccctttgtcaatactcaaggatatgttgccgtaatgccatgttattagttggctgtcctgttcgtcaataatttcatatttctacctgcccacagaaccccttttcttggttacatgctaattcttcattctttcttgtattgctctccatgcattcttgtagcattgtccgccatgccattattggaacagcttaatactt

SEQ ID NO: 4512 - DNA, 1096 bp, Oryza sativa
  ref <308>: DATABASE ACCESSION NUMBER: AK104801
  ref <309>: DATABASE ENTRY DATE: 2002-08-28
acgacccaaccaatcgactcgcaccaccaccagcagctcaagcagcaacagctcaaacggaggaagatctcatcgccatgacgaccggcaatggcgacgcaccggtgatcaagaacgcccacagcgacatcgacagcaccaacaagacgctgctcaagagcgacgccctgtacaagtatgtcctggacacgacggtgctgccacgggagccggagtgcatgcgcgatctgcgcctcatcacggacaagcaccagtgggggttcatgcagtcgtcggcggatgaggcgcagctgctggggatgctgctgaagatggccggagcgaagaggacaatcgaggtgggtgtcttcaccggctactcgctgctggcgacggcgctggcgctgccggaggacgggaaggtggtggcgatcgacccggacagggagagctacgagatcgggcggccgttcttggagaaggccggggtggcgcacaaggtggacttccgcgaggggaaggggctggagaagctggacgagctgctcgccgaggaggcggcggcggggcgcgaggcggcgttcgacttcgcgttcgtggacgcggacaagcccaactacgtcaagtaccacgagcagctgctgcagctggtgcgcgtcggcgggcacatcgtgtacgacaacacgctgtgggccggcacggtggcgctgccgccggacacgccgctgtcggacctggaccggaggttctccgtcgccatcagggacctcaactccaggctcgccgccgacccgcgcatcgacgtctgccagctcgccatcgccgacggcatcaccatctgccgccgcctcgtgtgaggtcgagaccgagaccttaccggccgatccatccatcgctctcgcgtgattaattaacgtgtgttgctgtactcttctactgctacaactatactattacttccttaattgccgcttaaattttcctatacgtgtttcaatcaatgagattattatattcttcgagcatgagagagacggagttgtagggacatttgatgatggttgttactgtactacatgttgataagtgcaacatctctttccatggttgctactct

SEQ ID NO: 4513 - DNA, 1217 bp, Oryza sativa
  ref <308>: DATABASE ACCESSION NUMBER: AK061825
  ref <309>: DATABASE ENTRY DATE: 2001-12-06
agtagtagactagtagtagtagaagttgtgcgtttgtgttgttcttcgccggcgccgccgcccatggcctcttccatggccgccaccgccaccctctcgccgccggttttatccgccgagaggccgactgtccgcggcggcctcttcttgcccccttcgccggcgacctcccgctctctccgcctccaatccgcccgccgctgcggcatctcgccggcgaccaggaagccacgctccttgcctcgagcagccaaggttgttgtggctgtgaaggctgatcctttgaaggtcatgatagcaggggctccagcatctggaaagggaacgcagtgtgagctcatcaagagcaaatatggtctggtgcacatttctgctggagatttgctaagggcagaaattgctgcaggcagtgagaatgggaagcgagctaaggaatttatggagaagggtcagctggttcctgatgagattgttgttaatatggtgaaggaacgccttctgcaaccagatgctcaggaaaagggttggttgttggatgggtacccaagaagctattcgcaagcgatggcgctggaaactcttaatatccgacctgacattttcattcttttggatgttccagatgaacttcttgttgaaagggtagttgggagacggcttgatcctgtaactgggaaaatataccatctaaagtattccccaccggagaatgaagaaatcgcttcaaggcttacacagagatttgatgatacagaagaaaaggttaagctgaggttacagactcattatcaaaatgtagaatccttgctatcaatttacgaagatgtgatagttgaggtaaaaggggatgctttggtggatgatgtgtttgctgagatcgacaagcagctgacttctagccttgataagaaaacagaaatggtggctagcgcatgagcaaaagatctgtgccgattgaacgtgctcagattcacttattttatacttttccatgtagttggaaattggaagtatgggaattttggtttgaagaatcccattattgttgtagacaaatggaagtgacaaagcatcgacaggatgaatgttagaaatctttctatcatacctttgatgtacatgcatagctgctgtcctgtaaacacctctaccgaagaaatggttaggaatgtatttgatatacaaccctaatgaaagggttgacttcatttgattgt

SEQ ID NO: 4514 - DNA, 1175 bp, Oryza sativa
  ref <308>: DATABASE ACCESSION NUMBER: AK104802
  ref <309>: DATABASE ENTRY DATE: 2002-08-28
ctcgaggcccaggtgttcgtccgtgtcctcttctccactccacacacgcacacgcacaagccaagcagcaagcagcggcgccgatgagaggaggagtagctgggcccaccgccggcgagccgccggggacggaggcggaggcggaggaggtggaggagagctcagctggggacgacgaggagctggagctcgggctcagccttggctccaagaaacagcagcagcagcagcatgcgccgtgccgaatcctgacggccagggacctgcagccggcggcggcgctgtcaccggactcctccgtgtcgtcgtcatcccccgcggcggcggcggcggcgggggggaagagggctgagggccccaccgccaccacctcgcctgggacggttgcttccggccatccacacagctttggagtggtgggatggccaccgatccgacagttcaggatgaacagcctgttcaatcaggctaaagaaaacacatctgaaaccgacaccaagaagaccgccaccaatgaatctgatgtgcagaaggacaaggaggagggcgaaaagaaaggacgggttgctggatgggtgaaggtgaacatggatggagaggtcattggaaggaaggtggatctcaatgcgcaccgctcatacaagacccttgcattagcccttgaactcatgttcacgaagccgtccattggcctttgcgcttctcataatacaaactcgctgaaactactagacaactctgccgaataccagctcacctacgaggacagggatggtgactggatgctcgttggagatgttccttgggaaatgtttgtcagctctgtgaagaggttgaggatcatgaggacatcagatgcgaatggtcttggtcagcgataccagggaattcacagaaccattgcttcaacaagaggcagatcctgagagcgtgtgacaaggaaaagagctataccgctggtgaagcttggagcgtgcttgatggttaattacttgtccagttaaaatagcagaaggctagtaagaaagagccacagggctcacccggttctgttatatttttgcctttgtggtgcctgtttttgtttgcactgtcgatctgcaagagcatatggtcgccttgctctgcttgcatgtacaagtatgtctttctagtagtttttatggtgtttgatg

SEQ ID NO: 4515 - DNA, 1035 bp, Oryza sativa
  ref <308>: DATABASE ACCESSION NUMBER: AK061826
  ref <309>: DATABASE ENTRY DATE: 2001-12-06
ctctttggcggcggcggcggaagagagcgacgcagacggacggcgtggtggtctccccctccggcgacgtagctcgagctcgcaaccatggcgaggggattgaagaagcatctcaagaggctcaatgcgcccaagcactggatgctcgacaagctcggcggagcttttgcccccaagccatcgtctggacctcacaagtccagggaatgcctgcccctgatcctcatcatcaggaacaggttgaagtatgcgctgacataccgtgaggttatctctatcctgatgcagcggcatgtcttggttgatgggaaggtcaggactgacaagacctaccctgctggtttcatggatgtgatttccattccaaagactggtgagaactacaggcttctctatgacaccaagggtcgcttccgccttcagtccgtcaaggatgaggatgccaagttcaagctttgcaaagttcggtctgtccagtttggacagaagggcattccctatctgaacacctatgatggacgcaccatccgctacccggaccctttgattaaggctaacgacacaatcaagattgatcttgagaccaacaagattgttgacttcatcaagtttgatgtgggcaatgtcgttatggtcacaggagggaggaacactggtcgtgttggagtaattaagaacagggagaagcacaagggcagttttgagaccatccatgtggaggacgcattgggccatgccttcgccacccgtctgggcaatgtgttcaccatcggcaagggcaacaagccatgggtgtctctccctaagggcaagggtatcaagctcagcatcatcgaggaacagaggaagcgagatgctgctgctcaggctgctgcaaatgcttaaatacatttctatcttcaaaatttgagttttgtttgggttgacagaattttccatcctagttgaaatgtagttcacagtaatactgttaagttgcagagatgcatccttttctactgttatttcatgttatcgagccattttattgtgttc

SEQ ID NO: 4516 - DNA, 990 bp, Oryza sativa
  ref <308>: DATABASE ACCESSION NUMBER: AK061827
  ref <309>: DATABASE ENTRY DATE: 2001-12-06
gagcgaaccctagccctagcgccgccgccgccgccgccatgaagttcaacatcgccaacccgaccaccgggtgccagaagaagctcgagatcgatgacgaccagaagctccgggcattttatgacaagaggatctcccaggaagtcagtggtgatgctcttggcgaagaattcaagggctatgtattcaagatcatgggaggctgtgacaagcaaggtttccccatgaagcagggtgtgcttacttctggacgtgtccgccttctcctccacaggggtaccccctgcttccgtggatatggcaggcgtgatggtgagcgcagaaggaagtcagtccgtggttgcattgtcagccaagatctctctgttatcaacttggtgattgtaaagaagggtgataatgaccttcctggcttgactgacactgagaagcccaggatgaggggacccaagagggcatctaagatcaggaagctgtttaaccttgccaaggatgatgatgtccgcaagtatgtcaacacttaccgcagaaccttcactaccaagaacggcaagaaggttagcaaggctcctaagatccagaggcttgtcactcccctgactcttcagaggaagagggcgagaatcgcccagaagaagcaaagaattgccaagaagaagtccgaggctgccgagtaccagaagctgcttgcccagaggctcaaggagcagagggaacgcaggagtgagagcttggcaaagaggaggtccaagctttctgctgccaccaccgcataagacccctataagaccttaaaacattatagatgaggaagtgtttgtcgttgtgatggatagacatggtgctgctagtttttcttcggtaattggagcagttttctgtggacaagatgatgctttgtcacaatttttgagcacttgcagttgctatgtattctgatgatataacttgtgcctactattttcttggtttttgtgtcatttgatgtct

SEQ ID NO: 4517 - DNA, 1105 bp, Oryza sativa
  ref <308>: DATABASE ACCESSION NUMBER: AK104803
  ref <309>: DATABASE ENTRY DATE: 2002-08-28
actgcctgagaagccgagaccactacaagcagcaactagcttagctagctagctactggtgatcaggcacgagctagccggccatggcgaggcgtcgccatgcttgctttcttctcctgctgcctctgctggtgctgcagcttcttcttgctgggggaagcttggttgatgatcttcctgctgcaactcatcaggtgccgaggttagtagggccacagcgcaagttacagcagcttccaaacccaaggccacagccgcaaccattgccccagccaaacccaaatccacagccacaaccactcccacagccacagccacagccacaaccacaaccacaacctctgccacaaccgcagccgcaaccacagcctttaccgctaccaggcccacaaccattaccgcaacccggcccgcagccgaacccaaacccccaaccgttaccacagccaaacccaaatccccagcctttacctcagccagacccgaacgctccgccgttgcctctgccgcagcctaacccaaacaacccgcaacctctgccgcagccagaccctaacgcgccatcactacctctgccgcagccagacccaaacgcgccaccactgcctctgccacaacctgatccgaacgcgccaccacaacctttgccgcaaccagacccaaacaaccctcaacctttaccgcaacctgaccctaacgcaccaccacagcctttgccgcaaccagaccctaactcgccgccacagcctttgccgcaaccagacccgaacacgcctcctggccaacaaattaatgcaaagatatcatcacagccggattctattggtggagccagaactttatatccatacggtgtaatatacaatctcatgccattgtttagcctattcttctatatgttttgatagtaaggagaggcttattgttgtaaataagcgtgctgagttaccatttttagattgcatgtatatacacattgccatgttgataggtttgctatgttatcttttttttttgtttgagatggaggtttgctatgtactgcactggcttgtaccctgatatttttgtgtatgttaatacacacctatttacctctttgtgt

SEQ ID NO: 4518 - DNA, 1759 bp, Oryza sativa
  ref <308>: DATABASE ACCESSION NUMBER: AK061828
  ref <309>: DATABASE ENTRY DATE: 2001-12-06
agagatggagaactacaacagagaagaaggagatccatctacacatatatgaagaacacacgcaagagaaaacacagggcctcggcggaagggcacgccaacgtgtgcgcggccggccggccgaaggcggcgcagcatggcacaccaaaagtgtggcccgccgggggcgccgctcgatgctggaagatcaatctacccggagacgaaggctgcgacaagatcgacgccacgccgtccaggacgatttcatctaacattgtccagttcttctgtttatctctttctctctctacatgtatatttcaggctttcagcacatatatgcatggacagtcattcaactcccatcaatccatccattggcggcggctgcgccgaaggcagaacacggagggaggaagaacacgacggcacgagagaagccggtggctgccggccggcgcatccgacgctcggcgagggtacaggcggtcacccaagagacggcgccaggcgatcgacattcgtccagccatccctcttcctgatgagaaggtacagcacgccggccggcggctggacagaatgacagaggagagaggcagtgcacggtcatctacaccagcacgccaggccttctctttctttcttttttacagattgatcatggagtcgagggggcacagatgtagaaccacggcaaaagagaggatccatccatcaactcctggcatcaacaagatcgatagatcaacacacttccatcccgagaacactcaacacacataacacatccatcccgaaaacactcaacacacatctatccattgacgatcaacccatccacggtggcggcgagcgacttcggccggagcaccggcgtccggcaggagacgcggcgctctgatcatcggcaagcagagatcaatggctgctcaaggcaaaagaactaattagattggttccttcttttcttgttgcagaacatgcatgcatgcgtaggagatgtacatatgcgggtgctgttgctgccgtagtagttgcatcctctgtacgtgctccccgggaagtaatcgtatcggcgccaccgcccaccgctcatccgagtcgacgagatgctggttatccctggagtcgacaccgccaatcgagtcgccggtgatgcatccacctgaaactgcggcgtcgccgagatgccgagatgtcgggcgtcctcgctttgtcggctgcaagtttcaccgcggcggactgaccatgtcggagtcgtcgtgacgctgctctgctggggcacgccaggatcgccggaggcccggagccaccgtcgactgccaagactcctgcttccaccacgcacagcgtatcaaatcatggccgcagccctttcccccgacgcggccgatgttcggcgctgctactgttctcacgacggcgatactatcttcctcacgatggcagcggcgccgcgtgcagatgatggtggttatcgatctacatcaacaaatatcgtcgggctacagatcagatcggcgatcggcggcctcatgtacacacatcgcatggcagcaacacaagccgaagcaaagcagcagcatgccgagtcaactccattcagcaaatacatggtgtggcaacgtggccgaccaaccggagggtgacacatcatcaccatgcttcagtgccatgcataagaagttgtcaatgcgatggctaaacaaatcctgttgatttcaagctttttcaattcgatgctgagctgtggttaaatggccggctgccgtct

SEQ ID NO: 4519 - DNA, 857 bp, Oryza sativa
  ref <308>: DATABASE ACCESSION NUMBER: AK104804
  ref <309>: DATABASE ENTRY DATE: 2002-08-28
aagagaaggttcagagtagcacacgctgcaccgcgcgcagcctcgagctcgaggagagggagatttggccccccgatggcgaggccgagggcgccgctgctgcggcggatgctgctgctgtgcgcggtggcggcctcctgctcctactacctcctcgtcctccacgcgcaggcctccgtgccgccgcgctacgacgggttcgcctacggggacgccgccaccgccgcctggaaggacaccatcctcgtcgaggccttcctcgacccgctctgccccgacagccgcgacgcctgggcgcccctcaggctcgccgtcgaccgctacgcccccagggtctccctcatcgtccaccccttccccctcccgtaccacaccaattcattccttgcctgccgtgcactttacatagctaacaaattgaactcatcatcgacctatcctttgctggagctgttcttcaagagccagggtaagttctacaatgctgcaacatcctcactatcgagcactgttataagtggcgagatgtcaaagctggcagcacgggttgtcggtaattcggtgtctgagttccagtcaggcttcagcgatataaggactgacctagcagcgagggtttccttcaagtatgggtgcacgagaggagtagccggtgcaccgttcttctttgtgaacggattccttcagcctggtggtggatcgcctattgactacagcacatgggtcagcatcctggatcccctcgctgggcagcatggcgatagattagagatgttcacctctatgtaagtatttgaagcgtgttgtaaacttgtaataatgattttgggaatactaacagttcgtctatttgatgc

SEQ ID NO: 4520 - DNA, 1111 bp, Oryza sativa
  ref <308>: DATABASE ACCESSION NUMBER: AK061829
  ref <309>: DATABASE ENTRY DATE: 2001-12-06
tgcaatcacaagtgcaggtctggtgggatctgaaggcccgactaactcaggaccatttgatattacattcatgtcatgcctgccaaacatgatcgtcatgtcaccatctaatgaggatgaacttattgacatggtggcaacagctgcaatggttgaggacagacccatttgcttccggtatcccaagggtgccatcgttgggactagtggcactttagcatatgggaatccacttgagattggtaaaggagagattcttgctgaggggaaagagatagcttttcttggttatggtgatgtggtccagagatgcttgatagctcgatctcttctgttcaactttggcatccaggcaactgttgctaatgcgagattttgcaagccacttgacattgatctgataagaatgttgtgccagcaacacgatttcctaatcaccgtggaagaaggaacggttggtggttttggctcacacgtctcgcaatttatttcactcgatgggttgcttgatggcaaaataaagtggcgacccattgtactaccagacaggtacatcgaacacgcttcgctcacagagcagctcgacatggctgggttgactgctcatcacatcgcagcaaccgcactgacccttttagggcgacaccgagacgcacttttgttgatgaagtaagaaggaaaaatgagctagaaaagaatgaaaagttgtgcagcaagtttgagctggtagaagacagccaaattgctgtttcatggatattcttcagtctttcagaggaaactgagattgccatggcagatacagcctgtgtgcaccactgaaagagcttgcaagtttttatctgtgctccagatgcttactgtaatctgttcatgggggctgtacatactataaaccctgttttgatgatgattatgttaaaccctatcaagtgcttgtaacaggaaggggataatcatcttgctgatgtaaatactcgaggaataaatgtgctgtgtgtgtgtgtgtatgactccaagtgaagagagagctgtgtctaaattgtaatcgagtaacccttcagaactttggatgcagtgaatcctctctgaatgagatcataaaatgttg

SEQ ID NO: 4521 - DNA, 1664 bp, Oryza sativa
  ref <308>: DATABASE ACCESSION NUMBER: AK061830
  ref <309>: DATABASE ENTRY DATE: 2001-12-06
acacctccaaccattactttctgttccagtgttgcacacacctccggccatttgggcgtcatgaagcaaaccgtcgtcctgtaccccggcggcggcgtcggccacgtcgtccccatgctggagctcgccaaggtcttcgtcaagcacgggcacgacgtcaccatggtgctgctggagccgcccttcaagtcgtccgactccggcgccctcgccgtcgagcgcctcgtcgcctccaacccttccgtctccttccacgtcctcccgccactccccgcccccgacttcgccagcttcggcaagcacccgttcctcctcgtcatccagctcctgcgccagtacaacgagcggctcgagagcttcctcctctccatccctcgacagcgcctgcactccctcgtcatcgacatgttctgcgtcgacgccatcgacgtgtgcgcaaagctcggcgtgccggtgtacacgttcttcgcctcgggcgtctcggtgctgtccgtcttgacccagctcccaccgtttcttgccggtagggagacgggcctgaaggagcttggcgacacgccgcttgatttcctcggtgtttcgccgatgccggcgtctcatctcgtcaaggaattgctcgagcatccggaggacgagttgtgcaaggccatggtgaaccgctgggagcgcaacacggaaaccatgggcgtcctggtgaactcgttcgaatcgttggagagccgggcggctcaggcgctcagggacgacccgctctgcgtcccaggcaaggtgctgcctccgatctactgcgtcgggcctttggtcggcggcggcgcggaggaggcggccgagaggcacgagtgcctcgtctggctcgacgctcagccggagcacagcgtcgtgttcctctgcttcgggagcaagggcgtgttctccgcggagcagctcaaggagatcgccgtcggcttggagaactccaggcaacggttcatgtgggtcgtgcgcacgccgccgacaaccaccgaaggcttgaagaagtacttcgagcaacgcgcggcgccggacctcgacgcgctcttcccggatgggttcgtggagcgtaccaaggaccgtggcttcatcgtcacgacgtgggcgccgcaggtggacgtgctccgccaccgggcgaccggcgcgttcgtgacgcactgcgggtggaactcggcgctggagggcatcacggcgggggtgccgatgctgtgctggccgcagtacgcggagcagaagatgaacaaggtgttcatgacggcggagatgggcgtcggggtggagctggacgggtacaactcggactttgtcaaagcggaggagttggaggccaaggtgaggctggtgatggagtcggaggaagggaagcagctcagggctcgttcggctgcgcggaagaaggaggcagaggcggcgctggaggaagggggctcgtcgcacgctgcgttcgtccagttcctgtccgatgtggagaatcttgtccagaactaactgacgaaaatttgcagatgcccagcatcttggccacaagtgacgaaaattctcagatgctctttatttgcctggggaccgggggccctttcaacgataatcatttaagaactacttgtgtaccttatttgttgttaataaagcaacgtactagaatggccgcgatg

SEQ ID NO: 4522 - DNA, 1142 bp, Oryza sativa
  ref <308>: DATABASE ACCESSION NUMBER: AK061831
  ref <309>: DATABASE ENTRY DATE: 2001-12-06
taataaatactctggcaaaaggcctagatatacgccttggccacagggttgttgagattgttcgccacaggaatagggtggaggttactgtaagcagtggtaaaacatttgttgcggatgctgcagtcattgctgtccccttaggtgttcttaaagcaaacaccattaaatttgaacctaggctgccagagtggaaggaggaagcaataagagaactctcagttggagtcgagaacaaaataattctccacttcagcgaggttttctggcctaatgtggagttccttggagtagtttcatccaacacatatggctgcagctatttcctcaacctccacaaggctactggccatcctgttctagtttacatgcctgcgggtcggcttgcatgtgacattgaaaagctgtcagatgaggctgctgcccaatttgccttctctcagctgaagaagatcctgcccaacgctgccgagccgatacattacctagtgtcacattggggctcagacgagaatacacttggatcctacaccttcgatggggtgggcaaacctcgtgacctgtattagaagctgcggatcccagtcgataacctattctttgctggagaagccaccagtgtccagtacactggcacggtgcatggcgccttctccactggtctgatggcagctgaggagtgccgaatgagggttcttgagcggttcagggagctggacatgctggagatgtgccaccctgcaatgggggagcagaccgccactgtctcagtcccactgctcatctcccggctgtgaacagaccaggagctgcacaaaaattatagtcttctaaggccatttggcacttggcacccggcgagcgcactaagccattcccctgattgctcgaggaaggcagcattggagcaattatcttatttgcttctccttggcatgaggagtgtgctggtgcagcttgcggtgcgctaaataaagtcactgtgaaaatggagtgtgggagtctggtgtgtattgttgagtataaaatgagggagtcaatatgtagttaagcagggattacggacaatgtgagccatcattactgaacaagatggtgtatgtgtgacgaacaattaatttaaacgatcgatattgaaaatg

SEQ ID NO: 4523 - DNA, 1174 bp, Oryza sativa
  ref <308>: DATABASE ACCESSION NUMBER: AK061832
  ref <309>: DATABASE ENTRY DATE: 2001-12-06
cagaccaagatcgctgtacagcctagggctgatcaggtcctgagttcttgggtgcctgctcaatccgcggatcgacaaatcatagcatgccatgtcaacaaatacatcgcggtgtatactctccgcagtctcagtcccaggacaaggctgatgatgcatttgactcaggtggcgtaccatcattcatcagatgaaaaccatgaagcatgagcatcccccaagcatgggagcaacagttgcgtgaatacagttggttctgtgaaagcgccccacccaccgctgtacataaatcccaatcttctagcatagaactgtaaataccaatatccccagcggcgtcagtcgtcgacaacatttacaaagaaccagccatgatttcgccgatgtcaagctcacttcttgctcaaccagaatggtctgaaaacatcagtgtctgctgacctgcatgtaagccgacgatgacgtcagcgatgactcatgaggacctggagtaggattacccaacaatgctgtcatcagatgaagagagagagggtgtagacgacaatggcaccattgtcgtcgtcgtcgacggtgacatggcggctgccagtgttcaccattctgcgtgctgggtaggcgcacatgccgaaaatgggcgccagctcggccgggggccgggctgcctgggcgcaagttggtgtggaaatggagatacacttggagagttggggatgcgtgtggaggatgcactgcctttgtttcaagctgtttgtcttgctaggcaggcagaggcaattccgagaaacatttgggaaaaacttttggtctcacctgtgtttcctgcactgtcatgtccgggccctgctgctgttgctccatttccacatgtctgcgtcccggcaaatatctctactactactagtgaacactttgatggctttctttttttttctttctttctttctctgttcaatcctgtttcactcgtgcgtccaccagattcacctgttcatcggtgcttccagtttattggcaaaactctgcctttcttttggggcttgttggtaagtgctgtttgtgcactgtggttgagacaaattgttccttgcattgacgaacacctttttcgttcatatgctcaataagttactgcttttatttttgttaaattaatcacatgtccgtgcgttgt

SEQ ID NO: 4524 - DNA, 1546 bp, Oryza sativa
  ref <308>: DATABASE ACCESSION NUMBER: AK061833
  ref <309>: DATABASE ENTRY DATE: 2001-12-06
agcgagagcgagttagcgagcagagatccacggcccgcagcggcggcggcggcggcggcggccgaagcccatctggttacgcgagggagatggcagcggcggcgggaggagtcgccggcgagccgtcggggacgaggacgaagcagcttaaggtcgccgtgatccaccccgatctcgggataggtggtgctgagagattgatagtcgatgcggcttgtcagcttgcggtccatggtcatgatgttcatgttttcacatcacatcatgacaaaaaccgatgctttgaagagactgtttctggtccatttgaagttaaagtatatggagatttcttgcctcgccatattttttaccgcttccacgctatctgtgcatatcttcgctgcatttttgttgcaatgtgtgtgctactttggtggccctcatttgacatcatattagtagaccaggtttcggttgtgattccactgcttaaactgaaggcaaaatccaagatagtattttattgtcactttcctgatatgttgcttgctcaacatactaccatgcttcggaggttgtatcgcaagccaattgacatgattgaagaaacaactactggtatggcagatttgattctagtaaacagcaagttcactgcaacaacatttgccaggaccttttgcagccttcatgctagaggagtcgagcctgctgttctatatccagctgtctctgttgaacagtttcaggaacctcatgcttataagttgaatttcctctcaattaaccggtttgagagaaaaaaagaatcttggtcttgccatttcagcattttctctgcttcgctctgttgcttctatgctacctggtgatgctcgacaggaagtaaccttaacagtagcaggtggatatgataagcgtctcagagaaaatgttgaataccttgaggagctcaaaagattggcagcgagtgaaggggtttctgaacatgtcaaatttgtgacatcttgttcaacttctgaaaggaacgaacttctctccaactgcctttgtgtgttatacactccaaaggatgaacatttcggtattgttcctctggaagccatggccgcatataaacctgtaattgcatgcaacagtggtggtccagtggaaacagtcataaatgacgagacagggtttctctgtgagccctctgcccctgaattttcaaaagccatgctgaagctcgtgaacgatcacgatctagcagttaagatgggtaaacaagcaaggggccatgttgtgcagaagttctcaaccaagacatttggtgaccttctgaacagctatgtccttaatgtgtaccatcagaggattgagtgatccccaattcggtgtcggcaatgccgtggaacacttggaatagaccatcattttcatgttttttccttttcttttgttacttctgacttcgatgtacacgcatgcgatagagtattatatacggatgaatagtgaaaacgactttgtaatgttaccatttgtggcaatgacaggaaaaaatatatatttgggccgtctg

SEQ ID NO: 4525 - DNA, 1032 bp, Oryza sativa
  ref <308>: DATABASE ACCESSION NUMBER: AK061834
  ref <309>: DATABASE ENTRY DATE: 2001-12-06
acggtttccaaattccagcagtctctcttcccatctcatcttgcttcccctcccctcctcactaccatctactcccatcccatccgccgccaatccgccgctgcagccggcaccggccttcttccacgccggcggccggcacccggcaggcagagcctacacaccaggccgccctcctcctcctcctccccggccgccggtacctgaggggaagaagcttcgcagctcgggctctcacgccctgaggcgtccggagttcgatgtccgtttgcatctcatggatccgcatcacctgaaccgccccaccgccgatgacgctgccgccgccgacgacgactgggataatgatggctttgtgataccaagcttgagtgttgaagaatctgatcttggtgattgggaagctgcacaggtttctcgtcctcaaccacctccaaaggctaccaaggataccgagaagatatatcttggaccgcacggcgcaccgccatctcgagcaaagaagcaagaggacactgcagcagctgccactgggtaccgcgacaagagcaaggtgaaggaagctgatcaaaaggtgcttggaactggccgggacaacaaagggggcaataacttcaaccgctacaacaatgctggccaccatgtcaaggaaccctacaagagatccacttgaccttctcctctccactgaggcttgctccctgtgaaacttttctctctcctatatcaacacagcttgacgaagccaaatttacgcgatttgtcggtgtgatggatatcattgctggaattaggacaacctatcttgcagcggcatgtatacctgaactgtggccatgtacgtaccgtctgtttgctactctgggctggagcaatgcgtttgctgattttctttcgaatggaaaaatatgtgttgttccggatgtcgccgacactacaggtatctggagcattacaaagcagatccatgtctattccgtttgtcattgccatgattaatgtgcctaatacatcatcgtcgtcatctctagc

SEQ ID NO: 4526 - DNA, 1373 bp, Oryza sativa
  ref <308>: DATABASE ACCESSION NUMBER: AK061835
  ref <309>: DATABASE ENTRY DATE: 2001-12-06
gtcgcagcagcaacacaagtcaggggaggagagagaggccgcgccgccgcagatctgtggccgcgttagggtttcttcgccggaatcgagcgaggaagtaggagggagaggaggaggaggaggagggcgacgagtaggaggcggcggcggcggagatggacgtggtgaaggcggcgcagctctcggggcggacgctggagaaggtggtggtgcacccgctggtgctgctcagcatcgtcgaccactacaaccgcgtcgcccgcgacacccgcaagcgcgtcgtcggcgtgctcctcggcacctcctcccgcggttccgtcgatgtcaccaactcctacgccgtgccgtttgaagaggatgacaaggatccgaggatctggttcctcgatcataattaccacgaatcgatgttttccatgttcaagaggatcaacgccaaggagcatgttgttggctggtacagcaccggtccaaaactcagggagaacgacttggatatacacgcactattcaataactatgttcctaaccctgtcctggtgattattgatgttcaacccaaggagttaggaatacccaccaaagcatactatgctgtggaggaggttaaagagaatgctactcaaaaaaagtcaaaaggtgtttgttcatgttccttcagaaatagctgcccacgaggttgaggaaatcggagttgagcatcttctgagggatgtcaaggacacaacaataagcacgcttgcgacagaggtaaccagcaagcttgcagccttgaaaggactggacgcaaggctcagggagatccgtgggtacttagatcttgtaattgaagggaagctcccactgaatcatgagattttgtaccacttgcaggatgtgtttaatctgctccccaatctcaatgtaaacgagcttattaaagcctttgcagttaaaacaaacgatatgatgttggtcatatacttgtcttctcttatccggagtgtcatcgcactccataacttgatcaataacaagatgctaaacaaggagcatgagaaagccgaggattcgaagccaaccgccatacctagtgctgctgggagctgaatgtgctttatttgccttagattttggacccagtggaagccaaaagaattgtgacatgttagcatgatggcgtttgaaccaattgtctttgaccttggttttacactttcgatgtttatttcatgtacgataaggtcaacggcaaactttacattctgtgagcttaggtcatactacctcttgagctttcatcttgatcttatatacaatgtttcatggggtgcatcatgttttgtgatgcggattgtcgtacgattaacttctagtaaatgtttacttgacgc

SEQ ID NO: 4527 - DNA, 1053 bp, Oryza sativa
  ref <308>: DATABASE ACCESSION NUMBER: AK061836
  ref <309>: DATABASE ENTRY DATE: 2001-12-06
atctcgccgccaatagctcgccgccgtcgaaacccaaaatcttctcttcccgtacgtgagaagcgccaggtcgtcgtcgccgccatgggcgtggaggtgtgcgtcaaggccgccgtcggccacccggacacgctcggcgactgtccattctcgcagagggtgctgctgactctggaggagaagaaggtgccctacgagatgaagctcatcgacgtccagaacaagcccgactggtttctgaagatcagcccagaggggaaggtgcctgtgtttaacggtggtgatggcaaatggattcctgattctgatgtgatcactcaagtcattgaggagaagtacccaaccccgtctcttgtcacccctcctgagtatgcatcagtgggatcaaaaattttctcatgcttcacaacgttcttgaagagcaaggatccaaatgatggttcagagaaggcacttcttactgaactgcaggcactcgaggagcatctgaaagctcatggcccctttatcaacgggcagaacatttcagctgctgaccttagcctggcaccaaagctctaccatctccaggttgctctggagcatttcaaaggctggaagatcccggaagacctaaccaatgttcatgcttacacagaggctctgtttagccgcgaatctttcatcaagacgaaggcagctaaggagcacctgattgctggatgggcaccaaaagtgaatgcgtaagagcctgcccttatgctctggtgctgcttggacaccatgctgtttatctgatcggtccatgtcagtggtgggcactactactactcttgtgtagcttgggtgcatgattgggttggaataatgtagcctcatccgttgagtaccttgatatggttgttgcaagtgtgcactttttctatgaactatctcctgctggcttaagtcgaaaccgtgggtcggtttggccttatgttcaactaagagagtgcatatactgtaatggaacctttgctagtacaatatgttatatgaataatggagatgcagcctgcagctgctcttgcttgg

SEQ ID NO: 4528 - DNA, 1008 bp, Oryza sativa
  ref <308>: DATABASE ACCESSION NUMBER: AK061837
  ref <309>: DATABASE ENTRY DATE: 2001-12-06
agcaagccaacaacctcagtggagctcacccttatcccccccagctccagaaccttctcctctctcctctctcgctcgctcgcttctcgcggttgtcgtcggcggtagcgagctcatggcgtcggtgcagctgtccgccggcccgcgggtgtcagtgtcaccggcggcggcgctggtggcgatgccttcggtcgccgccgccgcatcgagggggcgccgcgggtaccgggggctcgtcgtgagggccgccacggtcgtgtcgcccaagtatacttctatcaaacccttgggagatagggtgcttgtgaagatcaagacctctgatgataaaactgttggaggaatattacttccaacatcagttcagtcaaaaccgcaaggaggacaagttgtagcagttggagaggggagaagcatgggcagcgacagcatagagatcagtgttccagttggtgcacaagttgtctactctaaatatgctggcacagagttggaattcgatgggtctgaccatctcattttgaaagaagatgacatcattggtattctcgacacagatgatgtgaaagatctgaagccactgaatgaccgtgttctcattaaggttgcagaggctgaagagaaaactgcaggtggtttgctattgacacaagcgaccaaagaaaagccttctattggaacagtgacagccgtaggcccaggaccattggttgaggatggcagcaggaaacccttgtcaatcactcctgggaataccgtgatgtactccaagtacgcgggaagcgagtttaagggtgaagatggcgaatatattgttctcagggtatccgacgtaatggctgttctttcctaagcagacaacgctcttgcgaaataggattttctttaagaaaacatgtgaaataggaattttgatatttagtcaaaactttgttgcactgctcttgcttggaaatggtgtatcgctgctattcctacttgatgtcactgcaaaatgcagagttcaat

SEQ ID NO: 4529 - DNA, 916 bp, Oryza sativa
  ref <308>: DATABASE ACCESSION NUMBER: AK061838
  ref <309>: DATABASE ENTRY DATE: 2001-12-06
aagtgcatcagcagcgagttccagccatggcagcagacaagggagtgaaggtgttcggcatgtgggcgagccccatggcgatccgtgtggagtgggcgctccggctcaagggcgtcgactacgagtacgtcgacgaggacctcgccaacaagagcgaggcgctgctccggcacaacccggtgaccaagaaggtgcccgtgctggtccacgacggcaagcctctcgccgagtccaccgtcatcgtcgagtacatcgacgaggcctggaagcacggctaccccatcatgccctccgaccccttcgaccgtgctcaggcgaggttctgggccaggttcgctgaagagaagtgcaacgctgctctgtacccgatcttcatgacgaccggagaggagcagagaaagctggtgcacgaggcccagcagtgcctgaagacgctggagacggccctggaggggaagaagttcttcggcggcgacgccttcggctaccttgacatcgtcaccgggtggttcgcctactggctgccggtcatcgaggaggcctgcggcgtcgaagtcgtcaccgacgaggcgctgcccctgatgaaggcctggttcgaccgggtcctcgccgtcgacgccgtgaaggcggtcctgccgccgagggacaagctcgtcgcgctcaacaaggctcgccgtgagcagatcctctcggcgtagagagcacggtcacttcagctccccagctagtacgtttcatctccatggtccatggttaaacaataagttcgtcacaagcacattgtgcagaagtagtagatgctcgaagcatgatccgtcttagagagacaaacttaatgctctatgatatgttatccagtgtacaatattgcctacttaattatttcctcaagaggaaaaatacagtacagttttgt

SEQ ID NO: 4530 - DNA, 972 bp, Oryza sativa
  ref <308>: DATABASE ACCESSION NUMBER: AK104805
  ref <309>: DATABASE ENTRY DATE: 2002-08-28
agctccgctccgctccttgcgccgccaagacgagtcgcggctgaacataacaggggaggggcggcgatctccctctccatctccatctccatctccatctccatctggcgagcagagcaggggaggggaggggatcctcacctggaaagtgtgggtaaagcgcagggcaacaagaaatggcagcattcctgaggtcaaaatgttcgtcagttggacgtaccttgatgggaggccttgggaacaatctatttggagccgttaactcatctgttgaaacggtgtcaagaccatctcattgtgatcctatctttcagcaaatcagaacattcatccagatgagaacaaacctaaaggtggtagacaactctggtgccaagcgcgttatgtgcatccagtccttgagggggaagaaaggagcgaggctcggggacactataattggatctgtcaaggaagcacagcctcgtggtaaggtgaagaaaggagatgtggtctatggagtggttgtccgtgctgctatgaagcgaggacgcaacgatggcagcgagatccagtttgatgacaacgcgattgtccttgtgaacaacaaaggcgagctgattggcactcgtgtatttggtcctgttccccacgaactcaggaaaaagaagcatctcaagatcctagcgttagcggaacacatagtttgagatgcttacatacctggcaacctacctgttagttctgcagaatgaaatgagcatggtgctgtctcaagagtattccaccgttgttttgatcagttctgtttgcaataatgtaccctcaaaagattaaatgagctgatgccctgcagtcagtcctagacaaatcagattctgtactactatttaacctctgtagtattgcattccattcagatggaaacgcatacattgcttatgttctcttgttaaacctgaaactgcaactgaactcttgtgctttctgatc

SEQ ID NO: 4531 - DNA, 1015 bp, Oryza sativa
  ref <308>: DATABASE ACCESSION NUMBER: AK061839
  ref <309>: DATABASE ENTRY DATE: 2001-12-06
taccccttccaatggggtacaccaatcttcactgcaggtcattcatttggaatgatgggtgctgtacttgtttctgcttttgagtccactggtgcacactttgcaactgcacgtctagctggtgcgacaccacctccagctagtgtccttagtaggagtgttggtttgcagggcattggaatgttcctagaaggtatctttggcgctccagctggttcatctgtatcagttgaaaacattgggcttcttggactaacaaaagttggaagcaggagagtgatccagatatcaactggatttatgattttcttctccatatttgggaagtttggtgctttctttgcatctattccattgccaatcttcgcagcaattttctgtatcttatttggtattgttgctgcggtgggagtctcgtacatgcaatttgtaaacaaaaattcgatgaggaacatatacatcattggactttcgctgttcctaggcatctcggttcctcaatacttccatgagtatactgcttctgctagcactggacctgcccgaacaaatgctggatggttcaatgacatcataaacacagtcttcgcctctggcccgacagtgtcactgattgtcgcatcgatcctggacaacacactggagtttagaggctacgaaaacgaccgggggcttccatggttcatgccgttcctgcaccgtcggaaaggttactcagatcctagaaacgacgagttctacagcttcccgatcagggtgcatgacgtcatcccaagccgattcctctgacgggcgagggtagcgcccgttacctgcgcttccgcgcatgtaaatctctttgttcttgttagcccttccttactcctgtgacatgtagcaattggcaccgccaagattaaaaagtctcaacttagtggggatatggtacaaatggttaggacttttggttttcttttctttttcctcccctttgggccaaccatttggttaattacatgatggtgtagagttggtt

SEQ ID NO: 4532 - DNA, 1914 bp, Oryza sativa
  ref <308>: DATABASE ACCESSION NUMBER: AK061840
  ref <309>: DATABASE ENTRY DATE: 2001-12-06
tctgctcactccaaactcccaatttaacagagagaggctctccactttggacctttttggagatggagctccatcaccatggaaccagcagcgtctgagagcatagcaatcagatgggttcaatctgatggtttttccccattctccagctgatggatgtacacaagaaacttctcctggcctccctcagctgtgtacttctgatccaagtagcatcgagtgatggcactgcagagggagttggaacaacaagctggacatgtgtatgcacagctcatccactaggtgaaccaaactcaaatagcagcttgtcgtcgaattgttcttcttcctgccattgtctacaagatgatgatggtggcacaggatcatggaactgcacatgtgcttctgacaaagcccttaaaaaagaacacactgcagtacatgataggggctgcttcacttcctgtaactgcacatccggaatttctcaggaaggaaagaagcacgtctctaacaaaacagtgatagttacactgctagtatgtgtgatcctcaccactattgcattccttggcaccacggcgtactacctgcgtcgcaaggatgcgctctctccacattcgcatgcatactcctttgataagtacaccagctggagcagcagatcaaacctcgtcagtcatcgatcttctcctcttccccaaccaaagccaaaaccaaggatcagtgtacttaaagagtttctgtgcagctgcaatccaatatgtggcaatgaaggtggtccgcttcccggtgtcatcgtcaggttctcctactcggaattggagcaagcaaccgggaaattttcagatgaacatctgatcggagttggaggaacaagcaaggtgtaccgtggacagcttagcgacgccaaggtcattgccgtgaagaagctcaggcccctcggaggcgcagacgaagacttcgagttcctatccgaggttgagctgctgtctcggctgaaccactgccatgtcgtgccattgctgggttactgcatggagagccagggccggcagctggagcggctgctggtgttcgagtgcatgggcaatggcaacctgcgcgactgcctcgacctcaagcaggggaggaaggccatggactgggcgacgcgcgtcggcgtggcgctcggcgcggcgaggggggtggagtacctgcacgaggcggcggcgccgcggatcctccaccgcgacatcaagtccaccaacatcctgctcgacgacaagttcagggcgaagatcaccgaccttggcatggccaagtgcctgatgaacgacggcgtgacgagctgctcgagctcgccggcgcggatgctgggcacgttcgggtacttcgcgccggagtacgccatcgtggggaaggcgtcgctcaagtcggacgtgttcagcttcggcgtggtcatcctggagctcatcacggggcggcgccgcggctgcgcgacagccggctggtggtggcggttcccgcaggaggagatgcagatcatggcgcacctggcgcgggagtgcctgcagtgggagcccgagtcgcgtcccaccatgagcgaggtcgtccagatcctcgccaccatcgctccttcctcccgcaagcacgccgccgccgccaccttggtcacccgcatcgggagaagcagcagcgccggcgacacgatgcacagcactaggttagccgtgaagtgcagcgtcggagagagttggcgatcgccggagatggaggaggagacggtggtggacttgacggagccacggctggagccggccatcttcttcaattagctagataggctaccaaattagttgcatgcatgtaatgtaatgctgctgctgctgtacagacagacaaattaacgaaaaaaatcaaatccatactaaacgctattgagaatcc

SEQ ID NO: 4533 - DNA, 1037 bp, Oryza sativa
  ref <308>: DATABASE ACCESSION NUMBER: AK104806
  ref <309>: DATABASE ENTRY DATE: 2002-08-28
ctagccacccccgcctcccccattctccccgccgccgccgccgccgtctcgccgccgacgaggagatgggtcgcgtgatccgcgcgcagcgtaagggtgcgagctccgtgttcaagtcccacacccaccaccgcaagggccccgcgaggttccgctccctcgacttcggcgagcgcaacggctacctcaagggcgtcgtcaccgacatcatccacgaccccggccgcggcgcgccgctcgccaaggtgacgttccgccacccgttccggtacaagcaccagaaggagctgttcgtcgcggcggaggggatgtacacggggcagttcgtctactgcggccgccgcgccacgctctccatcggcaacgtgctcccgatccggtcggtacccgagggcgccgtggtctgcaacgtcgagcaccacgtcggcgaccgcggcgtcttcgccagggcgtccggcgactacgccatcgtcatcagccacaaccccgataacggcacatccaggatcaagctcccctctggtgccaagaagattgtccccagcagctgccgtgccatgatcggtcaggttgctggtggtggcaggactgagaagccgatgctcaaggctggaaacgcctaccacaagtaccgcgtgaagaggaactgctggcctaaggtgcgtggtgtggccatgaaccccgttgagcatccccacggaggaggtaaccaccagcacattggtcacgcctccaccgtccgccgtgatgcacctcctggccagaaggttggtctcatcgctgcaaggaggactggtcgtctcagaggccaggccgccgctaccgctgccaagaccgacaaggccacttagagtgttacttattgttgctactatccatattcgctaccatgcttatcatcgctagattaaaggacatgtattccagtatggtcgtgctttttgcttggtactctggtcacatttgtgatgaatgttcgcagttttcgtggtcatggtctggattctacattccacctaaagaagtttttacctggt

SEQ ID NO: 4534 - DNA, 1070 bp, Oryza sativa
  ref <308>: DATABASE ACCESSION NUMBER: AK061841
  ref <309>: DATABASE ENTRY DATE: 2001-12-06
aagcctttcgagtcgtcttctccccttcttctcctcctcctcgattcggagctccacccgcagccatggctaagaactaccccgtcgtgagcgccgagtaccaggaggccgtcgagaaggccaggcagaagctgcgcgccctcatcgccgagaagagctgcgcccctctcatgctccgcctcgcgtggcactcggcggggacgttcgacgtgtcgtcgaagaccgggggcccgttcgggacgatgaagaccccggcggagctgtcgcacgccgccaacgcggggctggacatcgcggtgcggatgctcgagcccatcaaggaggagatacccaccatctcctacgccgatttctaccagcttgccggagttgtggccgtcgaggtgtccggtggacctgccgtccccttccacccaggaagggaggacaaacctgcacccccacctgagggccgtcttcctgatgctaccaagggttctgaccacctaaggcaggtcttcggtgcgcagatgggcttgagtgatcaggacattgttgccctctctggcggtcacaccctgggaaggtgccacaaggaaagatctggttttgagggaccttggacaagaaaccctctgcagtttgacaactcttacttcacggagcttctgagtggtgacaaggagggccttcttcagcttcctagtgacaaagccctgctgagtgaccctgccttccgcccactcgtcgagaaatatgctgcagatgagaaggctttctttgaagactacaaggaggcccacctcaagctctccgaactggggttcgctgatgcttaagaggtttctagtctactactgctagtacattgcccgtggtactcttgttttgcatctaggctagggccagtgtgaaccagcagactaccactgtgagtcgcctctgtaataaaatttgttcggcctatggccatcctcagtacgttgtcaatgtctcggtgggctgttatgctcaactgcaatgctgcatccactgaaacctctttctagatgtgttggtatgaaatgcggtattgcgttcccgatttcccc

SEQ ID NO: 4535 - DNA, 1174 bp, Oryza sativa
  ref <308>: DATABASE ACCESSION NUMBER: AK061842
  ref <309>: DATABASE ENTRY DATE: 2001-12-06
aagacaactcagagacagacaaggacgagcaacccgcaaccgcgaccagaggagaagactcgatcgaatcgaatcgaagcgggaggatttcgggggtccgtgactccgttcggagaaaaggattcagcttgtgggcagaagaagaagaagaagatggcttccgcgaaatccggggagagggggagcagcagcttcgccatggcctgcagcctgctcagccgctacgtcaggcagaacggcgcagccgccggcgagctcggcctcggcatcagaggtgaagccgatgcgaacaaggggaaggagaccatggagctgttcccccagaattccgggttcggctctgaagctgctgccgtgaaggagaccccggatgcgagggagcaagagaagcgccaattaaccatcttctacggtgggaaggtcctggtgtttgatgacttcccagctgagaaggccaaggacctgatgcagatggccagcaagagttcctccacagcgcagaactgtgtccttcttccatcttccgctactgcaaccgttgccgacaacactaaggtgtctgctgtaccagccccagcaagtgcacttcctgttgctcaggccaatgccccgaaacctgttcgtccaaatgctgctgatctgcctcaggctaggaaggcgtcgcttcaccggttcctcgagaaaagaaaggatcgccttcaggctaaagcaccctaccagggttccccttcagatgcttctccggtcaagaaggagctgcaggagagtcagccatggcttgggttaggacctcaggttgccgctcccgacctgagcttgcggcaggaatcgagccaatgaatcaatgctcaattctgagatgcccctctcatcagatgattcagtcatagaggttatcacaactcttgaattgggtgttttgtgttaggagatgatccgatgacaaggcgatgttcttctgatatatatactaggattgaatgtaaagaaagtagctgatgattatgaccagtaatctgaatcaaattgctatgatagaaagcagaagattctgtaatcagtacaacccaagaaacctcatttgtaccaattcaatatcgttttgctttggcattgccatgtagaagcaaagcaaatgtactgctaatatatacacatcacaagattgattgtt

SEQ ID NO: 4536 - DNA, 1088 bp, Oryza sativa
  ref <308>: DATABASE ACCESSION NUMBER: AK061843
  ref <309>: DATABASE ENTRY DATE: 2001-12-06
gtgtacagtgcttgcagcagaataccatggcccgctgcttcgtcctcaacaccggcgccaagatcccgtcggtcgggctcggcacatggcaggccgagccgggcgtcgtcggcaatgccgtctacgccgccgtcaaggctggttatcggcacatcgattgtgctcaagcctacttcaacgaaaaggagattggggtcgctctcaagaaagtgttcgacgagggcatagtcaagcgcgaagatatattcatcacctccaaactctggtgcactaaccatgctccggaggatgtcccggttgcactggacagcacgcttcaggatttgcagaccgactatgtggatctttaccttatccactggccagtgaggatgaagaagggcgccggctttggcgggcaaaacgtcctcccgaccgatatcccggcgacgtgggcggcgatggagaagctccacgactccggcaaggctcgcgccatcggcgtcagcaacttctcgagcaagaagctggaggacctgctcgccgtcgcacgcgtgccgccggccgtcgaccaggtggagtgccacccggtgtggcagcagaccaagctccgcaagttctgcacctccaaaggaatccacctctcagcgtactcgccgttgggctcgccggggacagcgtcggtgaaagcggtgggcaatgtgctcgcgcacccggtggtcgtctccacggcggagaagctggggaagacgccggcgcaggtggctctacggtgggggattcagatggggcacagcgtgctcccgaagagcacccacgaggagaggatcaaggagaacattgacgtctatgactggtccatcccggaggacctgttcatcaagctctctgaaatcgagcagatgaagctgatccgtggagaattctggactcacccggaaggcgtctacaaatcaatcgaagagctttgggatggcgaaatctaatgatcgacttggctggactgaagtttgctttcttcgtgtgggtgaaaaactggaaactgccattgctgcaaataaagtggggaaatgttaatcaatgaatgaataaaaggagtttaagtctac

SEQ ID NO: 4537 - DNA, 1605 bp, Oryza sativa
  ref <308>: DATABASE ACCESSION NUMBER: AK104807
  ref <309>: DATABASE ENTRY DATE: 2002-08-28
ggctcatgcatttgctagctagctcatcgtcgataccaatggcgactaccagggccacatcgacgctgctgctgctgctgctgctggtttcggcaacatgggcggcatcggcgccgacgacgagtcgggcgaggaacgtgataacacacgtgaaggggttccaagggaggctgccgttccacctggagacggggtatgtggaggtggacaacaccaataccgttgagctcttctactacttcatccagtcggagcgcagccccgccgatgaccccctcatcctctggatcaccggcggccccggctgctccgccctctccggcctcctcttcgagattggccctctcaagtttgacgtagctgggtacacggaagggttccctcaattgttctacttccaagattcctggaccaaggtgagcaacgtgatatttctggacgcgccggtggggacggggttctcctacgcccgtgaggaacaagggtacaacgtcaccctcacacagacgggacagcagctggtggtgttcctcaccaaatggctgggcgatcacccagagttcgcctcgaaccctctctacatcggcggcgactcctactccggctacaccgtcccagtgacggcgctccagatcgccaacgacgacgacgcccgggcgcggctgaacctcaagggctacctggtgggcaacgctgccacggacgtcaagtacgacagtgggggcaaggtgcccttcatgcacggcatggggctcatctccgacgagatgtacgaggccgcgcggagcagctgccgtggcgactacgtgtccaccccgaccaacgccgactgcgccaacgcgctgcaggccatcagcatggcaaccttcgccatcaacccggtgcacatcctggagcccatatgcggattcgcgctgcgcgggcgcgcgatgcctgagacgacgatggaccagcgcctgcgcctgggcctccccgtggagtgcagggacaacggctaccggctgtcgtacctgtgggcggacgacccggaggtgcgcgccacgctgggcatccacgagggctccatcgcctcctggagccgctgcacggcgctgccgctcttccggcacgacgtggacagcgccatcccctaccacgcggagctcacgcagcgcggctacagggcgctggtgtacaacggcgaccacgacctggacatgacgttcgttggcacgcagcagtggatccggacgctgggctacaacgtggtgaccgcctggaggccgtggtactccaaccgccaggttgccggcttcaccaccgtctacgaccacaacctcaccttcgccaccgtcaagggcggtggccacaccgccccggagtaccgccccaaggagtgcctcgacatgctcgacagatggacctctccggccggcgagctctgaattactttactatactaattcatcaccgtccgtatatatgtccgtttatgggaaatcttacccccttcataatttatctacttatcttttatcatgtcttatctttctcttttcttagcctatactacacacacttacttacaaaattcggagcatttgtgtggtctgtcgttcttttccc

SEQ ID NO: 4538 - DNA, 993 bp, Oryza sativa
  ref <308>: DATABASE ACCESSION NUMBER: AK104808
  ref <309>: DATABASE ENTRY DATE: 2002-08-28
agcagatgacctcgccgccgccgccgccgtcgtcgttgctccgccgcctcccgaccacgcgctgctgctgctttgcctccgcgtcgagcggctggagcgcgagtgcgagcgtgcggctcggatccctcggcgggaagcagcggcgggggcatcgcggcgtggcggtgatggcggcggcggcggcagggggaggaggcttcgaggcgcgcgtggcgcggatcgcgtccaccatccgcgtcatccccgacttccccaagccagggattatgtttcaagatatcacaacaatgcttctcaagccagatgcatttcgtgacacgatcgagctcttcgttgagcgatacaaggacaaagggatcactgtaattgctggtgttgaagctagaggattcatttttggtccgcccattgctttagcactaggtgcaaaatttgttccattgaggaagccaaaaaagttacctggtgaggtgatctcggaagaatattctttggaatatggtacagataaaatagaaatgcatgtaggagctgtggagccaaatggccgggccgttgttgttgatgatctaatcgctacaggtggaaccttatctgcagccgttaaacttattgagcgtgctggagcagaggttgttgagtgcgcatgtgtcattgaactaccagaactgaagggtcgggacaagctggggaacaagccagtttttgtccttgtgaaggcagactaagcggaatgaaacaactaagggcctctcaagttgtccctattaatatcagtgtccttctcgaagcatgttggaagcaactaagatatcggtcgtgacaatattagcttgttctatccagtgctctgcaataaaagtctcatctttaaatttgtaggcacatgagttatttgggaattcggacttgaatgatccttgtaatacatcaaaacacggcataattttttttaaaggagtgccaattattcatggggaatgagaatcacct

SEQ ID NO: 4539 - DNA, 1015 bp, Oryza sativa
  ref <308>: DATABASE ACCESSION NUMBER: AK104809
  ref <309>: DATABASE ENTRY DATE: 2002-08-28
agtggctcgccgtcgccgctgctcctctccaactccaacctcgcatcactccatgcgcgagctcgagctcagctgagtggacgatggaatgaggctcgtggctgccaaaccttgctgcctcttccgaatctcaagcgtcgccgccgttgcagccggtcgccgccggccatggcgagccgcggcggcgagcggcaatgcgcacgccgaagccgaaggcgatgaggacggccaatcgctgtcggcgagggcgaggggcaggcgggcgcggctgtcggcgaggcggcgggagaggatcgtggtggtggagggcggcggcgttgggggcatcggcgagttcctgcgtcagcccgccggcgtggagtcgctgctgaacacgagggcgctgcagagcttcgcggcggtggacgaggcgccgggggcgaacacgttccggtgcacgctgcagagcatcggcttcctcgggttccaggtcgcccccgtcctcgacctccgcgtcgccccgacatgccacgactgcaccgtcgagatgctctcctgcaggtttgagggttcaggctcagttgagcagcagaatgagctcttttcagcttttatgagcaaccatataacttggaaagacgatggtgaggaaccatgcttggacattgatgtcaatttggaggtcactctggaggtttacacgaagccattcagcatgcttccattgtcagcagtggagacaccaggcaacctgctgatgcaaggcctcctggacaggctcgtgcccttgctgggggagcagctgctgagagactaccattcgtgggttcagcttcagcagcagcagcctgaaatttcctcattagaaactgctgaaatcgatgcttcatagtcggatggcttcatcgaattcagagatttttagcgagacgaaagaattctgagaaaatatgttggatggtttggagaaaaattggttgccgatgtaactaaaaattgcagtttgtaatatagttccattatgactgcttcagtg

SEQ ID NO: 4540 - DNA, 1064 bp, Oryza sativa
  ref <308>: DATABASE ACCESSION NUMBER: AK061844
  ref <309>: DATABASE ENTRY DATE: 2001-12-06
aagtgaagctgtttctgtaggtgctgaccttttcaattcagagcaagctcaaaacaaaagactaggttcctgcggtctagccttacattatgcgaacataatcaatcaaattgaaaatattgtttctagaccactctctcttcctcctagtgctagggacaatctgtatcatggtctgccagtaacagtgaagtcagctctcagatcgcgattgcaatcagttaatgcccaagaagagcgtactgtagctcaaattaaagctgaaatgcagaaaactcttcgctggattctaccgattgctgaaaatacaataagagcacatcaaggttttggatgggtcggcgaatgggcaaaccttggttgcgaaatgaacaagaaatcaggctcccagctcagtatcacccgtgtccagactcttcattacgccgataaggcaaagacggagcaatacatgctcgatctggtggtgctgctccaccatttagttgtccaggtgaagaacagaggctatgggagcaagtcctcaaagcacgaccagtcccgatcccgcaagggaatggatcttcaacctgaatccaagctcaacacatctccagtgaacaacgccacatatccgagcccgttgtcggagtccgaacgcgagacgctggaccacctgagcttcaagaggacgggctacggtaggagcaagagctgcgagcctccacccaatagagggaagaaggcacatcgaacctgggattcatgccggagccatggcagctcgccggcgagggaattcggtaggaactcagcttcagagcttgacaagacgatggacctggatgtaatagatgggttagatagactgacttcttaccacccaacatcccccacattttgttaggtatatgctgcacaaaaataggtattcttttggtgttcctacggttgattgatcgtatatatatcttgtaaatgtgtgtgatctacctatatattctcttacatgtacatatatacatagcttagtagtacagccctgagtttgagtggaaatatagcaagatcacaagtgatgctct

SEQ ID NO: 4541 - DNA, 1070 bp, Oryza sativa
  ref <308>: DATABASE ACCESSION NUMBER: AK061845
  ref <309>: DATABASE ENTRY DATE: 2001-12-06
ccttgcttgttcctatctccttctacctctctctctccctggctttcttggtctcctgctcttgcggggcgtttgttggtttcttcgcgggtgaggtgaggcggacatgaagaaggctaaggtggtgttggctcagccggcggcgagggcgccgccgtcgccgctgctgccgagggcgccggggcacagccgtggcggcggcgttggtggcggggaagaggcgtacagggcgagggccaagtacaagaatcttctccaggactacaaggagctcctcgaggaaactgaagcaaagaagaagagattacagatggagaagctcaagaaacagaggcttttggctgaagtcaagtttttgcggaaaaggtacaaatccatgtccgaaaatccatcccagacgtttgtctatagagtaaagaatccggcattgccgcccacattgcggcaacctggttggtctcatggtgaagagtaccacacggttcgggctatcggaagctctagcaaaggcccatcggcgcaccggaggctgaatgctgctccaagagcatctccggtgattgacctcaacgaggcctgcgagccgagttcagaagagatggaggagcttcatggttaccaggaacctgttagggttggcagggtcatgaggtacccaatggagggtgattttgccgccggtcctagtgatgcgaaaatggcggcattctgggatgtccggaacgccgcctcctcccgagctgggaagaggaagatatcatggcaggatcagttagctctcagagtataggttaataataacagtgttgagatagttgggaagaggaactgaatttcgttcatccctgttcctcgagttgtaaaagaatccttaagaggaatcggtggatgggtgtaatgctcctggcacttgttgagatcgtagtcgtgtataatcaatcacttgtctgttttgttagcgtgaatgccatctcaacaactactctagggctaatagtatttgagcaaatgaataattaatacaaatgctgtctgatgccttgtagtaggtgctgcagctgcatatgttt

SEQ ID NO: 4542 - DNA, 1569 bp, Oryza sativa
  ref <308>: DATABASE ACCESSION NUMBER: AK061846
  ref <309>: DATABASE ENTRY DATE: 2001-12-06
tggtgctcgtattcagttgattccccaacatcctccggaaggtgttacattgacagaaagaactgtacgtattactgggaataagaagcagatagaagcggcaaaagatatgattaagcaagctatgagtcagacattttcaagacatggggctcaatctggtggatatggtcagcaaaactaccgccctcagggtcatggtgcagcttctcagtggggcccacgttctcaaccccagcctggatatggatatccaccaagagggcctccacctcagaacatgccatactcccaaccttatggtggctacccgcagcagccaccaccaagaggtggcatgggctgggatcagaggcagggccctccaccccatgcttcccaccatggtggcggttacgactactataaacagggttctcaaccatatgaaggccagccaccaaattaccctcctgggcctggaaactacaatagttatgggccatcacagggcccaaattatggacaacctcagtatccgcagtctgcacctccacagaactatgggccgggttatggtgatcctagatacaatgctccagcaccaaaccagcagtactatggacagcctccagcgggtccacagcaaggctaccctccacagcaagatccctacgctaggccttatggtggacctggacaatgggcacccagaggtgcaccagccggagatggcacttaccaggcgccaccacctacatcttatggcccaccatctcagcagcctcctgcttatggtcagacatatgggccaacgactggacctgatgggtattctcagcagagttacccacagcaaggtgcacaagcgccagcaacatatggtcagagtgcaccagcagggccagggtatgctcaacaaggcgcacaacaaggtggctatgcacagtatcctcaatcccaaccagcatatggtgatcaagcagctcaaaacaatgcaaactacggctaccagggtgctccagcagatcccaactatggaaatgcctacccacaggcaggatacggttctactccggctagtggccaggctggatatgctgctgcaccggctgctggccagccagggtacggtcagccaggatacactcagccacctacaaatccaccagcttatgatcagtctgcccagccaccagctcagagtggctatgctgcacctcctgcaaacccacagcctgctgttgcaaagggggtgtcaccgcagcctgctggatatggtggacaatggaccgcttgaggtttgtacctcattattgacagcaatgatctagttgaagactatgttttgcctcatgatgctgccgcttatatgaagtaggcggttgaatccccttgggatgttcattcagtaagcggtagacttttgatatgcctataagggatgtaaccccttgcctctccagttgttataccggatctctgtagtagttagtagtttgttaagatgacataaaacctcctgtttagtttaaaagtgaaccgaattatgtgttattctgcagcatgtcgactgatgtttggatgctt

SEQ ID NO: 4543 - DNA, 1101 bp, Oryza sativa
  ref <308>: DATABASE ACCESSION NUMBER: AK061847
  ref <309>: DATABASE ENTRY DATE: 2001-12-06
gggtttggcattgggggcgtcgcaggagccttgcccttggtcctccgccgcactcgcacctgcacccctcccccgccgatggcgatgaccccactccaccacacctgctccttcttcttccgaccacaaccctctcctagtctctcccactccccatgcgccgccgccgccgacgacgacttcttcaccgtcgactacgacccagaggaggagaaagaagaagacgaggagggttctccgtgggagggcgcggtggtgtaccggcgggacgcgtcggttcaccacctcgagtacgccaccacactggagcgcctcggccttggcgacctctcctccactcactctcgggcgcgcgccgccaccatgggaatcctcatcctctcctccaccaaccttaccggtaccaaggacgatgacaccccggtgctcgtctccctcgacgttgccaggcgccgcggccgcctccgcctcgacggcatcgtccgcactgtcatcaccctcggttgctatgggtgtgctgagccagcgcctcaaggtatatttgccaatttttccctcttactgaccgaagacagagtagaggaacctgatgtggttgatctcggcacgatatttgaagaagaacaaaccaaagctccttcgctaaccggaagccaagaagatggagacgatgaagatatagattgggatgaccggctgcatttcccagctggagaaaaggagattgatatctcaaagcacatcagggacatcattcacttggagatcacgctcgatgccctgtgcagtcccacctgcaaaggtctctgccttggctgcggcgaaaacctcaacaccagcagctgcagctgcaacgcagagaaacagcaggccaagaatgttcagcggcgagggcctctcaaagacctgttgaagccactgcaaaggtgatgtaaacaccgcacggcagattttatacggtgatatgtatgtaatactttgtaggagtattcgaagataatatgtttagatgataaacttcttctcgtcctcctttttgagctcatctcctactctactttttaagacggaaaaatagacgccatgacttgtctgtttgct

SEQ ID NO: 4544 - DNA, 1241 bp, Oryza sativa
  ref <308>: DATABASE ACCESSION NUMBER: AK061848
  ref <309>: DATABASE ENTRY DATE: 2001-12-06
atcaggatcaagctcgtctcgttgatcaatggcatcagacaagtgctcatcgtttctactagcagcggcagcggctgcagtgctcgtcctcgcgtcggcgccggtggctcattcgtggagcaaggagggtcacatgctcacatgccgaatcgcgcaggatctgctggagccagccgcggcgcacgcggtgaggaacctgctgacggaggaggcggacggcgacctgtcggcgctgtgcgtgtggccggatcaggtcaggcactggtacaagtacaggtggacgagccctctccacttcatcgacacccctgacaaagcctgcagcttcgtctactcaagggattgccatggcgcggatggtgcggaggatatgtgcgtcgctggcgcgatcgcgaacttcacctctcagcttatgcactataatcacggcagcgccgatcgcaaatataacatgactgaagcactgctattcttgtcacacttcatgggagatgttcatcagccaatgcatgttgggttcacgagcgaccaagggggcaatacgattaatctacgctggttcaggcacaaatccaatctccatcatgtgtgggatagggagatgatactcacagctattgctgaattctacggcaaggacatggatgcgtttcaaaaggaccttgtgcacaacttcaccacgggaacgtggtctgatgacgtatcctcttggggagactgcgaggatctcctgtcttgctcaaccaagtacgctacagagagcataaatttggcttgcaaatgggcgtacaacgatgtccgtgaaggcgaaactctgtcagatgactacttcggctcacggctcccgatcgtgacacgacgaatcgcgcaggggggagttaggctggccatgttcttgaatcggctcttcggggagcacaaccgtgacgtcgcatcaccagcctgaactgatagctgcttcagaattcagaaaattcagaagttaaccacacgtgtaatctaacggccgcatccatttcattttatttttacgtgatacgtgactctatttttacgatgaatagttgatgccaacaatgctgattaattaaccacatagtaatacaagtaagcaacgcttgaaatcaacaggacatagcaaaccaattccattcttttctgatcataaagagatgtacatccacatgtatgattaattgtatctagacaagattcaatgactatactactctcattgcacc

SEQ ID NO: 4545 - DNA, 1029 bp, Oryza sativa
  ref <308>: DATABASE ACCESSION NUMBER: AK061849
  ref <309>: DATABASE ENTRY DATE: 2001-12-06
gtgcaacctccgcgacgccaagaatctctccccgtcccgcaccgtcgccatggctgccgcggccgccgcaccggcaagctctgagaaggaagtgctccccccttccctgacctcctcatcggagccccctcccctcttcgatggaaccaccaggttgtacgttgcgtaccactgcccttacgcgcagcgcgcgtggattgccaggaactacaagggtttgcaggataagatcaagattgtcgcgattgatcttgcagacaggcctgcttggtacaaggagaaggtttacccagagaacaaggtaccttcacttgagcacaacaatcaggtgaaaggagaaagcttggatttggtcaagtacattgacaccaatttcgaagggccagcattactccctgatgattctgagaagcagcagttcgctgaggagcttcttgcgtacactgatgcgttcaacaaagcatcgtactcatccatagtcgccaagggagatgtgtgcgatgaggctgttgctgctcttgacaaaatagaagctgctctgtcaaagttcaacgatggcccattcttccttggccagttcagcttggtggacattgcgtatgttccatttattgaaaggtttcagatattcttttctggtataaagaactacgatatcaccaagggccgacccaaccttcagaaattcatcgaggaagtgaacaagattcatgcctatacagaaaccaaacaggacccacagtttttgcttgaacacacaaagaagcgtcttgggattgcctgaagatgtgaccaaggatgaacccacaacaacctgcgatggagacagggagctggtgcagtatatagtagataaagactagtgtgcttcattttagcatatggtttatcttgaataagataatgcatgtcatgcagaccatgcttatggaacaaactattatgtatttttggtttggctgtgtacagctgttaatgtgaatttcccgtcatataattaattacaagcttcgcggggcgttgtctaat

SEQ ID NO: 4546 - DNA, 1202 bp, Oryza sativa
  ref <308>: DATABASE ACCESSION NUMBER: AK061850
  ref <309>: DATABASE ENTRY DATE: 2001-12-06
atcttactctagcttctccattccaaaattcaccaccgccggcgccgccatctccattccaaaatttgctctgcgtcgagtcgtgtgatcgatcgatcgatcgaggtgtacgtgtgcgctgctggggaaaagggaaatggatccgtcgggcgccttcttccacgcggctccccggagcggctcgaatgtgtcgctggcgtcgctggcgaggacggccggagggaggaggatgatgcacagggtcttccgcggcgtcatcaccttcatcttcgccatagctggactgtttcttggagcggtgactggcgggctgatcgggctggccaccgagagcggcctcttccgcggcaccggcatcggcgccatcaccggcgccctcgtctccatcgaggtcgtcgactcctccatccgcgtctggcgatcccgccgatccgggatctccagcatctgctatgtgcttaatgtgatctacagcctcctgaccggcaggcttgtccgcgagaaggtcgatccggcggtgcagcgggtagtccggagccagatgaatgcagtggattcatcgcccttcagggagtcccctgacctgttcgagatcgagggcaccaacggcatgccacgggcatccatcgacaagctcccggaggtcaggatcactgaggagtacaggaggaacgccattggtgacctctcgggatgttcagtttgcctccaggatttccagacaggtgagaaggtgaggagcttgccggattgctggcacgtgttccatgtgccgtgcatcgacggctggttgatcaagcatggatcctgcccgttgtgccggaggaagctgtgagatcgacgacgacgacggccatggtgatcactgctatagttgtagcagaaggaggaggaggctgctctgctttcttgctgtgtgctgcgatcgagttgtccatcagtgttgctgttcttagagaagaagactgacatctctctctctctctatatatatagaaaacccttaatctatagagcattttgtttctgcttatattgctacatgctctatctttttggttgaactatctacatatatatctatatttctatctactcactcctttctccttatgtaacatacctctcaaaactctgaactggcttgtgctgatcatctgatgtataatatataatatataaatatatatcgccccttggac

SEQ ID NO: 4547 - DNA, 1141 bp, Oryza sativa
  ref <308>: DATABASE ACCESSION NUMBER: AK061851
  ref <309>: DATABASE ENTRY DATE: 2001-12-06
ccaaagatgctgagggagttccttgagggaactgagtccactggtttcatgtacccaagtgcagtagaccattttaaaaaacagtttgcataccttgaagaacattatgccaagggatcaacagcagctccacctgagagacaacataactcattaccaaggccttgtgttgtctattcagataaccggccacaaagcacagccagtgtcactgaggatctttccaggtgtttaatcagagacaacaatctaaaatcacaggattctgcttcagtcggtgcaagcagaatccctcaaggtgctgctgcaagacctggtaaagcagttggttcggtgctgcgttacggtaactgttcgacatccgctgctgagcaacaatatgagcagcgaagggttgttcggaacccagcaattgctccaaacagcagtgttcctctggggagctcataccccagaagaaaccagacctgcaagagtgaaacaggtgatgttgaaaggatcgattccagccaaaccggtccaccgaagccatatgtggcgaacaaactgcctgctaccgtcgatggtcggagtggccactggtaaatttctgcagcgcaccagcgaaaacgctagttattaccacagcatcagcatgggtttattgttctatgtagtaaattcttagacatttaaaacatgtcattctgtacagacttgtattgtttcttgggggcttttccatgataaaaacagtagaattgtactgcaagccctagtggattaggctgcctgtttcttcatttcttcatagctcaacctctgaatgatctggtacacaaacaagatctcatggaattggacatcacatgattcagttcgaagggggtatagtggaaactggaagcaacaagtggactgtaacattttcttgctgagaaaacaagggactctttactgacctgactgatgctgctattcaatttattttccaagtaaatccgaagaaggatcatgtaaacagcacaatgttggacattgctttagtatttcgttctcaggaacattgttccctttgcagagctaggagctgcaactatgtactactatctgacattgctgtaacttgtaaaacttaattgcatttcaagtattttccctc

SEQ ID NO: 4548 - DNA, 1415 bp, Oryza sativa
  ref <308>: DATABASE ACCESSION NUMBER: AK061852
  ref <309>: DATABASE ENTRY DATE: 2001-12-06
agctttccccttcccgaagcttcgccaatctcccctcctctctctctctctctctcctccccgcggtcgccgacgacctcgccaccgaccccgccgccggacgcgaggaagagacggggggagccccggaggcaggagcggcgggaggggatggcgatgcagacggggttcgccacctccaaggtcctcatcctcgtcggcgcagggttgacgagctcgatcgtgctgcggaatggccggctatctgacgtgttggcggagcttcaggagcttatgaaaggtgtaaaccaaggagaaggttcgagtgcctatgacatcgcccttcttcaatctcagattcgaaatttagcacaagaagttagagatttgactatatcaaggcctattaccatattgagtggcaactccgactctggaggcagtttatcctcctacatactgcctgcagctgcagttggagcaatgggttactgctatatgtggtggaagggattgtccttatcggatgtcatgtttgttaccaaacgcaacatgaccaaagctgttgagagtatgtcgaagcaattggatcaagtgtcttcagctttagctgcaacaaaaaggcatctaagtcagcgcctggaaaatttagatgggaaaatggatgagcaagtggaggtctccaaaattattagaaacgaggtgaatgatgtcaaagatgatctgtctcaaattggatttgatattgcagcaatccaacagatggttgctggattggaagggaagatcgagttgcttgataataaacaggatgcaactaatgctggtgtatggtacctctgccaaatagctggaggtctaaaagatggaataaatgccaagttttttcaggaagctaatgaaaaactcaagctcacagagttggctcagtctgaaagaaaggcagtgaaggggcttgaatctgttctggagagcagaaaggaacaaaaggcaatcgactccaaacaaaataccaccgcgataattgacgccgaaaagcccgtgaaaacggtcgatgggcctgtgaaaagcggcgcggtgcacaggtgtagcagaatctcatttcggaaggaaggcctcgctttgtgatcaaagcaaagcgatcgtaaccagcccgctctcgcgatgtacattgtctgcctgattgttttgttcgattaaaaaaaatataaaataaaacctgtacctggagttattttgagtaggcaggttgatgcactattctgattcaaaagtgtatgtggttcaatccacgtacgctctttttcttggattttgattcatgtgatctcatttatttttatttggtgtgaatgtttgtacacagttggttcgaaacattccttgtgccattgtgagagttcccttcggcctgcatgcccttgtcccatatgtcc

SEQ ID NO: 4549 - DNA, 1581 bp, Oryza sativa
  ref <308>: DATABASE ACCESSION NUMBER: AK061853
  ref <309>: DATABASE ENTRY DATE: 2001-12-06
gctaccacgcgtgcccccagacgtatcagtcggcctcacgcccgcgcgcgccatggatatattctctccagctcggcccagttggacatttcgatcggatgagtacgatcgagttgcgtgctcctgatcatatcgctgcctctgcaccggcctagccaccagcagcaagcaggccatggggagccgaggacgacgcggcggcggggagagagagacggagacggaggaggatgagacgtggaagctgcgggtgggcgacgacttcaccgtcccggagcgcttccaccgcaagccccccttcttctccaggatcttccccgccggctcccatggaaagcatcggaaaattgcaaaatactacaagaagcaggaaaatctcctgaaggatttcagcgagatggaaaccatgaatgagattggttccttagatcagaatgctcctactgaggaagagttgaggcaaatggcaaagggcgaacgattggccatcaacctgtcgaatatcatcaatctgattcttttcattgggaaagttcttgcatcagttgaaagtttatcgatggcagtaatagcatcgacactggactccctactggatcttttgtcaggtttcatactctggtttactgcacatgctatgaaaaagcccaacaagtatagctatccaattgggaagagacgaatgcagccagtgggcataatagtatttgcatctgtaatgggtacacttggcttccaagtgctaattgaatccgggcgtcagcttatcacaaatgagcaccaagtgttcgaccacaggaaggagctgtggatgatcggcagcatgtcctcagtcgcagtggtgaagttcttcctgatgctctactgccggtcgttcaagaacgagatcgtgagagcctacgcgcaggaccatttcttcgacgtgatcaccaactcggtcggcctcgtcagcgcgctcctcgccgtccggtacaaatggtggatggatccggtcggagccatactgatcgcggtgtacacgatcacgacgtgggctcggacggtggtggagaacgtggggacgctgatcggcaggtcggcgccggcggagtacctgacgaagctgacgtacctgatatggaaccaccacgaggagatccggcacatcgacacggtgagggcctacaccttcgggactcactacttcgtggaggtggacatcgtcctccccggcgacatgccgctcagccacgcgcacgacatcggggagtcgctccaggagaagctggagcaactccccgaagtcgagcgcgcctttgtgcacgtcgacttcgagttcacccatcgccccgagcacaaggccgaggtctgaattctcatttatgcaaattttctcttcacttcacttcacttctgtttctgtttggcttgtacaagtcatcgtttccctgtgaaacccacaaggatgtcagttttactaccactgtctctgtagtctttaagtagctgtgggtgaaactgaattcttgttgttcttgttttattgagaagagaaaactgatcgaattcttctagtggattatatacgctgtcttttgctgg

SEQ ID NO: 4550 - DNA, 949 bp, Oryza sativa
  ref <308>: DATABASE ACCESSION NUMBER: AK061854
  ref <309>: DATABASE ENTRY DATE: 2001-12-06
acacgctttggagcgaacagtccaaggagcagagcagccttcctcttcctctcttctccgatcggaagcaggcgcggcggcggtagcggaagcggcagtcgccgtaggagcggatcgcgatgggagcggagtgcaagtacgaggtggcgcaggtggcgtacgtcaagctcgcgctgcacgccctcaagcaccccgccgccgccgtcaacggcctcctcgtcggccgcctcctcgacggggccgcctcccccgccgccgtcgtctccatcgccgacgccgtgccgctctcccaccacccgcaccacctcccgctgctccccaccctcgagctcgcgctcacgctcgtcgaggaccacttcgccgcgcagggcctcgcggtcgtcggctactaccacgccaacgcgcgccgcgacgacgccgacctcccgcccgtcgccaagcgcgtcggggaccacgtcttccgcaacttcccccgcgccgccgtactcctgcttgataacaagaagctggaggaggcagtcaaggggaagagtcgcgagccagtcgttcagctatacactagggattcatcaaaaagctggcgtcaggccggatcagatggaagtagtcagctgactttaaaagaaccatcaaccaatatggtcttagccgatcatgttacaacgaagaaatggcagcaagttgttgatttcgatgaccacctcgatgatattagcaaagattggttgaacccagggctacttgcttgaaataattatgtgctttgatatttttatacttgttggtaccaatatgttgaggctcgtctcaccagattattgcggttctctctatagctagacgagttatttgacagggtttgtacttaaatatggacaagtaatttttgtaacaaactgtagcatgtgaaaatgcttagatctgcattaagattactggcgttcatgcc

SEQ ID NO: 4551 - DNA, 1612 bp, Oryza sativa
  ref <308>: DATABASE ACCESSION NUMBER: AK061855
  ref <309>: DATABASE ENTRY DATE: 2001-12-06
gttttgttttcccctccgactccgactccgatcgatctccaccccgaatccctcctcctcaccgccggcgagcttccggctgcggcggagatggccacacgttattggatcgtgtctcttcccgtgcagactcctggctccaccgccaattctctctgggcgcgcctccaggactccatctcgcgccactccttcgacacgccgctctaccggttcaacgtccccgatctccgcgtcggcacgctcgactccctcctcgccctcagcgacgatctcgtcaagtccaacgtcttcatcgagggggtctcgcacaagatccggaggcagatcgaggagctagagcgcgccgggggtgtcgagagtggggctctcaccgttgacggcgtccccgtcgacacctacctcaccaggtttgtgtgggatgagggcaaatacccaacgatgtcaccgctcaaggagattgtcggcagcatccaatcacaggtctccaagattgaagatgacatgaaggttcgaggagcggaatacaataatgtaaggagccagcttagtgcgatcaacagaaagcaaactggaagcttagcagttcgtgatctttccaatctggtaaaaccagaggatatggtcacatcagaacatctagtgacactccttgcagttgttcctaagtactctcaaaaggattggttgtcaagctatgagtcccttgacacatttgtggtaccgagatcgtctaaaaaactttatgaggacaatgagtatgctctctacacggtaacattgtttgctaaggttgttgacaactttaaggtccgtgcacgtgaaaaaggtttccaggttcgcgattttgagtatagttctgaagcacaggaaagtaggaaggaagagctggaaaagctaatgcaagaccaggaagcaatgagggcatcacttctgcaatggtgctatgccagctacagtgaggtattcagttcctggatgcacttctgtgctgtgcgtgtctttgtagagagcattcttagatatggtcttcccccatcattcctgtctgctgttctagcaccttctcaaaagggtgaaaagaaagtaaggagcatcctggaggaactctgtggcaatgtccatagtatttactggaaatctgaagacgatgttggtgtagctggtctgggaggtgaaaccgaggctcacccctatgtttccttcacaataaattttatctgagcacagtatgttccttgctacctgtggccaggcaaggcagtgttttggagtaattactactttggcaaacaaaaaaccagcgaatggttcggtgtatattataattgtgatacgtcaattctttcttgatttatttacccagcttatatgatcctgtagtttgaaccgatcaataatgtagctttttgggggaacctggactattttcctggcacaatagggtatctgtttggactattttatccccggcaactacaatattccaactgtttcctttagtatatctattgtgctttgagagcaccgtgtaagatgttgtggatattatgtttttgtaactttgagcagccaggttcgtaataaaagatcaatataaataattcaggtc

SEQ ID NO: 4552 - DNA, 1284 bp, Oryza sativa
  ref <308>: DATABASE ACCESSION NUMBER: AK104810
  ref <309>: DATABASE ENTRY DATE: 2002-08-28
ctccttccctcccgccgttgccaaccacccccttcccctcccccctcgccctcgccgccggcggccgtctcgtcgtcggtgagacctagagagccaaacagcgcgttggttgttgagctcggagagggagagagagagagagagaggatggaattggagtcggagcagcacggctgcgagcattacacgaggggatgcaggatcagggcgccgtgctgcggcgaggtgttcggctgcaggcattgccacaacgaggccaagaattcgctcgagatccatctcaatgaccgtcacgagatcccccgccacgaaatcaagaaggttatctgctctctctgcgacaaagaacaggatgtacaacagtactgttctggttgtggggcatgcatggggaaatacttctgcgaaaaatgcaacttctttgatgatgatgtctcaaagaaccagtatcactgcgatggatgcggcatatgcagaactggtggtgtggataagttctttcactgcgacaaatgcgggtgttgctacagtaatgtcttgagggattctcatcactgtgtagaaggagcaatgcatcacaactgtcctgtctgcttcgagtacctatttgactcgacgaaggacatcagcgtcttgcactgcgggcacacgatccatctggaatgcctgaacgtgatgagagcgcatcatcacttcgcttgcccggtgtgctcacggtcggcctgcgacatgtcggacgcgtggaagaagctcgacgaggaggtggccgcgacgccgatgccggagttctaccagaagaagatgatatggatcctctgcaacgactgcggcgcgacgtcgaacgtgaacttccacgtcctggcgcggaagtgccccggatgcagctcctacaacacccgggagaccagaggctgcggccgccctgcagccgcgcgctccacggtttgatttcagcagcaggagcagcagcagcagagacgagttggcatccatctcacaaactaaggatgaaatcgagagcgacaaacaagatgcagagacggcttcctctgaacttagccgtcgagcaaaagctgcaaaatcgatcggcgtcgagtttggtagacacactttgcgccaagaggagtatggtgattttggcgcagtatgcagcgagttgaatagcccatatatgttgtgttttctctctctctcttttttgtgaggatatatgttatgttttgaaactccaactattattattactaaatgatactcctaataaaagagagacatcttctcaag

SEQ ID NO: 4553 - DNA, 1138 bp, Oryza sativa
  ref <308>: DATABASE ACCESSION NUMBER: AK104811
  ref <309>: DATABASE ENTRY DATE: 2002-08-28
gctcgctcccgatcacaccgtccgccaccggaagagagagcccccctacgacgacgacgaccatggcgctcgcctccacctccgccaccgcgtccgcggccgtgctcaagacgcccttcctcggggcgaagcgcgcgctcgccaatgccgtcggcgtcgcgggcgccaagcccgcgccgcgccgcgcgctcgtcgtgtcggccaagaagtcgtggatcccggccttcaagagcgacgccgagttcatcaacccgccgtggctcgatggctcgctccccggtgacttcggcttcgacccgctggggctgggcaaggacccggcgttcctcaagtggtacagggaggcggagctgatccacgggcggtgggcgatggcggcggtgctggggatcttcgtcgggcaggcgtggagcggcgtgccgtggttcgaggccggcgcgcagccggaggccatcgcgcccttctccttcggctccctcctcgggacgcagctgctgctcatgggctgggtagagtccaagcggtgggtcgacttcttcaacccggactcgcaggcggtggagtgggccacgccgtggtcgcgcaccgccgagaacttctccaacgccaccggcgagcagggctaccccggcggcaagttcttcgacccgctcggcctcggcggcgagaccagggacggcgtctacatcccggacaccgacaagctcgaccggctcaagctcgccgagatcaagcacgcccgcctcgccatgctcgccatgctcatcttctacttcgaggccggccagggcaagacgccgctcggcgccctcggcctatgagcaatcaaccccgctctcgctcgccatggatctgacacacagagttgggtttcgcttgcatgcgcgcttcgtgtttgatcgctagctgttgcatcgatcgggcgcgtgcatgggctcggatcgaacgattggaggtcggaggagcagtagcaaaatgtatcttgttgtgttcgtggccgcttttgggttgggtggtgtgcgtgaaccaaatgggggaattaatcaaggagttatttttttttatttttcttcccagtgtatgtaccatatgtaatatatataattaaggctgcaggatgagcaaggatatttcattg

SEQ ID NO: 4554 - DNA, 1032 bp, Oryza sativa
  ref <308>: DATABASE ACCESSION NUMBER: AK061856
  ref <309>: DATABASE ENTRY DATE: 2001-12-06
acctgatttcaagcaaaggcttgatcagaattaatccatttaattctgctctgccttgcaaggaactttgcctgcaggcttctccatggattccaactccatccagcgtttggctggcaaggtggctatcattaccggtggagccagtggcatcggaaaggttacagcaaaggagttcatcaagaatggtgccaaggtcatcatcgccgatgtccaggacgagctcggccactctgcggcggccaagctcggcccggacgcctcgtacacgcactgcgatgtcaccgacgaggcgcaggtcgaggcggccgtggacctcgctgtgaggctccacggccacctcgacatcctctacaacaacgctggcatcatcggcgccatgccgcaggacgacatggcgtccgtcgacctcgccaacttcgaccgcatgatggcgatcaacgcccgggcggcgctcgtcggcatcaagcacgccgcgcgcgtcatggcgccgcgccgcagcggcgtcatcctctgcacggcgagcgacgcgggcgtcatgcccatcccgaacatcgccatgtactccgtctccaaggcgaccaccatcgccatcgtgcgcgccgcggcggagccgctgtcgcgccacggcctgcgggtgaacgccatctcgccgacgggcaccaggacgccgatgatgatgcatatcatctcccagatgacccccggcgtgggcgaggacgacctggagcggatggcggacgccgccatcagcgccggcgtggccatcgagccggagtacgtcgcgagggcggcggtgtacctcgcctccgacgaggccaagtacgtcaacgggcataacctcgtcgtcgacggcggcttcacaacgcataaaggagacgacaatcgcatgaattaatgacacacccaactaattaatcgatcgaacacccttgttcgtcgactcgtcagaataataaggttgtggtgcatatgtacgtgcattgcacttgatagtgcagcggcaaggagtgtgtccctccaattctcgtt

SEQ ID NO: 4555 - DNA, 1160 bp, Oryza sativa
  ref <308>: DATABASE ACCESSION NUMBER: AK104812
  ref <309>: DATABASE ENTRY DATE: 2002-08-28
gcgagccggaggtgatccgcgacaaggcggcgatgcgcgcatggtcgcgccgccgccgcgccgagggcaagaccgtcgcggtcgtacccaccatgggctacctccaccaaggccacctctccctcatctccgccgccgccgccgccgcctccgctgatcccgtcgccatcgtcgtcaccatctacgtcaaccccagccagttcgcgccctcagaggacctcgccacctacccttccgacttcgccggtgacctccgcaagctcgcctccaccggcgtcgtggatgccgtcttcaacccccctgacctctacgtccgtggcgccggtcgccgcggcgccgcctccggaggcgcgatctcctgcctggaggaggcggccggggatgggcacgagacgtgggttcgggtggagcgattggagaaggggatgtgcggggccagccgtcccgtgttcttccgaggcgtggccaccatagtctccaagctgtttaacatcatcgagccggatgttgctgtgttcgggaagaaggattatcagcagtggcgcgtcatctgccgtatggttcgtgatcttgattttgccatagagataataggatcagaaattgtgcgagaagctgatggtcttgccatgagctcccggaatgtgcacctatcacgcgaggagagggaaaaggcattatccatcagtagatcactggttgatgctagaactggcgccttgaagggaaacactgattgcaaacaaatcaaaaacaaaatagtacagacactaactgaaactggcggtcaggttgactatgttgagatcgtggagcaagaaagtttggtccctgtagaacagatcgacggccctgtggtcatttgcgttgcggcgtggtttggaaaggtcaggctgatcgataatatcgaaatcgatacacgatcctgaggttttggggggattcacttgctgtctgctgtgaccttggcattgcgtttgaaataccttttgtttcgcgtgatgattcgcgtcatgttgtacgctgtaacaatcacagagagaaaatatgcaggagtacactgactgaaggcaaatttataagtacaaactgtagaggcctgatgctgtaacaggggaaatcatgcttgttgattacagattccgctgaagtattgctct

SEQ ID NO: 4556 - DNA, 1057 bp, Oryza sativa
  ref <308>: DATABASE ACCESSION NUMBER: AK061857
  ref <309>: DATABASE ENTRY DATE: 2001-12-06
caagtacaaccccatcaagaccatcaagaccaacgtggttgggacactgaacatgcttggattggccaagaggattggggcaaaatttctcctcaccagcaccagtgaggtatatggagatcccctccagcaccctcaggtggagacttactggggcaatgtcaaccccattggtgttagaagctgctatgatgagggcaagcgcacagctgaaacgttgaccatggattaccaccgtggtgccaaccttgaggtgaggattgctcggatttttaacacatatggtcctcgcatgtgcattgatgatggccgtgttgtcagcaactttgttgctcaggcactgaggaaggaacctttgactgtctatggtgatggcaagcagactaggagctttcaatatgtctctgatttggtggaagggttgatgagcttgatggaaggggagcacataggaccatttaacctgggtaatccgggtgagttcaccatgctggagctggctaaggttgtccaggacaccattgatccgaatgctcgcattgagttccgtccgaacactgcggatgatccacacaagcgcaagcctgacatcacccgtgcgaaagagctcctgggctgggagcccaaggttcccctgcgtgagggccttcccctcatggttaccgacttccgcaaacgcatctttggcgaccaggaagcctaatctgcagcagctggtggcatgtattaaatttcaacatgacaacggcacacaactcattaaaatcctataacttgtactttatagtaactacatgtggagaagttaaatcgggtagaaatacttggaaaggaaattggtgccttggttctttggttgcttcatacctcacggacaaaatggccatggctgaatacatagctagttctttggacacatggggatgctactaatactatcaatctatcataggcactactgtaagctactgtcttttttggtcttgctcatagaagccatatggtgttatacatgtaatctttattggaaactcgatatatgtttcagtatgaacag

SEQ ID NO: 4557 - DNA, 1080 bp, Oryza sativa
  ref <308>: DATABASE ACCESSION NUMBER: AK061858
  ref <309>: DATABASE ENTRY DATE: 2001-12-06
acaatccaatccaatccaatcaaatcacatcgatcgacgccgcaacccagcagcagcagcggaaccctagccaagccaccatgagcaagctctgccagtcggcgtgcaaggccgccaagtctctcctctccgccaccgccgccgcctcctccccgcgcacctccctcctagccgaggggaggaacgcggcgctggccaccctcaccaacctggggaggaagaccctccccacagcttacgcctactcctaccaccacaactcctccgccgccgccgccggatggctcgctgccatccccgccgctgtttacatgctacaggatcaggaggcgcatgctgcagagatggagcgcacctttatcgccatcaagcctgacggcgtccaaaggggcctgatttctgagatactgtcccgatttgaaagaaaaggattcaagcttgttgccatcaagctggtggttccatccaaagaatttgctcagaagcactatcatgatttgaaagacagacctttcttcaatggattgtgtgacttccttagctctggccctgtgcttgccatggtttgggaaggagagggtgttatcaagtacgggagaaaactgattggtgctacagacccacagaagtctgaaccaggaaccatcaggggtgaccttgctgttgttgttggcaggaacatcatccatggaagcgatggcccagagactgcaaaggctgagattggtctctggtttgagcccagggagctggtctcttacaccagcaacgaagagaagtggatctacggggtcaactaaccggcgaatcatctcccctgtttgttttgtttttttttcattttctctcactttacctaattacatcaccatggaagagtgtaataaagttgcgatcgtgacatttggggttatgcccatgtgatctggcgcaaataagaggcctcaagaagaattgtctaccttcaattgtagagcgtgcactgagtaatcagaccatcaccttcactcaaatggtcgaacggatggtgatgccacttgttttgttattgttatataatggtactacatgttgtctctt

SEQ ID NO: 4558 - DNA, 914 bp, Oryza sativa
  ref <308>: DATABASE ACCESSION NUMBER: AK104813
  ref <309>: DATABASE ENTRY DATE: 2002-08-28
gaaaagtcttctcctttctctgctccccccttcctcctctgcacctcacctctcctctcatggagttcgcctagttgtgtgctctgctcctccttgaagaagccttcagatctgtggttcctagcctttctcagcttcctcaacacagccgtccagatggcgtccctgacacccgaagctgaagctcccggaggaggagccctgctcgccgccggcgacgacgtcaccgccgcgaatctgctcgccgccgccgtagccaccgagggtcctgtatttgatatgcctgacttcaagatgggtgggaagaagagtgatgatgctgctcccactgatgccggggatgaagatggtggtgatgatgacggggacgaggatggtgactttggggaaggcgaagaggacgtttcagaaggtgagggatatgataatccaaaaggcatcgataacaacaagaaaagaggtgagcctgaggaaaatggtgaggaggatgaggaagagcctgaaggccaggagggtggtggaggtgatgacgacgatgacgatgatgatgacaatgaggatgacgacgacgatgatgatggtggtgaagatgatgatggagtagatgaggaagaggaagatcaggacaatgaggatgatgaggaagatgatgatgaagactcacttcagcccccaaagaagaggaagaagtgaatatcttcatgcggctatagttaccaacttaccatgcgctgagctgtgcttggttttcgtcatgttctcggaatcgaacttgcattagggagttaagaaaaaagggctccacacgttcagtaagtgtggatttgtaggagctttatgatttcaagcaattagacagaactctgttgtcattgttgcttgcttctgtggagttgaacagatgtttcgctaac

SEQ ID NO: 4559 - DNA, 1227 bp, Oryza sativa
  ref <308>: DATABASE ACCESSION NUMBER: AK061859
  ref <309>: DATABASE ENTRY DATE: 2001-12-06
ctgctcgagacgctgcagtccgccgccgtcgccggaggaggggggaaggcggcgctgctgacgccggcggaggtggccgacaagctgccgtccaaggcgaacccggcggcggccgacatggtggaccgcatgctccgcctgctcgcctcctacaacgtcgtcaggtgcgagatggaggagggcgccgacggcaagctctcccgccgctacgccgccgcgccggtgtgcaagtggctgacgcccaacgaggacggcgtctccatggccgccctcgccctcatgaaccaggacaaggtcctcatggagagctggtactaccttaaggacgcagtcctggacggcggcatcccgttcaacaaggcgtacgggatgacggcgttcgagtaccacggcacggacgcccgcttcaaccgcgtcttcaacgagggcatgaagaaccactccgtcatcatcaccaagaagctgctcgacctctacaccggcttcgacgccgcctccaccgtcgtcgacgtcggcggcggcgtgggcgccactgtggccgccgtcgtctcccgccacccgcacatccgggggatcaactacgacctcccccacgtcatctccgaggcgccgccgttccccggggtggagcacgtcggcggcgacatgttcgcctccgtgccccgcggcggcgacgccatcctgatgaagtggatcctccacgactggagcgacgagcactgcgcgcggctgctcaagaactgctacgacgcgctgccggagcacgggaaggtggtggtggtggagtgcgtgctgccggagagctccgacgcgacggcgagggagcagggggtgttccacgtcgacatgatcatgctcgcccacaaccccggcggcaaggagaggtacgagagggagttcagggagctcgcccgcgccgccggattcaccggcttcaaggccacctacatctacgccaacgcctgggccatcgagttcaccaagtaggtgattggtgatcgatcgccattgttgagctcgatcaaggtgttcgaccatcgtcttcttcttctcgtacttcttgttcttcatccaaaagcgtgggtaatcatgtcgtttgctgctggctgatgctgctgctgcttgtgttgtacttttgatgttcaattccggtgattctgagttctaatggatgtaacctgtctgctattatatatatatataatcgaatatatgatatatttactt

SEQ ID NO: 4560 - DNA, 1119 bp, Oryza sativa
  ref <308>: DATABASE ACCESSION NUMBER: AK061860
  ref <309>: DATABASE ENTRY DATE: 2001-12-06
tgtatcacatgctagggagtttcttaatacggtcgtcaccgacattcttcatctgcatggacaaaagctacatgcttacaaaggtgattatgacacattcgagaggacaagggaggagcaccttaagaaccagcagaaagcttttgaaacaaatgagaaggccagatcccacatgcaggcattcattgacaagttccgttacaatgcaaagagagcatcacttgttcaatcaagaatcaaggcattggagcgaatggagcatgttgatgcggtcgtcagtgatccagactataaattcgaatttccaacaccagatgaccgccctggaccaccaatcatcagcttcagtgacgcatcttttggttatcctggaggccccaccttatttaaaaacttgaattttggtattgacctggacagccgcatagcaatggttggtccaaatggtattggcaaatccactatacttaaactaatatctggagatcttcagccaacttcagggacagtgttccgctctcccaaggttcgcatggctgtattcaatcaacaccatgttgatgggcttgatttaacagtgaacccccttttgtacatgatgagatgctaccctggtgtacctgaacagaaactgagggcacacttgggttctttcggtgttacaggaaatcttgccctccaaccaatgtacactttatcaggtggtcagaaaagtagggttgcctttgcaaagatcaccttcaagaagccacacattattcttctcgatgagccttctaaccatcttgatctggatgctgtggaggcgctgatccagggtttactcgttttccagggaggagtgctaatggtgagtcacgacgagcacctgataacggggagcgtggatgagctttgggtggtgtcggaaggcagggtgtcgcctttcgcaggcacgttcaaggactacaagaagatgctcaagtcttaatctagagccagtgatgatatatatacagagacagcgagtctacaaagaaagacaccaacatatatatctgtatcgtgcagcaccgatgtaacatttaccggcctgaggccaaatcatcatttatgtttatttcatgtggatttactgag

SEQ ID NO: 4561 - DNA, 1612 bp, Oryza sativa
  ref <308>: DATABASE ACCESSION NUMBER: AK061861
  ref <309>: DATABASE ENTRY DATE: 2001-12-06
atctccaaaagtccactcctcgccttcgtttctcctcccccatttcgtccctacctgctcctcaccagatccttccgccgccgccgccgccatgtggaggggcggagcgaccgccgcctccgccgcgagggctctccgctcgcgcctgatccccgacacgtcccaccacccggccacggctctagctcccatcgcatcgccgcgctcctcctcctcctcctcctcctcgtctgcccccaccatcgccgccgctgtgcccgccgtcgcggaggctacggcggccgcggccgctgtttcgaggcaagctggatccgtctccgacgcgctgaggcactacgggaggtgctacttcgagctctccaaagcccgcctaagtgcccttgttgtggcaacatctggggctggttatgtgctcggaagtggcaacatggtagacatagctggactttgttgcacctgcgctggtaccatgatggttgcagcatctgcaaatactctcaaccaggtgtttgagataaagaatgacgctaaaatgaaaagaaccatgcgacggcccctaccatcagggcgcattagtcctgcacatgctgccatgtgggctactagtgttggagttgctggaacagctttgttggcttggaaggctaatggcttggcggctgggctcgcagcttctaatcttattctgtatgcatttgtatacacaccattgaagcaaatacaccctgtaaatacatgggttggagcagttgttggtgccataccaccacttctagggtgggcagcagcttcgtctgaactgtcactgaatgctatgattctccctgctgcattgtactattggcaaataccacattttatggcccttgcatacttatgtcggaatgattaccttgctggagggtaccgaatgttttcttttgctgatcctactggtaaaagaactgcatgggtatcactcagaaattgtctatacatgctgcccttgggattttttgcatacaactggggtctcacatctgagtggttcagtcttgaagcatcacttctaactttgggccttacaattggagctctatcatttgtgctggagccaacccccaaaactgcaaggagaatgttctatggtagccttttgtatcttcctgcttttatggctggacttctgttgcatcggctgcctaatgagcaaaaggagcataatgtcactcagacgagtgaaatcaccggaattctttatggtgctgaacagcaggatgaagaacgagctagacagaagcgtgaggaccgaaaaccttctcgtattcactcgcgccctccggttgcctatgcttctgtggccccttttcctttcttaccagtacctatatatgtctctacccaaggtcatgagctatgaaagatattacatggactaggcttgtggacgcaatgttggtccatatttttttggcttccaaaggaaattttcctgatcaagtactttgtccttgatgttgatatgattcgaaaataatgaacaagaaatttagctcttgggctcacctgactgtaaaaattgatgtccatttacatttgatgtcttgagtaacatgaatgcacatactttcag

SEQ ID NO: 4562 - DNA, 1371 bp, Oryza sativa
  ref <308>: DATABASE ACCESSION NUMBER: AK061862
  ref <309>: DATABASE ENTRY DATE: 2001-12-06
aacctgccccttgttccacaacgacgaacaacatctcgccacgaggaggagggcgagagcttacacgagtccgaaatccccaatccgggatcccctgcttctcttcgcgccaagatggcggctgcctgggcggcggcggtggccgtgatgctcctccttgcgcaggtgtcagcggcggctccggtgatggggcctgccttcctctgggcgcccaataactacggattctcttctgatgagactaaagaaatggtctactatcagacagtatccccaaagagcttagtgaaatctgttcttgaggaaggtggttggtcaaacttggtgtgttcaagggaggatcatgcaaagagtgttgatgttgcagttctttttcttggctcgaagctacaatcatcagacatttctaaagaaaagcaagctgattcaactttagtagacatgctgaagaactcctttgcaagctccgagttttccatggcattcccctatgttgccatgtcagatgatgacaaattggagaagtcattgctatctggatttgctgagaattgcaacaatggtcttggaaataatcatatcacctacacagacacctgttctgtaagtgaagatctgaagaaacatcacgacatggattccattcatggattggtggcatcacaaactaaaaagaacccaagtggacagactgatctggttgtcttctgtgatggtggtttcaaggataacacaaaatcagaaggggagttactttctgagctggttactctgctgaagaagtctggagctaaatatacaattctttatgcttctcagccctatggtttgctagagagcccttcaaacctgccgttaggcaggtacctcgcagagaagactaatactactaaacccggccgtggaaaatgtgatggggagtgcttagtaaaatcaactctgctagaaggaagctttgttggaatagtgctgctaatcatcttgatatcaggactcaaatgtatgatgggaattgataccccatcaaagttcgatgctcccccggaatcgtaagcccatttttaagcagatctgaatggaaactcaaggcaaacacgaggggaaaattgaatagctgatgtagcaggtctgtactgtgaatatagttagtttgctacttattgccttatgtattttaatgagccaactgcaatttgcagtcaatttttggtggaatattacatttcaaaacgtacacgtgcaaggcctgatttgtaccatataacactgcctctagtgtttgctgtgtgaataagctggaattaaaacctgttttggaataagatgtcacagttcatcgaataaaaccttgcgatatatttcattattttc

SEQ ID NO: 4563 - DNA, 1598 bp, Oryza sativa
  ref <308>: DATABASE ACCESSION NUMBER: AK061863
  ref <309>: DATABASE ENTRY DATE: 2001-12-06
atagcacaatggaattaggttatcccgattgaagaatagaatgttgtcatgttttgatgactgctgatttgtagccacatgtagactcgatgtcggagtgaactgatatctaaactgcctatagatgtgggtcgcgtgtccaaatttcccacagacagtcaggctacagggttaacagtttgtattgattcatttggcagtcactatactagacgtggagatacagtctcttcggatggtattgtgcggtttttctttagatgtatcgttgtggagatgtagacagttgacttcaaaactgatgactgtccgtgaagcgctgaactctgcactcgatgaagaaatgtctgctgatccttctgtttttctgatgggtgaagaggtgggagagtatcaaggtgcatacaagatttcaaagggcttgcttgacaagtatggtcctgagagggttctggatacaccaatcacagaggctgggtttactggcattgctgttggtgcagcgtatcaaggtcttcgacctgttgtagagttcatgacattcaatttctcaatgcaggcaattgatcatatcatcaattcagctgccaagtcaaactacatgtcagcgggtcagatatctgtccctattgttttcagaggacctaatggagctgctgctggagttggcgctcaacactcgcagtgttatgcggcttggtatgcacatgttccgggtcttaaggttctggttccatattctgcagaagatgctcgtggcttgctcaaagctgcgattagggatccggaccctgttgttttcttggaaaatgaactgctctatggagaatcattccctatttctgctgaagtgcttgattctagtttcgctctgccaattggcaaagcaaagatagagcgtgagggtaaagatgttacaattactgcatactccaagatggttggatatgctcttcaggccgcagatatattgtccaaagaaggaatcagtgctgaggtgataaaccttcgttcaattagaccacttgatagagctactatcaatgcatctgttagaaaaacaaatagattggtgaccattgaggaaagcttcccacagcatgggattggtgctgagatatgcatgtctgttgttgaggaaagctttgaatatcttgatgcaccagttgagagaattgctggagctgatgtacccatgccctatgctgccaatcttgagaggatggctgtcccacaggttgacgatattgtccgtgcagcgaagcgtgcgtgctacagagcggtgcccatggcagcaactgcctgataggagagacctcttttacatcatctttcttttcccgtccggccaacatatgattcataatggtgtccaacaattgcccaaactcaaagcgagctaattttgcaagatatttccatgacccccacctattcttttagctgcagttgcatcactgcgttcgttggtggtgacccaaatttccctctttttttttggtgtgtatgcgagaattatgcagcttatggtgattggttcacagtacacactggcgctagttacataaatgaaagaaaaatctgagctcttgatggac

SEQ ID NO: 4564 - DNA, 1177 bp, Oryza sativa
  ref <308>: DATABASE ACCESSION NUMBER: AK104814
  ref <309>: DATABASE ENTRY DATE: 2002-08-28
gataaatcgaatcaatccatcggcggcggcggcgactcggctctcgcttccacgcatccatccccgcgcccccctcctctccggcgactccccggaatcgcggcgcggcggcgcggccgccctagcgtcggcgacggctaggtcttcctccccgaccccttcgtgaggtgaggaattcctatataggactacaatttaagggagaagctttcaggcttctagcaagtaataactactgatctccaatggcacaaccttcttctaagaagacgccgtcagtctatctttacatccctaatatcattggatattttaggatcatcataaacttcattgcttttgccgtatgttattccaatagggtgctctttgctatcctatacttcttcagctttttctgcgatggcttggatggttggtttgcacgaaagtttaaccaagcatcaacatttggagctgtgctggacatggtaacagatagggttagcactgcctgtttgttggcacttctctcccagttttacagacctggcttagttttcttgatgttgcttgggttggatattacaagccattggtttcaaatgtacagttcgttcctatcaggtaagactagccacaaggatgtaaaagacacaggcaattggcttctgaagttatattatggacaccgaccattcatggccttctgttgtgttgcttcggaggttctgtacatagttctttttctgttcgccgatgagaagtcaacaagcttgcttaatgtgtgcggaaaccttctgaagcaaagtcctctcactgtctttgttttcatttcaactctagttggttgggcgttgaaacaagtgatcaatgttatccagatgaaatcagccgcagacgcgtgcgttgtgtttgatttgaagcgcggcaagtgagcagaaatgcacaacgatttcgtttagcttgtgtttggcatgtcgaagaaaatattccatgaggcttgatgtaccaaggctgtacaaacctaatgtaagattttgacatgtccttgacactgagggagggcatgctgtgcattaacagcatgaaaagaaaaggagagagatcagatgtatttgaggaaaacagggttttagtcagattttgtatgtttctttttacaacagcgatgaatcagcgcgatctttgtttcttt

SEQ ID NO: 4565 - DNA, 1344 bp, Oryza sativa
  ref <308>: DATABASE ACCESSION NUMBER: AK061864
  ref <309>: DATABASE ENTRY DATE: 2001-12-06
catcttgcaaatatttttatacactgttcccccaaccatgatgtttttttctacattagaaggacccgtgtcccacagtgaaaggaagagaagtgcctgctgtaaagtattatacttcactatttggaatgtattctttgtgaatgtcctatcaggttctgcaattagccaagtgaatgcgttatcaagcccaaaggacattcctatggtgcttgctagagcggtacctgtacaggctacattctttaccacctatgtactgacttctggttgggctagtttatcatcagaacttatgcaactctttggtctcacatggaactttataatgaagtatgttttgagaatgaaagaggatagctactttgtcccgtcatttccctatcatactgaagtgccaaaagttctgttgtttggactactgggattcacatgctctgtattagcacctctcatcttgccctttttactggtgtacttttttcttggttatgttgtgtaccgcaaccagttcctcaatgtttattgcacgaaatacgacacaggtggtctgtattggccgattgctcactatacaacaatcttctctattgtgctcacccagatcatctgtcttggtgtctttgggcttaaagaatccccagtagctgcaggcttcactgtacctctcatcatcctcactcttttattcaaccagtattgcagcaatcgtcttcggccattattcaagactctccctgcacaggatttaattgacatggacagggaggacgagcaatcgggaagaatggatgacattcaccaccgtcttcattctgcttactgccagtttgctgacactgacgacatacctctgaaaggagttcacgttgacagagatgcagatgcaagcggaagttccggtgaatctagctgcaaagaagacaccaaccaacccacaaccagtgacatttctcaccctacactggaaggactccctgtaaaccggctacggcatgcagtgaggtcgctcagttccatcatcaggttacagaagagaggcctgtcaccacagcccgctggaccctccgccgatgtaaatccgcaaactgcataagttttgcagataggacatacatacagtgaccaaagaagcatacaaatgaatatacaaaaaaaaaaggcatagagatgcatataaaagaaaagaagcatagaaatgaaagagagcgccatctgtcctagttgctagggtaaaattttgtttgttttaagttttaactagtgcctgagcaacttgtgtcagatccttttggccatacaaaagttctgattcttcaattgattggtgatacttttggtcat

SEQ ID NO: 4566 - DNA, 1084 bp, Oryza sativa
  ref <308>: DATABASE ACCESSION NUMBER: AK061865
  ref <309>: DATABASE ENTRY DATE: 2001-12-06
gtcagtaagattgaagccggggaacggttcactgtttatgttgtggtgccaatgtggcctgagggtgttccagagagtggatctgttcaggcaatcctggactggcaaaggagaacaatggagatgatgtacactgacattacagaggctctccaagccaagggaattgaagcgaaccccaaggactacctcactttcttctgcttgggtaaccgtgaggtgaagcaggctggggaatatcggcctgaagaacaaccagaagctgacactgattacagccgagctcaggaagctaggaggttcatgatctatgtccacaccaaaatgatgatagttgacgatgagtacatcatcatcggttctgcaaacatcaaccagaggtcgatggacggcgctagggactctgagatcgccatgggcgggtaccagccataccatctggcgaccaggcaaccagcccgtggccagatccatggcttccggatggcgctgtggtacgagcacctgggaatgctggatgatgtgttccagcgccccgagagcctggagtgtgtgcagaaggtgaacaggatcgcggagaagtactgggacatgtactccagcgacgacctccagcaggacctccctggccacctcctcagctaccccattggcgtcgccagcgatggtgtggtgactgagctgcccgggatggagtactttcctgacacacgggcccgcgtcctcggcgccaagtcggattacatgccccccatcctcacctcatagacgaggaagcactacactacaatctgctggcttctcctgtcagtccttctgtacttcttcagtttggtggcgagatggtatggccgttgttcagaatttcttcagaatagcagttgttacagttgtgaatcataaagtaataagtgcagtatctgtgcatggttgagttgggaagaagatcggggatgcaatgatgcttgtgaagttgtgatgccgtttgtaagatgggaagttgggaactactaagtaattggcatgattgtactttgcactactgtttagcgttgttgatactggttaaccgtgtgttcatctg

SEQ ID NO: 4567 - DNA, 1037 bp, Oryza sativa
  ref <308>: DATABASE ACCESSION NUMBER: AK104815
  ref <309>: DATABASE ENTRY DATE: 2002-08-28
cagcaatacgcatgagccagaagttgatgcacatgcgatatacgtgaggagtctaccattaaatgccactacgacacaactggaggatgagttcaagaagtttggcaccataaaacctgatgggattcaagtcagaagccataagattcaagggttctgttatggctttgttgaattcgaggaagctactgcagtccaaagtgctatagaggcttctcctgtaatgattggtggacgccaatgttttgtcgaggagaagagaacacctggttcacgaggatccagcagaggaggaaggtttgcaccaggaagaggtaataacaacttcagagctgacgggatgagaggccgtggcaattatagtggaggaaggagctacggaaggggtgatttcagttacagatctgattatggtggcagaggtggtggcagaggtggctctgcgcgtggacctgatgttggctaccagagggttgacggtggtcgtggtggccgtacatcagcaggccctggtgcccctgcaaaatgaggggcgaagtagcttgtgtctctagtattatcattccatggtccttggaatgtccagattcaacataggcttcatcaattgattgcatgctggaattgtcaagcccaatttacaaattatgaggttctatttttgaaggcggcaaaaggggttaaattggttgctaattgtagaatatacacctattcacatgtagtcttagcttggtctttgatgatcagctgatgtgttattttttttctttttgtgttaattttgtcccgtttaagtttggagcattcatttgttgtgtccatttgattttatagttactacgaactgctgaaaatttgattttatagttactacgaactgctgaaataattgatagtttagactctagagtagctggtaaagtagtaattaggagagattttgtcttgttcttgtgatgtcttgaggcgaaggacactcttattgatactagtttgatactggtttatttaattttcgaggaatttaccctgtg

SEQ ID NO: 4568 - DNA, 955 bp, Oryza sativa
  ref <308>: DATABASE ACCESSION NUMBER: AK104816
  ref <309>: DATABASE ENTRY DATE: 2002-08-28
gaagcggctcgcttagtaataaaggcagcaaggcctagccactccccgcgcgcgcgccgaagattctcagcaagattctgagccgtcgtcggccgttcgtccgtccaaggaaaggagagccatggtgggaacctcctcctggtcgtcgtcctcgtcgtcgtcgctcggctccctcgacgacgacatcatcgtcgcgtgcgtcgtcaaggcagcggacgccgccgtcgagggggcgtgcgtcaagttcctctgcagctacggcgggaggatcctaccacgccacgccgacggcgcgctgcgctacgtcggcggcgacaaccgcgtcgtctccgtcgaccgctccctccctttccacgagttgcaacggaagctgagggagatgtgcgggtgggaggcggtgtgcctgcggtgccagctcccgacggaggacctggacgcgctcgtctccgtcaacggcgacgacgacctcgccaacctgctggaggagtacgacgcggccagccgggaccgcctccagccgctcaagatccgggcgttcctgttcccaaggacgacagcgacaacgaccgcgccgctatcgcgcagcccgtcgcccaccgctgcgtccaggacggcaccccgtgcccactaccagcatcagactggcagcgcgccgtcgtgcgcatcccggtgggcggcgcgtcagatgtcgttgcctcctgctcgcgttccgcaccagcagcagcattacaaccggcacggcggcgacgcgcggccgcaacggtacctagtccagagtgccagcagccgctggtaatagcgatcagattgcgaaccggccgcggtctagtatctgcgtgccttacacgtactcggtactcgcgtaaccctgcgctgtacgtactaatgaaggtgtttaattagcatgtactgttgtgctgggtcttttaaagcaaaaaaatggacgaacttgatc

SEQ ID NO: 4569 - DNA, 1631 bp, Oryza sativa
  ref <308>: DATABASE ACCESSION NUMBER: AK061866
  ref <309>: DATABASE ENTRY DATE: 2001-12-06
gcactgcaaacagccatggaacaagcagctggactagtgtaccaactcttccaaaacgaaatgtttccctggatcctagccttgttcccattccttctcctagcactgcactacttggcaacaaatcatagaacaccaacaacctgcaaggaaacgaggaatcatctttccccaccttcacctccgaggttacccatcatagggcacctgcacctcatcggtgacctcccgcacgtctctcttcgtgagctcgctcatcggtacggccccaacctcatgctcctccacctcggccaggtccagaacctcgtcgtctcctccccacacgccgcagaggctgtcttgcgcacgcatgaccatgtctttgcgtcacggccacactctttaatcggcgacatactcctctacggcccgtccgatgtcgggctttcgccttacggcgagcagtggcggcggagcaggaggatcgtcacaacgcacctgctgaccaacaagaaggtgcggtcgtaccatgtagcacgagaagaggaggtgcataaggtaatgaccaaagtccatgagttatccaccaagggtatgggagtggacatgtttgagctcttcagcacctactcgaatgacctcatataccgccttgtgtcggggaagaacttccaaggggacaaaggccaggaacacgaggaagttgtgggatgaattgctcgacgagattatcaatgatcgtatgagcaaacaaccatgtgagcatgatagaggcaatgatgatcaagatgagatggacttcgtagatgttttgctccttcaagagcgaggcatcaccagagatcaccttaaagcaattctagtagacatgtttcaagccggtacggagacgacatcagtggtgctagtattcgccatggccgagcttatgcagaagccacatctcatggccaagttgcaggccgaactaagaacgaacatacccaagtagggacgagaattgatcactgaatgtgatcagaccaacatgacctacctcaaggctgtcatcaaggagacacttcggttgcatccaccaagtcctcttctcgtcccacatctcgcgatggctgactgtgatattgatggctacacagttcgctcggggacacgtgtcatcgtcaatgcatgggctattggaaggaactctgaatcttgggaagctgcagaggagtttttgcctgagaggtttgttgatggtggaagtgccgcgaacgtagacttcatagggacagacttccagttcttgccgtttggcgcaagcggcggatctgtcctggaataaactttgcttctgcgagcatggagatcatcctagcaaaccttctgtaccattttgactgggatgtttcagctgaagcagccatagataaagatggcattgatatggctgaagcgttcgggttgtcagtgcagctaaaggaaaagctactgcttgtaccggtagagtataagggtagcgtgcaggattcggctgttatattatgataggattagtttctgtcgtatttatttgggattatgtaaaatccaagttatgtataactctatttgtacgccggtctctgagtctgaggttcaatatatcgaaccatatatagttacgtggt

SEQ ID NO: 4570 - DNA, 961 bp, Oryza sativa
  ref <308>: DATABASE ACCESSION NUMBER: AK061867
  ref <309>: DATABASE ENTRY DATE: 2001-12-06
tcctcccccctcgccgtcgccgccgccgccgccgccgacgccgccgcgaccacctctcgcaaggggattttgtaggggtttctgatccgaggagcgggcgatgtcggactccgaggagcaccacttcgagtcgaaggccgacgccggcgcctccaagacctacccgcagcaggctgggaccatccgcaaaaatggctacatagtcatcaagaaccgcccctgcaaggttgttgaggtttcaacctctaaaactgggaagcacggtcacgccaagtgccactttgttgcaattgacatctttactgccaagaagctcgaagatattgtgccatcttctcacaactgtgatgtcccgcatgtgaaccgtacggagtaccagctcattgatatatctgaggatggatttgtgagtctgttaactgaaaatggcaacaccaaggatgacctcaggctccctactgatgataacctgcttagtcagatcaaggatggatttggagaagggaaggacctggtggtgactgttatgtctgccatgggagaggagcagatctgcgcgctgaaggacatcggcccgaagtaaacctcacctgttccatgtgattactactgaactttcagttatgatcggtttgggtatgtaggaacaaggattctcttaaaacatacagagtcacaaccattaaggaattgtatcacaaaactcgtccccgccagtcaggctcttatttatctgggtctcgtcgtcgattcactgtcctaaatttcctgagttcctgtacccctaaaccaccatccctagacgttttgttaaccctttgggtatttggtagcaactttcattgtggagttggattgtgtgcttaaggtgaaaatatcatttgtgataaaccatgagactttgttgtgctgtcaccatgaccactgctattagcatctgcagatgcaacttttgacagtt

SEQ ID NO: 4571 - DNA, 1130 bp, Oryza sativa
  ref <308>: DATABASE ACCESSION NUMBER: AK061868
  ref <309>: DATABASE ENTRY DATE: 2001-12-06
aagcagctctccactcccaccatgctgctgctccactcctctccgcgcctcctcctccgccaccgcctcctcctccccccgtcccgcgacctcctccccgccgcctccgcctccgccctccgcctccgccgctccgtcgccgtccgcgccgagccggagctgtccacctcggcagccgagcctcccccgggcgacgacggcgagggagatggccccgtggagctccgcaccccgacgctcttctccatcgacgagaaccccaccccgctgcagaccgccaccagcgtcctcctcaccggcgccatctccgtcttcctcttccgctccatccgccgccgcgtccgccgcgccaaggagctcagggttcggtccggcggggtggagaagcccaacaacctgagcaaggaggccctggaggggctgaggctggtgagcgcgtcgccgatcgaggtcgacaagccgccgtcgcccgtgcaggcgctgctcggcgggatcgccgcgggggtcatcgcgctcatcctctacaagttcaccaccaccatcgaggccgcgctcaaccgccagaccatctccgacagcttctcggttcgtcaaataacaataacaataagaacaattataaatgggatatgctacctagcaacatttgtgtttggaatcaactcaattggattagtactctatggtctccagctcacttttgcttctatcatgggcgatgacaattccagcagcgctgcagagaaaatcagtgagcagtccaacacaatggcatcatctaatagctccacagattcaacaagtgacaacgaatcaactagcaatgataagagtaaagggtagctggagtggaccgtgcaaatgcactagccaaatcttggagtacatacaattggataatctttgtgggcatttagttttctcatcttgagctgtagtgtcattgtatagcgcaaatatggaccaattgaattgcaattactgtagtaacatttcggctgaacatgtacaaagaaaaaaggtagcaagcagtttttttggggacactttctgattgcaactggatgaatatttttggcagaatctacccttgtacttgtggaataacattataatgaccctttgctgtg

SEQ ID NO: 4572 - DNA, 1261 bp, Oryza sativa
  ref <308>: DATABASE ACCESSION NUMBER: AK104817
  ref <309>: DATABASE ENTRY DATE: 2002-08-28
agccttcccgtgttatcctcttcaacctctggccctctcactcctcgcgccgcgcggctgctccggccaccaaagtggcgctccgatggcggtgagagtcccttccatggagctgcaccgccccccgccgtccgtatccggtgtccgaggaaaaagctgccttcaaaagcctttccttgtccaagcaaagagattagagggattggagaaggcaaacccaaggtcacgaggaaagcaaagtttggaacaagtgaagaaaagagcaccactgatccgtgggacagtgagtccacctctaccagtaccaggtcacataactcaacctccttacgttggtaaaaaggatgcttcagagatagcaagtgagatacaaatgcatgacaaagtgagcattattcacatgaaagctgcatgtgagcttgctgctcgtgttcttgaatacgctggaactttagtgaaaccctctgtaacaacagacgaaattgataaagcagtgcacaagatgatcattgatgctggagcctatccatcccctctcggatacggagggtttccaaaaagcgtgtgcacatctgtgaatgaatgcatctgccatggaattcctgattctcgtgaacttcaggatggagacataattaatatcgacgtcactgtctacctgaatggctatcatggggacacctcaaagactttcctatgtggagaagtggatgaagccagtaaacgacttgtgaaggttactgaagagtgcatgctcagggctatatcagcttgcaaacatggtaccagcttgaagaaaattggcagaagaataagcgagcatgctgagaggcacggatttggtgttgtggatcgttttgttgggcatggagttgggagaatatttcattcagaaccaatgatatatcaccagcgtaataatatgccaggtcaaatggttgaaggccagacattcacaatagaaccggccctatccatgggaagcattgattgcgacatgtgggacgacggctggacggccgtcacgacggacggcagcctagccgcgcagttcgagcacacgatactgattaccaagacaggagcagaaatcctcacgaaatgctagtaagatcggtgcccagcattagccactggagtagcagtgatctctgtgtttgtaggacgagtatggtggaaaggatggtcgattgttttgctgtataaagtactccctctgtattttaattttgattttaatgtattatgccgttgacttttt

SEQ ID NO: 4573 - DNA, 1305 bp, Oryza sativa
  ref <308>: DATABASE ACCESSION NUMBER: AK104818
  ref <309>: DATABASE ENTRY DATE: 2002-08-28
gctttttttcgcttcgagcctcttcctctcttttctctcgtctcttccatccacattcttctctctctctcgattgcttcgcactgggaatggcgatagaccatgcgtcccctttctcgctgaagaacagaggcgacatgggaggaagggggtatgaggaggaagaggtggagaaccagcggtggccgccgtggctgaagccgctgctgtcgacgagcttcttcgtgcaatgcaggatccacgccgacgcgcacaagagcgagtgcaacatgtactgcctcgactgcatgaacggcgcgctctgctccctctgcctctcccaccaccgcgaccaccacgccatccagatacggaggtcgtcgtaccacgacgtgatccgggtgtcggagatacagaaggtgctggacatcaccggcgtgcagacgtacatcatcaacagcgcccgcgtggtgttcctcaacgagcgcccccagccgaggcccggcaagggcgtcaccaacacctgcgaggtctgcgagcgcagcctcctcgactccttccgcttctgctccctcggatgcaagattgtgggtacgtccggtggataccgcccaaggaagaagcacggcgggtgcggcggcggcggcggcggcggcgacggtggcaagaagaagaagaagagggcggcgctcaaggacgcgcggtacgagtccgaggactcgtgcacgagcaccagcggcggcagcagcgacaagagcagcgtcgtgcagagcttcacgccgttgaccccgccgccgacctccgccagctaccgcaccggcaacaagcgccgcaagggcgtcccgcaccggtcccccttcggcagcctcatcgtcgagttctagggagtctcgacgcgtccgcgcctgatcaacatagtgtactgtacacatgacatagccaaacacaataaccgtgtgccccggaatggcggcgagcccggcgcttcccttcccggaggccggccggcgtaatgccggagaagggcaagagcagtaagccacgtcacatacatattatagcttgtttgttacttttcagcttcggtttttagttacagttcagttactcctagttagtacccagtcaagtccaagcactgctgggtgcttacgactcggtaacggcaactaagttttgcaaccgtgtaaaaatatagtagcagtagtagtaacctccatattgtagatgtacagagctgtggtggggtaggagacagtcacacagtgggatattcatatgtgcattatattacccatgtaataaaaaaaaaagagttgctgctcc

SEQ ID NO: 4574 - DNA, 1060 bp, Oryza sativa
  ref <308>: DATABASE ACCESSION NUMBER: AK061869
  ref <309>: DATABASE ENTRY DATE: 2001-12-06
gtgagctgattgccaacgaattccccgtgcgccgtgcgcctcgccctcccctccctccctcctcgtgccgttgccccccggttggactcggcgcgcttgcttctcgctcgcggctgctcgtaacctcgcctcgcctcgccctcctgcagcacgcgcggctggctgcccgacccagatccggagcgccatgtcgaggaatccgggctgcaccgtcttcataggtaacttggatgaaaaggtacctgagagggtcttgtatgagattcttattcaggtaggtcgtgttgtagacctacacataccacgtgacaaggaaactaatcgctccaaaggttatgcttttgctgagtatgaaacagaggagattgcccagtatgctgttaagctattttctggccttgttcgtcttcataatagaacacttagatttgcgatttctggacaagacaagcaatcttctaatggaaatattcctgtaacacctaaagtgaaccctataccgccaccaaagccggctcagctaatgagatctagtgatactcccgcatcgcaacatacagtggtaaatggcaggattgctggtatttctccaaaccattcttatagtgcgcactctgaggcaccaagtgggatatcgagtagaggattaagcaatggtacatacgaatatagtagacgcgtatttggttctgttctgaatgacgttagccgtcgtactgacaggcaaccaattccatacccgtcctactagcatattgagctccagggaagaacatggtatgctaacagattagcccagcgatgtcaatgttcgttgtctcagcccttctgtaatatcatctatgtattcaccattacatgcatgtaaatatgtcttatggcttagtcgtgtaggccgatgcttatcttttccattgttctgttctcaacattgtagtcagacttgtgcccgctggttatctcccatgtcatgtcctagtgatagcatcatgcctccactaatgcagctgtaccaagacttagtctaattgcagggatggctggcaatttgtgttttaat

SEQ ID NO: 4575 - DNA, 1418 bp, Oryza sativa
  ref <308>: DATABASE ACCESSION NUMBER: AK061870
  ref <309>: DATABASE ENTRY DATE: 2001-12-06
attccgcgccccctagccaagcagcacgagcacacgagaaaacaagagaaaaaaagcagcagcggccatggagggatacgaccgcgagttctaccagttcagcgaccagctgcggctgcagacggcgagcttctccggcctctccctcggcgactccatctggtcctccccctccgaccgccgcaacgagccggccttcgacggcgagtaccaccacttctcctccccctcccccgccaagaacgccatcgccaccaaggccgaccgctacaacagcgtcaacctccccgtcgacaacaacaacaacaacaagtcctacggcggcgccgccaagatcaacaacaacaacgtcaacgccttcgggttcaacaagatggggggttacaacaacagcagcaacggcggcggcaactacggcggcaacggcggcgacgtgaagagctacttcaacaagtcggtcgggaggccggcgagcaacaacaacaacaacaatagtaacggcggtggcgggtactacggcaagaagggcggcgacggcgccggcgggaagaagaagcacgccaagaacagcgacagcggcgcgcaggcgtcggacaagaggttcaagacgctgccggcgtcggaggcgctcccccgggacgaggccatcggcggctacatcttcgtctgcaacaacgacaccatggaggaaaacctcaagaggcagctcttcgggcttccatcgagatacagggattcagtgagggcgatcaggccagggctgcccctcttcctctacaactactccacccaccagctccacggcatcttcgaggctgcgagctttggcggaacaaacatcgatccgacggcgtgggaggacaagaagtgccccggcgagtcgcgcttccctgcacaggtgaaggttgcgacgaggaagatctatgacccgctggaggaggacgccttccggccgatcctccaccactacgacggccccaagttcaggctggagctcagcgtcgccgaggcgctctcccttcttgacatctttgcagacaaggatgacgcctgaggctactgcttccctgctgctgcttgctgaagaatatcaggggactgccggtgaaggacacaagtaataaagattcgacgtgtatccgttgtgagatatacatacataaatacataaatacaagtagtaagtaattaacggtgtgtgctgatgaatttggaacgattagtacaatttctgagggggtttcccatctcgcgggctaagagatgatgcgtcccattgtattttttttaatcatgtgcgatgatgatgacttcagtctgcagaggattagcccctttgttgttgtaatatttatacacacgttatttgcttctggacggccagccatgtataatactttgagacctctttctgtttc

SEQ ID NO: 4576 - DNA, 964 bp, Oryza sativa
  ref <308>: DATABASE ACCESSION NUMBER: AK061871
  ref <309>: DATABASE ENTRY DATE: 2001-12-06
cctttccgccgccgccaccgcgcgctcttcctcctccgctcctctctcgcccaccaccgcgcgccctttcctcctccgctccactcccacccgtcgccgccaccgcgtgcccttcctcctgcactccgctcccacccgccaccaccgcgcgccgtcgacactcggcgaccacgacgacgacgccggccgagagagcggatccaccgccaactcaggatccggaggctcctcccctccctctgtaccctctccttctcccagatctagctggaagggagtggttggcgcagaggaggtgatgacgcggtggaggaagaggatgaaggggaggcgcggtggaggaaagggtggggtgtgccgatcagcgacgggggtacacgagagctctggatctgtcgggcggcggcggtgctcggcagtgcacgggtgtcagcggtggtcggcggtgcacgggcggagagacgtgcgagcagcagagctcggttgcgggaggcagatggcggatccggcggcgactcgttcaagtcctgcattggcaagttctccatcggcaagccattaggcaatccggcagccccaagtcctcggatcgacgacggcgtggagctccttcctccgtgacgagctgccgccgtggagctccgtcctccaccgccgtggagctccttccttcgcatcgagccgctgccgggagctcggagccttgggttcagcaaccgctgctgttcttctcgtggtgaggcaatgggtgatgcatgctgggattgaaacattttttttgttccgcaggatcgacagcatggttggcaaaattaattttgatttttgtgatggtgaaattgcactgtgaggccaacatatttgaatcgatgcttgaatttgtgattgtggacttgtatttgtgatttggtgagaagaagaggatgcttgaatttgtaattgagggcatatctgaatcggtttg

SEQ ID NO: 4577 - DNA, 1080 bp, Oryza sativa
  ref <308>: DATABASE ACCESSION NUMBER: AK061872
  ref <309>: DATABASE ENTRY DATE: 2001-12-06
ctccccaaaccaaaaccaaaccgaagcttccccatctcgcgtgaacttcggagcaaggaagaacaaggcgccgcgccggatttagccccgcccccctctccggggtatcccccctcctctcctctgggtttgattggagtgaggtgaatcggtgaggttgtggctcggttggcgtccggatcggagggggttcgggcccttcctgattaatccctcttctgattccgtgtgggggattcaatcactggtgggcaaaggcgagatatttcgtcacttctccccctcatctaaccatgtctggtttgatgtgcctggagatcaagatgggattgtaaccacgctggttatctcgcgatcgcagagggtttcctccatcctctaaggaaggaaaggaacccttgccctttcttctccatggcttctaattcgtagtgtgaaggatctgatttttaggttagtgtaaatagtagcagtgttagatcttaggttagcaaacgctgatcgtcatgcagggaacattttagtgtgcaaggatgaagaaggtggcaattacaagttggttccaattgatcatggttactgcttgccagagaagtttgaagattgtacctttgagtggctgtactggccccaggctcgtgaaccattcagtgatgaaaccattgcatacatcaaatcactagacgctgaagaggacatcaagcttctcaagttccatgggtgggagctgtctgcaagatgtgctcgtgtcctgtgcatcagcaccatgcttttaaagaaaggtgcagcacgaggcctcacaccgtatgacatcgggcgtatactgtgcagggaaactgtgaatagagactctgagattgaggacatcgtccaggaagccgagggccatgttctcccagggtcaagtgaagtaatcttcttagaaaccgtatctgaaatcatagaccgtcacctcgacaagaagttcgcttagaaacccagaataactgatctagttgttcagctgtatccagtcagtttggtgtaagtatgttgacaagccactcttcaatggactaaatgatttcatttgtttgtagc

SEQ ID NO: 4578 - DNA, 1123 bp, Oryza sativa
  ref <308>: DATABASE ACCESSION NUMBER: AK061873
  ref <309>: DATABASE ENTRY DATE: 2001-12-06
cttccgttccgcgtcctctcaaaaggttgggaggaggaggaggcgacgcggagcgcagcagtgtgagtagtggtaagccatggaccgcgtgcagctcctcctcgtcggtctccccgccctcctcttcctctccgacctctcccacatcttcgcgccgccgccgccgcatctccggcacccccaccaccacccgccgcaccaccatccccatccgcctcaccaccaccccccgcatcacccccacccgcctcaccacccgcatccgccgcatcacccccacccgcctcaccacccgcatccgccgcaccatcacccccaccctcaccccgatcccgccgcggaggccatacaggctaacgttgatggagctggatatggcaccaccgtcgagctgcaattctgcgcctcctgctcgtacaaggggactgcaatgactatgaagcgcatgctggaaacatcatttccaggcattcatgttatcttgcacaattaccctccacccttccccaaacgtgtacttggcaaacttgtgccaattcttcaggttggagccattgcaacaataatggctggtgatcatattttccccagacttggaatggttccacccccatggtactactcactgcgtgccaatagatttggaaccatggcaacaatctggctatttggcaattttgcgcaatctttcctacaaagttctggtgcctttgaagtttactgcaatggagatttggttttctcaaaattagctgagcagaggttccctagtgagtttgaactgcgggatctcatcaacagcagattaccagattctctggttgggaaaaatgtgggaaaatccttgtcttagacaatgacattggaatatcacatgccaatgcgacatcttgctatcaaggtagtactatattgtttgctgtttgacgtcgagcagtttggaagctctgcagcttgtctgtgaacactactattcaattaaatggcttgtaaaggataacctagagtgagatagtgactcaattgtatgaacttattagttatgccacaaaaaaaatcatcatttcctgtttattttctgagaggttgataaaatattgtagtattcgtcacctttggtgtg

SEQ ID NO: 4579 - DNA, 977 bp, Oryza sativa
  ref <308>: DATABASE ACCESSION NUMBER: AK061874
  ref <309>: DATABASE ENTRY DATE: 2001-12-06
aagagaggaggagaaaaaaaaatcgcagcagcaaaccctcctcctccgccatccgccgccttccctcctcccccacgatctccggcggcggcggcggcgatggcccggaagaggaagacggacgcggcgccgcggctggacgaggccgaccggacgctctactccaccttctgcggcgccgccaactccctctcccagctctacacccaggccatggcccagcagaagctctccttccaggccggcgagcgccactccctcgaaaaactccaccagtggatattgagaaagcatgaggaagagtcgaggctcacggcggctgatataatgtctcatatccagcatgagttggattatggaggtaatgatccacatgtttcccccagagtacatcagcatagtgcaaatccgtttgcaaactcaagcatccaaccctcagctggttcctatggtcaagcaacagtaggatttgcgcctagacccagcatcagtgatcagtcaaagaatacaattttctcaaatgctttatcaagcccggtccgtcggagccttcagagctatcatttaacccaaggatctggtaatggaggccggaatgcagaaacaaactctgcaggacagaatagggagaccaactctggaggctccaatgacacctcaatggacatggtttcggacagcgctggtaacgaatactactgaagtggattgtggtgagaaggaatactactgaagtggattgtggtgagatgaatactactgaactggattgtggtgagatgctgcatgcaaaaccaggcagcacacaataccagtgttgtctcctgttgctgtatgttatgtattttcctaaaaccttatcatctgtgcggccttgtagtcacagatgaaatggttctctttaaggcttttaagcttttgtattttctatttttgttgaagcctgattggagagaaatcaagttgttcgtgggttc

SEQ ID NO: 4580 - DNA, 1032 bp, Oryza sativa
  ref <308>: DATABASE ACCESSION NUMBER: AK061875
  ref <309>: DATABASE ENTRY DATE: 2001-12-06
gtaaagattgaactgatacacaaattggtggcttctggtctatcagtagttgaagccacaagttttgtgtccccaaaatgggtgccacagctagcagatgcaaaggatgtggttgaagggattaagcatgtgccagatgtgcggtttccagtgttaactcctaacctcagaggatttgaggctgctgttgcagctggtgcaaaagaagttgcagttttcgcatctgcctctgaatccttttctaagtcaaaccttaattgtaccatcaaggaaagccttgttcggtaccatgatgttgtaacttctgccaagaaacatggaatacgaatccgtgggtatgtttcatgtgtggttggttgccctgttgaaggcacaattcatccatcaaaggtagcatatgtagctaaggagctttatgacatgggttgctcggagatctcactcggagacacgattggtgttggtacaccaggtagcgtacttgctatgcttgaagctgtaatgtcttttgttccagtggacaagatcgccgtccatttccatgacacatacggccaagcccttgccaacatactggtctctctccaactggggatcaacatagtggactcatcagtgtcaggactgggaggctgcccatatgcaaagggcgccaccggcaatgtcgcgacggaggacgttgtgtacatgctccatggactggggatagagaccaatgttgacctcaacaagctcatggatgctggagattacatctccaagcatctgggaaggcagtcaggctccaagaccaccactgctctccgcaagctaaccacttaagtccctgatgatcataatagggattcagaaaagaagtccgaagatacatcggttggcgtcagtttaatgtttttacacaagtcatatgtgattgtaacctgtaaaccgtctcaatttagtcccaatatgggtgaaagtaaacagaaaccatatatgtatagacacatttgtgtttaagttcttggattgaataatcaatgcccttcatac

SEQ ID NO: 4581 - DNA, 1572 bp, Oryza sativa
  ref <308>: DATABASE ACCESSION NUMBER: AK104819
  ref <309>: DATABASE ENTRY DATE: 2002-08-28
ctcctcctcctcctcctcctccttccccaaccactcgcaaccaaaggcgcaccaaaccggagccaatccgagcgctccggcggcggaggcggcggcggccggacctactcgctgccgtgggtgggggctgggagggagcgggctggtggctcgtcccgtccgcgatggactgggcggcggcggggtacacggcggcggcgctggtgtgcgccgcggcggccaccgtcatcgcgctcgtgcacatctaccgccacctcctccactacgcggagcccatctaccagcgattcatcgtccgcctcatcttcatggtcccggtctatgccgtgatgtcgttcctttcccttatcttaccagataattcaatatattttaattctattcgagagatttatgatgcttgggtcatctacaatttcttttcactttgcttggcatgggttggaggtcctggtgctgtggtggtaagtttgaatgggcgaaccctgaagccatcgtggtttctgatgacttgctgttttccagctattcctctagatgggcgttttattcggagatgcaaacaaggctgtttgcagtttgtgattcttaagcctattttggtggttattaccttcatactttatgcgaaaggaaaatacgcagatggaaactttagtgtcaagcaatcctatctatacattactatcatatatacagtctcatactcaatggcactatatgctcttgcggtgttctatgcggcatgcagagatctgcttcggccatataatcctgtcccaaaattcatcatgatcaaatcagtagtgtttctcacatattggcagggtgtcctggttttccttgctgcaaaatctcggtttatcaaaaatgctgaaaaagctgctgatctccagaacttcgtattgtgtgttgaaatgctcatagcagctattggccacctatttgcatttccttacaacgagtatgctggtcccaatggtcgaccttctggtgatttcaagggaagccttctgcatgctctgaagttcaatgatttctaccatgatactgttcatcagtttgcacctacctataacgaatatgtgctgtacaatcacaatgagggagacagcactcaaaggaagtatccttcagtgagtaccgtgccatccgggcgggatgtagaattgtctggcatctctgtgatgcctgcgaacagtgcggtgacatcaagcgtatcgtcaaaccaggcagatcaggaagaaacaatgagcaccccaatcaaggacagagttgataatgtagggctttacgacctgacagacttgcttgatgtggatttgtctaactacccagccaaggttcctgcaatctctgatgtaagaaaacaatgacattgtgatggcctttggcgggtggcaatcggggaaatcgtgttttccgtttgatcatagataacgctgtaaaaatgtgtgtattacttcccattgaagggagctattcatgtcagcacctgtcttacggcctctctgactcgctcttttcgctaactgtaaaatgttgtgagcttaaagtgaattgaaagtgagt

SEQ ID NO: 4582 - DNA, 1093 bp, Oryza sativa
  ref <308>: DATABASE ACCESSION NUMBER: AK104820
  ref <309>: DATABASE ENTRY DATE: 2002-08-28
atcatggagttccctcatcgccaccaccaccacggccaccgcggcgacgacgacgacgacgatcgccgccgccatcccgctcccgctcccgcctacggccacgactcagcccctccgccgggtccctacggccaagcgcctcctccggctgatccctacgctcgccacccgccttcccacgactacgctcatcctcctccggcgtatgggggagggggctacggcaacgtcgtccacgtttcccacgaggtctccgaccaccagaggcccacgccgcactacggtggatccgagtacatcagccccgtccaagagacccgcccttaccacggtggcggaggagccccaccggtgacccacaggatctactgcaaggccggggaggacaattacagcctcgccgtcagagatggcaaggtctgcctcgtccgctccgatcgcgacgaccacacgcagcactgggtgaaggacatgaagtacagcacgagagtgaaagacgaggaagggtaccctgccatggcgctcgtcaacaaggccaccggcgacgccctcaagcactccatcggccaatcccaccctgtccgtttggtgcgctacaatccagagtacatggacgagtctgtgctgtggacggagagcagggacgttgggagtgggtttcggtgcatcaggatggtgaacaacatctacctcaacttcgacgcgctccatggagacaaggaccacggcggcgtgcgcgacggaaccaccctggtgctctgggagtggtgcgagggtgacaaccagcgctggaagattgttccctggtgatcaaatcaaatctatctgtctatctctacatatgagtgagggaggtttatggaataataagaggcgcctctgatcgatggaggggccggcaggtgtggtcgctcgactggccctagctaagtgttttgttttgtttggtccagctctgtaataatccagccatctcattgtttggaatgtttgttgttgatccataaaatttggtcccggtacgaatatgaacatgtcacgtctgtgtgtgtgtgatactgttacttgtgatgcatctacgtacattgcatac

SEQ ID NO: 4583 - DNA, 1567 bp, Oryza sativa
  ref <308>: DATABASE ACCESSION NUMBER: AK061876
  ref <309>: DATABASE ENTRY DATE: 2001-12-06
aagtaaacccaaagccgccaactgcttctctcgccgccgccgccgccgccgccgccgctcaccgtcgccggagaagagggcaggaggaggaggaggaggaggaggggggagccatggcgccggagcccgaggacgacatcatgaacgagaagaacccgcgcccgctcgacgaggacgacatcgccctcctcaagacctacggtcttggaccttactcgaccagcattaagaaggttgagaaggaaatcaaagagatggcgaagaagataaatgatctctgtggaattaaagagtctgacactggattggctccacctagccagtgggaccttgtatccgataagcagatgatgcaggaggagcaacccctgcaggttgcaagatgcacaaagatcatcagccctaacacggacgatgctaaatatgtcatcaatgtcaagcaaattgcgaagtttgtggttgggttgggcgacaaggtctcccccactgatatcgaggaaggaatgcgggttggagttgatcgaaacaagtaccaaattcaaattcctttgccaccaaagattgatcccagcgttaccatgatgactgtggaagaaaaaccagatgtgacttacaatgatgttggtggatgcaaggagcagattgagaagatgcgtgaggtggttgagcttcctatgcttcacccagaaaagtttgtcaaacttggtatcgatcctcctaagggagtactgtgttatggccctcctggaactgggaaaacacttcttgctagggcagtggccaaccgcacggatgcttgctttattcgagtcataggaagtgagctagttcagaagtatgttggtgagggggcccgcatggttcgggaactcttccaaatggcacgatcgaagaaggcttgcattgtcttctttgatgaagtcgatgccatcggtggtgctcgctttgacgatggtgttggtggtgacaatgaggtccagcgcactatgcttgagattgttaatcagcttgatggatttgatgccaggggaaacatcaaggtcctcatggccaccaacaggcccgataccttggaccctgcattactacgtccagggcgtctggacaggaaagttgagtttggcctgccagacctggagggccggacccagatcttcaagatccacactcgcaccatgaactgcgagcgggacatccggtttgagctgctcgctcgcctctgccccaactccactggggccgacatacggagtgtgtgcacggaggctggcatgtacgccatccgcgctcgcaggaagacggtgacagagaaggatttcttggacgcggtgaataaggtgatcaagggttaccaaaagttcagcgcaacgcccaagtatatggtgtacaactagagggcactgaccttgatttcccgtttcttcctgtgcccctcctttggaccttcagaaagattgagcctgtttgtttccctttcttactcaaaagaaacctgggctgttttctgcatcatatgacacgctgggataatcttatctttagaatattgaaagatcacaatgggagg

SEQ ID NO: 4584 - DNA, 1298 bp, Oryza sativa
  ref <308>: DATABASE ACCESSION NUMBER: AK061877
  ref <309>: DATABASE ENTRY DATE: 2001-12-06
gatgccatggcattctggagtgcgtgagtctcgaggcaaatctggatgcttccaacccccaccatccccaccacctccctcctcgatccctcgcctcggaggccgcaggtccaaggtttcctcgcgagctgggctctctctctttcttccactttcggattggtgattggtgttgggggcgtttcttgattcggtggtggggtgggatcgatcgccatgggagagcagcggcactggatttatttgtgaggatgattgttgaattggcaggcagtatttgagcggttgtctcccgaggaagaggagggattgctagtgttgtccattatagtaacagagagagagagagagccaatcttttgatgttttagagcataggtgttcttttttgcagttccaatggatgctaagggtgttaatgaccgggatgctctaattgatctggagagtggaaataacattgttgtcggcgagcataacaacggggcggatgccaattttgctgttgcccaagaaagaacagcaccgaatggttcatggaatggtgccatgggcaccaatggatgcctgaaagatgatgtaaatcatcagcacatgtgttgctgtctgtcctctccagatgctgctgccaaaaatggagatgaccagaagctcctcaatgagctgagtgaacttgctatattgaaacgggcaaggattgagcggatgaaggctttgaagaagatgaagaacgccaaacatgggtcttcaagtggcaacttgtttcccctgatcattaccattatcttctgcctcgtcatactctggcaaggttttttctcacgaacggggtcggctgtgagcttccatggatcacctgaatcgtccgttagagcgcatagcagtctgatctccattcggttctacaagaacaataattctaatagcagatctcgagaggccatatcggcagctcccaagaatgctgagacaccatcgaggctggagatccatagcaaagcaagaaagatcacgagatgaacattgcgccccgagcatgatccgccatccatgattgccgtcgccgcaatgcctcccaacttggccattttgaaacctcatcacgtcaggttgatgtaaattatgagaatttcagtgcttctcgaggccgtcctcactgtaaatgatgaactactcttttagtgtgggtgtgtgcccccctctctgggttctatgctaaccagtggtggtaagagcaagctgtcttgttacaataataataaaatgttgctcttaataatagtagtatgatctagtct

SEQ ID NO: 4585 - DNA, 1233 bp, Oryza sativa
  ref <308>: DATABASE ACCESSION NUMBER: AK104821
  ref <309>: DATABASE ENTRY DATE: 2002-08-28
gcaaccaaccagccagccagccatgcagcccgactccgcctcccaccgcatcgcccgcgtcgccgcccacctcagcccgtcgccgcgcccccagatggaggagggggtgaggccggcgccatgcagggccaagggcggcgcgccggggttcaaggtggccgtgctgggcgcggcgggagggatcgggcagccgctgtcgctgctcatgaagttgaacccgctcgtctctgtgctccacctctatgatgtcgtcaacacgcccggtgtcaccgccgatgtcagccacatggacaccaccgccgtggtccgtggtttccttgggcccaaccagcttgaggcagcacttacaggaatggatcttgtcattatccctgctggtctcccaaggaaaccaggaatgacaagggatgatttgttcaacaaaaacgctgggattgttcgctcactttgtgaaggcgttgccaagtgctgtccaaatgcaattgtgaacttgatcagcaacccagtgaactcaaccgtccccattgcagcagaggttttcaagaaagctggaacttatgatcccaaacgtctccttggagttacaacactggatgtagcaagggcaaacacctttgtggctgaagtacttggaattgacccaaaagatgtcaatgttccagttgttggtgggcatgctggagtgactatattacccctcctctcccaggtccaccccccatgctcatttaccccagatgaaatcagctatttgactaaacgcatacagaatggtggcacagaagttgttgaggcaaaggcaggagcaggctctgcaactttgtcaatggcttttgctgcagcaaaatttggtgatgcatgcttgcgagcaatgcgtggtgatgctggcgttgtggaatgttcatatgttgcatctgcggtgaccgagttgccgttctttgcaacaaaagtgaggttaggtcgtgctggagccgaagaggttctccctctggggccgttgaatgattttgagagagctggcttggagatggcaaagaaagagctgatggagagcattcagaagggcatcgatttcatgaacaagtgaggtgtatgaagggacaaagttatgcatacatgtaaagagtgtcctatatatagtgctcatatacatgtaaaattttcgccgggctcatatacatgtaaaatcacttctgtaaaacgaccgtgaaatgctaattaccctttagttgc

SEQ ID NO: 4586 - DNA, 1408 bp, Oryza sativa
  ref <308>: DATABASE ACCESSION NUMBER: AK061878
  ref <309>: DATABASE ENTRY DATE: 2001-12-06
atgaacctccttagcggccggaatatactgatgctctcaggcgaggagctgaagcaagtccgtggcgcactgcagaatttcttaagcccagaaatggtaatcaggtatgtctctaagatggatgaggaagtcaggaggcatgttaaggtgaattgggttggacacaagactgtcaaggttcttcctttggcaaagaggctcacattggacatcatctgctcggtcatcttcggacaagaggcaggttctgtcagagaagcccttgccaccgacttcccggcgatggtgagggctgcgctgtcgattccagtgaagatacctttcaccaggttcagcaggggcctgagtgcgagccaaaggatcaggaagttgctcagggggatcgctcgtgagagagagacgctcttgcagcagcagcaggctcatggcgcttcagcagctgacgatttcttcacatacatgctcgccttgcgtgctgaaggtgcgcactcgctcacggtcgaggacatcgtggacaacgcgatcttccttctgatcgcaggctatgagacgacatctgttctaatcacattcatgctctggcacctggacaaggagccagaagtcctttccaagataactgaggagcaagatgagattgccaggaacaagggacctgaggatgctctaacctgggatgatgtttcaaggatgaagtacacatggaaggtggcaatggagacagtgcgaacaatccctccaatttttgggagcttcagaacagttaccagagacatcgaataccagggctatcacattccaaaaggttggatggtattcacagcccaatctgttacacatttggatgcaaatattttccctgagccaagcaatttcgaccctgctcgattcgagaacaactcttcgattcctccttattgctttgtgccatttgggggaggtccaagaatgtgtcctggaaacgagtttgcaaggactgagacattggtgaccatgcactccttggtgacacagttcaggtggaagctgtgctgcaaggaagaaagctacaagaaagatccgtctccgacgcctcttcttggactcccagttgaactggagccgagatgcctccctgaaaatgctcatgcttaaaaattgcttcatgtccgtgcattttgagtttatgctatttgcagttagccagagagaatcatggagtaatgcagtacaaatccaagaactgacaagaattcaagtccaaattcaatccttagattgagaaaaacaaaagcaaatctatatgaacaatatagacactatctatattcggattctccaacttttgttatacatatgtagattaaatttaaactggcgtgttcgaggggtatgaataatgttatgatctacggtgttggcacttttc

SEQ ID NO: 4587 - DNA, 1587 bp, Oryza sativa
  ref <308>: DATABASE ACCESSION NUMBER: AK104822
  ref <309>: DATABASE ENTRY DATE: 2002-08-28
ctctcatcatcatcatcatcctcctcctccctatccccttctcccccctctctctctctctccaccccgcgcggcggccgcttccgatccctctccgaccgaccaagcgccgcctccaagaatggggagctcggagaagaacggaactgcttatggcgagtacacctatgctgaactggagagggagcagtactggccgtctgagaagctgaggatatcgatcaccggagctggtggtttcattggatcccacattgctcgccgtctgaagagcgaggggcattacatcatcgcctccgactggaagaagaatgagcacatgactgaggacatgttctgccatgagttccaccttgttgaccttagggtcatggacaactgcctcaaggtcaccaacggcgtcgaccatgtgttcaaccttgccgctgatatgggtggtatggggttcattcagtccaaccactctgtgatcatgtacaacaacaccatgatcagtttcaacatgctcgaggctgcacgtatcaatggtgtgaagaggttcttctatgcctcaagtgcatgcatttaccctgaattcaagcagcttgaaactaacgttagcctgaaggaatctgatgcctggcctgctgagcctcaagatgcctatggtttggagaagcttgcaactgaggagctctgcaagcactacaccaaggactttggcattgagtgccgtgttggccgcttccacaacatatatggcccctttggaacatggaaaggtggccgtgagaaggcaccagctgcattctgcaggaaggctcagacttccactgacaggtttgagatgtggggtgatggcctccagacccggtccttcacattcatagatgagtgtgttgagggtgttctgaggttgacaaagtcggacttccgtgagccagtgaacattggaagcgatgaaatggtaagcatgaacgagatggctgaaatcattctcagcttcgaggatagggagctgcccatccaccacatccctggacccgagggtgtccgtggccgtaactccgacaacaccctcatcaaggagaagcttggctgggcacccacaatgaagctcaaggacgggctgaggttcacctacttctggatcaaggagcagatagagaaggagaagacccagggcgtcgacatcgcgggttacggctcatccaaggtggtgtccacccaggccccggttcagctgggctccctccgtgctgccgatggcaaggagtaatttcaaagctgctacaccatgaagatcaatcagctcctctcagcttgatcgtggccataccttacttcgctacagatagctcacagaaatgaattcttcttggaaatcttgcaacctttcagaacaacaacagccgttcttcctgtcgttataactcatatgcagtacaccggtttcttgtgtttaaaaagctatactcgagatttcttcctcttttttttttcgcgtcgtgttggaaattcttcgtatggattacattttgtcatatgaacaatgaaacaatgggaatgctctgcattacctttatgaatagatgatgtgttcttcct

SEQ ID NO: 4588 - DNA, 1355 bp, Oryza sativa
  ref <308>: DATABASE ACCESSION NUMBER: AK061879
  ref <309>: DATABASE ENTRY DATE: 2001-12-06
gtactactacaagattgggcatgaactttctgacggatcaattgtctggggcaagcaatacactttccgggcgccacccttccctggccagaactcgctgcaacgcatcatcgtcttcggcgacatgggcaaggcggagagagacggatcaaacgagttcgccaactaccagccaggatctctgaacacgacggacaggctggtcgaggatctggacaactacgacattgtcttccacatcggtgatcttccgtacgccaatggctacatctcccagtgggaccagttcaccgcccaggtcgcccccatcaccgccaagaagccctacatgattgcaagcggtaaccatgagagggactggcccaacaccggagggttcttcgacgtcaaggactccggcggcgagtgcggcgttccggcagagaccatgtactactacccggccgagaatcgagccaacttctggtacaaggtggactacgggatgttccggttctgcatcgcggactcggagcacgactggagggagggtaccgaccagtacaagttcatcgagcagtgcctgtcgacggtggaccggaagcaccagccgtggctcatcttcgcggcgcaccgcgtgctgggctacccctccaactggtggtacgccgaccagggctccttcgaggagcccgaagggagggagagcctgcagcggctgtggcagcgccaccgcgtcgacgtcgccttcttcggccacgtccacaactacgagcggacgtgcccgatgtaccagagccagtgcgtctccggcgagaggcgccgctactccggcaccatgaacggcaccatcttcgtcgtcgccggcggcggcgggagccacctctcggactacacctcggcgatccccaagtggagcgttttcagggaccgggacttcgggttcgtcaagctcaccgcgttcaaccactcgtcgctgctgttcgagtacaagaagagcagcgatgggaaggtgtatgactccttcaccgtggagagggattaccgcgacgtgctcagctgcgtgcacgacagctgcctccccaccacgctcgcctcctgatgaatgaaacaagggaaaggatcattattaggatgcatgagttgatgcctcatcgtcaaaatgctggcagctgagaaagagtgatcggtcggtcgatcgagttgggttttattttttttcttcttcttcaaccatttcgatcaggtgtggtagtggtcgatcgcttggctcgatcgtgtttctcttcctcatggatggtgatgttgtgcaataaaattgcttagctgctcgggcacaaatgtctaataagattggcaatctgaatttctgagtc

SEQ ID NO: 4589 - DNA, 940 bp, Oryza sativa
  ref <308>: DATABASE ACCESSION NUMBER: AK061880
  ref <309>: DATABASE ENTRY DATE: 2001-12-06
atcatcacaccatcacgagcaccaccaccactcaccacgcgccacccacccccgcaccgcacgccaagatccgaccgccgccgccgccgccgccggagtagggagagggagaggagatggggcggagggcggggtcctacccctactacgtggaggcggcgccgccggtggacgtgaacaagaacacggagtggttcatgtaccccggggtgtggaccacctacatcctcctcctcttcttcgcctggctgctcgtcctctccgtctccgcctgctcccccgggatcgcgtggaccgtcgtcaacctcgcccacttcgccatcacttatcacttcttccattggaagaagggaactccatttgctgctgatgaccaaggcatctacaacagactaacttggtgggaacaaattgataacgggcagcaacttactcgtaataggaagttcttgactgtggtacctgtggtgctgtacctgatcgcgtcacacttgaccgactacaaacagccaatgcttttcctcaacaccattgcagttctggtactagtggtagcaaagctgccaaacatgcacaaggtccgtatatttggaatcaatgcagatatctgaggaccatatgaagaacatcagggcacaagcttctgtgtgtttgcaacgagggacaagcgaactttgtgcaaacacggtatctaaagtagtgaaaaaactaaactttttcaccactgcaatctgtagtatgtgcataggtgtaggaagaacctgtaaatgttactgtagcttataatttgcctacaggttggaggctgctgcatgtttgctcatgccacttcctttaagaactctagtggagagtgtagactgtaacttaaataaacatgtaatcttgtggatatggaaagtttggtggttgttaaaatggtgaaccggagttcagttcc

SEQ ID NO: 4590 - DNA, 2254 bp, Oryza sativa
  ref <308>: DATABASE ACCESSION NUMBER: AK061881
  ref <309>: DATABASE ENTRY DATE: 2001-12-06
gctttcccccaaacgtgacccggccgggagggagaagtcgccatgaagcagcctcccgctgctgctttctctctctcgcctcgttaaaatctctcttccaccccgaaccccatccagttcagttccctctcgatcgcttcccgtgctctcgctctctcgcttgctagatcagagattcccctctgcggcggttgtgaggtttccgcttcggctcgctagctagctctgctgtttctgtgagagccgggagcaccaaccgcgcgtggggtgggtgcccggagctttgatgcgcgtggccgccggtttctccccgtcgtttgatgggcaacgcatgcggcggttcccttagatccaagtacctgagcttcaagcagaccgcgtcgcagcgccacgacaccgacgacaacaacaacgccgccgcggccgactcgccgaagaagccctcccgccctccagcagccgccaagacggacgaccacccagtctccgcgtcggcgccggccgccgccatgaggcgcggccaggcgcccgccgacctcggctcggtgctcggccaccccacccccaacctccgcgacctctacgccatgggcaggaagctcgggcaggggcagttcggcaccacctacctctgcaccgagctgtccactggggtggactacgcctgcaagtccatttccaagcgcaagctcatcaccaaggaggacatcgaagacgttcgccgcgagatccagatcatgcaccatctctcgggccacaagaacgtcgtcgccatcaagggcgcctacgaggaccagctatacgtgcacatcgtcatggagctctgcgccggcggcgagctcttcgatcgcatcatacagcgcggccactacagcgagcggaaggccgccgagctcacgcggatcatcgttggggtcgtcgaggcctgccactcgctcggggtcatgcaccgggacctcaagccagaaaacttcctgcttgccaacaaggacgatgacctctcgctcaaggccatagattttggtctctcagtcttcttcaagcccggtcaaacttttaccgatgttgtcggaagcccatattacgtagctccagaagtgttgttgaaacactatggaccagaagctgatgtatggactgcaggtgtcattctctacattttactaagtggtgtacccccattctgggcagagacacaacaaggaatatttgatgctgtactaaaaggtttcattgattttgattctgatccttggcctgtgatctctgagagcgcaaaggatcttataacaaaaatgctcaatcctcgcccaaaggaacgcttaacagcacatgaagttctatgccatccatggattcgtgatcacggagttgctccagatcggcctcttgatccagctgtcctatctcgcatcaagcagttctctgcaatgaataagttgaagaagatggctttgcgggtaatagctgagagtctctcagaggaggaaatcgctgggttgaaggaaatgtttcagactatggatgctgataacagtggtgcgatcacatatgatgagcttaaagaaggcttgagaaaatatggctcaacacttaaggacaccgagattcgtgatcttatggatgcagcagatatagacaacagcggaacaattgattatatcgaattcattgctgcaacattgcatctcaataaactggagcgagaggaacatcttgtggcagctttttcatattttgacaaagatggaagtggttacatcacagtggatgaactgcagcaagcttgcaaagagcataacatgcccgatgcttttcttgatgatgtcatcaatgaagctgatcaggacaatgatgggcgcattgactatggagaatttgttgccatgatgaccaagggcaatatgggagtcggacgaagaacaatgagaaacagcttgaatatcagcatgagggacgcacctggtgcactctagacttccacgatgtacagcttacggattttagcttcttcctgtcttcctgcccaacgaactcctgcgattttttagcgttgtcagatgtccgcggatgtgtttttctggtggttctgatttaacttgtcaattgattccatggaatgcataacaagatgtccatgccacgctcaaacgaagctgggttgtaaatctctcgtacgccattgctcaactctgaaggtgttcggtgaactagctcgtattctttgtgttgcaatggatgaacttatactggc

SEQ ID NO: 4591 - DNA, 815 bp, Oryza sativa
  ref <308>: DATABASE ACCESSION NUMBER: AK061882
  ref <309>: DATABASE ENTRY DATE: 2001-12-06
gtgcccatcaattgcgactccagaaccttctcttcttccttgttcgttcatcccctaaccctttctttgttcatcttgttcttcctcttgtcgtctcgtcgagatggccgggattggtccgatcaggcaggactgggagccggtggtggtgcggaagaaggcgcccaccgccgccgccaagaaggatgagaaggccgtcaacgccgcccgccgctccggcgccgagatcgagaccatgaagaagtataacgctggaacaaacaaggcggcgtccagtggcacatccctcaacaccaagcggctggatgacgacaccgagagccttgcccatgagcgtgtctcaagtgacctgaagaaaaacctcatgcaagcaaggctggacaagaagatgacccaggcacagcttgcacagatgatcaatgagaagccccaggtgatccaggagtacgagtcaggtaaagctattccgaaccagcagatcatcgggaagcttgaaagggctcttggaacaaagctgcgcggcaagaaataatgttctactattaggccctgaagcatagtgttggagcaaccagagccaaaatgtttgcgtaacctatgctgggtcttttgataccatgcaggatgtttctgttggtgcatgagtgaatactgaataactattatgttgtcgcaaaccttgtaatgctgccgctctttgtgtgtcatagtccctagtgtgcaagagttgtgctggaccttaaaactgacttgataacctgcgtggtttatgcatgatgtttattaaaatatcaatgatctctttggctgtttac

SEQ ID NO: 4592 - DNA, 1381 bp, Oryza sativa
  ref <308>: DATABASE ACCESSION NUMBER: AK061883
  ref <309>: DATABASE ENTRY DATE: 2001-12-06
aatacaagctccccagcttgacataaacacggtggctgctggtggtggatcgaagcttaagtttcagtttggagctttcaaggttgggccagattctgttggagcacatcctggtcctgtatgctatagaaaaggtggtgagctggcaataactgatgccaatttgattctgggaactgttattcctgagtacttcccatccatatttggtcctaacgaagatttaccccttgattatgacgctactaaaaaggcatttgagattcttgctgttgagataaactctcaccgaaagagtcaggatccatcagcaaaggacatgacggttgaggagattgccctcggttttgtagaatgggtcttgtgtcatcgaagatgaagattacatggatgatggttctgtgctccatttgaagctcacccttgattcaagtaaaggcgaagcaacctttgactttgaaggcaccagtcctgaggtgtatggtaactggaatgctcctgaagcagtaacagcggctgctgtgatatactgcttacggtgcttggtcgacgttgatatacctctaaatcaaggctgcctagctcctgtgaagatcctaattcctaaaggctctttcctttctccaagtgacaaagctgcagtggttggtggtaatgtattgacctctcagagagtgacggacgtagtcctaatggctttccaagcatgcgcctgctcccagggttgcatgaacaatttgacatttggagacgacaccttcggttactatgagaccattggaggcggttcaggagctggggcgagttgggatggtacaagtggtgttcagtgtcacatgacaaacacaaggatgactgacccagagatctttgagcagcgataccctgttcttttacatagatttagcatcagggagaacagtggaggttctggtttccacagaggtggtgatggccttgtgagagagattgaattttgccagcctgttgttgtgagcattctttcagagagaagggtgcatgctcccaggggactgaagggaggaagaaatggggcccgtggtgcaaactatctcgtcaagaaagatggtcgtagagtttaccttggagggaagaacactgttatggttaatgctggtgagattcttcagattctcactcctggtggtggtggttttggctctccttgatggctattcttgtggacgatcatctacctcgcttctgggtattgtcatttctacttctttagtcctacttttatccacaaataaaacatgcagaaggcagaaacttgcacaaatattgcctgatacagatccaaactgtcattgttgcttctgggacattggagctgaataaggaagcatgttgcttgttt

SEQ ID NO: 4593 - DNA, 1125 bp, Oryza sativa
  ref <308>: DATABASE ACCESSION NUMBER: AK104823
  ref <309>: DATABASE ENTRY DATE: 2002-08-28
ataattgcgagcgatgtcggctgcgagtgcgagtgccactgcctccctctccgcggcggcggcggtggcggtggcggcggccgctctccgccccacgcagcagcgacgcctgcgcgttgtcgcgccaccgcgccccctcaggctcaccagtctcaacccccctcgcgcggcttccgccccctctactcctctgtgggaggccggcgtccgagctgagtcgtccgactcgcccggagccggagccgggggtgacgtcatgggcctcctcctccgggagcgcatcgtcttcctcggcaacgagatagaggacttcctcgccgacgcagtcgtcagccagctcctcctcctcgacgccgtcgaccccaactctgacatccgcctcttcgtcaactcccctgggggatcactcagcgcaacaatggccatctatgatgtaatgcagctcgtgagggcagatgtttccactattggattgggcatagctggttccactgcttctataatccttggtggtggcacaaagggcaagcgattcgccatgcccaacaccaggataatgatccatcagcccgttggaggcgcaagtgggcaggccttggatgtcgaggtccaggccaaggagatattgactaacaagaggaatgtcatccggcttatatcaggtttcacaggacgcactccggagcaggttgagaaagacattgatagagacagatatatgggtcctcttgaggctgttgattacgggctcatcgacagtgtaatcgacggagacagtatcatcccacttgagcctgtcccggagagggtgaagccgaaatacaactacgaggaactgtacaaggatccacagaagttccttacacctgatgtcccagatgatgagatatactaggtaatgagcctgcctgcctgtcgtttgcatttcgcacggcaagggggctgcttgcaatcaaagacgatgctcctagtcctagcactagttgatttttcctgtcacatgttaaccaactagtgccatattacgattgttgagcacgcagttagacttattggttgtgtttgtcgttgaaattgcatgcgtttggtgtgcgaatgtggatggattgatgaggtggtttgtgt

SEQ ID NO: 4594 - DNA, 1339 bp, Oryza sativa
  ref <308>: DATABASE ACCESSION NUMBER: AK061884
  ref <309>: DATABASE ENTRY DATE: 2001-12-06
ctaataagaagtgcaccacacaacaacaatgtgattatcaaattaagtacaccgacaaggcatcttctctcggtgtgcttgttatggacagtttctcactgcccctgaggaacaaatccaatgttcgtccgagcctcagttttggctgtggatatgaccaacaagtggggaaaaatggtgcagcaccagcaacaacagacggcttgcttgggcttggtaggggatcagttagcttgctctcacagctcaagcagcaagggatcaccaagaatgtactcggccattgtctcagcaccagcggagggggattcctcttctttggggatgatatggttcccacttcacgcgtaacttgggtatccatggtccggagcacgtctgggaattactactcacccggctcagcaacactgtactttgatagacgttcactgagcacgaagcccatggaggttgtatttgacagtggtagcacatatacatacttttctgcgcagccataccaagcaactatttctgcgatcaaaggtagtctcagcaagtcacttaaacaggtttcagatcctagtcttcctctgtgctggaaagggcagaaggcattcaaatctgtttctgatgttaagaaggacttcaagtcattgcaattcatctttggtaagaatgcggtcatggatatccctcctgaaaactacctcattatcactaaaaatgggaatgtgtgcttgggcatccttgatggatctgctgctaagctgagtttcagcataattggagacattacaatgcaggatcagatggtgatatatgataacgagaaagcacagcttggttggatccgtggatcatgtagtaggagccccaagtctattatgtcttcctttccatgatcatccctcacatttgatccatgagctggacatccgcttaatcataattggatgtatcactgatggagttggagaaagttattgctagcctcaagtcaccagtactgtgtaagtgaagaatgacaatctgttgccatccaaataaagtctgtactcttaaacacaaatggatggagaaataagatgaaatgagagaaggatgagcatgtaatagtaatagaggctgataacaaggcactaacctgtattctcctgttcatggtgaataatcatgtgccatttatttggaaccaaaattttggatgcaaataggtgtttttagtgttaagctagattggtttcgtagttgaataccacaactagaacatacaggtagcattgtgagttggccttttgtgactgtaaattttccaggtgagcagttcatgtagttagactatagcttcaagatg

SEQ ID NO: 4595 - DNA, 1157 bp, Oryza sativa
  ref <308>: DATABASE ACCESSION NUMBER: AK104824
  ref <309>: DATABASE ENTRY DATE: 2002-08-28
aaacgcccaccacagtctccccctttctgaacacagcaccaccccttctgctgcatctcccacctccctctgaattgtgggcctgaggcgatggcggcgctcgccccgtccaagatgctcggcacccggctcaacttcgccggctcctcccgctacgccaccgcggcaccgaccaccggagcgcagaagatcgtctccctcttcagcaagaagcccgccccgaagcccaagcccgccgccgtcacctcctcgagccccgacatcggcgatgagctcgccgagtggtacggccctgacaggaggatcttcttgccggagggtctcctggaccgctcagaggtgccggactacctcaacggagaggtccccggagactacggctacgacccttttggcctcagcaagaagccagaggacttctccaagtaccaggcctatgagctgatccatgccaggtgggcgatgctcggcgccgctgggttcatcatccccgaggcctgcaacaagtttggcgcaaactgcggccccgaggccgtctggttcaagaccggcgccctcctcctggacggcaacaccctcaactacttcggcaacagcatccccatcaacctcatcgtcgccgtcgccgccgaggtcgtcctcgtcggcggcgccgagtactaccggatcatcaacggcctggatctggaggacaagctccacccaggtggcccattcgacccgctggggctggcgagcgacccggaccaggcggcgctgctgaaggtgaaggagatcaagaacgggcggctggccatgttctccatgctggggttcttcatccaggcctacgtcaccggcgagggccccgtcgagaacctctccaagcacctcagcgaccccttcggcaacaacctgctcaccgtcatctccggcgccgccgagaggacgcccagcctgtaaacatctcgccgccggcgacgctggctggcctcaagttaattttaatcttacccgggaagaagaagggaggagtttgagaagggtggaagaatgtgttaaatgtacgtgtaaattatcgtcgagttgggagatgaatttgaaaacctgttcattctgatcttctgataggaaggaccaagtgtttggatttgtggctgagaaatatttgctacctg

SEQ ID NO: 4596 - DNA, 1993 bp, Oryza sativa
  ref <308>: DATABASE ACCESSION NUMBER: AK061885
  ref <309>: DATABASE ENTRY DATE: 2001-12-06
tgatgctttcagttcagccaccaacagtgtacgggagattgttggtaatgtcgatggtgtccagatacggatcattgatactccaggccttcgacccaatgtgatggaccaaggatccaacagaaaaatcctcgcttctgtcaagaaatataccaagagatgccccccagatattgttctgtatgtggaccgcctggatagtctgagccgtgatctcaatgatttgcctcttctaaagaccattacttctgttctgggctcatctatatggttcaatgccattgttgctctcactcatgctgcttccgcccctcctgaaggtctaaatggtgcccctatgacatatgaggtgctaatggctcagaggtctcacattatccagcaatccatcaggcaagctgcaggagatatgcggttgatgaatccagtagctcttgttgagaaccatccttcttgcaggagaaaccgcgagggtcagaaagtacttccaaatggccagagctggaggcatcagatgctgcttttgtgctactcttcaaagatattgtctgaagcaaactcacttctgaaacttcaggatccaaatcctggaaagctttttgggttccgtttccgctctccgcctctgcccttcctgctctcctccctgttgcagtcaagagctcacccgaagctttcaccagatcagggtggcaatgaaggagattctgacatcgatttggatgattactctgatatagagcaggatgaagatgaagaggaatatgaccagcttcctcccttcaagccattgaccaaatctcagcttgcgaggctgacaaaggagcagaagaatgcttattttgatgagtacgactacagggtcaagcttctccagaagaaacagtggaaggatgagatccgcaggttgaaggagatgaagaagagaggtaaaactgatatggatgcttatgggtatgctaacatcgcaggagaaaatgatctggatcctcctccagagaacgtatcagttcccttacctgatatggtgctgcccccttcatttgactgtgacaatcccacataccggtaccgctttctggagccaacttcgactgttcttgcaaggcctgtgttagatgcacacgggtgggatcatgactgtggttatgacggagtaagtgttgaggagacgcttgctctccttaacaagtttccagctaatatggcggttcaggtcaccaaggacaagaaggaatttagcatccatttggactcttccatctcagcaaagcttggggaggatgcatcgtcgcttgctggttttgatatccagactgttgggcggcagcttgcgtacattctccgtggtgaaaccaagttcaagaatatcaagaagaacaagactactggaggattttcagtgactttcttgggcgacattgtggcgactgggctgaaggttgaggaccagctctctcttgggaagaggttggcactggtggcgagcacaggtgcaatgcgagctcaaggcgacaccgcttatggagctaacttggaggcacgcctgaaagacaaagattatccgattggccagtccctgtcaaccctgggtctttctttgatgaagtggcgccgagaccttgctctcggtgcgaatttgcagtcccagttctcgattggaaggggctcgaagatggtggttcgtcttggattgaataacaaactaagtggccagatcactgtcaggacaagcacctcggagcaggtccagatcgcgctgttgggtcttatcccagttgcagcctccatttacaggagcttcaggcccagcgaaccctccttcgcctattagcttcgcatcaagatgaacaatttactcatgtcggctgcgcctcctttcgtcttagcaattttcctatcttatatgaaccataattttctgtctgtttttgcttttaccagtgtactccgaagatcgttcctatcataattttggctgaagagggttgtg

SEQ ID NO: 4597 - DNA, 389 bp, Oryza sativa
  ref <308>: DATABASE ACCESSION NUMBER: AK061886
  ref <309>: DATABASE ENTRY DATE: 2001-12-06
aaaaagctgacattatatgaccctaggagctcagtaagttaaaaagtggtgaaatgtgatgatatgttctgcacttcgcccgatagggatgtgcagccagaatgcaacacaagctaactttgtccattcatcgcgacctatgctgatggtggatcaacaataggcgcctttgtcactgatcttgtgcactataatcaactctctgggaatgggctgactcaatcaactaacaccagcctcacattcgggtgagttgtgtccattgaagaaatttttgtatgtgaaattttttgaattagaactgaagtgtacgattgtaaaataccgttgatagacaatagttcaacaacatgccatcttacgtgcaataatactctttcttttttgcc

SEQ ID NO: 4598 - DNA, 1860 bp, Oryza sativa
  ref <308>: DATABASE ACCESSION NUMBER: AK104825
  ref <309>: DATABASE ENTRY DATE: 2002-08-28
agtgcaccagagtcacagaaacacatcacacattcgtgagctcagcttagccatggataacgcctacattattgccattctctctgtagctatcctcttcttgctccactactacctcctcggccgcggcaatggcggggcggcgcggctgccgccgggtccaccggccgtcccgatcctgggacacctccacctcgtcaagaagccgatgcacgccaccatgtcccgcctcgccgagcggtacgggccggtgttctcgctgcgcctcgggtcgcggcgcgccgtggtggtgtcgtcgccggggtgcgccagggagtgcttcaccgagcacgacgtgaccttcgcgaaccggcccaggttcgagtcgcagctgctggtctcgttcaacggcgccgcgctcgccacggcgagctacggcgcgcactggcgcaacctccgccggatcgtcgccgtgcagctgctctccgcgcaccgcgtcggcctcatgtcggggctcatcgccggcgaggtccgcgccatggtgcggaggatgtaccgcgccgcggccgcgtcccccgccggcgccgcgcgcatccagctgaagcggaggctgttcgaggtctccctcagcgtgctcatggagaccatcgcccacaccaaggcgacccgccccgagacggacccggacaccgacatgtccgtggaagcccaggagtttaagcaggtcgtcgacgagatcatcccgcacatcggcgcggccaacctgtgggactacttgccggcgctccggtggttcgacgtgttcggcgtcaggaggaagatcctcgccgctgtaagccggagggacgcgttccttcgccgcctgatcgacgcggagcggcggaggctggacgacggcgacgagggcgagaagaagagcatgatcgccgtgctgctcactctgcagaagacagagccggaggtgtacaccgataacatgatcacagctctaacggcgaacttgttcggagcaggaacagagacaacctcgacgacatcagaatgggcgatgtcgctactgctgaaccaccccgacacactcaagaaagcgcaagccgagatcgacgcatccgtcggcaactctcgcctgatcaccgccgacgacgtgactcgcctcggctacctccagtgcatcgtcagggagacgctccgcctgtaccccgccgcgccgatgctcctcccgcacgagtcctccgccgactgcaaggtcggcggctacaacatcccgcgcgggtcgatgttgctcatcaacgcgtacgccatccaccgtgacccggcggtgtgggaggagccggagaagttcatgccggagaggttcgaggacggcgggtgcgacggcaatctcttgatgccgttcgggatggggaggcggaggtgccccggcgagacgctggcgctgcgcacagtggggttggtgctgggcacgctgatccagtgcttcgactgggagagggtcgacggcgtggaggtcgacatgactgaaggtggcgggctcaccatccccaaggtcgtgccgttggaggccatgtgcaggccgcgcgacgccatgggtggtgttcttcgcgagctcgtctgaatattttttggcggcgtttgcatctccaggacgaactcatgtattgaaagcaccaaaagtaagtagcaaataagcttctcgtgagcatacacataacacatgtgagcttgtaatgtggaataaattacacgtagaggatttggaagagagtgactgcgctagcaatcgctctttgagagttgtgttttacagttttagtgaggaaccaatttgtatgaatgtgcaataatcatgtataaagtataattgtacacgccaggtatttc

SEQ ID NO: 4599 - DNA, 1519 bp, Oryza sativa
  ref <308>: DATABASE ACCESSION NUMBER: AK061887
  ref <309>: DATABASE ENTRY DATE: 2001-12-06
ggatgagatccacagccgcctggggcgagctcgagcgtggcggcggaagcgcggcgaggttcagcagcggggatcggggaggcgagccggccggcagaagtgcggaggcggagcacagcgaggagggagacgaactggttggccactttgcctcaaccatatacaaaaatagtgtttcaccggatgttcatcttgctgctctttttttccctcaaaactgttcgtagatcgaccaggaattcgcgatggttgcgctctccaagttagtgctgatcactgcagtggcgctgctgggctgggcgtacaaggtcgcgcggccgccgccgccgccgatcttgggcggtccgggagggccaccggtctcctctccgagagtccagctcaaggacggccggcacctggcctacagggaagccggggtcggcagggagatcgccaagtacaagatcattttctcccatggcttcgcctccaccaaggaatccgacttcccggtgtcccaagagctggcagaggagctggggatttacctgctgtacttcgacagggctgggtatggcgacagcgacgccaacccgaagcgggggctgaagagcgacgccacggacgtcgaggagctcgccgacaagctgcagctcggggagaagttctatgtggttgggacttccatgggcggctacgttgcgtggagctgcctcaactacatcccttacaggctggccggcgtggcgctggtcgtgccggcggtgaactactggtggccgatgcccgccagtgtgtcggccagtgcgtaccgcaagctggacgtcggggaccggaggacgttctggatcgcgcaccacatgccttggctgttctacgcctggttcaatcaaaagtggttcaggatctcaccgatcgtggaggggaagcccgaggctttcactgaaaaggactgggagatcctagctgagattcagagaactggccaattggacagggggagggcgacgaagcagggagcctaccactcgctgtgccgcgacgcgacgatcctgttcggggcgtgggagttcgacccgacggcgatcgagaacccgttccccaacggggacggcgtcgtcagcatctggcaagggcgcgaggacaagatcgtgcgggtggaggcgcagcgctacgtggcggagaagctcccgtgggtacggtaccacgagcaccccgagggcggccacctcttcatgtgcgccgacgggttgggcgacaagatcgtccgggagctcctgctcggcgaggagccgcgagatttgtagacagatcgagttcgtgtcctgtttcgctacacagagaggggaacacaaactcacagattggggaggaatataggtccaagcggtgcttgtagttgttgatggaataaacctccgatttgctaaactagaaaatcgaacttaaaatcctgtgaatttctaacttctgatatgcaccgcagtctgtgctccgatcaggctagtgttgaatatatagattgtgttttcttttc

SEQ ID NO: 4600 - DNA, 1539 bp, Oryza sativa
  ref <308>: DATABASE ACCESSION NUMBER: AK104826
  ref <309>: DATABASE ENTRY DATE: 2002-08-28
agccgatacgggagattggatcggaagcttctagaagtttccgtgggcgatggcgatccgcgcgaggtcctcctcctacgccgccgcggcggtcgcgctggcgctcgcgctggcgtccgtcgccgctgtcgccggcgaggtcttcttccaggagaagttcgaagatggatgggaaagtcggtgggtcaagtcagaatggaagaaggatgagaacatggctggtgaatggaaccacacatctgggaagtggaatggagatcctgaggacaaaggtatccaaacctctgaggactacaggttctacgctatttcagcggagtacccagaattcagcaacaaggataaaaccctggtgctgcagttctctgtaaagcatgagcaaaagcttgactgtggtggtggatatgtcaagttgcttggtggtgatgttgaccagaagaaatttggtggggacacaccgtacagcattatgtttggaccagacatctgtgggtacagcaccaagaaggtccatactatctttactaagaatgacaagaaccatttgatcaagaaggatgtcccctgcgagactgatcagctgtcccatgtgtacactttgatcatccatcctgatgctacatacaccatacttattgacaatgttgagaagcaatctggcagcatctacgagcactgggatattctgcctccgaagcaaatcaaggacccagaagctaagaagccagaggactgggatgacaaggagtacattcctgaccctgaggacaagaagcctgagggatacgatgatattcccaaggaaatccctgaccctgatgctaagaagcctgaggactgggatgatgaggaagatggtgagtggactgcaccaaccattcctaaccctgagtacaagggaccatggaagcaaaagaaaatcaggaaccctaactaccaaggcaaatggaaggcaccgatgatcgacaacccagacttcaaggatgatccatacatctatgcttttgacagcctgaagtacattggcattgagttgtggcaggtcaaatcaggtactctgtttgacaacttccttattactgacgaccctgagttggccaagacattcgcagaggagacatggggcaagcacaaggatgctgagaaggctgcttttgacgaggcagagaaaaagaaggaagaggaggaagctgccaaggccggtgaggacgatgatgatttggatgacgaggatgctgaggatgaggacaaggccgatgagaaggctgactctgatgcagaggatggcaaggattctgatgatgagaagcatgatgagctctaagatggtgaggatgaagaatggaggccgccttcgcgacgatgccaggatttgctagttctcccattgttatggagttccctttttcgtgatcagaaacttgacaagaaagtactctgtagatgagcattgctgaggaactttaatttggtctttgtagctctctctgtagtgtcatttttcccaccacaagaaaaagaactgataacttattgaac

SEQ ID NO: 4601 - DNA, 397 bp, Oryza sativa
  ref <308>: DATABASE ACCESSION NUMBER: AK061888
  ref <309>: DATABASE ENTRY DATE: 2001-12-06
tctcgtcgcggagtaccagcagtaccaggacgccacagccgatgaagagtacgaagacgaagaggaagaggctgaggccgaatagcattgagccccatttgcccttcacaggttgttttgccagtgaagagttttgtgtctttgtgatgctgtgctcttttttctttctctgacgtgcgtgatggatgtatgggtgaggtttgcgtccgtgcttcgttttgtcacctgtgctgcgtagcaggctgcagtcccgttttgtaagacgtctctggtggtcagtagctgaaggcttgaaaagtgttttgagtgccctccttgagctaaatcacctgtaagttctgacatgtattggtagtggttttctcatctctgtgaagcttctgtgtagtctgttact

SEQ ID NO: 4602 - DNA, 1373 bp, Oryza sativa
  ref <308>: DATABASE ACCESSION NUMBER: AK061889
  ref <309>: DATABASE ENTRY DATE: 2001-12-06
gtaaaaagatacaattgccaaccttccgtgattgcctaaaggagcgaggaactgtccaaatgctaacaatctcacgagaagtggcacttgaagttcagtcactcaccacagttcttgggtcatgtcttggaaatgtcatgtgccaatcacttgtattatttgaagatctcttggtgtccacaacacttccaccggatgatacactaaacctatatacttatgctatcttgaggttaactcctcgtgctttattgtccaatgcaacttcctggtcctatctgcggaaaggaacttcggttcatgctggccccacttctagttcatcaaatggaacagcttcagtagaaaggcctctccagcgtgagaaactatacaaaggaaaggatggttttgttgccgctggttccactacttcagaagttcgtggtgctgtggcttgggttcccatactgtggttccagcaggcagaagaccgcatgcatctctgtgtttatcagcacaagaacataaccattctgctactgattccagcttcatctctaataaatggagatgatggcattgctcatgtgaagagacatcttcttgaaaatgcatcacagaacattgtgactctggagctgaaattatcacgaggatggggaggagaaaatgcttatcatgttggtggatatcgctacttacttgttgatccagatagaaaagtatcaagagcctccccacctgggaaagtcaccaccctctcaaaggattctctactttccttgaatagactaagagaagaaatagatttggagaagtcaagggccaagaggtctgactcttgtcatgacaaggatttcgaagtatgcatcagagccaaaaataatgcatgggtcattgctaaagttacccgaggaagagaactttatatggcgttagagaaggctggtgaaacacttctttatgcatctactgccatcgagaagtttagcaacaggtactgtgaaggagcattctctacagactagaacaccgaaatgacaacgattgttttatccaaaccactcacctatccagcttcgtcatttaggctgtgcggctcgctccctcatggtgtcgtgaatatggatcttgttattttgaagagattcgtacatgttgtgcagctgccatgttgttgcctttctatgcatacaaaacaaatagcttcgtcagagaacaatacagcgcaggaaacagtcagtttcccctgccctgcgctccgacgtccttccagttccagattcgaccatcttaatttgtttgttgtatattctgacgatggacctgctgacttatgtagtagttcattcgattgcttcgatatctatgtttcaattcagtttgttgtt

SEQ ID NO: 4603 - DNA, 364 bp, Oryza sativa
  ref <308>: DATABASE ACCESSION NUMBER: AK061890
  ref <309>: DATABASE ENTRY DATE: 2001-12-06
gagctgaaggctgcttggcagatcttcactcccctgctgcacgacatcgacgaaggcaaggtgaagtctattccataccagcctggcagccgaggccccaaggaagccgatgaactgagcgagagggttgggtatatgcagacccacggttacatatggataccacccacccttgcatagacagacagacagacagacagtagtattgtttagctaggaagagtgcctctaaactgttattattgcggatatattcgtttcatattttcacgataacgcctgactagtgactacctggcgttgtaataatgtgttgcttcgtaagtataactgctattgtgaaataaaagtgcatgtttcgatc

SEQ ID NO: 4604 - DNA, 1304 bp, Oryza sativa
  ref <308>: DATABASE ACCESSION NUMBER: AK061891
  ref <309>: DATABASE ENTRY DATE: 2001-12-06
tgatttttaatgtgacttcattcaaatgcgaagttaacaatattcaaagattcaggaatcttgcaataggacggtttcagaatgcattgacatacatcgacaaggataatggtgctcatggatccaaggcggggttccctatatctggattttacagtgatatgaggaaaatgcagaacataaatggtttagaggggcagttattgttggaacctatcactaatgatttacaaccaatggaaaaatgcaattctgttcaatctcctaaagtggcaaattttactgcccttcacaatgtagataatgagagcatgaaccatgtttcaacagcaactggagcaaccacatcagtcacaacagtggacactttaccttcaaccatcagaccattgagcagctactccctcttggatggatctcttgatgatggattaccatcacctgcaagtaatgtatcattcaggcctcagataaccaacaattcttcagtaagcaatggtacaatgactgacatctcaaatgggtgtctcacgagcatcaattctggacagaatgaagcatctgattctcacaactcagtggagtttacccagtatttccaagagggctattgtaaaatatcagaactcgatgactgccgtgagttaactgaagctgttactgatgctgacagcagcagcagccactgcgagagagagaagcccgaggaagatggggataacgatgacatgcttggggctgtttttgccttcagcgaagaaggttgaacctaataatatactctgcttttacatagagaatggaaaacagtgcccgtgatattacctagaaaatggtggatttccattaggctttcgtggaataaattggtgctgagatgataatctactatttggtacatattagaaaggtgaagcttgtgctcgatatccatttgtgagaagttttactcaggaattgagatcaagatccttccttccgggccattaactaatccacggatccacgttaaggggagcttggtgttgtcgagaagttgctgctgcctgccgcaacactgccccttttccgttgctttgtacatactgtaaaagaccatttgttttgtgaaatacgtctctggaacattggacggtccaacttccttggcagccatatttgttgactgcttcctgccaaggcctgttaatgttccttgtttatttgtacagtcttttctgtttcattaaggaaaaagaaaatctagcaaggattaatgtgacataactgtataaacattcagtaaagaatttccgtttacgaag

SEQ ID NO: 4605 - DNA, 879 bp, Oryza sativa
  ref <308>: DATABASE ACCESSION NUMBER: AK104827
  ref <309>: DATABASE ENTRY DATE: 2002-08-28
aaacgtgagcccgctacactgacaacaacaagctcatcgccaacccgctactgaagcagcagcctaccagcaatggcgttgccgctgctcaagtcgtccccccacttctctgctcttcactccgcgaacagagcccagctccatggccgctgccgtgcaacgctcggtggattccatgacccgaggtccaactccagccgttgcaagaaatcggccgggaggggttcagtgaaggcgaacgcgtccccgttggacgtggtgacgctgatggtgacgatggtggagcacgtcgacctgcagagggactacgtcgtgcacaagtcgatctggcatctcagcgacgccgccctcaagagcgtctataccttctacgccttcttcacagtctggggcatctgcttctttgcgtccatgaaggatcctttctacgacagtgaggcgtacaggggacaagggggtgacggcaccgtgcactggtactatgaccggcaagaggacctggaggcgtctgcaagagaggagctcctgagggaggagctactcgaggagatcgagcagagggtcggagggctcagagaactcgaggaagcagccaaggaggagcagcttacaaactgatggatgaatgagagattgcgcatggatggatgactgcatgatcctggcgcgatgcggctgcattctgtaataccgtacagagcggctgtgtaatagcaagatacacagttgcctgatagcgcctgtaaatgttggcatcagactcaaaaggaaagcaaataggtgctccgtctgcatgaatgcattatattgcatttgtagtgtaggctaaaagaaggaatgtactactccatgttaatcaaagaacctgtaccgttcacc

SEQ ID NO: 4606 - DNA, 1153 bp, Oryza sativa
  ref <308>: DATABASE ACCESSION NUMBER: AK061892
  ref <309>: DATABASE ENTRY DATE: 2001-12-06
attaatggtgctggtatcaactctagttttgctgttcaccaggatgttgatggaagggcaactgatgttgctctaggatggtcagttgcgctgggatctcccttcacatttgctactaccttagaacaggagtacaagagcgatatctttggggagcgaggcattcctcttggagctgttcatggcatcgtggaggctctgtttaggagatacacagagcaaggaatggatgaagaaatggcatacaaaaacaccgtagagggcatcactggaattatctcgaaaactatctcaaagaagggaatgcttgaagtgtacaactccttgacagaggaggggaagaaggaattcaacaaggcctacagtgcatcattctatccttgcatggacatactctatgagtgctacgaagatgttgcctctggaagtgaaatccggagtgttgtgttggctggacggagattttacgagaaggaaggccttcctgctttccctatgggcaacatcgaccaaactcgtatgtggaaggttggtgaaaaggtgcggtcaacccgaccagaaaacgatcttggccccctgcatcccttcactgctggagtctacgttgcactgatgatggctcagatcgaggtccttagaaagaagggtcactcctactcagagatcatcaacgagagcgtcatcgagtccgtggactcactgaaccccttcatgcatgctcgtggagtggccttcatggttgacaactgctcaacgacggctcgtctgggatcaaggaaatgggcgccacgcttcgactacatcctgacccagcaagcattcgtgacagtggacaaggatgctcccatcaaccaggacctcatcagcaacttcatgtccgaccccgtccatggcgcaatcgaggtgtgcgctgagctgcggcccaccgtcgacatctccgtgcctgccaacgccgatttcgtgcgcccagagctccggcagtcatcgtagagtgagataagataatctcaagggagcttgcatcttgttacagtttgtccgagagtattgtatgtgtgtgcgtgactgtctgaacttgtgagcttgccatcaggtgacctggaactggcctgagcatctttttcccgaataaaatgaggcccggattctgaat

SEQ ID NO: 4607 - DNA, 2137 bp, Oryza sativa
  ref <308>: DATABASE ACCESSION NUMBER: AK061893
  ref <309>: DATABASE ENTRY DATE: 2001-12-06
atcgccacagcgcaccaccaccaccaccaccaccaccaccaccaccgtctccagccatggcctcctccgcctccctgcagcgcttcctccccccgtacccccacgcggcagtatcccgctgccgccctcccggcgtccgcgcccgccccgtgcagtcgtcgacggtgtccgcaccgtcctcctcgactccggcggcggacgaggccgtgtcggcggagcggctggagccgcgggtggagcagcgggagggccggtactgggtgctcaaggagaagtaccggacggggctgaacccgcaggagaaggtgaagctggggaaggagcccatgtcattgttcatggagggcggcatcaaggagctcgccaagatgcccatggaggagatcgaggccgacaagctctccaaggaggacatcgacgtgcggctcaagtggctcggcctcttccaccgccgcaagcatcagtatgggcggttcatgatgcggctgaagctgccaaacggtgtgacgacgagcgagcagacgaggtacctggcgagcgtgatcgaggcgtacggcaaggagggctgcgccgacgtgacaacccgccagaactggcagatccgcggcgtcacgctccccgacgtgccggccatcctcgacgggctcaacgccgtcggcctcaccagcctccagagcggcatggacaacgtccgcaaccccgtcggcaacccgctcgccggcatcgaccccgacgagatcgtcgacacgcgatcctacaccaacctcctctcctcctacatcaccagcaacttccagggcaaccccaccatcaccaacctgccgaggaagtggaacgtgtgcgtgatcgggtcgcacgatctgtacgagcacccacacatcaacgacctcgcgtacatgccggcggtgaagggcggcaagttcgggttcaacctcctcgtcggcgggttcataagccccaagaggtgggaggaggcgctgccgctcgacgcctgggtccccggcgacgacatcatcccggtgtgcaaggccgttctcgaggcgtaccgcgacctcggcaccaggggcaaccgccagaagacccgcatgatgtggctcatcgacgaacttgtgaaccatttttttctccattcatccacgccattgactgaattacgtatgtcccaatgttcttatcagttaattgcggtgttggcattgcagggaatggaggcttttcggtcggaggtggagaagaggatgccgaacggcgtgctggagcgcgcggcgccggaggacctcatcgacaagaaatggcagaggagggactacctcggcgtgcacccgcagaagcaggaagggatgtcctacgtcggcctgcacgtgcccgtcggccgggtgcaggcggcggacatgttcgagctcgcacgcctcgccgacgagtacggctccggcgagctccgcctcaccgtggagcagaacatcgtgatcccgaacgtcaagaacgagaaggtggaggcgctgctctccgagccgctgcttcagaagttctccccgcagccgtcgctgctgctcaagggcctcgtcgcgtgcaccggcaaccagttctgcggccaggccatcatcgagacgaagcagcgggcgctgctggtgacgtcgcaggtggagaagctcgtgtcggtgccccgggcggtgcggatgcactggaccggctgccccaacagctgcggccaggtgcaggtcgccgacatcggcttcatgggctgcctcaccaaggacagcgccggcaagatcgttgaggcggccgacatcttcgtcggcggccgcgtcggcagcgactcgcacctcgccggcgcgtacaagaagtccgtgccgtgcgacgagctggcgccgatcgtcgccgacatcctggtcgagcggttcggggccgtgcggagggagagggaggaggacgaggagtaggaacacagactggggtgttttgcttgctccggtgatctctcgccgtccttgtaaagtagacgacaatatgccttcgcccatggcacgcttgtactgtcacgttttggtttgatcttgtagcccaaaagttgtgttcattctcgttacagtcttacagaggatgattgattgataaataaagaagaaacagattctgc

SEQ ID NO: 4608 - DNA, 887 bp, Oryza sativa
  ref <308>: DATABASE ACCESSION NUMBER: AK061894
  ref <309>: DATABASE ENTRY DATE: 2001-12-06
acgcagcgatctgaagtgaaacagcaaaaaaaatcaaacaaaaagaaaaaatattccccatctgtgaaattcgcaaaaccctagcgcggcggcgatgtcgaacacgagggtgttcttcgacatgaccgtcggcggagctccggcggggcggatcgtgatggagctgtacgcgaaggacgtgccgcggacggcggagaacttccgcgcgctctgcaccggcgagaagggcgtgggcaagagcggcaagccgctgcactacaaggggagcaccttccaccgcgtgatcccggagttcatgtgccagggcggcgacttcacccgcggcaacggcacgggaggggagtcgatctacggcgagaagttcgccgacgaggtgttcaagttcaagcacgacagccccggcatcctgtccatggcgaacgccgggcccaacactaacgggtcccagttcttcatctgcaccgtgccctgcagctggctggacgggaagcacgtcgtgttcggccgcgtcgtcgagggcatggacgtcgtcaaggccatcgagaaggtgggatcccgcggcgggagcaccgccaagccggtcgtcatcgccgactgcggccagctctcctagatctgtgctgttccccttcgcctttcgccagtatcagtcgtcttgagtcgtcgagtccctaaataaggaggaggtggtggtggtgttagtctttttatgagttcgtgtcgtgttggtgagatgagatcgcccatggtttggttggattaggcggagttcttggatcgattcggtggagttggatctgcgatccttcttggggttggttttaaatcttaattcgtgtcgctgcttctatgatatcgctatcaatcaatgagaacatttgggatcc

SEQ ID NO: 4609 - DNA, 1321 bp, Oryza sativa
  ref <308>: DATABASE ACCESSION NUMBER: AK061895
  ref <309>: DATABASE ENTRY DATE: 2001-12-06
actcaaacagccttgcctcctcctgttgagttgacccgatcccatccggtgttatccatcccttccctgatcccccatccatcgccgccgccgccgccgccgtggagacgatgacgacgacgaagaagaagctcgtcatcgacaccgacccgggaatcgatgacgccatggccatcttcgtggcgctgaggtcgccggaggtggagctgctgggcctcaccaccatcttcggcaacgtctacaccaccctcgccacccgcaacgccctccacctgctggaggctgttgggaggactgacatccccgtggcagagggatcccatgtaacaatcaagaaagccaccaagctacggattgcgagctttgttcatggctcggatggtctaggaaatcagaactttcctccgccaactgggaagcccttagatcaatcggccgccgcgtttcttgtcgagcaggcaaatctgtaccctggacaagttactgtggttgcccttggtccacttaccaacctagctttggctatagaacttgatccttctttcccgaagaagattgggcagattgtgatccttggtggtgcgtattcagttaatggaaatgtcaaccctgcagctgaggcaaatatatttggtgaccctgatgcagctgatatagttttcacctccggtgctgatattttggctgtgggaataaatattacacaccaagtagttctttctgatgctgaccgggaaaagcttgaacagtctgatagcaaatatgcccgatacttgagcaagatcctgggtctttattatgattaccacaaggacggctacttcataaaaggagtgtatcttcacgatccagcaacacttattgctgcggtagatccgtcactgatgacttacacggaaggtgtagtgagggtgcagactgatggcatcacaaagggtctcacagttttcgacacaaccaagaaaaggtatggggagataactgcgtggaccggtaagccaaccgtgaaggttgctgtgaccgttgatgctcctgccgttgtggagatgatcatgcagaggcttacgacggatgattagcagcagcagcagcagcagcagcaagcaagcagccaagggaaaaacgctgcctttgtcttgttgaacctgtcggatcttataaagaatagacaatgctgtatatcctaaattctgaagaatttgctttacatgattcgtcgtcgaggttgatcaacatcacacagaactagctagaaacagcctgatgcactgattcagaggttgacaatccatttcaattttatggccagaattcatactac

SEQ ID NO: 4610 - DNA, 1775 bp, Oryza sativa
  ref <308>: DATABASE ACCESSION NUMBER: AK104828
  ref <309>: DATABASE ENTRY DATE: 2002-08-28
ccttgtgggtgtgtgctgtggtggagaggagaaagggaggaagaagaggagagcaagaaccaaaaaccaagagctgctgccaaccctgcacagcctgggcttgtgatcattgattgcccaactattactaccttcctgtttttttcttctcatatagaagaatcccatctatctatcccttatacatatctcttcttctctttggttcttggaaatctcccatctcttctagatttcctttgtggcttcaagggcctccacaccatatcttgattagtagttggttgctcttcttcttgttcttggttttcttgattgcttagggggttggaattttgcggttcttggtttcttggtctttccccccaatctttgcaagtcttgtagagagtatttgagttgttccttccgcttgttggggagccatggatgataggattccgccaccctcgcccttgcagtactcgccgtctcccgtccattcttctcctcaccccctcagttctttgaggtattcttcctctgaaagagagagatatctggctgagttgcttgccgagaggcagaaattagctccatttgtacaagttcttcccttctgcaccaggctcttgaaccaagagattctgcgggcgtcttctttgccacctaaccataattttgttgatcctgagagaatcgagcatggtagcccattgaggttacctggcctcccagtgaatggtcagccaatggatctggagggatggtcagggatgcaaacagagaatatgagggttctgcaagcatcatctatgggctggaatggtcctccagcaattactggcacccctgttgtcaagaaagttgtgaggctagatgttcctgtcgacaagtatcctaattacaactttgttggtcggttgttggggccacgaggtaactccctcaaaagagttgaagcttcaacccagtgtagggtttatattcggggacgtggttcagtgaaagattctgttaaggaggacaagctgagagataaacctgggtatgagcacctgaatgaaccgctgcatgtgcttgtggaagcagagttcccggcagatattattgatacccgtctaaaccaagctgtgactatcctagaggatcttctcaaaccaattgatgagtcaatggactgctacaagaagcaacaactgagggaattggccattctaaatggcaccctgagagaggaaagcccaagtcctcacctgagccccagtgtatcccccttcaactccaccgggatgaagcgcgcgaaaacagggcggtgatctcggttccgaaagcattattattctccaaatctggtcatggtttctatgtctgatcacatgctgctgtgctttgctggagatgattggtgatgcatatgctgggatcatcagtgctgctggcctatgcctgtcatgatctgccttgttttatcatccttgggggtgaatgatcctctctgtgggcttgatgtttgacggtattattatttattctttgtgcatctgacttctgaatattaacattattggtttgggtaagttaacaacaaggcccggtttggccaatctagaaagaattgggatcccaagtgtcggacaataatcaggttttgtcggtgtacctgaaagaaatagtagtaatttgtcaaaggggctggtgctcttgtgtgctagtgcttagtacaagacagccgagcaatgaagcaagtatagctgaagagacaaccctccattaatgattatttgcattcatac

SEQ ID NO: 4611 - DNA, 2440 bp, Oryza sativa
  ref <308>: DATABASE ACCESSION NUMBER: AK061896
  ref <309>: DATABASE ENTRY DATE: 2001-12-06
tctcaaaaccctctcctaaccctagccgccgccgcagccgcagccgcagccgcgcgtcgtctcctccgcccgcgagctcctcttcccgccggcgagagatcaggagcacgcaaggcgcgcggccatggcgtcggagaccgagacgttcgccttccaggccgagatcaaccagctgctgtccctcatcatcaacaccttctactccaacaaggagatcttcctccgcgagctcatctccaactcctccgatgcattggataagattaggttcgagagcctcacggacaagagcaagctcgatgcgcagccggagctgttcatccacattgtccccgacaaggctagcaacaccctgtcgatcatcgacagtggtgtcggcatgaccaagtcggacctcgtcaacaacctcggtaccatcgccaggtcggggaccaaggagttcatggaggcgctcgctgctggtgctgatgtgtccatgattgggcagtttggtgtcgggttctactccgcctaccttgttgctgagagggttgttgtgaccaccaagcacaacgacgacgagcagtatgtgtgggagtcacaggccggtgggtccttcactgttacacgtgatacctctggtgagcagcttggacggggtactaagatcaccctctacctcaaggatgatcagctggaataccttgaggagcgtcgcctcaaggatctggtgaagaagcattctgagttcatcagctaccctatctccctatggactgagaagacaactgagaaggagatttctgatgatgaagacgaggaagagaagaaggatgctgaggagggaaaggttgaggatgttgatgaggagaaggaagagaaagagaagaaaaagaagaagatcaaggaagtctctcacgagtggaacgtgatgaacaagcagaaacccatttggttgaggaagccagaggagatcaccaaggaagagtacgctgctttctacaagagcttgacaaacgactgggaggaacatctggctgtcaagcacttctctgtggagggtcagcttgaattcaaggccatcctgtttgtaccaaagagagcgccatttgacctctttgacaccaggaagaagcaaaacaacatcaagctgtacgtacgccgggtgtttatcatggacaactgtgaggagttgatcccagagtggctcagctttgtcaagggcattgttgattctgaagaccttcccctcaacatctcacgtgagatgctccagcagaacaagatcctgaaggtgatccgcaagaaccttgtgaagaagtgcgtggagctcttctttgagatcgctgagaacaaggaagactacaacaagttctacgaggctttctccaagaatctcaagcttggcatccatgaggattccaccaacaggaccaagattgctgagctcctgaggtatcactccaccaagagtggtgatgagttgaccagcctcaaggactacgtaacccggatgaaggagggccagagtgagatctattacatcactggtgagagcaagaaggctgttgagaactcccccttcctcgagaagctgaagaagaagggttatgaggtcctgtacatggttgatgccattgatgagtacgctgttggtcagcttaaggagtttgaaggcaagaagctcgtctctgccaccaaggaaggtctgaagcttgatgagagtgaggacgagaagaagcggcaggaggaactcaaggagaagttcgagggtctgtgcaaggtgatcaaggaggtgctcggtgacaaggtggagaaggttgttgtctctgaccgtgtggtggactctccctgctgtctagtcactggggagtatggctggactgctaacatggagaggatcatgaaggcccaggctctgagggactccagcatggccggctacatgtctagcaagaagaccatggagatcaacccggagaatgccatcatggacgagctccgcaagcgtgccgatgcggacaagaatgacaagtccgtgaaggacctggtgatgctgctcttcgagactgccctgctgacctccggtttcagcttggaggaccccaacaccttcggcaccaggatccaccgcatgctcaagctcggcctgagcatcgacgaggacgagtccgccgaggctgacgccgacatgccgccgctggaggacgacgccggcgagagcaagatggaggaggtcgactaaacgtcatggacccatggatgccattctgtcccttctagttatccctctcctagttctcttctcatagctatctgactgctgctgttcgctttctttttggtacgttggatgcatcagttttgtctttgtcttagctcttaaacaatgcgtggtaccttgtcatactgtttgcgttgcaatgctactagccgaagtatatgccagcttcttattcat

SEQ ID NO: 4612 - DNA, 599 bp, Oryza sativa
  ref <308>: DATABASE ACCESSION NUMBER: AK061897
  ref <309>: DATABASE ENTRY DATE: 2001-12-06
ctatgctcaaaaggatggtgctaccgctttcttccttgtagaatgtatcgtcaacacagcatcagcgaaggcacagatcaaagtgaaggctgatgatgggaccgctgcagaggcattttcaacgttgtttcagtcagctttgtccaaatttgggctttcttgatcctgagcattttatattggtgatgagcctgtcagtttctctgcttgtcctaccacatccttgaacgtcctaaagatttttggtacatctttaatgggaatgttgaagcatgagtttgaacatcctcaacagcatatacagcagggagagcacaggctggagttttttaaggatgtatttatggtggctcggtggagaaaaattagcattgtcgtatatttcatctggagaagtgagttgttgtggcttcttgtgtttctgaaggtgaatgtcacctgttttgtcgatgtagagacaatatagatacagcgctgcttctgtatgttagtactccgtatttcttacttgcacagggcaataaagctgttcattctaccaatatgaagtgacacatattaagcccctttacattgtgaagtaaatcgactgatttctt

SEQ ID NO: 4613 - DNA, 1620 bp, Oryza sativa
  ref <308>: DATABASE ACCESSION NUMBER: AK061898
  ref <309>: DATABASE ENTRY DATE: 2001-12-06
ggcgtgtgtgtgattagttcaaaaaagaaaaatagaagcgagatgtcggcgttgctcgatctgctcatgggggtcttccgccagccgaccctcggcggcgtcgccctcgagctcgcctccctcgccgcgccgctctggctcgccgccctcgtcggcctactcatcggctgggcgtggcgcccgcgctgggccctcgtcgtcgtcggggaggcgccgccgccgccgcgtgccgccgccgaggactcctgccgcaagaacgagctagttgccgccgttcctagaactgcgatggccgccgccgcgccggaggaggatgagggattggccgtcgacaccggagatttgatgcacctccgccgccttgtcgaggagaaggacggcgggccggcgtggattcacatgatggacaagacgctgcccacgatgcgctaccaagcatggaggagagatcctgagggtggcccgcctcaataccgcagtagcactatctttgaggatgcatcgccagaagttgtcagggatttcttctgggatgacgagttccggattaagaacacttgggacgacatgcttcttcagcacgatacgttggaggagtgcacaaagactggaacgatggttctccggtgggtcaggaagttcccgttcttctgcagtgacagggagtacattatcggtcgcaggatatgggcatctggaaagacgtattactgtgtaacaaagggtgtgcctcgcccctctgttccaaggtgcaacaaacctcgtcgtgtggacgtgtactactctagttggtgcatccgtccagttgaatcaagaaacggtgatggctcaatgaccgcatgtgaggtgctcctgttccatcatgaggaaatggggattccaagggaaattgcaaagctcggtgttcggcaggggatgtggggctgcgtcaaaaggattgagcctggcttgagggcataccaaatcgcaaggactgctggcgagcccctttcaaaatgcgctgccatggcacatgtcaacacgaaggttgatcctgatgagctcatcactgcagaggacaagacagaggccagttcaaccaacaacgctgaagctgagaaaccaaagcactggacaggcaatatacccaaagtcatccttgtaggtggcgcagttgccctggcatgcacgtttgaccatggactgttaacaaaggctctcatatttggtacggcgaggaggtttgcaggaccaggaaggagatgaagttaagtcctaatgaacaattcttcgcttatcatttttcaacagaaggtacaaaaggtcgcccgcaaagctgtcatcgtaccaatagtccaatacagcagatgatgcagatcaagccttttttgcagttcagatagtgccattgttgcatattctgggttggtttgtccatgttagatcagttcatgaaaagatctagttcgagacaaaaaggagtgttcgtttagcagactaggggcatactgctgttactgcagtttctgaggattagaactagctaagctgggattttgagaccaaaaaaccggttgtatggtgtacaatgtattaacgctcaaatttgaggtgctataaaatatagtgctattgtttgtt

SEQ ID NO: 4614 - DNA, 868 bp, Oryza sativa
  ref <308>: DATABASE ACCESSION NUMBER: AK061899
  ref <309>: DATABASE ENTRY DATE: 2001-12-06
tcgatttctccacttctctctctctccctttctctctgtgtgcagcggcggcctggcagggacagaggggagcgtgcggcggcccagcggcggcggcgccctcccctccaccagatctaacaggagcaggaggagaggcacggtcatggcgaacggtgtggaggtgcaacgccggtgaccacaagccggctagggctccaagtttggacaacccgagctcggggggctgtggatctagctgtcccgagtttgggtactccagatccagtggcctccggcgccaacagcgccagatccaggctcatggtgagtggatggcgtctcctctctcctccaatcggctgtgtgcgctgccgtccgccgtcaaggcctatcggctgtacggcgagcatgtgcttctcctcatcctgtgcagtcaccacctaccggctacattagctagacatctttggagctgcttctccagttgctgcagctctttgagattcagagattcaagatcctctcccatgagatggctgcaggaattacagaaaatcaattttgctgcaagatcctcttctcccataaggtaaataggtgctccatagactatggagttgctgacatagcagataattgaatgactctgcttttctaagtgcaagccattgtgttctttgagttttatattaattctcgaacttgatgatgttggcctggtagcatgtctctatatttgaaaactcaaaagagctcttttctgatatggcatcattactttctaatttttgaatttgtaatttctttttctatgagcaattttggcagtacgaatgtaagagacatggtcctaattcttgtttgtctggagaatgggaattggttg

SEQ ID NO: 4615 - DNA, 1152 bp, Oryza sativa
  ref <308>: DATABASE ACCESSION NUMBER: AK061900
  ref <309>: DATABASE ENTRY DATE: 2001-12-06
atttagcttctgatgttacagactccatgttggaagaagcattcaaaaccagttatccttcagttagaggagccaaagttgtttttgacaaagtcactgggcgatccaagggatatggttttgtacgttttggagatgaaaatgagcaaacacgtgctatgactgagatgaatggagcgaccttgtctacaaggcaaatgaggcttgggccggcagctaacaagaagaatatgggtacccagcagacatattcaacaaatggacgccatgccaccttatagggtctggaattgtcttcagctgagatacatgtcacaatccatggcctcagttaggttaccagagctcccaaggaaacagtttggagaatgatcccaataatacaacaatctttgtgggcgggttagattccagtgtaaatgaggaccatctaaagcaagtatttactccatatggggaaattggttatgtgaagattcctctaggcaagcgttgtggatttgtccaatttactagcaggtcatctgctgaagaagccatccgtgtgctgaatgggtctcagattggtgggcagcaagttcggctttcatggggccgtactcctcagaacaagcaggctccccagcaggatgccaaccagtggaatggcaactactatggataccaacagggctatgattcttcttactatggtgcacccaatgcacaggatcctagtgcgcaaaactactatggatattctggctatggcaattacgaacagcagcaggagcccccacagcagcagcagcaacccccacaacagcccccacagcagtgaccatggcgacgtgcaactttcagatctcgcagttggattatcagggtgtacattttgcgtgaactcgagctggcgcttccttaagttatttgtagatgtctttgtgtggatgaggtcgtgttctagctccgctaccacctgtcgttagacgactgatcgaacccttttgacagtagccagtgtttcgttttttgggcctccctgggtgtgatgatcatcaaatctgatgctctgagagttactgaggcgactaatgttatttatggatggtttgtttgggcttttgcatggaaatgaaaccatcacccccctgtgaggctgtgattcccgtc

SEQ ID NO: 4616 - DNA, 1519 bp, Oryza sativa
  ref <308>: DATABASE ACCESSION NUMBER: AK104829
  ref <309>: DATABASE ENTRY DATE: 2002-08-28
acgaacagcaaccaccaccagcacctcctcctccgccgccgacgccgactcctccctccaagctttccccaccatggcgtcgtcgtccgtcttcgctggcctcgcgcaggcgccggaggaccccatcctcggggtgacggtcgcgtacaacaaggatcccagccccgtgaaggtcaatctcggcgtcggcgcctaccggaccgaggaagggaagcccctggtgctgaatgtggtcaggcgcgctgagcagatgctgatcaacaacccgtcacgtgttaaggagtatttgccgatcactggactggccgatttcaataagctgagtgctaagcttatttttggtgctgacagtcctgccattcaagagaatagggtggctacagttcagtgcttgtcaggaactggttctttaagggtgggaggtgaatttcttgcaaggcattatcatgaacgcactatatacatcccacagccaacctgggggaatcaccccaaagtgttcactttagctggcctgactgttaggagttaccgctactatgatcctgcaacccgtggactggatttccaagggctgttagaagatctcggttcagctccttcaggtgcaattgtactgcttcatgcttgtgcccacaaccctactggagtagacccaactttggaccagtgggaacagatcaggcagttgatgagatcaaaagcattgctgccattctttgatagcgcttatcagggatttgcaagtggaagtcttgaccaagatgctcaatcagtgcgcatgtttgttgctgatggtggtgaattgctcatggctcagagctacgctaagaacatgggattgtatggagagcgtgtcggtgctttaagcatagtttgtggaagtgctgatgtagctgtcagggttgaaagtcaacttaagcttgtaattaggcctatgtattcaaaccctcctattcatggtgcatctatcgtggctaccatacttaaggacagtgcaatgttcaatgaatggactgtggagctgaagggcatggctgataggattattagcatgaggcaacagctttttgatgctctgaaaacgagagaaactcctggagactggagtcacatcattaagcagatcggaatgttcactttcactgggctcaacagtgatcaagtggctttcatgaggcaggaataccacatttacatgacatctgatgggaggatcagtatggctggtttgagcgggaggaccattccgcatcttgcagatgcaatccatgccgcagtcacaaaactgaagtgaatgatggtagcatagcagctccctccaagaataacatcttaaaaccatccgcagcagtgttctgaggattcagacagtgatgtttgctggctgagcacatcctggaagtttccttgtaatagactcgtgtgacttgcttttgggagcagttttgtaccagtggattcagaaaaagtggtgatttcgaatcacctaataagctccatcggtgatgcttttacc

SEQ ID NO: 4617 - DNA, 1107 bp, Oryza sativa
  ref <308>: DATABASE ACCESSION NUMBER: AK061901
  ref <309>: DATABASE ENTRY DATE: 2001-12-06
aaataattcctttgctggaacaaacaactcaactaagagcaccactcctcataattgcggaggatgtagctggcgaagctttggcaactttagttgtcaacaagcttagaggaattctcaatgtagctgcgattaaagcacctggctttggtgaaaggcgtaaggctcttcttcaggacatcgccatcgttacaggtgctgaatttcaagccaaagatcttggtttactggtggagagtacaaccgtggagcaacttggcatagcccggaaagtgacaatctcccagtcatccactaccattatagcagatgttgccaccaaagatgagatccaggcaagaattgcacagctgaagagagagctttctcagacagactcagcatatgactctgagaagttggctgagagaatcgcaaagctttctggcggagttgcggttataaaggtaggagctgcaaccgagacagagcttgaggatcgcaagcttcgtatcgaggatgccaagaatgcaacatttgctgctattgaggaaggtatagtacctggaggtggtgcggcctatgttcacctgtcaaaatttgtaccagccatcaaggagaagttggatgaccctgaagagcgccttggtgctgatatcattcaaaaggctctagtggcaccggcagcactaatagcacacaatgctggagttgaaggggaagtgattgtagaaaagatcaaggagagtgaatgggaggttggctacaatgcgatggctgacagacacgagaacttggtacaggctggtgtgattgaccctgcaaaggtgacaagatgtgcgttgcaaaacgcagcctcggtggctggaatggtactaaccacgcaagccatcgttgtggagaagccaaagaagaaggcgtcggcggcttccggggcaccagaaggttctcttgccatgtgaaggaggtgatcatatctcccattctattctacctgtggtgtgtgattttgctactgcgtcgtaacaacaaaacagtacaagatgtttagcagaggtaaacttgtgaacaagaagaataaatcaatctagtccaagtgaagtgagtagctgtgatggtttccttttg

SEQ ID NO: 4618 - DNA, 2115 bp, Oryza sativa
  ref <308>: DATABASE ACCESSION NUMBER: AK061902
  ref <309>: DATABASE ENTRY DATE: 2001-12-06
aagggtggcccatattcacgacttgtgaaactgcagaagatggtgagctacatcgatcaagaaggtggtgaccaatttagggcctcttcagtggcaaggaccagtaccagccgtctcagtatgtccagagcaagtccaatgccacttacaccaggtatttcaaaggaaaccgattcctctgtttctcccccggcaccatctttctccaggcttcttgcgatgaatgcaccagagtggagacaagcagtcataggaagtctctctgctttggtatatggttccttgcagcccatctatgctataaccatcggaggaatgattgctgcattttttgttcaagatctcaaagagatgaatgcaattatcagccgctatgccttgattttctgctcattgtcggtgatatccattgttgttaatctacttcaacattacaatttcgcttacatgggagagcatctagtaaggcgtatcagagtccaagtacttgaaaagatcttaacctttgaggcagcatggtttgatgaagaaactaattcaagtggttcactgtgctctcggcttagcaatgaggcttctcttgtcaaaacccttgttgcagatagaatttccctactgcttcagacagcttctggaattataattgcagtgacaatgggccttatagtagcttggaaacttgctcttgtcatgatcgctgtacagccaactacgatgatatgctactatgccaaaaagatagttctctcaaatgtgtcaagggacttagcaaaggctcagcaccaaagtactcagattgctatagaagctgtttacaaccacaggatggtgtcctcttttggatgctcatcaaaggttcttcagctctttgagcatacacaagaggaaccactgaagagagcaaggaagaaatcatgggtggccgggatcaccactggactgtcaccttgcctttcattcttgtcatgggctcttgacttctggtatggtgggaaattggcacaatctggggagatctccgcaggtgatgtcttcaaaacattttttgtcttggtgagtacaggaaagttgattgctgatgctggcagcatgacatccgacctggctaagggagcaaatgcagttgcttcagtgtttgaggtgctagacaggaaatctatctctccacaaaattcacaggtggaaaaggacaatcagaagaacaaaatacaaggaaggatagagttcaaaagggtagattttgcatatccgacaagaccacaatgccttatcctgcaggattttagcttggatgtgaaagcaggaacaagtattggtcttgttgggagaagcggctgtggaaaatctaccatcattggtttgatccagaggttctatgatgttgacagaggggctgtaaaggttgatggtatggatgtgagggagatggatatcctttggtatcgaggatttacagcccttgttagccaggagcctgcaatattttctggtagtgtcagggacaacattgcttttggtaaaccagaagctgatgaagacgagatcgtggaagctgctaaagctgcaaatgcacatgaattcatatcatctctaaaggacggatatcatactgactgtggtgagcatggattacaactatcaggagggcaaaagcaacgaattgcaattgcgagggcaataatccggaatccagcaatacttctacttgacgaagcaacaagtgctctcgatgcacagtcagagcaagttgtgcaggaagcccttgatagaatcatgtcaggaaggactacaattgtggtggcacatcgactgaacacaatcaagaatgtagattcgattgccttcttaggagagggtaaggtagtggaacgtggtacttatccacacctcatgagtaagaaaggagcattctacaacctagcggctcttcagaaataaactgcttgtataatgtaaagtactgccataagtgacatgacaacttaatatagcataatatcagtgccacttaacaagttttggggtaatttcttcttcttctgtcatcagaagatgtatcttacctagaacttgtctttcaagaggtctaagatatgaataaatgcaaactagtac

SEQ ID NO: 4619 - DNA, 1238 bp, Oryza sativa
  ref <308>: DATABASE ACCESSION NUMBER: AK061903
  ref <309>: DATABASE ENTRY DATE: 2001-12-06
ctcttccccgtgcgacccgcccaacccaaaccctaggtcacccagcgccgcggcgcccccggttgctgacttgccgcgggaaggaggatgagcaggcggtggagccggacgatctacgtggggaatctccctggtgacatcagggagagggaggtggaggatctcttctacaagtatggccgaattgttgatattgacttgaagatccctccgaggccaccaggctatgcttttgtagagtttgaagatcctcgtgatgctgaagaagcatgtgctggcagggatggttataactttgatggacatcgtctaagggttgaacctgctcacggtgggagaggtaatggtggttcctcctttgaccgccccagcaactttggtggtggaggacgccgtggtgtgtccaggcactcagaataccgtgttctggttactggtttgccttcttctgcatcatggcaagatttaaaggaccatatgcgcaaggctggtgatgtttgtttctcagaagtgtatcgcgagggcggcggtactgtagggattgtggactacacaaactatgatgacatgaaatatgctataaagaaacttgatgacagtgaattcaggaatgccttttctaaaggtcacataagggtgaaggaatatgatggcaagcgcgcccgctcctattcacgtagccgaagcccaagtcgtagccgaagcaaaagcaggagtctaagtaaatctcctagaactcgccgttcagcatcccgatctcgatctcgatcaaggtctgtttcttcccgttcacggtcagcatcaaaagggcgctctccatcaagatcaccagcaagatccaaatctccaaatgcttctcctgcaaatggtgaagcatcaagccccaagaaacggagcccaagcaggagcccatctcgttcacggtctcctgatgcgaaatctgaatagaagtgatatgctgatgtgagcagtgacacggacttctcatgtacggctatttgctgtccttgatgtccgattacatccgaatcttagctgtggtgcaatgaagctccattaaatttgatactatgaatttgtagtaatgaaaacatcaaactatgcacttcatgtggccttctgtggctggtcttgttcccttgggtttttggtagttcgccgaatgctactatctggattatttttactcaaaacatatgtcggatgcttattgatttccatgtcagttatttcttggc

SEQ ID NO: 4620 - DNA, 625 bp, Oryza sativa
  ref <308>: DATABASE ACCESSION NUMBER: AK061904
  ref <309>: DATABASE ENTRY DATE: 2001-12-06
ttacactgctgaggatactgaatcagcagttaaaggaaagttcgatgccgtgttggataccataggagtacctgaaactgagagaattggcattaatgttctgaggagaggcggacactatatgacccttcagggagaggcggctgccctagcagatagatatggattagctgtgggacttcctgctgctactgctgttttactaaagaaacaaatgcagtaccgttattctcatggaatagattattggtggacatacatgagagctgactctgaaggacttcatgagatacagaggctgtctggagctgggaaattgcagataccggtggagaagacatttcccatcagcaaagtaagagaagctcacgaggccaaggagaaaaggctggtgcctggcaaggtggttttagaatttgactagttttagtaagattcttctcttgtaggaacagaagaaccgcacctgtctgtaaatcgtaagaactttctcctttttctttacctctattttggaaatatgtatcggtttgttggcctgacaaaatttggtcgtcctgtcaagatgcatttgtcatacatggaaatgcagtaagcaataacgtgaggcccgaaagaaattttc

SEQ ID NO: 4621 - DNA, 1278 bp, Oryza sativa
  ref <308>: DATABASE ACCESSION NUMBER: AK061905
  ref <309>: DATABASE ENTRY DATE: 2001-12-06
agtggtggtctgcactctgcaggcaggcaggcacccaggcctgcagctcgatggcgccgccgccgccgtcgccgccgcgatctctcacctccgtctccctccggactcctctgagccctctcctcttcctacggccagcttcttgcaatccatcggcggtctccggctcctgcagcagcggagcatgccgcggcgtgcgctgctcggcggcgaacaagccttctccttccaccgctccgggcaccgaggtaagctcgacctccatggcaaagataaggagtgaggtgctgtccccgttccgctccgtgcggatgttcttctacctcgcgttcatggccagcgccgggctcggggccctcatcgcgctcacgcagctcatcccggcgctgtccagcccggcgagggcggccgccgcgggggagacgctcaagggcctgggcatcgacgtcgcggcggtctccgtcttcgcgttcctctactggcgcgagagcaaggccaaggacgcgcaggtggcgaagctcacgcgggaggagaacctgtccaggctcaggatccgcgccggcgagggccgcccgcccgtcccgctcggcgagctgaggggcaccgcgcggctcgtcatcgtcgccggccccgcggcgttcgtcaccgagtcgttccgccggagcaagccgttcttgaaggacctcatggagcgcggcgtgcttgtcgtgcccttctcgacggacggcaacgcgccggacttgcagttcgacgaggccgacgaggaggaggaggaggcggcggcggcggctgggaagatgaagcggaggctctggcagctcactccggtttacacttctgaatgggccaaatggctagatgagcagaagaagctagccaacgtgtcacctgattcccccgtgtatctctcgctccggctggacggccgcgtccgtggcagcggcgtcgggtacccgccgtggcaagcgttcgtggcgcagctgccgccggtgaaggggatgtggtccggcctccttgatgggatggacgggagggtgctttgaatatttgactgatacagaccgtgaaaacattagttgattggagaaaaaaaaggacggccgggttcgatctatagcttatactagaacaagaacaggaagagtttgatgattgctttaacttctgtggggttgattttgcttcctgcatcccagcgacatcgcccaagtgaatgtgatatgccatgtgcccatgtacatgttgttttgcagcctacgtgacttgattattaacgag

SEQ ID NO: 4622 - DNA, 1899 bp, Oryza sativa
  ref <308>: DATABASE ACCESSION NUMBER: AK061906
  ref <309>: DATABASE ENTRY DATE: 2001-12-06
tttttgaaggggatgagaatagttcaaaggcctgaggactttgtggattctgtattgagtgctcaacgagaagccgcagcatcatttggcataaacacgctgctggttgagaagtatattacccaacccagacatatagaagtccagatatttggagatcaacatggaaatgtgattcacctttatgagagagattgtagtctacaaagaaggcaccaaaagattatcgaggaagctccagctccaaatgtgacagctcagtttcggtctcatattggtgaagctgctgtatcagctgcaaaggcagttggttactacagtgctggaacagtggagtttatcgtggatactctttccggagaattctatttcatggaaatgaatactcggctccaggttgaacacccagtgaccgagatgatcgttggccaagatcttgttgagtggcaaatacgaattgcaaatggagagtgcctaccattatctcaggagcaggttccgttaaatggacatgcgtttgaagcccgaatatacgcagaaaatgtgccaaggggatttcttcctgctacaggaaccttacaccactacaggccagttccctctaccgcaacagtaagagttgaaactggagttgaagaaggagatactgtcagcatgcattatgatcccatgatagccaaacttgtggtttggggtgaaagtcgcaatgctgcgctagtcaagctaaagaacagcctgtcaaactttcagattgcaggtttgccgaccaatgttggtttcctccaagaactcgcaggtcatagtgcctttgaaaaaggcctagtcgatacacatttcattgaacgctatcaaaatgatcttctgagtacttctactcaagccttgagtggatcacatgaagcagaagagcttggtgcaattttggctgctgcctgcatttgcaagaaggatcatgtttcctctgaagtgtcacttcatgataagaaactttctatgtggtacgcccatccacctttcaggatgcatcattttgccaagcgtctaatggaatttgagttggatagagaacttggtggatcaagtgatgatcttcttaaactgtcggtaacatatagatctgacggaacctacttcgttgagactgaagatggttcttctcctggattggatgtcaaagtagatagcagaggtgaccatgatttccgggttgatgttggtgggctgcaaacagacgtaactctagcattttattcaaaggacaattgcaaccatatacacatctggcatgggaagcatcatcatcattacaggcagacgttgagagctgagcagtcacctgatgacagttctcaacctagcgcttcctctgaggcgaggtcacatccaaaggggagtgttttggcaccaatggctggtctggttgtaaaggttttgcttaaagacggggcacgggtggaggaaggtcagcctgtcatggttatggaagcaatgaagatggagcatgttgtgaaggcgccttgtgccggatatgtggaagggctgaaggctactgccggacaacaagtttttgactctagtgtccttttcaccgtgaaggagaacaagccaaattgagaaacccaggcagagattcacgacctgtacagctcaattcacagacgcttcataagttggctgatgatgctgccggccgtccaaaagcgagcaaataataagcgacaacatcgagttcacaacacaaaagcaagcaaaaataagcaacgggttcatctgtgtgaataaattagttgacgagctcccaacccaccccctgttgtttgtcgcaaacctgaaactgtacagtgtacattactgctgtcacatacagtgacaaaaacaattaaacctcatttgttcttc

SEQ ID NO: 4623 - DNA, 1704 bp, Oryza sativa
  ref <308>: DATABASE ACCESSION NUMBER: AK061907
  ref <309>: DATABASE ENTRY DATE: 2001-12-06
atggaacgccgcgtctgacctgagccccctcgctttcctgcgcccggtgcccgatgccgctcgccggcatcgccctcgcgcctctcttcgtctcccacctcgcgcctccacatcatcgccgcagcagcgttgcttccgccgccgccgccgccgcgagaaggaggccgcgcgcggttcagtgctccgctaccgctactgccgcgtccggtgaaggcgcaggagacgacgttgagctctcccgagggacgctgctctggagggcggcaaagctgccaatctactccgtggcgcttgtgccactcacggttggaagcgcctgtgcttaccatcatgtgggttcattctttggtaaacggtattttgttctcttggttgcatcggtccttgtgatcacttggctcaatctaagcaatgatgtttacgattcagatactggggctgataagaacaagaaggaatctgttgttaacatcgttggcagtcgaacgatgacgcaatatgctgcaaatatttctctcctgttcggatttatggggctattttgggcctttgcccaagctggggatgccaggttcattttatcggtaacctgtgcaatcatctgtggctatgtttatcagtgcccaccattccgactaagttacaggggactaggtgaaccattatgttttgctgcatttggtccattggcaaccacagctttctacttctcaaacagcagcagaaacatttccagcggaacagctcttctccctctcagtaaaacagtcattgcttcatccattctagttgggctgacgactaccctgatactcttctgcagccattttcatcagattgatggagatcgtgctgttgggaaaatgtctcccctggtaagaattggcaccaaaacaggatcaagattagtgactcttggggttgtcacgctttatgttcttttggctgcttttggcatgagcaaatctcttccatcagcttgcactgtcctttgtgccttgacactccctgtgggcaaatgggttgtggactatgtgctgaaaaaccatgaagacaacagcaagattttcatggcaaagtattactgtgttcggctacatgctctgtttgggatggcactggcttctggtttagtcttggctagaaatggcacactggtctgacagacgaccaaccttgacatccttgtgaagacccagagcagaccgccgtcttgcagtttcagactgagtacctccagtagctgtttggttccagagcaagctggaacgacgagtgcaatggcagtgcaattgtgcagccatttggcagctagattgggtaggcagagcgaatcagagaaagaagcacaggtttggaagcactgccagccaaggcagtggagagtgtagaggatggtaaattgcctgaaaccggaatgaatggagaggtacttgagttgttggctacagaatcccagtcatttatctccatgagaaaaaaagcccagctatgcatttcttcccatcgcagtaaagattgccgttgcacaggaggctcccagtgtgaattgattttcatgccgggacagataggacatgtcatgttctaccattacttcttcctcccaagcaccaacagctatttggtagtacaccactcatctgggcagtttcgcatgtgcctttaacacttctagtttcctggctagtgatttgtgatatt

SEQ ID NO: 4624 - DNA, 650 bp, Oryza sativa
  ref <308>: DATABASE ACCESSION NUMBER: AK061908
  ref <309>: DATABASE ENTRY DATE: 2001-12-06
taggttgtcggacttcctcagtcggttacatctttagggaccagtgactgtatatatgtcaaataattattgaagttcgcagcaggcctcctggaggaagcaatcgtgatctgaggacaaggaaaacagaagttttgtcgcaaatacgctcaatagtccaaacgttagaactaaactgttgaaaaactttgccatatccactcatcttgcctcctggccagcagtgattcagtaaacattcactggccatcgtgccaaagcacaggtgtataatactattccttcctcaatgctctctactgagggaaggctgcctgcacccaaccacaggccacctgatgccgtgtgattgtacttgtatgaaaagaaggaactagaaaaaaagaaagagaggatgaaacaaagattactcttcagactacacattgatgaatccgcattaggacgaggtccagatgcttaaagccgcttggttgtcttggtctgagggagagaaggaaaacaagaaaggaaacaaatcacattctttataaacatcagtgttgaatgtggcatgtgctaatgtgctatatatatctgatgttgatatgccctgtacatgttcctggaacaggttggcgcttttgctcaggaaacaggaacgtctgcct

SEQ ID NO: 4625 - DNA, 880 bp, Oryza sativa
  ref <308>: DATABASE ACCESSION NUMBER: AK104830
  ref <309>: DATABASE ENTRY DATE: 2002-08-28
gatgacctcgatcttattgttactaccatgaatggcaatgtcttctgcttctccactccctctccgcaccatccacttaaggaatggagatcatcaaaccagggaagaaacaatgctgcatatcgttacaaccgtgaaggtatttatgttaaacacggttccagaacattccgtgacgaagagggcaagcatttctgggtagagtttgagattgtggacaagtacagggttccttatgggaaccaagctccttataacgtgacggttactctacttgtccctgggaattatcaaggagaaaggcgcattgtggttaatgcagcttataatgaaccaggcaagcagcggatgaagcttcccacagttcctgtgagaaccacaggaactgtgcttgtggaaatggttgacaaaaacgggttctacttctctgacgagttctcgctcaccttccacatgcattattacaagcttctgaaatggctcgtgcttcttccaatgcttgggatgtttagcgttcttgtcatcctgcggccacaagaaggcgctccgttgccatcattttcaaggaatattgattagtgatttgcacagtgaaacgtcaggtcctcatagaagcagataagcagaacaagatattagcaggatatccaatcacccatgaaggagcttgtccacatcatactgcatcggggagctcaatctgcacagaaaaaacccctcacgatgctgcatcccatcagttagctagttcgggaagtacagcttttagtcatgcaaaaagaattttgtcacacttgagattgttttctaacttatgatatttacacaaggaactggcagctgtctgatcctggtttaacatcttgagaattttagcccc

SEQ ID NO: 4626 - DNA, 1392 bp, Oryza sativa
  ref <308>: DATABASE ACCESSION NUMBER: AK061909
  ref <309>: DATABASE ENTRY DATE: 2001-12-06
gagtttagaggagcgaggagaagagcatgatgtgcaggctgatggggcgcactcgggtgagagtgaggtgatcaaccccgctgaggaggtgggtggagaagccacctcacagccagaagacgtaaagccgcgtgtttccaagggaagccaaagtcattcccctaaggttactaccaaatctcagcgccagagcccacgaagtggagataagagtcaagctaggaaaaacagtcccggttctacttatcccaaggcacccattgcacgagtgtctgacccagatttggttgatagctcttcatgcaatgatggtgctgatattaagaaaaaggctgaaaagagcagtttccgtccagttgccagggcgagtcaatcactggaggactcaaaggaaaagaagaaaactcagaaaacatcaaaccaatgttctgtcaaaaatgatgaagaagagccaaactgtgaaaaagtaaagcctcaaagggttggcagcactcctgcgtacggatttgcattcaaatgtgatgagagagctgaaaaaagaagagagttctactcaaagcttgaggagaagattcatgcacaggaattggagaaaagcaacatgcaggcgaaatcaaaggaaacagaagaagctgaactcaaaaagctaaggaagagtttgaattttagggcaaatccaatgcccagcttttataaggaaccacctcctcccaaggttgagttgaaaaagatccctaccaccagagctagatcaccaaagcttggccgctcaaagaacacaagctcagtaagcactgaagaaagtaccgttccttcaagccgcccagctcgtctgagcctggatgaaagggcctcccagaatggtgtgaagaaggtgcctgctgcgaacacggtgaggaagccccaacggaagtctctccccaaactgccatcagagcaaacagtcactgaacaggtagaaaacaacacgtcggctacagatcccgttcgggagctgatccgtgcccaagttaccccggatgatcaatttggtggatagaaaagctaccaatttgagccgcccaaagaaacgcgcaagttatgcctcaacttcctatatttcattctctgctatttctgctgtaaaactgctggatatgccactactatgtactaaaattagtcctcatcaccaggagtttcgaagaacgcaagtagcccctgtaatgtttatcttgtcaatttttgttcttgatacaagagaggaggaacctactgttgttatttgtagttggtaacaattgcatatgaccatatcctatttcctaggctagaagaacttattatttccatatgaattaccctgcctttttctctttagcaaataagcaataaactttgtgcattctatct

SEQ ID NO: 4627 - DNA, 1574 bp, Oryza sativa
  ref <308>: DATABASE ACCESSION NUMBER: AK061910
  ref <309>: DATABASE ENTRY DATE: 2001-12-06
gaacttgattcgagtgctttagagcgagcaaaagcaatggggcatgccttgtcttcagctagagatgttctgtacaactccgatgaagtatctagaagattgcttgttatgctgcagtctacagaactaaatattgatagtgttaagaagcagaactcattcctggtgcagcatgctgcaaagacggtccccatgcccttgcactgtctgcatatgcagctgacaaccgattattactttcgtgatggtatgatcaaggaatatttccatgatgccgctttgaaggaagaagaagataaagcaaagcgtgaggataggtcactataccactacgctatattttcagataacgtccttgcagcctcagtagttgtcagatcaactgtgacacatgccaaggaaccagagaagcacgtgttccacatcgtcactgatagacttaattttgcagctatgacgatgtggtttatacgtcatcctcctctacctgctactgtccatgtggaaaacattgacaacttcaagtggctcaattcatcatactgttcagtcctacgacaacttgagtcagctcggctcaaagagtactatttcaaagcacatgatccatcatcactctctgacggaaatgaaaatctgaagtacaggaaccccaaatatctgtctatgcttaaccatctaaggttctacatgccagaaatacaccccaagcttgacaagatattgtttcttgacgacgatgttgttgtacagaaggacttgacaccattatgggacgttgatcttaaagggatggtaaatggtgcagttgaaacctgcaaagaaagtttccatcgcttcgacacgtacctcaatttctcacacccaaagatcgcagagaacttcgatccacgtgcttgtgggtgggcttttgggatgaacatgtttgacctgaaagagtggaagaagcaaaatatcactggaatataccattattggcaagatctgaatgaggatcgcaagctgtggaagctgggcacactgcctccaggactgattactttttacaacctgacatacccattgaatcgcaattggcatgtgttggggcttggctatgatccagctgttgaccttgccgagattgagaatgcagcagtagttcattacaatgggaactacaagccctggctagaccttgctgtctccaagtacaagccctactggtccaagtatgtagatcttgacaattcacacatccagcactgctacatgagtgagcaatgaaatgaagtacgtgtaatccttcacccagttcttatttatttagtttctttgtgcgcacgtgtgagtttcgtagggcaagtttttcgccaataggaagttaggcatagttgtgtatataaataacatatttcagacttgatgatcttgtcattcttaagctcaataaccggttcacgtacatgaattgtgtcaggtggtttacatcttgcagcataatagttattattttgttcatttgagaatacactggatattgtatgaaatgacaaaagaacaaatgttgaggctaataaaagatcattcaaatc

SEQ ID NO: 4628 - DNA, 2181 bp, Oryza sativa
  ref <308>: DATABASE ACCESSION NUMBER: AK104831
  ref <309>: DATABASE ENTRY DATE: 2002-08-28
aacaactaagttgttggatagtaaaacctagctttgctatagcaacaacaacaacaacaaaaaatctctctcacatggtggggatgcgtggagcttatggctacaatgacaacggcaacgagggtggcgtagtagttggagggggggaggcggaggcggagatcgcggcgatggcggtgctacacaaggtggcggcgccgccggcgcagagcacggcgagcaagctgaaggcgagggtgaaggagaccttcttccccgacgacccgttccgcgggttcaaggggaagccgctgacgaccaagtgggtcatggcggtgcagtacctgttcccgatcctcgactgggtgcccagctactccttctccctcttcaaatccgacctcgtcgccggcctcaccatcgccagcctcgccatccctcagggcattagctacgcgaagctggcgagcttgcctccgatcatcggcctctattcgagctttgtgccgccgatggtgtacgcggtgctggggagctcgagggacctggcggtggggccggtgtcgatcgcgtcgctgataatggggtccatgctgcggcaggcggtgagccccgccgccgagccgctgctcttcctccagctcgccttcacctccaccttcttcgccggcctcgtccaggcctccctcggcatcctccggctggggttcatcatcgatttcctgtcgaaggcgacgcttgtcgggttcatggccggcgcggcgatcatcgtgtcgctgcagcagctcaaggcgctgctcggcatcgtccacttcaccaccgagatgggcctcgtccccgtcatggcctccgtcatccaccacaccaaggagtggtcgtggcagacgatcctgatggccgtgtgcttcctggtgctcctgctcacggcgaggcatgtgagtatgaaatggccaaagcttttctgggtttcagcttgtgctcccttggcatgtgttatcgtctctaccctgcttgttttcctgttcaaagctcagaaacatggcattagcataattgggcagctcaaatgtggcctgaatcgcccttcatgggataaactactctttgatcctcaatatttgggcctcactgtaaagactggccttgtcaccggaatcatctccctaacggaaggagtggcagttggtaggacatttgcttcactcaaggactaccaggtagatggtaacaaagagatgatggccataggattgatgaacattgtgggctcatgtacatcatgctatgtaactacaggagcattctctcgttctgctgtgaaccacaatgctggttgcaagactgccatgtcaaatgtgatcatggcactgactgtcatggtcacactgttgttcctcatgccactgtttgtgtacacaccgaatgttgttcttggagcaatcataattgctgctgtgattgggctcattgatctccctgctgtatacaacatctggaagatggacaagatggatttccttgtgtgtctatgtgcatttgctggtgtaatcttcatctcagtccaacaaggccttgcaatagcggttggtatatcaatattcagggtactgttgcaaatcacaaggccaaagatgatgattcaagggaacatcaaaggcactgatatttaccgaaatcttcatcagtacaaggacgctcaaagagttcctgggttcttaatcctgacagttgaggctcctataaactttgcaaacaccaactacctaaatgaaaggattaaaagatggatagaagaagaaagttctgcaggaaccaaacaaagtgaactccatttcgtaattttggatctgtcagctgtccctgcaattgatacaagtggcatatcgttcctcatcgacttgaagaaatcaacagagaagcatggactagagcttatacttgtgaatccaactggagaggtcatggagaagatacaacgagcgaatgatgctcatggtcatttcaaatcagatagtctgtacttaaccactggggaagcagtggcttcactctctacattttccaagatgacagcgccttagagctgattctaaggttgtcattttcattattattctaactgcgctgctaagtttgcaatgcaagattttccaccctgttctctcagcaatagaagtgcctccagcaacgtatttcccggtt

SEQ ID NO: 4629 - DNA, 991 bp, Oryza sativa
  ref <308>: DATABASE ACCESSION NUMBER: AK061911
  ref <309>: DATABASE ENTRY DATE: 2001-12-06
gaagagagagagtgagagagagagagagagagagagaggagacgccaccacgcgcaccgagctcgcgattccaatccccgcacgcctcctccgccaccgccgcctcggcctccgccgccgccgcgaccaggatcacagttgcgatggaacacaaggaggctggctgccagcagcccgagggcccaatcctttgcatcaataactgcggcttctttggcagcgcggcgaccatgaacatgtgctccaagtgccacaaggagatgatcatgaaggaggagcaggccaagcttgctgcctcctccatcgatagcattgtcaatggttgtgacggtgggaaggagcatattgttgctgccagtggtagcacggcggtggcggtggctcaggtcgaggcgaagacgctcgttgtgcagcctaccgatgtcgcgggcaccagcgaggaggttgctgtagtccccaaggtcaaggaagggccgaaccggtgcgctacctgtaggaagagggttgggctgacgggattcaactgccggtgcggtaacatgtactgtgcgttgcaccgctactccgacaagcatgaatgccagttcgactaccggactgcggctagggatgccatcgccaaggccaacccagtggtgaaggctgagaagctcgacaagatctaaggcggctaggggcgtggaatggattgcaacctacaagatttcaacatccacctttgctgctctatcctcacacttcttcttgtcggctgctacatttcttaaattgttcaactttgtgatgcacactgcatcctggcagccgaaagaattcatcctctcagtcaagtcaagtggtttgcgtgttgggtatgttgtgtaatctttattcttggtggttttcggtcagtattgtggtgtctcatttggctagctctgtgatgtactatgtcccatgcttgctacatttcaatcagtaatagttatcagcaatggtccatcatattgcc

SEQ ID NO: 4630 - DNA, 1544 bp, Oryza sativa
  ref <308>: DATABASE ACCESSION NUMBER: AK061912
  ref <309>: DATABASE ENTRY DATE: 2001-12-06
gcattgctgttgtccacatcgcagttacacatactctcgggtagcatatgccctatctctgatacttctaatattgttcactcgtgctgcaattgttggatgtgtcatgctgtatgatggtcaaggaaagttccataaaagcacaacgactacctcgaattttgtcgttagccaggccaattttactgtcgaaaaccttaataacttatccgatagtttatctgctgcaaaaaaggttgacatagggcgatcctttttgcctaacgatgtgcaaaatcagatcaatgaaattcaaggaaagttgaactcatcagctactgagcttgctactagaactactgacaattccgagaagatacaaaaattgctaaatcaagtgcggattgctttgattatcattgcggcagtagtgcttcttctggcatttattggcttcttactatctatctttggcctggaattcattgtctctattttggtgattatcgggtggatactagtcaccgggacgtttatcctgtgtggtgtcttccttcttctgcataatgtcgtcgcagatacttgtgtctcgatggaggagtgggttgctcatccaacagagcacacagctctggatgacattattccctgtgttgaacctgccaccgcgaatgaatccctgtatagaagtaggcaagtcacttaccaactggtgaatctggtaaaccaagtaatcaccaacgtgtccaatggaaacttccctccgcaaactcctttcttctacttcaatcagtcggggccactgatgcctacactctgcaacccgttcacagccgatctgaataaccgtacttgcaccagaggagaggttaccttggacaatgcaacccgggtttggaagaattttgagtgccagactaccactgtctcaggaactgagatatgcactaccgtgggccgtgttaccccaacgattctcggtcagatggcagcgggcgtgaatgtgagccaggggctgtatcagtatgggcccttcctgatccagctggaggactgcactttcgtccgcgacaccttcaccaacatcaaccagaaccactgccctggcctggagaggtacagcaaatgggtttacgtcggcctggtgatggtttcgtcggccgttatgctctccctcgtcttctgggtgatctacgccagggagcggcgccaccgtgcgtacagcaaacagcacaactacgctgacaagccgcatccgactggcccggacgcttgatgcatatggccgatgctgtgctgcagaagaatctccatgtccatactcttcgtgcctgtcatcatcatgtagatcaccgtgccttctgattgttcgttggttacaccgatcctgtcctcttctttttttttcttttttttttgttgtagcattgatgtgaattattattgtagcttgatctttttcatcttgtttgctcttcttggtgaactgaaactttgttaagaggtgctgtttgtgaacttgagacagatttctgactttgtgccattagagtttcagtttgtgt

SEQ ID NO: 4631 - DNA, 1402 bp, Oryza sativa
  ref <308>: DATABASE ACCESSION NUMBER: AK061913
  ref <309>: DATABASE ENTRY DATE: 2001-12-06
atgtgcaacctctatcagggtcacctgccaacttccatgtttacactgccctattgaaaccacatgagagaatcatggctttggatcttcctcatggtggacatctttctcacggctaccagactgatactaagaagatttcagcagtttcgatattctttgagacaatgccctacagattggatgaaagcactggcttgattgattatgatcagatggagaaaagtgccgttctttttaggccaaagttgatcgttgcgggtgcaagtgcatatgcgcgtctttatgactatgaccgcatgcggaaggtttgtgacaagcagaaggcaatacttctagcagatatggcacatatcagtgggcttgtcgcagctggtgttgttccatctccttttgattatgcagatgtagtgactaccactactcacaagtcactccgtggaccacgtggagccatgatcttttacaggaagggggtgaaaggagtaaacaagcaaggcaaagaggttatgtatgactttgaggacaagatcaatgctgctgtcttcccaggtctgcaaggtggaccacataatcataccattactggcttagctgttgcgcttaagcaggcaactactccggagtacagagcttatcaagagcaagttatgagtaactgtgcaaaatttgcacagagcttgacagcaaaaggctacgaacttgcctctggtgggactgacaaccatttagtgttggtaaatctcaagagcaagggcatagatggttcaagagtggagaaggttttagaaaacgtgcacattgcagcaaacaagaacacagttcctggtgatgtttcagctatggtaccaggaggcatcaggatgggaaccccagcactgacctcaagaggatttgttgaggaggactttgctaaggttgctgatttcttcgatgcagcagtgaacttggctttgaaggttaaggctgcagcaggtggaacaaaactgaaggactttgttgccactttgcaatctgatagcaacattcaatccgagattgcaaaacttcgccatgatgtggaggaatatgcaaaacagttccccacaattgggtttgagaaagaaaccatgaagtacaagaactaagaaactttgaatggaacagcaagggtaaaagaaaaggcatcaagctgaattcctgaggtgactgttggaattcttgcaagaacaagtcggtgtaaacatatatccatggagtgccatcttatgtaaaagggacccctggcattttacagcgtgtggaaactttgtcaatagttcttatcgtagacacctactgtaagatgttatgctaatgctatattaaccttcactatcttcttggacaagcagttacacatactttggtgtattctgtgaat

SEQ ID NO: 4632 - DNA, 1749 bp, Oryza sativa
  ref <308>: DATABASE ACCESSION NUMBER: AK104832
  ref <309>: DATABASE ENTRY DATE: 2002-08-28
aagagaaggaaggatccaatactagaaaagggaaaaaaaaataaatcaaaatccattccccttctccttccccaaacacggtgtggtctgcacgcgactcctcccccctccgccgccgccgccgccgcagcgagaccccggcgaatggcgtcccgcatcgcctctcgcctcctccgccactccaacgcgactctaggcctcatcaggagttattcacatgccaggaactacagcagtcaactttcagctcttattccaattggttcccagagctcaaagcttacaagaagacgctattacttgccaaatgcctctccgtaccaactctggagtaggtcatttgcatctgacaatggagaccaggttgaagctgttgtccctttcatgggtgaatctgtaactgatggaactcttgctaacttcttgaagaaacctggtgacagagttgaggctgatgagcccatagcacagattgaaactgataaggttactatagatgttgctagtccggaagctggtgttattgaaaagttcattgctagcgaaggtgatactgttactccaggcaccaaagttgctatcatatcaaagtctgcggcaccagctgaaacacatgttgctccgtctgaggattcaaccccaaaagaaacgcctccaaaagctgaggagacaaaaccaaaattagaagagaagtcaccaaaagcagaacctcccaagatgcctctgccacccaaaacctcccctacagaaccacagctccctccaaaagaacgagaacggagggtgccaatgccaaggctcaggaagcgtattgcaaaccgtttgaaggattcacaaaacacatttgcaatgctgaccacatttaatgaagttgacatgactaatttgatgaagctgcggtctgattataaggatgagtttgtcaccaagcacggtgtcaaattgggtctgatgtcctgctttgtcaaggctgctgttacagcacttcaaaaccaaccaattgtcaatgctgtcattgatggtgatgacatcatatacagagactatgttgacatcagtgttgctgttggtacttccaagggtcttgtggtgcctgttatccgagatgctgataacatgaactttgcggacattgagaaagggataaacgcccttgcaaagaaggctactgagggggcactctcaattgatgagatggcaggaggaacattcaccatctctaacggtggtgtttacggaagccttatcagcacacctatcatcaaccccccacagtctgctattcttggaatgcactccattgtacaacgccctgtggtcgtggacggcaacattctcgcgaggccaatgatgtaccttgcgctgacatatgaccacaggctgatcgacggcagagaagctgtctacttcctgcgccgcatcaaggacgtggttgaagacccacggagattgctcctcgacatataaactccgcgcgcgccaccaatcgcagcctgagagctgctttgtgctttgtctggaaaataatactgcaaatttttgactgatacaaagagttgcttttctgagaaagacgaaatttgagttgaggataccgtgagggggtctctctgacaattatagacgagagcaccaaatccgaatcttaaatcttatatatcagcgcttattccattttgggatgtagttccctaaacaatttgcttttagtttcaatgcaagagcaatagatcatgcattttttgtttg

SEQ ID NO: 4633 - DNA, 488 bp, Oryza sativa
  ref <308>: DATABASE ACCESSION NUMBER: AK061914
  ref <309>: DATABASE ENTRY DATE: 2001-12-06
aaattgaaggatttatatggtgacgcgacaaacacaaaggatgatacaggtgatgataaagctcgcagggattctggaactgaagaggtaatcagattgggaggtgcaaggtggaggtgaatgccaaagggcacatgaaagacatccacccctatttgttcttgttaacagcaatataacagccagagatatttgctatccccagtgctgcattcccagggacgctcagaagaaggaatgagctttcatttgttaaaattcgattgggccattgtatcttaggtagcatgtgcgcaacagaatgcatttgttgaaactcaattgggccaatgtatcttaggtagcatgtgcgcaacacaatacaatctgttaagcaggcaaacagctatgcaaattgctagtactaggataaagagattaatttggatagccaagttctgtacctggtatgctgttcgcgttatatgatacttttcccgtgttctgac

SEQ ID NO: 4634 - DNA, 1230 bp, Oryza sativa
  ref <308>: DATABASE ACCESSION NUMBER: AK061915
  ref <309>: DATABASE ENTRY DATE: 2001-12-06
agttatagctgatgaaaagacagcagcttcaactgaaaagaggaaactcgaagctgaagaaactgttgctgccactgagccaatcaaacgccagcgtcgatgggctgcagatggtgccaaagttccagagagacaaccaataagtcatagtggctctgatgctcctaaggaaaattttcagcctgctttaaaacgatcttttggcaggtctgattcaacagctagtggagattccccaaaggagcgggttgtgccaccatctcagaaacctgcaacagcttccttgagaattgatcgatttgtaaggccatttacgctgaaggctgtgcaagaacttcttggtaaaactggatctctttgtagtttctggatggatcacatcaagacccactgctatgttacgttttcatcagtagaggaagctgtggctactcgggatgctgtctacgatttgcagtggccaccaaacaacggcaatcgtttggttgctgaatttgttgatccccaggaagtgaagctcaaacttgaacctcctccgccagcggcggctcctattagccctgctactacaccaaaggagccaccctttcaacaggctcaggctaatcaaaacatgcctcgtcaagccgctgcaccaagggagcacttgccacctccaccgcctcttactacgcttcctacatctgactcaggatcagcaaaggagaggcttccacccaccccaaagaaacagccggaacctcctgttgtgacactcgatgatctcttcaggaagacacattcttctcctaggatttattaccttcctttatcagaagaggaagtggcagccaagcttgcttcacagggcaaaggcaagagagaatgaggagctgtagcctctttttttcttgtcgctagtatgggggcatgtggaggtatgtagtggttacatacttgcatgtgtacgctgcaggttgtagggctgagagcctgagatctttcttcctaactttccaggaaaaatggtgtattacagctcagcagctggctcttgcagttcatttgaaataacaggaggcggcgactgctgttaggtattttgctgcaagagagagtagctgtaggctagtgtagaagcagcaaatgtattttctacagaaggaatgttttttgttctatcactgtctagtgtgttgcgtctaactcttgttacttggaacgtctgacgtctgagattatggttggttt

SEQ ID NO: 4635 - DNA, 1007 bp, Oryza sativa
  ref <308>: DATABASE ACCESSION NUMBER: AK061916
  ref <309>: DATABASE ENTRY DATE: 2001-12-06
gaaaagatctttgtggtccaagacattggaagatattgttgagaagcttgtagacatcgtgcagtacttgcattttgagatcaacgcttcttttggatcttctgatgaaggtgaattgagttctgaatctactgaagactgtcagagactaggacctgccggacttgcattacactatgcaaatattatcatacagatctatagcgttgtttctcgatcaggatatataccaccaaatacaagagatgctctctaccaaggattgccaccaagagtgagatcggcactacctaatagattaagaacttcgtcagtgcctcaggagctcaatattgatcaaattagggctacaatggataaaacattgaaatggcttgttccaatggccatcaataccacgtgtgcccgaggcttcttgcggtttagcgaatgggcgagatcagggactgagagggttggaaggaggccaggccaaccggacgtggtcgagacgctctaccatgcggacaaggcgaagaccgaggactacattctggacctggttgtctggcttcaccaccttgtcaaccagagtaaccggccggcaaatgcaaaagacaaagacaaagagcagtccacctcacctctaaccaaatctgatcttgacaaggcacaacaagaatagcactgcactgcactgcactgcaccgcactgcacagcagccgacaagagcaaaacaccagacgacgcctgtgacctgtccgattgtttgatgtgggcattgtttgtaggttgtaaatggaagctaggcttcttgctgttgtcctaaaacttgtggtggcgacgtgggcatgcgttgcgctctgtacatgtacatcagtcaagtaggtagtagaaatgaggagccttttttttttctctccgattatttggtcgtcacagagagggttctataatttcattgttgcagccattcggttgtcacatgttgtacgaaggggaagatgcagtaaaaggctggtgattc

SEQ ID NO: 4636 - DNA, 1505 bp, Oryza sativa
  ref <308>: DATABASE ACCESSION NUMBER: AK061917
  ref <309>: DATABASE ENTRY DATE: 2001-12-06
gtaagtggtaactggcgacgcggtggtgccgtggtggtggtggtgcagcttctctcctcttctgaatcttctcgacttctcgtcctccctgttgcagaggcttctccggcgaggccgcgaggcttgatttcagtgcatagttgatggcatgtcttgagctggattcttcacaattcctactgaatggggatggcagtgtgatcggcagcccatttgatatccagcttgagtgcaatagcttcacaggctccaaagctgttcaagatcatagccgatatactcttccttcacagtgcactaatgcccctgatccacctccattacccggaacttcttatggcacacacagaacttccaggaatgcaaaggcttgcaggtgtgtccctgaagagatccaggatttctgggacaggatgttcttcgaagcgtatcaatatgatctccgtgttttgacggaagatggcaatgagatcatgtcacattcctgcgttgttggtattaaatctcctgttctaagagctatgttggaagaagctaaagtacaaggtggcatccgacacatcctgatacctggtgtatcatcagaagcagtacatgttttcatcagatttctttattcctcgcgttttgagcagtatcagatgaagaggtatgtacttcatctgcttgtactctcccacgttttctcagtaccatctctgaagagagtctgcatcaaccaactggagacatctttgctttctcctgagaacgtggtagacatactacaacttgctagactgtgcgacgcgccgcggctctccctcgtatgcactcgtatgatcatcggagatttcaaggctatcactcaaacagaagggtggagagtgatgagacaagccaacccaagcctggagcaggagctgcttgagtccctcgtcgaagaagatacaaaaaggcaagagagagcaagaaggctggaggagaataaggtttatctgcagctacatgaagctatggaagctcttattcatatatgtcgagatggatgcaggacaattggccctcgagatcaaacgctaaagagcagtcaggccgtttgcaggtttcctgcctgcaagggcatcgagctgctcctgcgccatttctcggcgtgcaaaatgcgggtgcctggtggctgcgctaactgcaagcgcatatggcagcttcttgagctgcattctcgcatgtgctctgcacttgaaacttgccatgttcccctctgtaggcatttcaaggagaaaatgcaacatctgagcagaaaggaggaggccaagtggaatcttttggtgtccaaggtgttggagagcaaagcaacaaccagttccatctcagaaaggagaaaatttccatccctgaaaacatagtgctacgttctaggttcacaagttacaagaattatgcactaacacataaactcgatgtaaactgtgaacatttgttgtactgaagattaaaaggtgtctcaattctaacatgacaatctg

SEQ ID NO: 4637 - DNA, 934 bp, Oryza sativa
  ref <308>: DATABASE ACCESSION NUMBER: AK061918
  ref <309>: DATABASE ENTRY DATE: 2001-12-06
gtgggttcgtgcgacgggacctcgattcgtccatccagcttccactacccctccgcgcgctgcctagatctttcctctctctcgcaccctcttattggcggaggaggaggagggatggtgcgggaggttgcggagagctgtgtcgacggggtggtgatggagatggtggcggcctactgcggccgcttctacgccgccaagccggagctcgccgcccgccgcatcgaggccatcggcttccaggtcggccaccagctcacggagagatataccatggagcgccctcgatttagtgatcatcttgaagcaatcaaatttatctgcaaagacttttggtcagagctattcaagaagcagattgacaatcttaaaactaatcataggggaacatttgttcttcaagataaccgtttccggtggcttactcgtgtttctatagatccatctgtagagagcatggatgcaactgacaatgactcagcaacactaggggatagcgcagcccaaacaacaagcatgcttctgtactttccatgcgggataataagaggtgccttgaccaatttgggtatttcgtgttctgtcactgcagacatgtccaaccttccagcatgttcttttgttgtgcgcataaaaacatgagctgcagattttatgcctgcttgttcgatcaagcggtttgaacattaaagagtgcaagcacgcaatagcctgggaaatacgccttgtagctgctcctttttctttctctttgttcttagaggcacctctttacttactgacttcatcataccttcctttgtgcacatcttaagattgggtgtaattttgtgattcgtgtgaacaagagaagacaaaatgtaatatttctcctgagatactggctagagccatgtaattttgttgtctagcagtggagaatgttttatcttgt

SEQ ID NO: 4638 - DNA, 401 bp, Oryza sativa
  ref <308>: DATABASE ACCESSION NUMBER: AK061919
  ref <309>: DATABASE ENTRY DATE: 2001-12-06
aagaagttggacatcagaaacttcctgtaggccataaatctctcaaggcattttgaaatgctcggacactccataatggttttcttttccagtgacagccggcgctgtaagcataccaatgaatgttattcttgctttttgtaataaaaactgcaccgaagtacaaagacaagtcaacggttgagttggattgcttgttaccttcctgcgtggagaattttgttttttgtattggcaatgtgaacgccaagcagcttactgtctccctgatgatgcacctgtgttggtttctctgatgatatggacacaccaggttgaggcttaggcaatggtttactgttttcgattacattttgattagaatactttgtttcctctaaaatcattatcctaattaaccg

SEQ ID NO: 4639 - DNA, 1298 bp, Oryza sativa
  ref <308>: DATABASE ACCESSION NUMBER: AK104833
  ref <309>: DATABASE ENTRY DATE: 2002-08-28
aggaggcagaggtcgagctgagagtgatcgatctttgttagctagagtgttgagcaatggcgtccaagctgggtatggttgtgctactgatctcgggcctctttgctgcccgttgcgcggccgtggtgaccaccggcgaacccgtcgtcgccggcctctcctgggggttctatgacacgtcgtgcccgtcggtggagggcatcgtgaggtggcacgtcaccgaggccctccgccgcgacatcggcatcgccgccggcctcgtccgcatcttcttccacgactgcttcccgcaggggtgcgacgcgtcggtcctcctgacgggttcccaaagcgagctgggtgagatacccaaccagacgctgcggccgtcggcgctgaagctcatcgaggacatccgcgccgccgtacactccgcctgcggcgccaaggtgtcctgcgccgacatcaccacgctcgccacgcgtgacgccatcgtcgcctccggcgggccctacttcgacgtgcctctggggcggcgcgacgggctggcaccggcgtcgagcgacaaggtgggcctcctgccggcgcccttcttcgacgtgcccacgctcatccaggcgttcaaggaccgaaacctggacaagacggacctggtggcgctgtccggcgcgcacaccatcggactaggccactgcggcagcttcaacgaccgcttcgatggctccaagcccatcatggaccctgtgctggtgaagaagctgcaggccaagtgcgccaaggacgtgccggtgaactcggtcacgcaggagctggacgtccgcacgcccaacgccttcgacaacaagtactacttcgacctcatcgccaagcaggggatcttcaagtccgaccagggcctcatcgaggacgcgcagaccaaccgcaccgccgtccgcttcgccctcaaccaggccgccttcttcgaccagttcgcacgctccatggtcaagatgagccagatggacgtcctcaccggcaacgccggcgagatccgcaacaactgcgccgctcccaaccgccgctcctccgacctcctcaacgctgccgacgacgaccaaggcttcgccgccgacgcctaattaacttatggagtaattagtgatcgttttatgtttatgttttgtgctagtaataataattaagaggatgccatctgcgcgtggtgtttggtttccatgcattctctgcttagttagaatggttttgcttcataaaaagtaaagttactactcgattcctcggtcgggacagagtaactgcatgtcaaatgtatcatcatc

SEQ ID NO: 4640 - DNA, 1411 bp, Oryza sativa
  ref <308>: DATABASE ACCESSION NUMBER: AK104834
  ref <309>: DATABASE ENTRY DATE: 2002-08-28
accctcatcgccttgctgtctctgcgaatcgagagagagtcagataaggtcgttaattaggtttgtcaattcggctgcttgcggcgagagaagaggaggagggattagggatggacggggcgccggtggcggagttcaggccgacgatgacgcacggcggccggtacctgctctacgacatcttcgggaacaagttcgaggtgacgaacaagtaccagccgcccatcatgcccattggccgcggcgcctacgggatcgtctgctccgtgatgaactttgagacgagggagatggtggcgataaagaagatcgccaacgcgttcaacaacgacatggacgccaagcgcacgctccgggagatcaagctcctcaggcacctcgaccacgagaacatcataggcatcagggatgtgatcccgccgccgatccctcaggcgttcaacgacgtctacatcgccacggagctcatggacaccgacctccatcacatcatccgctccaaccaagaactgtcagaagagcactgccagtatttcctgtaccagatcctgcgggggctcaagtacatccactcggcgaacgtgatccaccgcgacctgaagccgagcaacctgctgctgaacgccaactgcgacctcaagatctgcgacttcgggctggcgcggccgtcgtcggagagcgacatgatgacggagtacgtggtcacccggtggtaccgcgcgccggagctgctgctcaactccaccgactactccgccgccatcgacgtctggtccgtcggctgcatcttcatggagctcatcaaccgccagccgctcttccccggcagggaccacatgcaccagatgcgcctcatcaccgaggtgatcgggacgccgacggacgacgagctggggttcatacggaacgaggacgcgaggaagtacatgaggcacctgccgcagtacccgcgccggacgttcgcgagcatgttcccgcgggtgcagcccgccgcgctcgacctcatcgagaggatgctcaccttcaacccgctgcagagaatcacagttgaggaggcgctcgatcatccttacctagagagattgcacgacatcgccgatgagcccatctgcctggagcccttctccttcgacttcgagcagaaggctctaaacgaggaccaaatgaagcagctgatcttcaacgaagcgatcgagatgaacccaaacatccggtactagattgaatcaccatggaaatgagatcccgtctatacctgctttgtacatatgatcaagattgagagccgggtagactgaacattgcatttgtttgtttgttgatgttcgaaacccacattctctgcaagttgtggctgctttgtatgatatatggtactatgttcgaataaaagggtttggaactttggatt

SEQ ID NO: 4641 - DNA, 394 bp, Oryza sativa
  ref <308>: DATABASE ACCESSION NUMBER: AK061920
  ref <309>: DATABASE ENTRY DATE: 2001-12-06
aatctccacccttctaccccagtatccggacaccccgtgaaaccctagcgactcttgccccggcggcggcggcggcggcagcaaaggcgaagatgatctacgacgtgaactcccctctcttccgctccttcctcagccagaagggcggcgcctcctccgacaagaggaaaatggaagagcaaaagccaaaggagcagaggcccaaggccagtgagaacaagcctgtgatgaatgaatgaaggctttctgatgtgtttggtccttacaaggaataggcttcaatcatgtgattcctagtatgtttctgtactggttctgtttaagtgagtttgatgtgaaccatgtctggaacatctgagattcccagctatcaatctttaattttacatctgag

SEQ ID NO: 4642 - DNA, 1237 bp, Oryza sativa
  ref <308>: DATABASE ACCESSION NUMBER: AK061921
  ref <309>: DATABASE ENTRY DATE: 2001-12-06
gtccgactccgagggcaatatcccccaccacccatctcatccagagacgagctcctcgaatttgagggagtccggggagaaacctacggggtgatcttctggtccgcatcgggtcccctcccattgcatgatgccttctgttccttttcgttatctgcctggtgattgttcgctgagcttttgatctcgccttctcgagacacatctgatatcgctgttctttttatgagttcacaagacactcaacatgaagtttttagaatacacccccttcgacagtataaatctgttccttgataatcttgaccttggtgattgtacgataagaggaaaccttgaagccttctcatgcaagcacactggtaatgaccgtcgactttcaataagtctagaacatgagattcttgattgcctcagtaagtcttctgatagtgatcattcatcaccagtggagcatttgtcatgtcggtcaagtcggaaaacattgatctatctagttctcacccttagccacatgtatccagattatgatttcagtgctgttcgggcacacctgttcttcaaagaagaggagtgggaaagctttaaggagatgacagacacctacttatctgaggcttcaaagcaatgggcagcaacaaatgagggcacttctcttctagacagtatgactaatgtcattgatgaggttatcaaaatcggagagtctgacatctacagctataatccagaccaagatggagatccatttcttgaaaagggggtcatatggtcgatcaactttttcttctacaatcggaagctaaagcgagttgtgagctttcgttgcagttgtataagcaaaatatcaggagatgacttccttaccagtgcaccatccgatggtgaagaggaagatgcactgatagacatggacatataattgacacctttctggcaggaaaatgaccaaccagtgtggcatccagttgtgtagtaccagtatatatcatgtatggcagtttggcagttgccagtaggaactacaaccagaattttcttagcagacttcacctgtaccgaggcctgcataatattatgatttgacagcaggaaattctgcgtttctagcctgagacttgaattggcattttacttggtgacctaagctagtgtttgttgagatcgaaattctcgttctatgcagttgaataatgtatatttaacaatgttatgttatgcttgtaacttgatttgc

SEQ ID NO: 4643 - DNA, 1401 bp, Oryza sativa
  ref <308>: DATABASE ACCESSION NUMBER: AK061922
  ref <309>: DATABASE ENTRY DATE: 2001-12-06
aaaactgcaagcaaggatgagctaaagaaggcataccggaaggctgccataaaaaaccatcctgacaagggaggggatccagaaaagtttaaagaattatcacaagcgtatgaggttctcactgatcctgagaagagagacatatatgaccaatatggggaggatgctcttaaggatggaatgggaggaggcagtgacttccataatccatttgacatatttgagcagtttttcgggggtggtgcctttggggggagtagctcaagagtacgcagacagagacgtggtgaagatgtggcgcatactttgaaggtgtctttagaagatgtgtataatggatctatgaagaaactatcattatcacgaaatattctgtgcccaaagtgcaaaggaaaagggaccaaatctgaggctccagcaacatgctatggttgtcatggtgtaggaatgaggaatataatgcgacagataggactaggcatgattcaacatatgcagactgtctgtcctgaatgcagaggatcaggtgagatcataagtgacagggataaatgcacaaactgcagagctagcaaagttattcaggagaaaaaggtgcttgaggttcatattgagaagggaatgcaacatggccaaaaaattgtattccaaggtgaagctgatgaagctcctgatacagtgacaggagatatagtatttatcttgcaagttaaggtacatccaagatttaagaggaaatatgatgacctgttcattgagcgcacaatctctttaactgaggcattgtgtgggttccaattcatcctcactcatctggacagtaggcagctcctaatcaaggcaaatcctggcgaaattattaaacctggtcaacacaaggccataaatgatgagggaatgccacaccatggccggcctttcatgaagggccgtctctttgtggaattcaatgttgagttccctgaatctggtgtactctcccgtgaccaatgccgggcacttgagatgatcctaccacctaaacctgggcaccaattatcagatatggacctggatcaatgtgaggaaactaccatgcatgatgtgaacatagaagaggagatgaggcgcaagcagtatcaaaggaagcaggaagcgtacgacgaagatgaggaggaggatgctccaagagtacagtgtgctcaacagtaagaagtgtcactttctggcgcaagtgatgatactccatgtaaactaagtagtttttggtgagactgttcattttagtgtattttgtactagttaaattaaatagtgaatgtctaagttgtgtcgtttgatatataagcttgtgctaacaacataaggctttcttggccttcataagatatactcctacctaggagaaagtggtggatgagc

SEQ ID NO: 4644 - DNA, 483 bp, Oryza sativa
  ref <308>: DATABASE ACCESSION NUMBER: AK061923
  ref <309>: DATABASE ENTRY DATE: 2001-12-06
gacaggagaggttcatccgccgcttcgccggcgagctcgcgcaccccaaggtctcccctgagctccgcgccatctgggtcaactacctctcccagtgtgatgagtcgttgggggtgaagattgcgaataggctcaacgtgaagccaagcatgtgaagaaactaaggcacaagaatgcatcatctcttgttaattaattggagtactaccaaccaaataaggccagacaatgtcagatgcacgcatcttctgttgtcgttgggccatcttttgtatgcatcctattgttaattactagtacatgatatccaagtgatcatcagcaaggctacagaaattctgtaatacgataaattaaaagaaaccaaaatggagcctgcatatgtgtaacttaattaatgtactggcgtattaatgccactgctgcatgttgtaatactccatcaaagagtctattactattaagtatttaaattatcacttc

SEQ ID NO: 4645 - DNA, 1466 bp, Oryza sativa
  ref <308>: DATABASE ACCESSION NUMBER: AK061924
  ref <309>: DATABASE ENTRY DATE: 2001-12-06
cttcggcaccatcgtcggatccctcgccgataagcaggggaggaagagggcgtgcattacctactgcatcagctacatcctgagctgcatcacgaagcactcgcctgagtacaagatcctgatgattgggcgcgtgctcggaggcatcgccacatcgctgctcttctcggcgttcgagtcgtggctcgtcgcggagcacaacaagagaggatttgacccacagtggttgtcgataacattctccaaggctatatttcttggaaatggcctagttgcgatcatcgctgggctatttgcaaatctgcttgcagataacttgggttttgggcctgttgctccatttgatgctgctgcttgctttttagcaataggcatggcaatcatcttatcatcatggagtgagaactatggagatacatctgataacaaggatctgatagcccaattcaaggttgcagccaaagccattgcttcagatgaaaagattgcattgcttggagctatacagtcactgtttgagggttcaatgtacacttttgttttcctgtggactcctgctttgagcccaaatgatgaagaaattcctcatggcttcatatttgccacattcatgctctcctctatgttgggtagctcaattgcctctcgtttgttagctcggaagctgaaggttgaaggttatatgcagattgtgttttcgatatcagcttttactcttttcctccctgttgtcactaacttcctagtacctccctcctcggtcaaaggtggtggcatcttatttggaggctgtctacagctgctcggtttctgtatatttgaatcctgtgttggcattttctggccatcaatcatgaagatgaggtcccagtatattcctgaggaggcaagaagcacgatcatgaacttcttccgcataccactcaacctgtttgtttgtgtggttctttacaatgtgaatgcattccccatcactgtcatgtttggcatgtgtgctattttccttttcatggcagcaatcttgcagaggcggctgatggttgtctctgatctccacagatcaacaactgtagagatgactggggaagatgagccgttaaacccatagaagacaagacaatagatgtgaattggacatgaaaattgccatccaacttgagccgctttccactggctgctgaataagctggaaaatagcaggctggaatgaaacgtactagtagtagtttagtttgcttgtaggtagtctcaattcatttttgtcaggagagagtacacggtccagaaaatattgagctacaggcggcatagtaacgccttgcataggtctccttcccattcttttccactttcttctcgagtgtgatgatcgatgcttaaccattttggatgcaaaacatattgagtagtgtaacaaatttggtgattgttcctaatgtttcgtatacgatgattgaatctgtttc

SEQ ID NO: 4646 - DNA, 1001 bp, Oryza sativa
  ref <308>: DATABASE ACCESSION NUMBER: AK061925
  ref <309>: DATABASE ENTRY DATE: 2001-12-06
cttttacgaacgtgctggtaaggtgaaatgtctcggcagtccagatcggacaggcagtgtcacaattgttggtgctgtctctccacctggaggtgatttttcagatcctgttacctctgcaactcttagtattgtgcaggtcttttggggattggataagaagctggctcaaagaaagcatttcccatctgtcaattggctcatctcttactcaaaatactcaaaggctctggaatccttctatgagaagtttgatcaagatttcattgatattagaacaaaagctcgtgaagtgttacagagagaggacgatctaaatgaaattgtccagcttgttggtaaagatgcactggcagaatctgataagattacattggaaacagccaagctactaagggaagattacttggcacagaatgcatttaccccatatgacaagttctgtccattctacaagtctgtttggatgatgcgcaacattattcatttcaatacattagcaaatcaggctgtggagcgtgcagctaatgctgatggacaaaaaataacatacagtgtcataaagcatcgtatgggtgatctattttatcgcctagtatctcaaaagtttgaggaccctgcagagggtgaagatgtcctagtcgcaaaattccagaaattgtatgatgacctcacaaccggattccgcaacctagaagatgaagctaggtgaagtgctgtaaattgaggatcacattcgtgtaaacaataaaatatcaccagatattcgaagcgagttggggcaatttattttgcttcgcgtgaggttgtagatgtgaattacgtttcagaatcatcatattttccttctgcatcgacactgctgctgctttttgtagcttcctgtttgacctccggtgctcgatgaaggcattctttttggtgtacaattatttatattgtaagatacctgtgcacatgttgatagttgaataagcacgatgaccatctacttgaacatc

SEQ ID NO: 4647 - DNA, 515 bp, Oryza sativa
  ref <308>: DATABASE ACCESSION NUMBER: AK061926
  ref <309>: DATABASE ENTRY DATE: 2001-12-06
gatgctcctctcaacaaatacaacagagagactttctacatctctgatccagttattggatacactgactacccatttcttccatcagatgtctaaatgtgcctttcagtactcgaattctcttccgcctctcatcaaagcagctcagcagccaccatttgtgttgttacttggtaggattgaagaaatatggccattgatctgaaagctgtttttcatgtgtgtgggcaaagcattgataaaataatgtgacattgtgatttcagcacggcacatgaatacaaagggagatgataggtagatcaagcagtgttgagaaattattttagtttgtatgcacaaatattgtgagcctgatataatatcagggagcttgcctgtcttactttgctctcaaatatgttctcagtcattcacatggttgtcagcgactgcaaatcttttacgtattcctgatatgtgtcactgactgagagatgggagtacagttggaataaaaagtggaagttgaatgt

SEQ ID NO: 4648 - DNA, 1394 bp, Oryza sativa
  ref <308>: DATABASE ACCESSION NUMBER: AK061927
  ref <309>: DATABASE ENTRY DATE: 2001-12-06
agtcccccacttcgcagagggattgcctgcggcgctcacctctcgccgtctccgcctctccggagacggcggccaccgcgcgcccgcctctcgtcggcgccgtgcctccctcaacggccaccacctttgcgggcgctcccatcgtactgcgtggctgctgccagatccaggccgtcaggatctaccccccgcccttctcgtcggagggttagggtttgtgcgacccggcgacggcgagcgaggtctctcacccgcgaaaggggggggggggggtggcgcgtacctacagagccctccgagtttcgcgagcacagttccccgcagggagagcgcaagcccgaggctgttatagctacatagaaggacaactgatacggtgttaggtcatggaggagattcatggcatgcaagaatcaaagactgcatctgtcatcaaagttgccagagagcctgccgtcattatcaatggagttccagacttgcctcctgatgtagcatccgaatcacaacctgagccacgtaatgctgcagaacctcctgttgatcatcgttttggtgaatttctagaagggcggaaagtaaggaaaccttttggggacaagcattttgtagggaaagtggacaagtatgatagtgaaagtaactggtacagtgttgtctatcaagatggagaccaggaggatctcgagtggaaggaagtggaggagatcatgctgccattggacataactatcccgctgaaaacacttatttcggataaattcgcacttcaaaatacagctcctgtcttcaaacctaaggtgggtagaccaagaaaagtctatgctataacggatggcaacacaaacaatgctatggaagatcagatgatgactggagcggcaaatgaacatcaatccaataacttactagcgttggttccagcatctacatccaacgatgcatatgttaacgctagtagtcaacctagaaaaaggggcaggcctcgaaaggatgcaactatgtatcctcgaaaggatgcaactattcctgccaatactcagcctaaaagaagaggcaggcctccaaaaaacaggaacttgtctggaaatgctcagagtgctgaatgcacaccacaaaatagtgttcttatacgcaatgcacagacagtcagggcagaaaaactggcgaaggcagaaagactgaagagagaaaatatgcatgctcaaggcgcaccacctggaactcaatttttctaacatgcattcccactgttccaatacatatatctgtaaacattccagaatctatgcacgatggtgacactagctttcaacatatattttgtacaatccatcgtagagcaaaacttgtaagactatatttgctatcccaatgctatcgtatttctttcc

SEQ ID NO: 4649 - DNA, 1343 bp, Oryza sativa
  ref <308>: DATABASE ACCESSION NUMBER: AK061928
  ref <309>: DATABASE ENTRY DATE: 2001-12-06
aaaatagtttcggtatctggtgagccacttgagaggttgggagcctacatggtagaagggcttgttgccaggcttgcctcctctggcatttcaatctacaaagctttgaaatgcaaggaaccaaagagctctgaccttctgtcttacatgcacttcctgtatgaggcctgtccctacttcaagtttgggtatatgtcggcaaatggtgctattgcagaggctgtcaagggagaagacaggattcatatcatcgacttccatatctctcaaggggctcagtggatctctctccttcaggcccttgcagccaggcctggtggaccaccaactgtaaggatcactggtattgatgactcagtgtcagcttacgcacgaggcggcgggctagagctggtcggaaggaggctgtcgcacatcgccagcctgtgcaaggtgccctttgaattccacccacttgctatctccggcagcaaggtggaggcagcacatctcggagtcatccccggggaagccctcgccgtgaacttcaccctggagctgcaccacattccagacgagtcggtgagcacggcgaaccaccgtgaccgcctcctaaggatggtgaagagtctgtcgccgaaggtactcaccctggtggagatggagtccaacacgaacacggcgccattcccgcagaggttcgcggagacgctggactactacaccgccatcttcgagtccatcgacctgacgctgccgagggacgacagggagaggatcaacatggagcagcactgcctcgcgagggagatcgtcaacctcatcgcgtgcgagggggaggagagggcggagcggtacgagcccttcggcaagtggaaggcgcgcctcaccatggccgggttcaggccgtcgccgctcagctcgctggtgaacgccaccatcaggacgctgctgcagagctactcggacaactacaagctcgccgagagggatggggcgctctacctcgggtggaagagcaggcccctggtggtctcgtcggcgtggcactagcgttgtgactttgtgaggtgatctgacgacgaacttcccttgtaaccatcttggctgggggctttagaaagctatagtgatcatggactggtaagggtagctgtaacaatggtgttgtaatggtaaggtagcggctagggtcaaactcgaaaatgggcaaaatgctgatgaggtgtagaagtgtagtacatgtttgagagtatatgtttcagtttttcttttaaatgtcttgtagtaatgttgtggcacactaatgtctatgatcagaattatcatccactataagctaaaatatccattggaatgctggc

SEQ ID NO: 4650 - DNA, 1207 bp, Oryza sativa
  ref <308>: DATABASE ACCESSION NUMBER: AK104835
  ref <309>: DATABASE ENTRY DATE: 2002-08-28
attcagctagctgtacgttggggaaagatcgacatgctacgagtattgttgaaacatgacagatctcaagggtatgttatcaacagaaaaaatggttatcctctcctcctttctgctgcacatcgaggtcatgttgctgttgcccgagagattatcaaatattgcccagatgctccatattgcaaaaaagatgggtggacatgtcttcataaagctgtcaaatcaggtaatatggaattcgttgagtttatccttggggaaccacgacttcagaaactcgtgaacatgcgtagcagcaaggggaaaacagctctacattatgccatccagaagtgtgatccgaaaattgttgctgctttacttgacaagaaaatagacttgacaattcttggcagtgacggtaatgcagccgcttgggaattacgggatgccttggatagtgcgaagacattaaactggaatgaagtgtcaatgcttatgattaaagctgatcctccaaatgcaaaatccgtttataatcttcacgaggaagccaaagaaaagttgatcaatgcgtcaaggaaggatgcaaggtcgctgactcaaacatacacaagcaacacttcgctagtggcgatcctcatcgcaacaattacctttgctgctgctttcaccctgcctggaggatacagcagtgatgctggaagccagggacttcctataatggcaaggaacgttgcctttaaggcattcttgatatcagataccttagcaatgtgcgcctcacttgctgttgcgttcatatgcatcatagcaagatgggaggatctcgatttcttgctttactacagatccttcaccaagaagcttatgtggttcgcgtacatggcaacaactacagcatttgcaaccggtttatacacagtattggcccctcggctgctatggttagctgttggaatttgctctgttgctgttttagtgccaattctcactaaggtgctcggggaatggcctgtcttaaagctcagaattcggttgggccaagctttcaaatcagagttccttgatatggtctgatattatcgatatatcttgtaaatgatagcatattatatcgttattgttcaaatatatgtgtcacgtgttgtttgatcaataatagcatacattgttaaatctttaacttcatgtatataatctaaataatgtactctgaacattattc

SEQ ID NO: 4651 - DNA, 1174 bp, Oryza sativa
  ref <308>: DATABASE ACCESSION NUMBER: AK104836
  ref <309>: DATABASE ENTRY DATE: 2002-08-28
aaaaagtgtagtgcaatcttatctctttccctccaagaaacacttcagcagaggagcaacaatggcggcggcagggtcgctgggacttctccaggcgccatcgtccttcacggcggcagcggcgagccggccggcttctcggcgagcaccgcgagctctgttcgccgtgagagcctcggctgccgccgatgccaccaaggacgccgtcctcaaggccttccgcgagaagagagctctcaagatcatttcagggcttcagaatttcgacaggagtagtgttgcctctgttgtctcggctgcagataagggaggtgccacccatgttgatatagcgtgtgaccaagacttagtaaagcttgctctggagcttacttcccttccgatttgtgtctcctccgtagatccttcagcattccgttctgcggtagaagctggagcaaagatgattgagattggaaactatgattctttttatgacacaggcatcgaattctcttctgagaagatcttaaagctgaccaaggagacaagggaaatgcttccagatataacactgtccgtaacagttccacatacactgagcctcctagatcaggtaagacttgcagagctactcgaagaggaaggcgctgatatcatccaaactgaaggagggaagtgttctagtccaacaaagcctggagtgcttggattaattgaaaaggcaacaccaactttggccgctgcatactccatctctcgggctgtcacaattccagtgatgtgtgcatctgggctaagctcagtgactgcaccaatggcagtaactgcaggagctgccggtgtgggagttggttctgctgtcaacaaacttaacgacatcgtcgcaatggtcgctgaggtgaaaagtattgctgaagcattgggtttgccttcacggaacgtgtctagcaacttgagaacagttcaccattaggggctagttacctcctcttctagacaaactctagcgatcaataatattatcaaaagatgcagtagcttgacatttcacagtctactgcctttcgtaacatatatgcaaagcaatgcagaggtgccaattggcgttttcgacggttgtaatgtagctttggccagtggcgttgttgaactgagatcaagtttcagctgcaatcaattgtcagattgtcac

SEQ ID NO: 4652 - DNA, 839 bp, Oryza sativa
  ref <308>: DATABASE ACCESSION NUMBER: AK061929
  ref <309>: DATABASE ENTRY DATE: 2001-12-06
agccggaggccgacacgaggtaagaagcccagaagccctagcgccgccgcagcagcagcagccatgggtatcgacctcgttgccggcgggaggaacaagaagacgaagcgcaccgcgccgaggtcggacgatgtctacctcaagctcctcgtcaagctgtaccgtttcctggtgaggagaaccaagagtaacttcaatgccgtgatcctcaagaggctcttcatgagcaagaccaaccgcccgccgctctccctgcgccgcctcgccaagttcatggaaggcaaggaggagaacaacattgctgtgattgttggtacagtcactgatgacaagaggatccaagagattccgaaaatgaaggttactgccctgaggttcacggagacggctagggcaaggattgtcaatgctggcggcgagtgcctcaccttcgaccagcttgctctccgtgctccgcttggggagaacacggtcctcttgaggggtcccaagaatgcccgtgaggccgtcaggcactttggtaaggctcctggtgtgccgcacagccacacgaagccatatgtgcgctccaagggaaggaagttcgagaaggcccgtggcaggaggaacagccgtggattcaaggtctaagtcagctcctgtttgcaagtgttgcgatcggcattgtgcgaccgttctgtttgagcaatcgacagtaattagtagtcacttccctactgagactagcaaaacttaattgtgtcatttctgaaagatattttgaaggatcctttctacctacctacatgcgtttgtgggcaagaagacaatgttttttgtttcctctctattagagcttg

SEQ ID NO: 4653 - DNA, 1399 bp, Oryza sativa
  ref <308>: DATABASE ACCESSION NUMBER: AK061930
  ref <309>: DATABASE ENTRY DATE: 2001-12-06
acactgctgcagtgctgcttaagctcgccatccagccgcaatggaagatcagagcctgaagcccatccgttgcaaagcggcggtctgtagagcggccagtgagccactgatcgtcgaggagatcgtcgtcgatcctccgaaagcctacgagatccgcatcaagatcatctgcacctccctgtgccacaccgatgtcaccctctggcacaaggtagaccctgcctttccaagaatcttgggccacgaggcctacggggtggtggagagcgtgggggagaacgtggaggggctcgcggcgggggacacggtggtgccgacgttcatggggcagtgcgactcgtgcgccagctgcgcggcggagtggacgaaccagtgcaccgccgtgccgttcaccatgggccccgggatgcggcgcgacggcacaaccaggttctgggacggcgaagggaagccgctcagcgacacggtggccgtcaccagcttcagccagtacaccgtcgtcgacgtcaaccaggtcgtcaaggtcgaccccgccgtgccgcccaaaatcgcctgcctcctcggctgctgcggcggcaccggggtaggagcagcatggaggttggccaaagtgcaacccggttcgtcggtggttgtcttcgggctgggatccgtcggattggcggtagtgcaaggggcaaaaatgtgtggagcaacgaagattatcggtgttgatttgaatcctaacaaagaggaagttggaaaagagttcggtgtgactgatttcgtcaatccatcccaactcggcgacaaatccgtcagtgaggtgatcaatgcgatgacagacggtggcgctgactacagcttcgagtgcatcggtatctcgtcggtgatgactgaggcagtcagaagcaccaaatcaggacggggcaagacgatcattctgggggtcgagaaggacagccagccgttgtgcctgccgtccttcgagtttctgttcggcaagtgcgtcatgggatcgctcttcggtggggccaaacccaaaactgacatcccaatcctcgccgagaaatgcatgaacaaggagctggaactggagaagctggtcactcatgaggtaggcctgacggagataaacacagccttcgatttgcttctgcagggaaagagcctgagatgcatcatatggatggacaagtgatggccacaacttggggtggggatgcttttcctgttcaggttctgaatttggttgattgatgtgttcaataagtatgctgtttatttcgctggtgttgctgaaacaaggagtaatacactaatacgtccatcagccatcacgaataactgatgtacacttaatttcatgggcggttagcagcatcctcctttctgaatcaatgcagaatattttcattcc

SEQ ID NO: 4654 - DNA, 439 bp, Oryza sativa
  ref <308>: DATABASE ACCESSION NUMBER: AK061931
  ref <309>: DATABASE ENTRY DATE: 2001-12-06
agcaagtatccatccatccatccaacccatgaacaatcgtctatctatccatgcatctatctatggttagtctctttagataggagagggcacttgggcacagaggaaggctattgcagtgccattgctagagttgccatcaagtgcaaagtaggcggatcaggcgtgtgtcatgcctgtggatttgtagtctatgtatgtgtcagctgctgagctccggtgtcgcagccttggtccctgtcgtgttatttccatcgtttttttccctccgccattgttcggtttaggtgttgtcatggtcggcgtccgtgtggacgacgtgtcttgtgcggtttgtctgtcattgagttggctccgtccgttgcttgctgttgtaaaacgcttgtggtgttcatggcggaataactaaacgtcgaatggaatgacaacttttttgcgt

SEQ ID NO: 4655 - DNA, 2187 bp, Oryza sativa
  ref <308>: DATABASE ACCESSION NUMBER: AK061932
  ref <309>: DATABASE ENTRY DATE: 2001-12-06
ctaaatgtggttgcccctgctatatctccatctcaaagttggagaccagttcgctccatgttgtcaaaagctaaagttgacattagtatttcagtcagcgaacaaagacgaaagaagctatattcatcaccagctactctatctgtgcaccctccaatgtcagcgccaagctatagctccatttctgatgctgcgcctcctgatgcagcctcaaatactagtgcagctccttctggattagtacaacctccagtatctcctcacaatgcatgttgttcacataacatggtacaaaagagagggagccaagattgccattgtgtttacccagtaagagttgagctttttctccgaaatgtttcactgacgtcaaattggagcgatgaatttctgggggaacttgcttctcaactcagtctgagggttactcagtttgagattgtaaatttctatgttgttggggcttctgggctaaacatcacaatgtatatagctccccatacaggaattagtttctcagccgaccaagttaccgcaatgaattattcacttagtcagcatacagttcagatcaaccctgtactagttggtgactacaatcttcttaatttaacctggttcaggccactggttctagctcctgctccaacattcacaatatcacctaaaccctctccatctcaagcatctacagtaccaagacacagtgcggataccagcaatgaaaaacacatgagcttgattactatcatttgcatatttattggtgctctaattgctgtcttggtgattgccatgtttatttgcttctgcaaattaaggaaagggaaaaggaaggttcctccagttgagacacccaagcaaagaacaccagatgcggtttctgcagtggactcacttcctcgcccaacaagtacaaggttccttgcatatgatgaactgaaagaagcaaccaacaactttgatccgtcaagtatgcttggagaaggaggttttggccgtgtctttaaaggggtactaactgatggcactgccgttgctataaagaagcttactagtggagggcaccaaggagataaggaatttctagttgaagtggagatgctgagcaggttgcaccaccgaaaccttgtgaaactcattggttactatagtaaccgtgagtcatcacagaacctactgtgctatgagcttgttcctaatggaagcctagaggcttggcttcatggtacattgggagctagccgccccttggactgggacactagaatgaggatagcactagatgctgccaggggattggcataccttcatgaggattctcagccttgcgtaatccacagggatttcaaggcttctaatatattgcttgaggatgactttcatgctaaagtgtctgattttggtttggccaaacaggcaccggaaggttgcacaaattatctctcaacacgtgttatgggaacattcgggtatgtagcaccagagtatgcaatgacaggacacttgcttgtaaaaagcgatgtatatagctatggagttgttctacttgaactacttactgggaggaggcctgtggatatgtcacaaccttctggccaggaaaatctagtgacatgggcacgaccaattttacgagataaagatacgctagaagaactagctgatcccaagcttggtggccagtatccaaaagatgattttgtgcgagtatgcacaattgcagccgcctgtgtttcaccggaggcaagccaaaggccaacaatgggcgaggtggtgcagtcactgaagatggtccaacgctctgagttccaggaatccataccaacacctccagcacgacccaatgttaggcagtcctcaaccacctatgaatctgatggcacttcatccatgttctcttctggacccttttcaggcctcagcccctttgagactgagaacatatcgagaacggctttctctgaagatcttcacgaagggcggtaacagtggtggtttgtgaagctgttttgggtagagcctcagagtctctgaccacccatttgaaggctggtggtgcaagtgacctaaccagttttattgggaggtaaatcctgtaaattccatttttattcaccacctgcgaaagaccaaattgttacaagaacattcggtggctttgtatgatggaaatgattttgttcc

SEQ ID NO: 4656 - DNA, 664 bp, Oryza sativa
  ref <308>: DATABASE ACCESSION NUMBER: AK061933
  ref <309>: DATABASE ENTRY DATE: 2001-12-06
ctagtcgaggagagcacccaacccctgcgccgccacctccgatcgtcagccatgaccttcaagcgcaggaacggcggccgcaacaagcatggccgcggccatgtgaagtacatccgctgctccaactgcgccaagtgctgccccaaggacaaggccatcaagaggttccaggtgaggaacatcgtcgagcaggcggccatcagggatgtccaggaggcgtgcgtccatgacggatacgtcctcccgaagctgtacgccaaggtccatcactgcgtctcctgcgccatccacgcccacatcgtccgtgtccgctcccgcgagaaccgcagggaccgcaggccgccggagaggttcaggcgcagggaggataggcctactggacctcgccctggtggtgctggtggacctggtgcccctgctgctgctggacctggtggcccccctaatgttgctcgcacctaaacagccgtagtcgctcctttgttactctatatcatatcctgttaatggcgccatggatatcatcgttatggtctttcatgaggtcaaagtctttcttggaactagcttgtactttgcgattggcagtgtgacaatggaagtctgaatttttgcctgagttgtttatctattttagaccgctatcgttgcttttttaaaaaac

SEQ ID NO: 4657 - DNA, 897 bp, Oryza sativa
  ref <308>: DATABASE ACCESSION NUMBER: AK061934
  ref <309>: DATABASE ENTRY DATE: 2001-12-06
acatagatgtggaaataagtggtgaacaccaagttaagcggtgtagatgatttttagtgtattaataatgtataatttattttagtggtattaatgttgttttattaaaaatgcacatagcttttgaagcaagaacaatagaggagtttatatatgaccacgacaaaaagatttttatttaaatatgagagatattcttattcctatcatatttagtagtatattccatctattttgcggtaaatatttttctttttttattgctagataatttacatttccttaattacattgtatatagtgatgtatgatttattttatcattcttttttttaacaacaaatattctctggcttatatcccatctttatagtgtttgaaatacagccctacgatatatacttacgcgaatgcgcgggctaccttgttgatttaaaatgaactctctcttgctggtcacttcggcagtggccaggttaaattcattggccaagctattatggaatcaagacagcacgaagccgcagaggaggagctccaagcacgagcaggctcgactctcgagtgcacaggcggacaagctcgagcacgacgggcggcgtgacgggcgagctcgataggtcggtggacgagctcaacgaatcagagcaatctggaaggaggcgagtaggaatgagatcggcggcaacacaaatggcaagctccatagcagcgctacgttgaatgaatcccaccttgatgtcgagattttacttcccatcataccctttgtaatggacagttggatatgaatggtacctcgtacctcatagtaccttgtgagaccttttcaaggatgggaaagatgctcataaaatttgcttacgtttataaagtgctgcagaagcttaaatggtc

SEQ ID NO: 4658 - DNA, 1561 bp, Oryza sativa
  ref <308>: DATABASE ACCESSION NUMBER: AK061935
  ref <309>: DATABASE ENTRY DATE: 2001-12-06
tgaagcatcacaacaacctctacacctctacatctcaagtatgcatgtgaagaacctagaagctgcaaaagttttagcagaaaaccttctagatactatagcagctgaatttggtgcttccagaatttcttcttcaaaagtatatggtgctgttccacctccgcagcaattattggatggtgtacaaacgtcaggaacaataccagatgtacaccctactttaggccctaatgtgttaaccggagcatcacattcctttgcatctactggagctaatgcttccttagttgctccttcagtgacatctcaatctggggccccgtcttattctgtggtttcaccacctagtaacctgatatgtcctagtcaaccagcaaatggtgggacattttatggtggctatgggggcatttatccccaggcaactccattgcagcaggttgcattaacactcaagcatgcttcatcatcatcaacccaggttgtttcagcgacgtctacatcaacaagcactgtggcaatggtgaacccttgttcacacgcagaagcagataaacgctcacaaaggaggaaattccaggaattaccagtttcacagggcgcaaccacagaagttcagaactcacaacagaggtccaaatttgttaagacaggtttagacggtttaggtaacatgaccaattcatcgattgaacctccaattaaagttcagcctggatcaaatgggatgcttcttcaagatcaaccgcatgtttctgcacatccatctgcatccaagaacatgctgccgccaccaccaccaccacccaggaacatgctacccccacctcccaagagcatgcctccgccaccgcctaagtttccttcaaatgagatgtcaagaaatgaggataggcgttcagatttaaacaagccaatggcacctccgagatccttggacgtgagttcagtctcaccaccaaatttgtattcagcacaattaccttcaaaggagcctagagtggtcaaacctggtggggcatctgtttctgatactctgctgaagcttatggattatggagatgacgatgaagaggacaacatcgatgaggcgaatagcgtgcttggagggaacccaacttccatttctgggcagaaaccgttttgggctgtgtgaaaaattagtttgttctgtactccaatgcaagttgagtgcaggtagagaatgttgcctgacctgatgcatcagctcaatgccattacgctaacagttcatcgctcaatgttctcagtgtgagctatgtacaatatccagttccttttcttttggggtggttcaaatgtcgacgtgatggtcatttttcttttgacatataatcctgtagaagctagtgtgatcaggcagggcaagggcacttgtctgcacgacattcagagtgctgatgatgcttaagccaatttttgctagcttctcttggatgctgtatgttgctggttttgttagtttggtgaccttgacttgtaagatcaatgcaacaaaaccatgtgttgatacataaataagatcccattttgacttcgc

SEQ ID NO: 4659 - DNA, 970 bp, Oryza sativa
  ref <308>: DATABASE ACCESSION NUMBER: AK061936
  ref <309>: DATABASE ENTRY DATE: 2001-12-06
gctaaatgttctaaatgtaaagtatagttgaatgtaaacagataagccttcaggtatgatgcaatccacctgattatactatttttctccctagtgctacgtgtgaccctttttcatgtatttttcgtatgtgtctatcgttggtggttttgtttcatctaatggtcattcatctctgtctacttgtaggcgatacatgggccacaagagaaccattcgcccaaatgctaaaaaactcaacttactatttaagagacggaaacagatgggatgggatatattttcacagaaggtaaagaaagtgcagaggggactaatgggagaaccggatgatatcagaccaggaagagatgatttcaatgaatttccatcatcttgcatctgccaaagaataccagtcaatagatcagtcacagcgcgagctgaaaacttgtgagctctagtgtagtgaggcagacaacttgagaacggagaatgctgggtgattgagcacgtcccttgctgcactggggaaaatacatgtttgttaagcaaagaaaacagggatgtaaacccaatcagacagaagcagacgtggtggataaatactcttaccggctttaactcatggcactctggtagtctggtggttcagacccagcagaactggttagtgtgcagcgatgacagacaaactgctgatttgcagcttcagtttggttccactaattgttaaaactgtggtaaagaatctgccacgataattgtagtcattagctcgatatgctatccctgtaaattgtacggtatacacgatcaattatttggatgtgtgcttcaatcgtcccatcttctgtctggtagaacctcacagcaacgaacttatttgctgaagggaaatgccattgtaccagaaacttggaaattgaaaattgcggtgattacgtgtaatttatttccttttaacgagccagtctggttcttttgaagc

SEQ ID NO: 4660 - DNA, 1972 bp, Oryza sativa
  ref <308>: DATABASE ACCESSION NUMBER: AK061937
  ref <309>: DATABASE ENTRY DATE: 2001-12-06
taactatgatagatacatggcaagaagcattcgggggaccacgtgcaagatatccacagtactatgcagcgtaccatgacttggtgcgtgctggagctgcatttccaaagagatctgatcgacctgcaccattgtttaatggccagtctccagcaggcagaaatatgcgtagtcctgatcagcaggatgaagctgaatcgtctgctggaaatgattttcctgctttgagcatgtcagagattcagaatgctcgtggtataatggatgtgctagccgagatgctaaatgctttagaccctggaaacagagagggactaaggcaggaggtaattgtggagcttgttgatcagtgtcgcacttacaagcagagagtggtactactagttaatgctaccgcggatgaggaacttatgtcacaagggcttgcactgaatgatgacttgcaacgtgttctcgcaaaacacgatgcaattgctgcaggcattgcagttcgagtggagaagaaacctaagtctctgcaggcacttgtagacactgaggattctatgaaccaagactctaagaaagagcaggcacttgtagatattgaggatcctacaacccaagagactaataaagaaccaagccaaagtgccagtgtgcagtcaccatttgagcaactagcgcttccagcacctccggtgtcaaatggctcagcaaccccagcaccaaaatccgatcttggcgtcgatcttcttagctgggatgacaacccatctacaacagaaaattcactagcgcttgtcccagttactgatccagtagttgattctactccaagtcaaaatgcactagctatcgttgacatattctctcaaaacaacacaaccaataacattgccaaacctgcggatccctttggtgttaattctagctctactcttcctggatcacagccatacaatgctccaacccagcatcctctgcaagcacagcagcagcctcagcaggtgggcctctatcctaatgggggagctgtgaaccctggaacatcataccccacaagttctgggtggaatggtcaaattgcgaacaatgcgacgcctccagcgcagcaaacagtgaattatgatgagcaaagtggagcccttcccccacctccttgggaagctcagtcagcgccaagcggcgacatgtcaaatggcggtatgcagtctcacccggtgtcaaacggccaatttggaggtatgccatctctcccaacaccatcaaaccagatgggtgggatgcagcccttgcacccgcagatgaaccagatgggaggtccacaagcccaccaaatgtacaacaaccaacaaccgggagccatgcaacccagccaacctgctgtaacccagatgcaatcaggctttgcgaaccaattcggttcgatgccaccacactccatgccaggaatgcaattccccgggatgcaaccttcgccgatgccaggagcgcagccagtcatgatgtatgcgcaaccgatgatgatgccgggtatgcagtttgcagccatgccgcaaccacgaatgtatggcccccagatgtcccagtaccggcttgtgcagcagcaagcggcacaatactacagcaacagccaagggaggccaacatactacgctggtatgaatgacctctcccagaaaatgtatggcctctccatgcaagacagctcttacatggggatgaacagctcgccctactctacaacaccttcatcatcatcttccatggggcaaccatcgaagcctgaggacaagctgtttggagatcttcttagcattgccaaaacaaagcagaacaaggcttaatgagaaacaatcaaatggagtattaaaaaaaaagtgtgaagaggtctaatatctcttgtgtaattgttacacatttttttccccacgtggcttgatcatacgctgttgtagcatttgaatgtataatcttgttccggttttgt

SEQ ID NO: 4661 - DNA, 950 bp, Oryza sativa
  ref <308>: DATABASE ACCESSION NUMBER: AK061938
  ref <309>: DATABASE ENTRY DATE: 2001-12-06
aacagaatacatgcctggagggaatttatatgactttcttcacaagcaaaataatgttttggacctccttacgattttaaggattgctatcagtatttcaaaggggatgaattatctgcatcagaataacatcattcatagagatctgaagactgcaaacctgctcatgggctatcatcaagttgtgaagatcgcagactttggtgtggctcgacaaggaaatcaagagggacaaatgactgctgaaactggaacctatagatggatggcacccgagatcattaaccataagccttatgataacaaagcagatgtgttcagctttgctattgttctgtgggagctggtaactttgaaggtcccatacgataacatgacgcccttgcaggctgcactaggagtaaggcagggatttcgcttggagattccctcaagtgtgaacccgagattgtcaaaactgattcagcggtgttgggacgaagatcctgatgtccggcctgtttttgcagagattgtcatcgaacttgaagacatcttacagcatgcccaggcaaacagcaggggagccagtcggcgttctagagctaagatacagaagaaatcacctcgatagagtatcataccaaaggttatcttgctcttttgttttcattctttttggtaaaacaggctaacttgtagctgctttcttagcaactccacagaatgtgtaatttctttaggtctccttcaaatgaaggtatatatgcgtatatatatgtacttgccgatttgacggcagtaacagaatgactgcgaattcactgttggtgtcatctgtggactgattagaagatgaccattgtttgcttcccatcctcgatggcaaagccgaccttagaacacttgtacagctgtagttgttgcacctaagtactagtacttcgtattatagtggccttcgctgctcc

SEQ ID NO: 4662 - DNA, 854 bp, Oryza sativa
  ref <308>: DATABASE ACCESSION NUMBER: AK061939
  ref <309>: DATABASE ENTRY DATE: 2001-12-06
attcaccagcgacacctactactcctcctcccctcccctctcgaaacgcggcttcgacatggcggcggcggcggcgcacaaggaggaggtgatcgggaagctcaacgtccgcgtggtgcggggctccaacctcatcatcgccgacccgctcacccacaccagcgacccctacgtcgtcctctcctacggcccacagaaagtgaagaccagtgtccagaagaagaattccaatcctgtctggaatgaagtactgcagctcgcagtcacaaatcctacaaagccagtaaaacttgaagttttcgatgaggataaattcacagcagatgacagcatgggcgtagctgagttcaacgtgactgacatctacgatgctgctaagctggatctaaagcatgtctctgacggggccaggatcaagacgatctacccagttggtgtgaactatcttggcgcagagagccacgtttcatggaaaaatggcaaggtcgtccaagacatcactctgaagctgagcaaggttgacagtggcctgatcgtgctgcagctggagtgggttcacgtcccaggtgttaccctctgagcagtgtccgatggtcgtcgatggagctgcaggtgcagctggtctctgaatgtgatattgtagactatgcgtgtggacgttgtttgcaatgtgtacctccgatatgtgtgctgttggtttgtagtttctgcggttatatttgtactccttagtgtcaagtgtttgtgtctatcagtgtgtcacaataagaatcgacctgctgaggtcatctggagcgagatgtaaattaagaattcaggtgttcattatgttgtagaattgtccgatttgttcc

SEQ ID NO: 4663 - DNA, 1384 bp, Oryza sativa
  ref <308>: DATABASE ACCESSION NUMBER: AK061940
  ref <309>: DATABASE ENTRY DATE: 2001-12-06
tggtggatgggcaggctgaggtttcagctcctgcaaacacagaagaagaaaaccgccctgactatgtgttaaataagtatgactactttggttatggaaccaatagttctgtgcatcaagtaaatgttattgcagtatcaaagctgacctgcttcgtattgccaaatcaatatggacacttgttgcaaccaaagaccatttggagtgcagaagagacacctgagaaccattctttgctagaacaaattttgcacttagagccattggaggtcgatatcttccgtgggtttactttgccaggagctccgacttttaggcaagtttttggaggacagttgataggacaggcactagcagcagcatccaagaccgttgactgcctaaaagcggtgcacagtttgcacgcaattttccttatcgcaggagacaagaatttgccaataatatatcaggttcatcgggcgcgcgatggaacaagctttgccaccagaaaagtggaggcaaagcaaaagggccttgtcattttcaccttgattgcttcattccagaaagacgaattagggtttgagcatcaagctgcaatcatgcctgatgttcctcctccagaagagctcctgaatctggaagagatacgggaaagaagacttactgatcctcgcttcccaatgcaatataggaactcagctgccaagaaaaagttcgtaccttggcccatagaaatgaggttttgtgaagattcagcatctcaacataaaccaagcttaaattattggtttagagccagaggaaaactttctgatgatccagcactgcataggtgtgttgtagcatatgcttcggatctactatattctggtgtcagcctaaatcctcatagggagaagggtctgaagacatactcactcagtcttgatcactcgatttggttccacaagcctgtgaaagctgatgattggcttttatatgtgatcgacagcccatctgcacacggtgggcggggttttgttacagggcgaatgttcaaccgacaaggagagctcgtcatgtcgttgacccaagaggcgctgattaggagggcgaagacgccaggacaaccgtcacaaaccccaaggccaaagctttgagaggtgcagaagagcagtattatcgtttcatttttggcactttcacagttattttccttttcaatggaagtctataacacgtagacgtgaagccgaagtatagcatactgcatatatgtagcaagaaaaaacgatggtaaaactggttctgtaattcacgaacagcttactgacataccacgtatgtattggatcgggaaaaataagcgaagaacttggtatcgctttttttttatctcaataaagccttcaattatttc

SEQ ID NO: 4664 - DNA, 1991 bp, Oryza sativa
  ref <308>: DATABASE ACCESSION NUMBER: AK061941
  ref <309>: DATABASE ENTRY DATE: 2001-12-06
ctcgccctcggccacccggcgcctccttccctccctactctctctccacatggcggcggcggcggctctccggtgcaacccgcggccctctgcggcggttgctctccgcggtgccgccgcagccccgcaggtcgggaatgaggctgccttcgagctgctggtcggtgccaccgagccttgcctgcggggccggaggaggggtgcggggattcggtgccagcgaagtgcggctgccagcgcggtcgtcgtcgagaagaagagtcgcgcggtggagccggcgcgggagggggccaatgccggtcacacggagtcggagctcaccgtggtgatgaagttcggcgggtcgtcagtggcgtcggccgagcggatgcgggaggtggccgatctcatcctcagcttccccgaggagcggccggtgatcgtactctccgccatggggaagaccaccaacaagcttctgatggctggggagaaagcggtgggctgtggtgcaacaaatgtgtcggagcttgatgagctcacctttattaaggaattgcattttgggaccattgatcaacttggattggataggtcaattgtttccggcttgtcggatgagcttgagcaacttcttaagggaattgctatgatgaaagagcttactcttaggacaagagactatcttgtttccttcggtgaatgcatgtcaacaaggatatttgcggcacttttgaataaacttggggtgaaagcacgtcagtatgatgcatttgaaataggctttataaccactgatgatttcacaaacgctgatattctggaagcaacttatcctgccattgcaaagaggctacatggggactgggttactggtcctgctattccaatagtcactggttttctcggaaagggatggaaaactggtgcaatcaccactttaggcaggggtggtagcgacctgacagctactaccattggcaaagccttgggattaagagaaatccaggtttggaaagatgttgatggtgttttaacttgtgatcctaatattcatccaaatgcgaaacctgtgccatacttgacatttgatgaggcagctgaacttgcctattttggtgcacaggttttgcatccacaatcgatgcgaccagctagagaaggtgatatacctgtcagggttaaaaactcttataaccgccgagcccctggtacactcattactaaagctagagatatgagtaagactgttttgactagtattgtacttaaatcaaatattacaatgcttgatatagtgagcacacggatgcttggacaatatggttttctagctaaggtcttttcaatttttgaagatttgggcatctctgttgattgtgtagctacaagtgaagtcagcatatctttgaccctggatccatcaaaactctggagtcgtgaattgatcaagcaggcaaatgaacttgatcatgtcatcgaagaacttgaaaagatagcagttgttcacctactgcagcatagatcgataatttcgttaattggaaatgtgcagaggtcatctttgattcttgaaaaggctttcaacgttttacgtacaaatggagttaatgttcagatgatctcacaaggggcatccaaggtgaacatttccttggtggtccatgacagtgaggcaaagcagtgcgttcaagccctccactcagcattctttgagagtggtttcttgccagaagtcaatgatattctgcaggacgactctgtggcacattccaatggcacagtttacaggcattagtcagaagtttaatccttatgttgtactgtagttataccatttgcagcctcagaatctgatcgttctcaggctaaaaacccaatgttgtaggagggaaggagcaattccggctttttatagtattctagttggctctggtttactaccaaaatgggcatactaccattgttaccattctttgcagagcaagtaattgctagggagctagtagcct
